United States Patent Application Publication US 2015/0376612 A1 - sequence listing, part 16

SEQ ID NO: 40076 - DNA, 1037 bp, Homo sapiens
gccaggaggcagaggttgcagtgaggcgaaatcgcgccattgcattgtagcctgggcaacagagcaagactgtgtctcaaaaaaaaaaaaaaaaaaaagctttctaagagtttcttttcctccctccctccctccctccctcccttccttccttccttccttcctttctttctttttttcagacagggtctcactctggttgcccaggctggaggagtgcagtggcacgatcctggctcactgtagccttgacatcccaggctcaggtgattctcccacctcaacctctcaagtagctgggattacaggcacgcgtcattacaccccgctaatgtgcattttgattagagacggggttttgctatgttgcccagggtggtctcaaactcctagactcatgcagtccacctgcctcggcctcccagagtgctgggattacagacgtgagccactgtgcccagccagatttctaagagttttgcttatagtttgttttgacatgatcttgaaagcaatttaattctaaagtgggtttggttttggctcagtagatttcagtcatttttacgttttattttcatgatttctcttatatatttagaaatcagaagtgattgtgaaagtgaattttatttctgacagccttatttgaggactttaaaaaatatttaataatacattttatttaactgaatatagccaaaatattttttcaacatgtgactctagctacatcccaagtactcaatagccaccatatggctggtggccaccagctcttttggacagtgcagctctgtggatgctgtctgatacgttgtaccattttttttctgtaagaaattttatagaattggtgttattcttctactaaagaatttccagcaaaaccattcaaacctggaggtgtttaggttttcaattactagttcaacttattttcatagttataggtctattaaggtaatctatttcatcttgagtgatgtgggaaaatttcaaggagttggtccttttcatctaagttgaatttatgt

SEQ ID NO: 40077 - DNA, 1017 bp, Homo sapiens
tactaaaactgcaaaaaaattagccaggcatggtggcaggcgcctgtaatcccacgtattcgggaggctgaggcagaagaattgcatgaacctgggaggtggaggttgcagtgagctgagaccgcgccactgcactccagcctgggcggcagagactccgactcataaataaataaataaataaataaataaataaataaataaataaaaataaataaataaaattaagctcctaatattttttaagtccttagatttagatttgcagaagcagaactgagatatctaataacatagatgcaaaattctaggattcagacttctgtcactgtggaagcattggaagcttagtaaacctgagcaggaaactttgggagttaaaatgaaaatttaaaactgtccctctaaaaatatgagtagacagaattctctttaccagcacctagagcttctcagttgttatactaccatgctctgttgtacaattgtagtgaatattaagctgtgcatgttatgataaccctagtgtttctctgactttggtgaaatttttgtgattgtcatatgagagggtatcttgggcatattgatacagagtcgtctttattttttgaacttcatagaagtgaatataaagggatgggaaaagaacttgagaaagaacaattatttcccccatttttcttctagtgcattaaaatagttagctttctacctttctcttcagtatgattctagagaagataattttgcttctttcattcaacacattttattatgttccagtcactttattaggtacaagggaggaatggtcacaagattgatgaaggtttctgctttcatggagcttaatatgaaatgcagtgtccacacttataagggttaaaaaggagatcatcattaaggtttgtcttctgtattgctatttggatattccttactgtctccagactatttctataattgtatatacttactaagtcccctgggactgttggacttttgatttttgtg

SEQ ID NO: 40078 - DNA, 1054 bp, Homo sapiens
tgtgtatgttgaggaaaaaagagaacatgattttctgtattatgtgcacatattaactttattttaaaaagtgaagcttctggctgggctcagtggctcatgcctataatcctagcactttgggaggctgagatggatggatcgcttgagctcaggagttcaagactagcctgggcaacatggctgtctctctctcttttttttaatattaacaaataataataatacaaaataaaaagtagtgcttctttgaatgccgtagttatagaactctcttttaattgatttctttacccattcttgttttcctgtgggtaataagggagatttcctcatactgttgctgatggtactaatgtttgttactttctgtgtgggaagaaagtgatacacaaatttgttggtcctggtgtttttcctattgttcctcagccagaatagaaggctttaaagacgtgtataccaggagcctcaggttctgtgacaaaccctaagaaacaggctttttccttttgtttaacaattaggataatatctggacagtactgaagtctgttgccttttctctttttctataggaacctacaagcagcaattggcgcctattatgactttgagagcccaaacatcagtgtgccctctatgtcctttgttgaagatgtcaccataggagaaggggagtcaatacctccggatactcagtttgtaaaaacatggcggatccagaattctggtaagtacataatgggcaatcctcccttgcctagttttcattttcttaatagttaaataagaaggaaatgttttagcttatgtatgtgattgtgtaactgcgagctttctcttacacatgatatgtagtattttcttgtactggtgtgatgaccaaacattagtgaaatatctcctgctctaaagtaggaagaagaatttatgtctcatgcttttaagccacctataacttaatggcatctaaacacaatccaatattggttttgttactaggaactagacttctatatgatggggtattggctccacctgtacagtttta

SEQ ID NO: 40079 - DNA, 1043 bp, Homo sapiens
catgcactatgcccagctaatttttgtattttttgtagagacgaggtttcaccacgttggccaggctggtctcaaactcctgacctcaagtgatctgcctgcctctgcctcccaaagtgttgggattacaggcgtgagtcacagcatccagcaccagcatccatcttaatctgtgctttttatcactgttaacgttgcctctgtttgttcttcagggtacttttaaccatctgaaattagatttaaaacttttttgagcagaaaaactgaaggaatctggaggtttaaactttcagactgcactgaatgctgggtcaatgttttccctttcccatcaccttagccagctccatttcatgaagaattacttgttggctaataatagctgagtatgttgttttgaacaggaatacctgctatcatgtctactttctgacactgaattggagctgtttggtctatgcctgctgttgctcagcctagtgggccagtaatttaaattctctgaactctgagaagctgtgtaccccacatttgtagctgtgtacctgcttgatgggttagatcactcgggctaaagtccactttctgccttgtacttgggaaatgaatttgctttgtcatcctctccagcttcctgccaggattccagttcgctgctttcagtttcagtttggggtttaaaaatgtttcttaatctttctctggctgaattacctgtataatacacatacaaataagctttgactgtgggataagttggaaaggtgtgaaaggagatttgaggataggaatggatctgcctaagttgggtagcttgactttcccacttactagtgttcctactgcagtggtcttaaagtcctatcctgatggcagagccaaagggtgaaatatgacacaagctggggatgagaattggcaattgtcctgagtgcacaaatagtttcttccctccaaaacatattttgcagccaagtgaacagaaaacaattcagcaggctacttactgaagacctgctgcaaaaaaattctgttttcaa

SEQ ID NO: 40080 - DNA, 1034 bp, Homo sapiens
aaaaaaaaaaaaaaaattagccaggcattaatttttttaaatagtagtcccagctacttgggaggctgagatgagaggattgcttgagcccaggagttttaggctgcagagagctataatcctgctactgcactccagcctcagcgacagagtgagactgtctccaaaaaaagaaaagaaggtttcagagttctcacaggtagcctctgaaggcgtcttggataaggctgagtcttgactgtttttgtgatcttttgtagatgggcctattattattattttagccactttttactttttatcagtttattttaggtcttgggtggcaccacgtaacaagaaaagtaggtgttatcatctcagtctgttatgcatgtgtttatcgatttgaggggtgaacatcactgtgggctgaatgttacttgatgtgagggactattttgagacattaggatcacagatcattatatcaatatataagttgatgtacatttgaatttttacttactggctatattatgaataaagctgctgtgaacatttcacttgtgagactatgtggacatatttttaaatttatcttgggtagatacataggaagggaattgttaatttgtatggtaaggttatatgtagctttttaagaatctgctaaactgttttccaaagtaattaccattctacattcttagcagcattgtatgagagttctctcaagcttttatactttttttttcctgaaccatttgagataacttgcaaggattgtgagatttcacctttaagcccttcagcaaatatatcctgggagaacaagagcatcattctacatgactacagtactattgtcactctgaaggaatttaacatggaaacaaaagtattatctaatatatagcccatctctaaatttgttcccagaattgccctttacaaccttcctttttttaatgcaggatcttctcagggatcttatgttatctttggttatcatgtctctttagacttctatctagaacagttccttcgccttt

SEQ ID NO: 40081 - DNA, 1118 bp, Homo sapiens
ctgggattacaggtgtgagccaccatgcccggcccgcattttaatcagtttaaggtgtacagttcagtgttacattaggtgttcattgtaagttgtttagcattagtaacaagagtcaaataactcttctagatttttatacattaacttaggagttaatattggccttatttctcagtatagcagtagataaaatatcttttaatagcatatagacaatgtttctctacctcctattaggctactgctgtgcagttgtggtattgcaacatcctaggttgcctgcaggtatcttcagggagcagtgtgtatgttttggaattctacttgcatccaccatggatggaacagatgttttctagaaaagtaacttgggaaaaatatttctgtaaaatatgatgtcctattaattttctcaacattgtcagaaacaccctactagataaagatataaccacaaatcaatgaaatgaaattagaatctagatatgaaaatcagttgtacctcttacctgatcacgtattaccttctttgcctgttaatccatttctcagtcacccgtgctaaatgagtttctcatctatgctgtggtttatatgtataaatctaggaaaaagttcctttatgatagagataatacttctattaatattggtttccttaaataaatgtgtgtcaaatagtagttttaggaagagggtaaggaagggctacataacagtgatagagtattatgtactctattacattttttaaaaggtttttatttttgatttggaatattgttgatttttaaagtaagattgtgaaattgataccatgtaaaattaactattttattttcatttatttaattttaatttttttagagacgtctcactatgttgcccaggctggagtgcaatggctgtttacaggcatgatcatgtagcacactacggccttgaactctgaggctcaagtgattctcccacctcagccacctgagtacttgggattacgtgtgtgcagtactgtgcctggcaaaattaactgttttaaagtgaacagttcagtggtgtttagcgcattcacagtgttgtgcaaccaccaccactctcttgtttctaaacttttt

SEQ ID NO: 40082 - DNA, 1045 bp, Homo sapiens
ctatgataaagcctgttatgagacgttatactaatattctcttaaaaaggaaaaatgtctgtttatttccttagcaagcttaagaaaagttaacaagaattacaggactcaaaaggattatgtgattagtaaattattgtgtgataatcagactttctccttaccctctgtttagcactggatgtgtgtgagaagtggggagaaatgccaccactacaacccaaacatatgagggaagccgttagaaggttaaagtcaaaaggacagatccctaactcgaagcacaaaaaaatcatcttcttctagaccaaagtctagaaaggcctatgttactgacggaagaagtattggttccagacttcctataagactgtctgcattggtgctttagtatctcaggcctccaaggattccatgatgattttaatgtctttctcaaaactctgatatttgtcacacctagaaagtatgtagcctgattgatacttgccttgactaaattttgggacctcttggggcattttgaagtatttaactgtcttgaccagttggaagaagatacgtgggccataagcatcttctggacaggggaactgctttcagagagaaaacctttccaagagagttttgttttgttttggtttcgttttgtttgagatagggtcttgctctatcacctaggctggagtgcagcggcatgactgcagccttgaactcctgggcttaagtgaccctcccacctcagtctcctgagtagctaggactacaggcacacactactgtgcccagctaacttatttttattttttatggagatggggtcttgctttgttgcccaggctggtcgtgaactcctggcttcaagcagtcctcctgcctcagcctcctaaagtgctgagggctttaatggtttcacattgaagcctgaagttgctaagacttaggttgtttcttatatctggttttaagtagatgaaacaaccagaaacttttacttgtgatactctaccatgaaggatgcggtaatggcaggaatagcagaata

SEQ ID NO: 40083 - DNA, 1089 bp, Homo sapiens
attaggagtattaactgtttccacatattttgcagatatttcccctaaatctgttaatgttgaaaactactggtttgattataaatttgtatattaaatttttaccatcagtgtgaaattcaataagatagagttatggagatagtgtctaatgctgcaaacagtctgtgtagtacgatacagtgacccagtgttgttctttttgttaacaggtaagaaaagaagtttttgttttacgttttctcaaattcctttggagtagaagtgttttatcttcattcctcaaggcaccaagcctaatgccattgacccctttaagaattcgtttttgaattgtctgaaacttttattgacttcataatatcttgagtattcgttcttataagttaacttagttacctggatctttgtttagaatcctggtttcttctttttctgaggagcagctgaaccgttatgaaatgtatcgccgctcagctttccctaaggcagccatcaaaagggtaaggatggaccaccacacttcatctccatcacgttttagaactgaactcaagagccatgtccattggcatttgaagtgaggtgttagacaagtcaggggattatttaggtgggaaaaaaaatgcacttcagttatcttacctttttctgtgaattacttggtactgtgttccaaagccagtctttgactattgtgatcacggagtctttgtgcttctttcaagctgatccagtccatcactggcacctctgtgtctcagaatgttgttattgctatgtctggtatttccaaggttttcgtcggggaggtggtagaagaaggtgagtagtgttggttacaaatactggattgtacctgtggtggtcttatttttaagaatatctacacaaaggagcttattaaagcacctatgggagttctcatttgcacttgaagttgaccaagtggggagccctttatttaggagaacatgactgttattccttgcaagtttcaataacagatggtaaggaaccatctgggaaatcccctccctgattcctttcctcagcccagggtgaaagaagtagactttgtattttctg

SEQ ID NO: 40084 - DNA, 1037 bp, Homo sapiens
gattatttcatcacccaggtattaagcctagtgtcccttagttatttttcctgatcctttccctcctgccacccttcatccttccatatacccttcacccttccatataccccagtgtgtgttcccctctatgtgtccgtgtgctgtcatcatttagttcccacttattagtgagaacatgcagtatttggttttctgttcctacattagtttgctaaagataatggtctccagctccatccatgtccctgcaaaggacatgatctccttttttatggctgtatagtatttcatggtgtatactggaaaatacattttctttatccagtctaccattgatgggcatttaggttgattccatgtctttgctattgtgaatagcactgcaatgaacataagtgtggatgtgtctttataatagaacaatttatattcctttgggtatatacccagtaatgggattgctgggtcaaatggtaattctgtctttaggtctttgaggaattgtcacactgccttcctcaatggtgaactgatttatactccaaccaagagtttaaaagctttcctttgcctccacaaccttgccagtatctgttattttttgacttttgaataatagccattctgactgatatgagatggtatctcattatggttttgatttgcatttctctaatcagtgaagctgacctttttttcacatgattgttggccacaggtatgtcttgttttgagaagtgtctttgcctacttttaagtggggtttgaacaggcatttattaaacatccagcataagtaaaattgcattaaatgctgatgggggggagatataaataataagagacaaacctatcttcaaaaagactagtaatgtgaaataaacatttgcatgaaacagtaggattgaagaataagaacaaaagagcactacgtgtgagaagctcacttgaaagtcccaaattgaaataaacactgttttgatgagaaggggcctcctttttaatattctttccatgtggaatcatcagcagta

SEQ ID NO: 40085 - DNA, 1065 bp, Homo sapiens
ggttttttgtttgttttttgttttttgttttttgttttgagaccgagtctcgctctgttgcccaggctggagtgtgcagtggcgtgatcttggctcactgcaagctcctttaaggcagtttttgtttgttgagacaaggtctcactctgtcacccagcctggagtgcagtggcacagtctctgcctcctgggctcaagcaatcctcttatcccagcctccccagtaactgggactgcaggcatgctgcaccacgctcatctaaagtttttgttttgttttgtttcgtttttgagacagagtctcgctctgccgcccaggctggagtgcaatggcgcaatctcggctcactgcaacctccgcctctcaggctcaagcgattctcctgcctcagcctccccagtagctgggattacagacacgtgccaccgcgcccagctaatttttgtatttttagtagagctgaggtttcacaagtttcacaagttgcccagcctggtcttgaactcctgacctcatgatccatccgcctcggcctcccaaagtgctgggattataggcatgagccaccgcacccggccagctaaaggttttttaaatattgttttggtagagacaaggtcttattatgttgcccagtctggtctccaactcgttgggctcaagcaatcctcctgcctcagcttcccaaagtgctaagattacaggtggcagccaccatgcctggccaagaaggaaactttaaaacaggtgtcaaggacagcaaggatttgaataattagcttagtacacagagggctcactacatatctaaatttgcaccgaacagaggataaaattatgttgtttctgaaacacttttaaaaatcgatcatgtaccagaccacaaagaaaaatatgaactcttaaaagtagaaatcataacaggccacatcttgttaatgtaatgcattaaacttgaaattaactacaaaaagcttctcccccaccaaaaaagaactaaccccctggaaattttaaactattttttaaatagcctttagactaaagaaattaatagaacactt

SEQ ID NO: 40086 - DNA, 1057 bp, Homo sapiens
accaaaactaggaacaggccctcagggaattacctagaggaggggcaggtgggcatttgacctaacaggctagcccttagtctccagctgatggccattccctgaaaggttggtgggtaagggttatctctttcctgtccctcaggacggggggttgggggggtgcggggcaaggagaggtggagggtctaaagggactcactgaaaacgggcagccctttagggaggaggaggagctgggaaagaggccaggcagggaggacctccaggagagccagtgaggctgggtagctgatgggggagggctgggggccaggcaaggggctggactgggagagatctggagagactcaggcctgaggcagctttcagcactagtaagggaaaggggggctggtgaatggcttccttcctgaggtcaagttccccaagctggtggcagacaggacccaggctactcacccctggttgggggaaggggcagggagggcagcctttcacttcactcttagcatacctgtcaacagttcttcccagcaggaaacctctcaactctggctggctgacctgctgccctagcctcccccctcctctcgcagctgttgggccaaaagacacaaagaacgagcccagtcctcctcgtccccactccttgtgaccaggggatatggacctaatgaatcatcattttcagtatggctaccctgcctttttcctccaccctttccccccattctccctcagacctggctaattaaaaggaagggaaacagaatgcataatgtgggtaactatactgtaataacagttaacacaaagtgtttccatttgccaagcactgttctaagtactttttatgtaatcactcttttaatcacaacacagtatgaggcgagcactatggaaaactgaggcacagagacattaagtgacttgtccaggatcacagagctagtaggagacagggctgggatctgaacccagcttcagtcctcctaactagtatcctactctccctttgaccagtacagcctttcgaggggtagacatcatttcc

SEQ ID NO: 40087 - DNA, 1073 bp, Homo sapiens
taaaaaggcattctaggcactgtaagatgactactggcctgagaagagctcaaacctcctccaattatctctgtccccaaaggaatgatcgagaaggggccaagccaacaagctttttaaagccttccactcctcccaaccagtgagactgtcatttgggagctgagagtgggggttcagggacagttataggaatgggagataggaattttggaggcaggatgctgtttccgcagtctcccagttcttcaaaagctgtcttaattcctcctattttgtcacagcggatgcagacatggtgcatgcatccagggattgcccatagccacaagccaacacaaggacctgttcaattggagggtgaagaggtgagggggccagggtggctgggggtgcaagcttactagcttacccccacagtgggtgataccatacaacaggtagccacgatggcagagacactggaagcttcctggtgtgttgacacatatgtggtcacaggttcgatcaaaggaacactcgtctatatctggaagagcaaagattcaagccactgaatctgtcttggagcacttgacccttgctcaggtgaaggacccaagtgaggggccttggctttcccccttgaactgaagagttcctattcatgtcctagctctaggaccagtgatttaacaatgccattccatcttctctgccccctctatttgaagtccttggaattaggaactgcaagatctggtgcctttaggtcagggcccaccatgtgtggttaggtacgtcctactctgccaaggatatgaattggggtgaaatccatccctcagtccttgccaggctgaatgctttgatatggagctagtccgctgaggggaaagagtaccatttgctaatttgcaggatgacactgcctctagagactctgtgtgatatctattgagtttctaagactttagccctctggcctccttgaagctctcccacaagaacctctcctaaggctttcacctttggctgagtctgctcaccctggcagttcctctcattgatgagaagcttatagcctttcttgc

SEQ ID NO: 40088 - DNA, 1041 bp, Homo sapiens
ctatgtacttcaaccaaaattgcaacagatgaatgcagaaataggagaatctggttgtctcgtgttacaagtcaaacacatttccacatgtataacattctaaaacaatgacactcgtctcactaattttttttttattttggaaaatacaaaatatacaaatactttgtacaaaattaaattacttatattaacatggggttattctaaaatgaattattaaataactacttttttactaaatctcagtagatatgtcaaataaacaagttctttggagtcctcaatttttaagatgttaaggggtcctgaggaaaaaaggttgagaactactattttcaagtattaagtatgatttttactaaattattttcaaatgccttttttttttgagacagggtctcgatctgtcacccgggccggctcactgtagcctcaacctctcaggctcaagtgatcctcccaactcagccccgcaaatagctgggaatacaggtgcatgccaccatgtctggctcgctctgttgcccaggctggagtgtagtagcaccatctcggcccactgcagcctccacttccgaggttcaagcaagattatcatgcctaagccccccaagtagctgggactacaggcgtacaccaccacgcctggctaatttttgtgttttttgtagagatggggctttgccatgttggccaggctagccatgaactcctcacctcaagtgatccgcccacctcagcccacccaaacacctgggattacaggcatgagccaccatgcccagcctaattttttttttttttttttttttgtagagacagggtttcaccatgttgcccaggctagtcttgaactcctgggctcaagcaatctgcccgcctcagcctcccaaagtgctaggattataggcatgagccaccacacctggcctcaaatgctgttaaatgtctttagttcatttaatgttcttattttttaatcttgtaggaataatagcccatacatcaaattaaactttgtagaacatgtggcttatt

SEQ ID NO: 40089 - DNA, 1029 bp, Homo sapiens
agagaagttaaggtagccaacatcaaacagcttgtaaggagcagaggaagaacacccccaaattccattacaaattccttgcactttttgtcttaccattctcaaaggtagaggcattctagggaatctaaatatgaacaaagcatggaccttgctctgaaggatcttttaaacctaacaggcgcatagtcttatgaatctcttacagacaacaaatcgagagaagagctaaggaagtacgtaaaagggcaaaatggcctacaaatagagggtcaaggttggtatgacagaagtaggatttgagagaggtggatgttttggaaacaagaaagggagtgaccagaagaatgactatgggaaagcactgggtttgttgtagaggtggaattggcctagtttggctggagcatgagctgcatgaaagaaagtaaaataaaataatggcagctagaactcaaagatagattagggccagattgtgaagggccttgaatgccacatggaagaacattctgtaggtattttgggcaggagatgaaaaatgaccctacagaaggcccaataatgatgataaatggttaaatatgtttaagttaccaatctatgctaatcttttaagaaatgttatctcactgtaactatgaatagtgtactgtgtccattttgcagatgaaaaatgaaggctcagcaagattaaggaaactggaaatgtcaagagctgcagctaggacccagacttgggtctgttggattctaaatcctgttctgtgtctcactgtgattgatatattgtcacttcttttattaagaactgataaggtcttaatcctctgtcaagaatatggctgtagaaaaaggatgttttcaaagttgtgaagggactgcttctcaccatgttatgttaaggaatgtaatcactacccaacttgacttgtactgttctctgttttgagaccagagctagatgggaaattaaagaattggatgatgttttatttacatgcctgatgacatcaatacatgctcata

SEQ ID NO: 40090 - DNA, 1027 bp, Homo sapiens
ggagaaggaaagagggagaaattatgccacttttaatttcagctactacctctattaggatttgggagttatactaatagaggtaatagttgaaattaagagtggatgagttctggtatgaagtggttgatggggacaactgttgattgacaactgcattttaaggagaggatactgatagtaatgggagatgggatgaaagaatgcccaggcagagaggaaatttaataatttcaggagtggggaaagaataaagacaaatgttactgcagcctacctttcattcttttactgtgcatgagatactgtatttgctggatgttttcctgtagataccacattgttcttcctccgggagtggcatgtcagaaaatttgatgattattttaaagatgttgagttttattcctgaaattgaatatggtaacggaaaaagggtcttgggtagtttttggtgtcatatgctgtgttccttttagttcataaaatctttcatcttgtttgaatatctgtgggtctaaaaaaaaaacagctaatttttggataggtaaaagtccagatactttgtacattttaattgattatttaaaaaatattccctggcttttaaaacttggctaatacaaattgtaagaatcaccatctttttagaagaacatactgtgaattcagaatttttgctggcttagtgcttgtcagcatggagcctgttcacaggaaatgctttagaatcagagtcagagacctgtgacacttctggggagtcagtatgtaaaatagttagagtgcaggctccagagtcagtctccctggttccactgttcactagaagtatatccttggatagattacttagctcgtccattagatttgctgtctggacgtgtcagtagtaacaatctcaatgtcacacggttattgaagagatccatcatagagcttacattctagtaaggagagacaggcagtatacaaatactataaatacactggaggaaaacatagtggggctgattatagtcgattt

SEQ ID NO: 40091 - DNA, 1855 bp, Homo sapiens
gctgttcctagttaatgatttttcaggggctgtttctcatacatacttttctgtttccgatagcggttaggagaagaaataattaaaggtgtcagcgtttctaaagtggatttagatttatttatgtttctccactgaatttatcctggacccttactttcaccttctattaatatttgtatccactctcctgcttttcttgccttttctttttctatttgctttacactatgacgtcaaatccctctttttctcttcttgctgctgcttttgtccagctgtccttcattacccatatttcattatgactgtggaatttatcaaataggcccttgagtctaagctattactgatttaaattcagatgtcccaatagttgttaggattaataggacccttctactctgttatacagcaactggagagaggagtcctagggttagagggggtgggcaagcctgagggtagaaggaatggtgtagaagagaattccaaggattgttttgattttgcccctaaaatataagttaaaatcctaagtttcgatgatgatgacttttgcactgataaaagtttgatcctgaagtcataatggactgtgagagtttcttgaaggcagagctgaacttctaattctgaatccacagcattcagtaatgctgaagtattgctgctgctaagtgcaagttgaattaaattgttaggattgatgctttcttccctcaaggtgttttgtggtaggctggggattaagagtatggtatagacttgtttttttgagacggagtgtttctctgtcacccaggctggagtgcagtggcgtgatctcggctcactgcaacctctgtctcccaggttcaagcgattctcttgcctcagcctcctgagtagctgggattacaggcatgtgccaccacgcccagctaatgtttgcatttttagtagagacggggtttcaccatgttggtcaggctggtctcaaactcctgactttgtgatccacccgcctcggcctcccaaaatgctatatctgtagaatccgtagaatccgggattacaggcgtgagccaccacacccagcctagagtatggtatagactcgtgtaagacttcagtgaatcttatcactaccactttgtggtatgggataagatacttattttctgtaagtctcagtttcctcaactataacatgcgagagggacaaaatgagcacttacctcaaggttgttgtgaggattaaatgagacaatacatgtaaagcacttagctcagcgcctagtatgtcttcactaaatattaaatactagtgtagtttcattaataagtactgctgtgttccagatatttattaagttctgctaggttctaagtagggttaacaaaatgaacaggacatgatcctgctctcagaaaggacagaacatatgcacaaaagataattaacaacctagatccaatggtaagtggcaaaggagtggtttacttaagggctcaagaggctaagcaaatgagaacttcaggaaggtgacagaacttgatctcagctttgaaggactaattagcaagttgacagtctccttggagccagactgcttgtgtttgaatcctagttctgctactgtgtcatcttaagcaagtgacgtgatctctcgcctaggattgttgagagaattaaatgagttaatacatgtaaaacacttagaatggttccgcaaacattgttagagcttgataaattattattaataagttgagagaagggagaatgcatttcagatagaacattgagtgataatgaaggggagatactctaggtttgtttgaagtgatgaagccaaattggttagaggga

SEQ ID NO: 40092 - DNA, 1028 bp, Homo sapiens
gaatcacttgagcccaggagttcagtgctgcagtgagccaccatactccagcctgggggacagagcaagacccagtctcaaatacacacacacacacacacacacacacacacacacacacacacacacacacacacacatatacgtatatatatacacacacacttttttttttaaagaaagagcttgggatatatatttctatactttttttaagaaaaagattggaagagacatatatatacacacagacacatacatacattttaaagagattgacgtatgtttttaacctttttttaaaaaagaaatgggatatatatatatatacttttttttctttttttttttttttaaaagagattgtttcttgctctgtcaccgaggctgaagtgtggtggctaactgcagcctcgacacaaactcctgggctcaagcaatcctcttgtctcagcctcccaaagtgctgggatcccaggcccaagccaccatgcctggcttaaaaatgtagtacatttgaattgtatccttttgaaattgttcgttttttggaaagaagaataagagatgaagaaaaatcagactggaagagggttgttttttcccttttgtagttgcaaatcctaagtgggcagtggtaaatttctagaatcatttgtagcattctgttttaaacttggcaatttaaagatgttataaatgaggagtccccagaaaatggtcatttcattatcaaaagcagggttgcaaatttcagattgatcttttcaaaagttagatttgtacttgttctcagtgttcctatctctggaaactaaagaacctcctccattgttagctgaaaattgcacagtgaatttgaaagtcaagatgtcccagtcatggacataatgctgcgataggttactttttggaatggagaaaacatcttagagattgagtctgcatcagaatatattctgaatgagcatggaatgttctttacccatgttagatattaattaattaagtttttccatgtttaactt

SEQ ID NO: 40093 - DNA, 1508 bp, Homo sapiens
aattgagaatatgccccaactaagtcctggactctacagttcttgaggttgtttggactgcttagtaccattgatttaatcaaaattgacctatgactagcgcttattttataactgtgcttccctatcaataaggtcattttttaaaactgctgttggccaggcgtggtggctcacacctgtgatcccagcactttgggaggccgaggcaggcggatcacgaggtcaggagatcgagaccatcctggctaacatggtgaaaccctgtcctactaaaaatacaaaaaattagccgggcttggtggcgggcacctgtagtcccacctactggggaggctgaggcaggagaatgacatgaacctgggaggcggagcttgcagtgagccgagattgtgccactgcactccagcctgggcgacagagcgagactccatccaaaaaaaaaaaaaaaaaactgctgttgtgtactaatttttaaaactccatttgtaatcagtgaggatttatgtagccctgcttttcattctgcatggcacttattcccaaggatatcatttcctaagacactctcgagcactgtaagaggtttttctattaaaggagacaggcttttcttttcctaattagggagtgctgacttgccagtcacataggctaggctcctgactccctttacacttaatcttctgattttctaaagacctacgaattggccaggcatggtggctcacgcctgtaatcccagcactttgggaggcagaggcgggtggatcatgaggtcaagagattgagaccatcctggccaacatggtaaaaccccatctctactaaaaatacaaaaattagctgggcgtggtggcatgcacctgtagtcccagctactccggaggctgaggcaggagaatcacttgaacccaggaggcagaagttgcagtgagctgagatcatgccagtgcactccagtctggccggcagagcaagattccatctcaaaaacaaaggacctaggaatcaggaacttcccatctgggacaatctagggagtacttcctatgcaaaagttaatgatgtacttgtcaaacactaaagagtcataagtagaagtctgaatttttttttttttttgattttttttgtttggtacagaatctcaatttctagccatgtgtgattataatgtaagaaagacctgggctgggcgtggtggctcacacctgtaatcccagcactttgggaggccaaggttggcagatcacgaggtcaggagattgagaacatcctggctaacgcagtgaaaccccatctctactaaaaatacaaaaaattagctgggcgtggtggtgggcacctgtagtcccagctactcgggaggctgaggcaggagaatggtgtgaacccaggaggcggagcttgcagtgagccgagaccgtgccactgcactccagcctaagcaacagagtgagactccgtctcaaaaaaaaaaaaaaaagacctgttcttctcatgaa

SEQ ID NO: 40094 - DNA, 1049 bp, Homo sapiens
gtttccccctgtttcttctggtagtttttcagtttcaggtcttattaagtctttcatccatttcgatttttgtattcggagtgagatgagggtggtccagtttcattctttttatatccagtttttccaacaccatttattgaagagactatccttttcccattctgtattcttggcaattttgtcaaagatcacttgaccatacatgcgtgggttcatttctgggctctctatattgttcctttggtctatgcgtctgctttttttgccaggaccatgctgttttaattactgtagctttgtagtatagtttgaaatcaggtggtttgatgcctccagctttgttcttgttttgagacagagtctcatactgtcactcaggctggagtgcagtggcgcaatcacagctctcttcagcctccgcttcctgggctgaagtgatcctcccatctcagcctcccaaatagctgggactacaggtgtgccccaccacatccaactatttttgtattttttgtagaggtggggtctccctgtgttgcccaggctggtctcaaaactcctgagctccagtgatctgcccacttcagcctcccaaagtgctgggattacaggcgtgagccaccatgcccagcccagctttcttctttgtgctcatgattgccttggctatttgggatgttttgtgattccatgtgaattttaggatgttttttctatttctatgaaaaataatattggaattgtgataggaattgcattgaatctgatagatcactttgagtagtacggacattttaacaatagtaaggccgggcacagtggctcatacctgtagtcccagcattttgggaggccaaggcagatggattgtgtgagaccagcctgggcaacatggcaaaatcccatctctacaaataatttaaaaattagccaagtgtggtggtgcatgctacttgggaggctgaggtgggagaatcacctgaggctgggaggcagaggttacagtaagccgagattacaccactacagtccagcctggatcacag

SEQ ID NO: 40095 - DNA, 1044 bp, Homo sapiens
gatggggtcttgctctgttgcccaggctggagtgcagtggtgtgatcataactcaatataaccccaaactcctgggttcaagggatcctcccacctcagtgccctgccccttccccccgccaacgagtatatgggcacatgcctaggactataggcatgtgccacccactcggctcatttttaaatttttttgtagagaccaggtcttgctatgttgcacagactggtctcaaactcctagcttcaaacgatcatcctacctcagcctcccaaagcactggaattacaggcatgagtcactgtgcctgtcctttacttgtatttttattgtgctgttgttgttgctgtttctgaatattttcaatctacagtcagttgaatctgagcatgtggaacctgcagacacccagggctgactaacttaattcttggtcaggtgtttcagtaagggagtgaatctttcagaaatgggatccaaaggggtttatccataactgtcttgtctgtctagaactcttaaggctactaaaatccttaaactatcaaaatccaaagtgtagtaatttgacccaagagctctttctccatcatcaccaattcccaatctgagctgcccgaatgaaacggcagaaatgtctgcaggtggttataacttctagcactatgcacaatagctctttagatttcaccaaagattgtcacctttattcaacagcagtaagtcactggaggctggattttgaatgccattttagtaagtaatattttgagttctttttgtacaatttccttatcctatacaatgaaagctataggtttgcttttgtttacttgtttttgctgccagtgttccgctaaacagaggtaatacaaacaccaaaaaaacagagtataatctcatctctttcacagttctgtaataaaatcactaggacctgtgtctttacagtagatccctgcagttggtatgtgcagaatcccaggcattgctctcagtgaaggtaaaggagagctgggtatttgctgtattcaagagatgggagt

SEQ ID NO: 40096 - DNA, 1050 bp, Homo sapiens
tgcctttatgtttggaacaccttcatgtgtgttttcttacctatgtggcacactttattccggtggagtcttctgttacttacatcacaacagaattaatctctcttcaacttttataacaagcctactctgttaattcattcacaccctgtgataacccattaatccattcatgaaggcagaccccctcatgacccagtcacctcttaaaggctaaaaggtctcacctcttagtactgttaacattggacattaagtttcaatattagtttcaaaggggacaaacattcaaaccatagcagtgtctctgcatttaaaatgactgcgttcttggctcgcccctgtaatcccagcactttgggaggccgaggcaggcggatcacgaggtcaggagatcaagaccatcctagctaacacagtgaaaccccgtctctactaaaaatacaaaaaaaaaatattagccaggcgttgtggcaggcacctgtagtcccagctacttgggaggcagaggcaggagaatgacgtgaacccaggaggcagagcttgcagtgagccaagatcgcaccactgcactccagcctgggtgacagagcgagactccatctcaaaaaaaaaaaaaaagactacgttcttttcagccattcactcattcagcaaacatgctggcacatactctgatgtaggcattaggacacagcggtgaacaatacatgtgtgttgcaccccattgaattcagattggatctcacttcttgatctcttcagcacatcagcatctggcattcagtaatggaattttacataatttttaacgagctgtattattaaacatacagtcaacttttgaacaacataggtttgaactacacaagtccacttatgcacagatttttttaaccaaacaaggatcgaaaacaatattcaagggatgtgaaatgcacatatatgaagggctggctttttgtatatttgagttctgggccaactgtgaaacttgagtatgcacagattttatactcgggggattctgaaactaatccctgaagtaca

SEQ ID NO: 40097 - DNA, 1044 bp, Homo sapiens
tcccaagtagctgtgattacaggcgtgcgccagcatgccctggctaatttttgtatttttagtagaggaggggtttcaccatgttggccaggccagcctcaaactccggacctcaagtgatctgcccgtctcggcctcccaaagtgttgggactacaggcatgagccaccatacctgaccaaggttatttttaatggacatctttttaaaatttataatagaatgattcacacataaatgacagtactcaaagagccatatgcttttaaatgggacatggttcagacctcagaaggatcttacttcccatattgattgtagaatattgtgataaccttttagaaaaaacaaagccagcttagcactgactaataagaatgtggagcagctttccaagtaattagaattactccactacgctatcatctggtccaggtcaccctggatgacttcagtagtgactgcaatagcttcttcactttctcccttctgctgcccttgctccccgtagactattggcaacacatctatcagagtgatacttttttttttaatttgtatatgttcatgaggtataagtgcagttttgctaggttgatatattgcattgtggtgaagtcagggccttcaatggatccatcactggaacagtgcacattgtaaccaccaagtaacatcccttcatccaccctttcaccccaccctctgagtcttcattgtcgatcattccacactatacctccatgtgtacacattatgcagctcccacttataagtgagaacatgtggtatttacctttctttgagttgtttcaattaagataatggcatccagttccatccatgttgctgcaaaacacatgatttcattcttttttatggctgaatagtattgtgttcattccataccacattttctttatctactcctagacacttgggttgattccgtagttgtaattatgaatagtgctgtgataaacatacaagtataggtatatttttgatatgatttattttcctttgtgcagatacccagcagtg

SEQ ID NO: 40098 - DNA, 1303 bp, Homo sapiens
aaacttggtataaatagaacatcacgaaaattactgtacaacacactttaacgttaatttatcattgctatataatacagtggtttcatacatacaacacatctctgggggtatctttataagaatatggatcttgtcataaatgttaggcaggtaatatttaaatgtaatttgtaacttttctcaggaaatggaacatagatttcatttaacaattgggtaaaagtaagatcttggcccttccggaaataggttttagatgtttagtcatgtttttatgtcactcagtataagttctagaaaatgttttaatcttgtgagaaatgtttctgttctttcactcacacacatatgcatatatctttttttgttcgtttgttccttagaagagtcaagtaccattggccaggatcaaacgcttatggaacgtgatacagagggtggtgcagcagaaattaattgcaatggagtgattgaagtcattaattatactcagaacagtaataatgaaacattgagacataaagaggatctacataatgctaatgactgtgatgtccaaaatttgaatcaggaatctagtttcctaagctcccaaaatggagacagcagcacatctcaagaaacagactcttgtacacctataacatctgaggtgtcagacaccatggtgtgccagtcttcctcaactgtaggtcagtcattcagtgaacaacacattagccaacttcaagaaagcattcgggcagagataccctgtgaagatgaacaagagcaagaacataacggaccactggacaacaaaggtacctatgcagctatacttcctcaacactccttccctgcacaacacattcacagatttctagactaaaagtatgattgtttttgtaactatagctttacaacaggtgtgtctaagttacgtttaaattgtaatctgtagctaactttatccatcatgtactgagtacacagcacttcatttgttgctgtgagggcagaggtttttaattctggaaactcaaggcgttgctgtgctctttttgtctcagaaaatgtaagttgtcacttgggtattgctgactgtattactcttaccttggagagctttattactcattgagtatttctctgttcattgaacagtcttattgatgatgcctgttgtctgtaggaaaatccacggctggaaattttcttgttaatccccttgagccaaaaaatgcagaaaagctcaaggtgaagattgctgaccttggaaatgcttgttgggtggtaagttaaacttgccttaatggtg

SEQ ID NO: 40099 - DNA, 1055 bp, Homo sapiens
gcgaattattgggattaaatggtaaagcagttagtagtgtgccacacaatattatataccaaataaattgcgggaccaggcacagtggctcatgcctgtaacgcaacactttgggaggttgaggtgggtggatgatttgggcccagaagtttgagaccagcctaggcaacacagtaagaccctgtctctacaaaaattaaaaaaattagccaggcatagtgatgcgtgcctgtagtccatttactcaggaggctggggcaggatgattgcttgagcctaggaagtcaaggctgccacgagttgtgatagtaccactgcactcgagcataggcaacaaagtgagaccctgtctaagacataaaattaaataaataaataaaggctgctttatgattttttttcttttgagatacagattttagttttagtagtgtgtcattttttaggaacttgcttgatcctcaagttgagttattagttatacacttctttaaaaaggaagactaaagaagggggaaatggggagttggttgttaaatggatgtagtttctgttttacaagatgaaaacattctacagatcctgttatacaacagtgtgaatagtgttaaaaccactgaatgtacacttatctagagtataaatttttattatgtgttttttgttaaccacagttattatactaatattttaaaaagaggaagactgaagatcctaccttccagctaagctacactgttatccatgacatgctgtagagcaaattactatagctcttgatgtcacctagactccccttttaaaactgacagattctgggtagcatttgaggtgaagaggttgttgcttgtcccattctattttaagcagtgcatgggaatggaaaataggtgatttttagcaactttagtttacctggggaggaagaattttatttatcccttttttttaagtttggcaatttctattcattattttctttaaaaatggtaataatatagcttctacttaagtcatttaaaaacaatagttttctctgcaatgtagactacata

SEQ ID NO: 40100 - DNA, 1044 bp, Homo sapiens
cagtggctcacgcttgtaatcccagcactttgggaggccaaggcaggtagattatgaggtcaggagttcaagaccagcctggccaatatggtgaaaccccatctgtactaaaaatacaaaaattagcccagcgtggtggtacacacctgtagtgccgagaggcagaggttgcagtgagctgagatagtgccactgcactccagcctgggcaacagagccaagactctgtctcaaaaaaaaaaaaaaaaaagaagtctccatgttggctggtgacatccttttcaagatggttcctgtttcttcctgacaggttcttttatttgttagaacagcaaggtgttccaagtttaccctgttatttttcctaccttggatttggccatttttccaaggagctcaggctttcctttaatggagaatgttaaagtctgagcactagaccattactatatatgtatgtcttaacttgcatgtagaagccagtgggggtggaagacatcaagatactactaaaatctctgtagtgccctgcacaattttagactcagagtattcctgctgtgtggtgtcatcaggttgttcatacataaggacaacacatggtggcactggaatcaagattagttttgtaaaatacagagcattaagcaagtttcctatttaaaaaaaaatgttggcatttacgtttttgaggtttaagtctttcttgtacattcatctcttctatagttaaggaataatttgtttttccttgctttgaagctgtgagagtgggaatttttaccctggacaccaattttgatattagggaagaaactaatttacctgaagctaatcaacagcttgaggcttgagcctactgctttctttcactatttgcatatgtaggtttcactttttcttttaccattgagtattttaatgtacataataatattgatgaagccagccgcccacaatttaatgtttcatgaatgctttcattgactatagcattagactttgaaattttagaatattaacagctacatatttattcattca

SEQ ID NO: 40101 - DNA, 1088 bp, Homo sapiens
cctgttactccatcttggctaaagcagaaaacttgataggtgctggggttttttgtttgttgtttttgtgacggggtgtcactgtgtcactcaggctggagtgccgtggcatgatctctgctcactgcagccttgacctcctgggctcaggtgatcctctcacctcagcctcctaagtagctgggactacaggcacacgccaccacacttggctaatttttggatttttcttgtagagacagggtttcaccttgttgcccaggctggtcttcttgaactcctgggctcaagggatctatctgtctcggcctcccaaagtgctaggattacaggcatgagccaccatgcccgacctgtcataggttttatatttaagaatttgccaagcagttttccaaagtgcttgtaccattttagacttctactagcataatacaagagttctaattgttccacaacctcacctacatttggtgatgtttagtttttttattttagtcatttattagtttgagatgctatcttactgtaattttgatctgtgtttgtggttgtcatgtgcttttaatcttacgtagtttggaacatttatgacattgccttttttttttttttttttttttaatttaagaatccaggctagttgttttatgccaccttagtttggatttgtttgattgtttcctcatgattaaattcaggttaaccgtgtttgtcaagcatagtacatggattattgcattagaatatgcattcgaatgcatattagtatattgcattagaaggcacatggtgtgaatttgtgcttatcattggtggtagtaagtttgatcacttggttaaggcagtgccttccagatttcccagttgtaaaggtactttgttctttttgtaattaataagcaatctgtggaatgatattttgacactgtgacaatcctttttcccgacagtctttcacatagttgttttagtattcactgattcttacctgaatcagtaatagtatactatagtgattgtaaaaatggtgattttctatttctgtaatcccttatgtatttattatttggctttcttctctaaag

SEQ ID NO: 40102 - DNA, 1043 bp, Homo sapiens
tctttattgtggtaaaatacacataacataaaattgtgcagtcattaccatcatccatcttcataacttttcatcttgtaaaactgaagctctatacctgttaaatggctattagatctcattggtttattgtgttaagtcctctattgccttgcttatcttctgtctgcttgttctatacattattgagagtgtggcattaaaatctccaactattattgtagaactatttctccctttaattctgtcagtttttgttttatatagtttggtggtcttttaataagtatgtaaatgtctataattgttatatcttcttggtggtatgttgaaccttttattaatatagataatgtccttctttatctcttataactttttctgattgaaaatctattttgtctgatattagtatagccacccctgatttcgtttggttactatttgcatggaatcttttcttcagcctttcactttaatctgtttgtgtctttggatctaaagtgagtctcttgtagacagcatatagttggatctatatctatatctatatctatatctatatctatatctatatctatatctatatgtgtattctaccaaaccaaagttataatcatactagcttttagactaattattttttgacatattggttttttaaatcatgtagaaaacaaaaagaggagttataaaccattattacaatattagcttttataattgctcaagtatttaccttcattgataatctttatttcttcatatggatgcctggctttgtgttattgtttagtgtcttttcatttcaccttataggactcccttgaccatttccagggcacatctggtaatgaactcgttcagcttctgtttacatgggatgtcttaatttttctctcacttttgaaatactgtttttcttaatataggattcttggttgacattatttttcttttagtatttcaaatatattggcccactgctttctggcctccaaaaatttttgatgagaaacttgctgataatcttagtgaggatc

SEQ ID NO: 40103 - DNA, 2077 bp, Homo sapiens
agtcattattgtctgcttatatgacctcctatgtctttaggatactttttttttcatgctgtattctgtctgttttgctagctcctcttattcataatgtgccctaaatgtgcttactcaataacataagccttttattttcagccttttgttattttctttacactgtctccccattagatttttttaaaaatataaccttgtgggccgggtgcagtggctcacacctgtaatctcagcactttgggaggccgaggtgggcggatcacgaggtcaggagaccgagaccatcttggctaacacggtgaaacctcatctctactaaaaatacaaaaaaaagctgggcgtggtggcaggcgcctgtagtcccagctactcagaaggctgaggcaggagaatggcgtgaacctgggaggaggagattgcagtgagccaagatagcgccaactgcactccagcctgggcgacagagcaagactccgcctcaaaaaaaaaaaaaataaccttgtgatttcaattactagtgcttctgattgctactcattagctttctttcactcaaattatttggctcttcctttttgccacttgattatgatgttctgtcaagtttttttttaagctactatatgtttggtcattttaatatcactgcttacaaattaaaacattttcaaattgtaatacttctctcaacaaataaaaattaagcagatggaagctagaaacataagagaatagctttacaatcctattttatgtttagtctttttaagtaatctgcattttaaataatcttgttttgataattttttttatttaattgcttttttatttttatttattttgagacagagtttcgttcttgttggccaggctggagtgcaatggcgcaatctcggctcactgcaacctccgcctcccaggttcaagcgattctccttcctcaccctcccgagtagctgagattacagatgcacaccaccacgcccagctagtttttgtatttttagcagagacggggttttgccatgttggcgatccacctgccacagcctcccaaagtgctgggattgaaggcatgagccaccatgcccagcctatttaattgcttgtttaaaaaaatttcctggccaggtgcagtggctcacgcctataatcccagcactttgggaggccaaagcgggcggatcacgaggtcaggagttcaagaccagactggccaacatggcgaaaccccatctctactaaaaatacaaaaattagcgaggcgtggtggcacgtgcctgtaatcccagctacttgggaggctgaggtaggagaatggtttgaacctgggaggcggaggttgcagtgacctgagatcatgccactgcactccagcctgggtgacagagcaagactccatctcgggtggggaaattttttttctcagcagaatcattggtaaatttcaaatgtaaagaagtagaaatagtttaatgaatccccacagatccattacccatttcaggagttatcaacttatagccaatcttgttttgtctgtacctcctgataattctgtagccaatcttaaacattttatctgtaattgttttagaatgtatttctaaatgacaaggactcttaaaatataacctagccaggcactgtggctcatgcctataatcccagcaccttgcaaagctgaggtgttcaagaccagcctgggtaacatagcaagaccctgtctctacaaaaataaaaaaatactagccaggcatggtagctcatgcctgtagtcccagctacttgggaggctgaagcagcagggtcactcgagcctgggagtttgaggctgcagtgagctatgatagtgccactgtactccagtgtgggtggcacaacaagatgcattctctgacaaaaagatttgttaaataaaaagataacctgaatgcaattattataccaaaaaaaaaaaaattgtgaccagtttcttagtcacaagtttctctagtcagtgtttcaatctcaccaaatgtcttgtgctttattttctttttgtcttcttcttcttctgctgctgctgcta

SEQ ID NO: 40104 - DNA, 1028 bp, Homo sapiens
atatacagatatatacacagaacacttggaatttggtaatatctttccccttatttatcctcattttgcagttttgcttgtaactcagggagatattcaaaagaaggattttaactcagagaaaatgttcaacaactgagattatctgagaacagattttttattcttcctataaatgaaatctggccagttagtgtcattaacaagtataaatgttcccatagaagtagcttgtttgggctacagggaaacgtgaaatcaatatttgtcctttttaaccatcttatagctaaatcttagcttcctaaagtaagggtaggctatgtagtcttaattgcctgtgtttgtttcttagggggaagaaatttgtggcaatgaaagtagttaaaagtgctgaacattacactgaaacagcactagatgaaatccggttgctgaagtcagtgagtattagattatatgtatgaatgtgaagaattataaataaatcaagtttcattgaataaaaacacaccaagtggaggctctttagcatggataattttctctataaagttctagtaaccttaaagaggtaaaggaagacaacaatatttacacataccatgcatgtagtagggaactggtggcaaatgctatgatgagaattcttcttacacgcatgaaccaaaaaaaaacctttcaaatgaataaaaatattcactgagcatgttttacaggccaggtagctactgtcataatgtttttttttcctactatggttaaaaggaaagttgtgtaaataaatgtatagcatcttttttgttgtttttcaaatatgttatagaatacataatataaaaatactgtatttactgattccatttatacctggaaactgagataaattctatcaaaaatgtatttttagttctgttttaaattaggaatatgccagtgtggtagaaggaacttaaattcagaattagaaaacctgggtttaggtcgcctttaccccggtatgtcctccatgttaccatttttttctt

SEQ ID NO: 40105 - DNA, 1010 bp, Homo sapiens
caaattttttgtttccttagtagagatggggtttcaccatattggccagactggtttcgaactcctgacctcaggtgatccacccacctcggcctcccaaagtgctgggattacagatgtgagccaccatccatgcctggcctccatgttaagatttaagagatttcatagaaatgaaaaaagtttgtaatagaaaaagccagatgcaaatttgtttatgtagtatgtgattacagataaatatttttatgaagatacagcaacataatggaagaagagtcagtagtttatcagtgattatgtttggatattgagattcaagtaatttttctcctttgtactttttaatatttttcagattttatttattatgtactgaagtttttaaaaagtatttttctaacatgaggtaaaactacagctaatattttcctaggctgccacttggtaatactctgttcatattatctgaaagtttagttttttgtggggagggcagcatttgataatgtcttattttcttctgtccaaatggaatgggcatttttgtatcatttcttagatctgaaactcagcaccgaggctctgctccccactctgagagtgatctaccagagcaggaagaggagattctgggatctgatgatgatgagcaagaagatcctaatgattattgtaaaggtaagttcataaagaggtatgaagtgagacatgagccatctatttgcaatttctcgtttggatgtttgatctatcagcataaacacagttttattgctgtttacttgtatccttttctctaaaacataggaaatagtatttgttcttagtctgacttaatttatcaaagcctaattttatattaaatgtttttacctttttcctctttaaaaattataatacatatttaccttagaaaatttcagagctgtgttaaacagaaaagaaagtaaaagacttctgcaatgctatcagccacatataaccagtgataacattttggcatatag

SEQ ID NO: 40106 - DNA, 1107 bp, Homo sapiens
ttctctatagttgtgctcttggaacttcctttttggctcttctgtttttgatctgtaaaacagaatcctgtggatcctatgtcttctttctcagttttactgctttgttttcttgactttaagtaacttcttcagagaagatgaatgggagataagtttcaatgttggtccatatttgaaaaactttattctgctctcaaatgttgttgatacttagactaggttaaaaaaaaaatcctcagaatttagaagtcattgcctcattgtcttttagtgtattggctttctgatgagatagatgatgacagtctaattactgcccttctagctttttttacctagaagcctttagagtcttcttaacactgggatttaaaaatttccctaataaaaaattaagtagagcttccgttcaatctccagaaatttcttgaatttctttaataattttatctcttctattttcataagtttctctttctgcaactctattattcagatgtgggaacttctggtttgattgtgtttgtctcatctctttttgagcattattatcttgagtagagatattacgggataatgggcgattatgagataagtgggcatttttcccccctacatttagggaatggtcaagtttattttctagaacttctttctgactttactcatcttttagactagagcatcatagtctgtatggaaatcggcatcatttaacatttctctattcatattaactagtttttaagtttggtctttctcctgaatgcatatctctcttgtagggtcagttttccaattgcttatcttggtctctgtctttggggccgtgggctttcctcaaatgttcgatgatccttagtcaccttttatttttatggatgaggcattagagacctgattgatagccctacgtccctagcaaggctttttctttcttttctttttttttcttttatttgagacagagtctcgctctgtcgcccaggctggagcacagtggcatgatctcggctcattgcaacctctgtctcccggattcaagcaattctcacacctcagcctcccgagtagctgcgattacaggcgcatgccactgtgcct

SEQ ID NO: 40107 - DNA, 1039 bp, Homo sapiens
tctttactagaaagaagaatgcagtgggataaattaggtaattcatgctaatatttctaggtagaaggataatacagtacatgctcaatatgctgtttatcaaaaagagcttgtccttttgaattacacagtcccggatttcagcctgcctccaacaccattgttaggtgaacatggacagtttcttttgacttttcagttcaagttgccttatctgtagatggcaaggttataaggatgaaattgcattgagtgcctagcccagtactgaggtgaaataagtttttggatgactgctttctttctcatgcttcgttctttaccttagatgggtttatctttgtcttttatgtgacttttttttggatttttattttattattattttttattttttagaaacagggtctcactttgttacccaggctctggagtgcagtggcgtgatcatagcttacagctgcatcacactgctgggctcaagggatcctcctgcctctgctcccttagtagctgcgactacaggcacatgccaccaagactggctaatcttttttttcttttttttttttttttttttgtagagacggagtctcgccatctggcccaggctgggctcaagcattcctcccgccttggtctcccaaagtgctgggattacagacatggggccactgtgccaagcctatgtgacatttcttaatactattagtgtatcaaactaatagttttagctcatgtgttggtgtttcattttcatgtatatttatatatatgtgtgtgtatatatggtagagtttggagtatagtcacctgaggatcaaggttgaattatatttatttgtatgtaacacctgataaacttaggcactcagatttttatttttatattgttagaccctagttccagcttaagatttctgagttgagaaacttagactacttgtgagtatgtctcagaagttaagtttggataaaattagatatgtaaaggattatgtcaatttgcaaaagaaaaaaatctttcaggaaaaatata

SEQ ID NO: 40108 - DNA, 1014 bp, Homo sapiens
ctcaccttcaaccttaggcagccactaatctactttctgtgcctatggaatttcctgttctggacatttcatataaatggaatcataacatatgttatctttagtgactggcttcttttacttaatgtttttaatattcgtgcatggctcacatctgtaatctcagcactttgggaggccaaggccggtggatcgtttgaggccaggagtttgacaccagcctggccaacatggcctaaccctgtctctactaaaaatacaaaaatcagctgggcgtgatggtgcacgcctgtaatcccagctactcaggaggctgaggcatgagaatcacttgaacctgggaggtggaggttgcagtaagccgagatcatgccactgaactccagaccaggtgacagagtgagactctgtctcaaaaaaaaaataataaaattcgtgcatgttgtatcatgtgtggttatttttattgcttgtccactgttggctaattggagttttttttcatggtatctcctgagttcattttactcaacctgagatgtctttgattgctttttttaatctggtgtgacagtatgtctaaggcttatcttgtacattttctgcccccggctaggaaatagctgtctctccaagaagccttttagtgggaaatggtatttggagaccataatctgagcgcttaaggagcttattactagtgagtgagttagtcattgtttctatgctttttctgtgactagagcttaggaaataagttgtgttttttcatttaaaaaaatcatgagttcatgttatacttaaacatggaatcataggacccaaggatttttgtttgattttatatttcactcttctttctcccacgctgaaaatcccagttctcaacagcatcatgattgctcattttctttttcctacaatatatacacaacagtcttagaattacaattccagcactaccccaacaatatgattactaaagaagatcacaatttttgttattgttcttag

SEQ ID NO: 40109 - DNA, 1026 bp, Homo sapiens
tattttttgagacggagttttgttctcattgcccaggctggagtgcaatggtgcaatctcggctcactgcaacccccgcctcccgggttcaagtgattctcctgcctcagcctcccaagtagctgggattacagacatgtgccaccacactcagctaattttgtgtttttagtagaaatggagtttcactatgttggtcaggctggtcttgaactcctgatctcaggtgatccacccacctcagcctctcaaagtgctgggattacaggtgtgagccatcgcgcccagcctcactccatcttattttaaagcaaatcccaggcatcatattattttataaattatagactcttaatttttttaaagcatagctacggtagtataattgccctaaatttttttaaacaagtctttaatgtcaagtattcaatctgtgttcaaattttcctaattttctttggatcaggatccacaaagtctttccattgcctttgtttgaaaagtttctagtcttttactctgtaagttctctgtggttcttttccttgcagatttgtttttggcaaactacctatgggtggtggtgtaaactttcatcaggaaacatcaattctggttgtctctctttttgtggtgttagtggctattgatccttgcttagatccattaatttatttagggtttcaaaaatggtaatattctatttcttaatttattaattgtaatacttctataaagagaaactttatctcataactttggttacccagagagagagttgacagatccctagcatgctccaaaatgaccaataaacatttgataataactcacaaatttgaacgtatttgtggtttagtccattagagtgggtttttttttcctacagttttatggaggtataattaaaactcattttaactgtgcaattcagtggtttttagtatgttcatagagttgcacaaacatcactgcagtgtaaatttaggttgttttcatcaactccaaaagaaacctggacctatt

SEQ ID NO: 40110 - DNA, 1053 bp, Homo sapiens
gctgtcgccaagatctctgacatgccctgacgacattttctctattgtcttggtgattagcagccagcttgaatttctccccagaaaatgtttttttcttttctatcccattgtcaggctacacatttcccaaacttttattctttgtttcacttttaaacataagtcccaatttcaaatgatttctttctgaatgcataaaactgaatgctttcagaataacccaggtcatgtcttgaatgctttgctgcttagaaatttcttctgccaaataccctaaatgatctctgtcaagttcaaacttccacagatctctagggcaggggcagaatgctgccagtctctgctaaagcatagcatgagtgacctttactttagtcccaataagttctttgtctccgtctgagaccacttcagcctggacttcattgttcacctcactatcagcattttggtcaaaatagtgcaagtctctaggaagctccaaactttgctacatcttactgttttcttctgagccctcctccaaactgttccaacctctgcccactacccagttccaaagttgcttccacattttcaagtatctttatagcagtaccccactctctgtggtaccaatttactgtattagtccatttcacactgctataaagaatactacctgagaccgggtatataaaggaaagaagtttgattcacagttccacaggcttaacaggaagcataacgagggctcaggaaacttacaatcatggtggaaggtgaaggggaagcaggcaccttcttcacaaggtggcaggagggaatgtctgcgagaacgaggaagtgccacactttaaaaccatcagctctcgtgagaactcacaaactatcagaacagcgtgggtgaaccacccccatgacccagtgacctcccacctcatccctctgctgatgtggggattacaatttgacatgagatttgtgtagagacacagagccaaactatatcaaggctgttcctctttcttgttattcatgtgttcactccatcttacttattttttattt

SEQ ID NO: 40111 - DNA, 1057 bp, Homo sapiens
gtgctactgttttataaattaagattatgttatattctaagtcccttgttgtcatttcaacaatgttcacagcatctttaccaatagtagattccatctcaagaaaccgctttctgctgggtgtggtggcatgcacctgtggtcctagctacttcggaggccgagatgggaggattgcttgggcccaggagttcaaggccagcctgggcaacatagtgagaccttagctcttaaaaacaaaaaagaaagaaacttattttttaaaaaaattaattaataaactaatcagttattttgagacagggtctcaccatgttgcccatgctggtcttgaactcctgggctcaagccatcctcccaccttggcctcccaaagtgctgggattacaggcgtgagccaccacgcccggccaagtaaccactttctcatcataagaagcagctcctcatctgttcaagttttattatgagattggagcaatttagtcacatcttcaggatccatgtctaattctagtcctcttgctgtttctaccacatctgtagttacttcctccacagaagtcttgaacatttcagtcatgcatgagggttggaatcaacttcttccaaactcctgttaatgttgatatttttacctctccccatgactgttcttaatggcatatagaatcgtgaatcctttccagaaggttttcaatagatttttcccagacccatcagaggaatcactatggtagctattgccttatcaaatgtatttcttaaataataagacttgaaagttgaaatgactccttgatccatgggctgcagaatacatgttatgtcagtaggcatggaaacaacattaatctctttgtacattcccatcagagctcttgggtgactaggtacattgcaaatgagcagtaatattttcaaaggaatctatttttctgagcagaaggtctcaatagtggccttaaaatattcagtaaactatgcagtaaacagatgttctgtcatctaggctttgttgttccatttatagagcacaggcagagtagatttagca

SEQ ID NO: 40112 - DNA, 1038 bp, Homo sapiens
tccacctgccttggcctctcatagtgctggtattacaggtgtgagctaccgtgcctgacctatatgtctgtttttgaagttgtttctatggaacataattccagaatggatttcatacttactgattttattacttaccttaggaagctggtttggacagtaattttcactttatttgcagttaaataattatggatttagtatacatttggtagtaaaattaattcagctctaacactgatttgtggagtcatttgggagatatattgaaaatttacttgaatttggccacaaattaaaaaaaaaatttacaagagaaaatacttaaatatctaacatttttattcagtaggaagtagagccagtaaatttgaaacaatttaaaaaatgaaatagtatttgatgctttttacacttagcagtgcaccttggaaattggttctatattccatatagtgcagccttactattttttttagggtctgcctttttcactgagtcttagaaatagttccatgtcaggacagaaagagaacctcatctagcattccattaagttgatatgccataatttaattaattaattaattaatttatttatttatttatttgaggcagagtcttcgctcttgtcatccagtctggagtgcagtggtgagatctcagctcactgcaacctcagcctcctgggttcaagcgattctcctgtctcagtttctcgagtagctgggattacaggcacataccactgtgtccagccaaccataatttattttaatttttattaataaacgtgtgtgtgtgtgtgtgtgtgtgtgtgtgtgtgtgtgtgtgtgtgtatatatttttttttttttttgtttttgagacagagtctcgttctgtcgcccaggctggagttcagtggtgcaatctcggctctctgcaacctccgcctcctgggttcaagtgattctcctgcctcagcctccagagtagctgggactacaggtgtgtgccaccacgccccactaattttttgtatttttagtagagacg

SEQ ID NO: 40113 - DNA, 2552 bp, Homo sapiens
aaaggatcttggaaatcagctcttacacactttgtattcagagagagcttgtatgcctagttattaatacatcttaattttagatgtattatctttatagttttacatttatttgatgttttgtggcatcgtatgcggtctaattccctctgagctgatacaacacatttcaaaggccttcctaggtcaccccactgaatgacaataccagattaggggggtgtaggggtgtgtgttgtttttggaggctacctactgtttggggagagcacataatgacttctctctttcaatagaactaaagtggtaggtgacctcacctcttgctccattttctcttctgtcttatgaaatgtattttgtaagtgcttggtgacgaagtcttgtaaatgagagtttgtgtgtgtctgtttacctttggattatccatatatgggattattcaaaaccagtttttaatcctagatcgtttaatagaaacagcaaggtgctaacttggttctagtgtgcagtaggacttgaaatgttacttttctgtgcctagtttagttattctttgtggaattgatgagaatgtgttaaaacgttcttttctattgatacaaggaagttgcagtttttattatattactctgtattttttagaaatcctggtctctcagactatttgtccagatctctcttaccacttagaaattaatttgagattagcccaaatcaagctgtaatttgaggggtaaatgtatatagatgatatactttaagcaccagaaatctgttactttcgattatctatttagaccatatgctttatttctaaagtcagatgtgtatctgttaccccattcactactatggataacttagagttatttgtgttaattgtttgcaagtatggattatagataatctagcagtcattttactgaatatttcatcttgaacaactttgaatcctgaaaatatgcgtgaatgaactgcccccatttccttgtaacttcagaggtgttttatttttggatttgtttccaattaataagttttttttgtttgtttgtttttgaatttacctaccttttttttctttttctttttgaggcaaaaagaaagcctgttgcccaggctgcagtgcaatggtgcgatctcggctcactgcaacctccacctaccagattcaagcaattctcttgcctcagccccccaagtagctgggactacaggcgtgtgccactacgcctggttaatttttgtattttttgtagagagagagtttcgccatgttgcccaggctggtctcgaactcctgagctcaggtaatccgcctgcctcagcctcccaaagtgctgggattacaggcatgagccactgcaccttgctctttttctttcttcctttttgtctttctttctgtctttcttttcttttgtttgtatcccagcctccttttaagtagctgaaatgtctaattaagttggttagagtactgtgttagaagttcaagcctcaactaaggtaacttgactctgttccatgacttctgactgcactcctgatgacttccatttactttgctaaggcaagctgctagttacaggaggtgagtcaggaagaagatttgaggaagaagcatgccatagagtttggtctttggagatagatgtggttttgaattctgattttgctactttttagcaatctgaccttagacaagttagttaaggaaacagtcttatgtatatatcctgactggcagttcagtcatagtgaaaactgatcaggacctaaagatataaaaacaaagcgtttaaatgaaaattttagaaagttttggaactgttacagtaaatagcatccttagtaatttagtcgtgttgtgtcacaggcagaagggattttcagtcccctggtactgcagatcttaaacccagggtcttgaagctggtgacagaagaaccaaaacttggaattcagggtccctttccagctctgtgtttgttagagtggatttcctttgggttcttttcactgtgctggagtatttgactttgggattttaaattttcttatttagacaattcttcattttacttttgtggacgctgtgcttttatttactaacattaactagttggtgatgatctccattttactttacagataagagaattgaggtttgtcagattactcccctagaaaattgcaaagctgggatttgaacccaggtctgacatacccaaagccctggctaccaatcatgtgtttctaagtgacagtgcttttggtgtgtcttacaacaggtaaggtagaagctgagttgaaagaggcttctgaatgagagacctctggatgcttgggggtttgggtgccctttcatgacatactgtcctgtgtctatgaaacagcacaatcatctatctccctctgaacatttgttttcagtgtttataccaatagctgtgagcctttatttgtttgtcataagcttttataatttaacagtgtgtgtctgtttttgttttgttttgttttgttttttgagacagagtctcact

SEQ ID NO: 40114 - DNA, 1020 bp, Homo sapiens
acagtgaggatctgcccgatgaactctggggtcttgcaagtgtacagtcctggagaaccaggcccagtcccaactcaacccccagagacctcactcagccactcggtgagaaaagggagatggccgctgggtggccccggggagggcgctgggccttgaggtccgcggtcaaggtggcgctggcgaggggccagcccagggcgggctgggcggaaaggggagagcctggcgcccgccccccgccccccagcggcccaggggtctcaccacacggagccataggccccgctgccgacgtgcgtcggggacacgtaggtcttgggcagctcccaggctgtcttgttgacgtcctgcttgtagaagccctttttccggatgaggctcatcccgggcacccgatctcggcggccccagcgtggcggctgcgttcgcggcccaacgggctcccagcgccccgacccccgctgcgcccgccccgcgccgcccgctcctcccccgcgcgagggcgggggccccgggctgctacgctcccacctgccggctcgcccaggtgcgccggggccgccacgcccgggcctgtccagccctgcgctcccgcgcttccgcccggcccgacggagccactgcggcaggtgcggcccaggcacggggtcggggctgcccagcgggaccccggtgcctcccagccgagcgcgggccagcggcggggctggtgggtccaagcaggagcggggaggcagtgcttcccagttccctccagccccggtctccgtaggaagagctccctgtgactgtgaacacacaggaaagcagaacaaaaccccacaacctcttcattatggaaaatgtcaaacatgcaggaaagaattgaacagagtaagccagcgcttctcacacttcagtgtgctcaggaatcccctgggcattttatttgattaaaatacagatcctgactcagtaggtttggggtggagccgagattctgcatttctagccagctcccaggtctgaggcttctga

SEQ ID NO: 40115 - DNA, 1057 bp, Homo sapiens
tagctgggaccacaagcatgcaccactacacgtggctaatgttattttttgtagaaatggaagtctcactgtgttgcccaggctaggcttctgtatactttaagtcatttctagatcacttataatacctaatacaatatataaatgttatgtaaatagatgttatactgtatttttaaattttgtatttttttaattgttctattgttattttttattgtttattgttttgtttattgttgtttattttgtttattgtgttgtttattgttttattgttgtttattgtttattgtttttattgttgtttggaatatttttgatcccagttggttgaatccatggatgtggaacccatagatatggcgggccaactatatttattatttagatcaagatatatttcaatatataaatttaaaaatcttttctgaaataaaagaagattgactcttcttttcaagtcaaagaacataccatgtgccaggcaaaattgattcaaacgtatcttcgtaaaactattggacaagggatcttctcttgctacctgaataaatagtgtgaaaaatatggttgttgaagagacaaagtaatagtatctgtcaattcattttgataaacttcagttttgtaagagattatatatattttgtatatattttgcattatttgtatatatgcatattttatattatatattttatatatgtgtgtgtgtttatatgtatgtgtgtatatatatatttgactctttatatccatgggttcatctaattacctctgcttctatttaacattgtactgggctgttttgtagtgatgttcagggaatacaatcaggacagtgcagttctgctctgtagaggagtttcatgggtggatgttgaagagcctcaagtcaccttcccaaccctcctaccaatatagcttctccctgactggttgagatgaagacttaacctgaagattggtttgatgttactggttttctggtgcccaggttatatggtttggctgtgtccccacccaaatctcatcttgaattgtagttatcata

SEQ ID NO: 40116 - DNA, 1135 bp, Homo sapiens
acagcctgtacatgcatgtggtcacctgtacatgcatgtggtcatctacatttccgggaaatctgattaagctttccaaacacacttataaacttcttaatccagctgggcaaggtggctcatgcttgtaatctcagcactttgggaagccgaggtgggcggataatttgaggccaggagttcgagaccagcctggtcaacatggtgaaaccccatctctactaaaaatacagtaattagccgggcatggtgctacatgcctgtaatcatagctactcaggaggctgaggcaggagaatcacttgaacccaggaggcagaggtttgcagtgagccagggtcgtgccactgcactccagcctgggcaacagagcaagactccatgtcaaaaaaaaaatcttattcctcagtttttccttataatctttttttcccccaaatgttatcacctcaggcacctgagatgttaaacaattgccactaattgttttccataaatactccaaagaaaaggctgttcacagtaaatgaaccctgagtcagttccaataaagaccaaccctgagagcccctgtggtttccaggaaactgccagacaagtcaaagaataactaatggaagatgagcatttaggggaactccaagcccattctgcctgcttcagtgactgctaggttgctggttttcagggttaccatgattgaaggttgttggtttccaaggctactatggaactacagaaagagggatggcaataggacaagttaaaatgccaccagtcttgctcttcttatgagatttagccatgtgtgtgtgtgtgtgtgtgtgtgtgtgtgtgtgaaaatgctcctcagacttttgtgagcctttggttaattttcagagttctaaaaatgttgattttaacaattttttgccagtgctctcattgcttttctgaagaaatcaatttttggcgatttttactccaccattctgaatgcagttccaatcatattgacattaatacagtcaagatacagaacaattccatcaccacaaggatctcttgtgttgttcttttacagccacgtgcatttccttcctattactgtcttaggccctggcaaccactaatctgttctctatttctataa

SEQ ID NO: 40117 - DNA, 1112 bp, Homo sapiens
accagtccctgtcccatgctttcccagccccagtcacctacatgttcatttccttcctggtcagattagtaggtcttgtccctagaagggactaatctgagaagtaacaagaattctatcccttctaatggaaagaggagagaagcctcttaccagttcaggaacctgttgttgctggcaacaataccatagaagaaaagtcctgccaaagcatggctaccctagtcctcttaattctattgcttagagggcatactatatgagaaacagttaaggaaatgtggaatgtttagcctaaagaaaaaacagagatgctgcctaaaatatgtgaaaggttgtcacatggaaatgggaaaaatagtcaaagtagcttcagaggctattaactggaaggcaggcaggagagggaggccgttatctattaaatatgtatggcagaatgttctaatggtaaaacagtttgatgggttgttctgggaaatgcacctaacagacaagggaaagaccgagtaggaggagatttaatagataatctcaaaaatgtcttccaaggctggacactgtcgctcacacctgtaatcctagcactttgggaggccaaggcaggaggatcgcttgagtccaggagttcaaaaccagcctgggccagagggagacctcatctcttagaaaaaaggttaaaaaaaaatagtggagcatagtggtgcatgcctgtggtctctgctacttggaaggctgaggcaggaggaccacttgagcccaggaaggtaaggctgcagtgagccatgattgtgtcactgtactccagtgtaagcagaagagtgagaccctgtctcttaaaaaaaaaagtcctccaactttaaattcaacttaagtcagacacagtgaagctttgatgggttctgtgggcagaaatgaggcaacaagagtagcaaagcacaagagtcaaacaaagatccacatagggggccaggcgccgtggctcacatctgtaatcccagcacttagggaggccgaggcggcggatcacgaggtcaggagattgagaccatcctggctaacaaagtgaaacaccgtctctactaaaaatacaagaaattagccgggcatgg

SEQ ID NO: 40118 - DNA, 1054 bp, Homo sapiens
gcagttctcctgcctcagcctcccaagtagctgggactacaggcacttgccaccacaccgggctaatttttttgtatttttagtagagacggggtttcaccatgttggccaggctggtctcgaactcctgaccttaggtgatttgccggcctcggcctcccaaagtgctgggattacaggcgtgagccaccacgcctggccaaaaacccttgctttttaacttcgattgacacttaacaaaaatcctccacatcccactttttgacagtttacattaaagcctgtggtctgaatatttgttttacttagagggggaccctttgggcaacttatttgcaaacacatctaaccttcctgggcttattccacagtattttcatagacctgtatatattagacatcacactgttctcttgggatttaaagtagtactgggtactgcatattgtgcagtaaatctggcttgctttcttaacctttttgctgccattctttcaaatatttttccagggcttaggggaaaccattaaatgatctgacttaacactgtcgtcttgccctccctccaactcctcagtggcaaatgtttcctcatcaaaacagcatgatatgatgcagatgcaaactcaagattctaaacttcagattcgggttaatcttggcttgccgatttctctggctaaaatatcaacagcctggcttgcttatttaggcacttagaagaaaacaccaaacccaagtttcacatttttaaaattacaaatgcctcttacccatctggccaggaaccaactctgaagggggtgacctcaacccagcccttgtttctgtgaggtcctgcttttgcagaatggcctgcccctgggactggagcaggcttgggtgagctctaggtggagggtggtgggaggggcatagaaataaaccttcctctccatcagaaggaacctgtgatcccagcttttccttcagtcaccaccacctcgtgacactagaaagcctaccgtcacagatttccagcttactcaaaccccacaggttggggtcaaatgca

SEQ ID NO: 40119 - DNA, 1035 bp, Homo sapiens
agttctgcggtctcaggcaaagccattttgagcatcaaattgtatctgcaaagttaagctaataaggtcctccttggaaaagttttgtcaggattaaatggactcatgtatatgaagttatatatatatataaaactcatgtaatatatatattaagtacagagcctagtacttaatgggtgctcagtaaattgtaataccagttattatgacacagatgccttcgccctagtgactcatagttaagggtctcctgcctcatgaacaaagctttattgttcattttggaaagtgctttgggaaatcgagcttgccattaagctactgggcagtcctgcttatttagcttgggggtagcttctgatgttactcatagcctttggtttctagaacagaactctgggcacctcctgcctggctgggcctcgctgatgtgtggtccatgtttcaggccttctccacagtaggcactcctgactacattgctcctgaggtgttcatgcagaccgggtacaacaagctctgtgattggtggtcgcttggggtgatcatgtatgagatgctcatcggtaagttgcatggtttcagaggactttttctgtgcatccatgacagacttttacattgataccagcctctgtttcaattggcagtgatctaagtgatttccctacttgtctttcaaagtgaattgttttagacagatgacacctctttcagtaagatgtatcccactccattcttgggcttactggcatcctgcaattgctttgctgatcattttttatgtttttctttctcttataccttcatcttctccatctagaagctcttttagtcactagcatttattaaatatccgttgtatgcagagcacttcaactgggcattgcctcactttcctaatttgccgcccccttcctctgtcaaagccttcaaatcatgggaccctctggcctctctccctcttattgtattggtgtgtctctgtatttatgggacgcatctgtgggggtggtcatatgccagtgagca

SEQ ID NO: 40120 - DNA, 1097 bp, Homo sapiens
tactgtatcctctgccacttgatccacatgggagtgccttttacaactctgtgtgagtcttttaagttaatgctttacagcctctgatttgggtttactgtaaacgtactaggatatgtatcatctggagcttttgatgtatgagtagaagaaaagcaagactttagggtctcatgtgacttgaaagagcctactaaaaaaagtagtaaacattttggtctgaactttgactgcagcttgtattctttactttcagctttccagaacatgaattccaaaaggaaagcagaaacctggaaaagaaatagacgtcagctagtaagtaatatctgtggcttctgaaatgctacaaaccaagtatgaataagttcaaaagattttcacataaatttgcatttgacaaatatttgcaacatatcccttgcttttaagattacctaaagagagtgctgttgttaggttggtaggaccgaaaggaatcttttgaaggaggacaggtaatattaggttgttttgattgtgacattttccgtgggcgacctcattctgaccttttagcttggtaacaatacctttccttcctgccccaccttttctccattttcatagtggtaaaggggttatatttaagctggagatctgtcagaactaagtacaaatacctacttagagttttcaggcatcaattctcaaactttttaaaaattttgatccactcgggcaagggcaagtcaagactcctcaattcatttgcctcacactttctgactttgtgatgtaaaaaagaacttacttataaagattggagagaaatataaagggaatgcttattactttatatgcatttgactttgtgcctatataaaattatgtcctacaggctgaaaaataagaaacatcgtgtttaccttgatagtatgttggaagtacaaatttaccagtgaaatattgctgtctaagcagaatttattttttgccaatagctgataaattggttcatgtttgaagttcagtgtacatgttccagtgtccagttactggaaagttattggccagataatagaaatgcgtatcactacattcttaagctttgcaag

SEQ ID NO: 40121 - DNA, 1095 bp, Homo sapiens
tgggcctaagtgatcctcctgcctcggccttccaaaatgttgggattacaggcatgagccatcatgcctggctgccttctcatttttgaatatggttttggagaatactgaggccagatttactccttcctttacatcagggttaattttttgatttctatttctgaatattttctctgttatacttactggattttctatttcaggaaatatagttatttgtttcatcacctttgccttccatatctatcatatttcttttgattgtgtgataggatttttttttcttttttccctgcattcactaaaataatctcagacctttactctgtgccttactcaattttcagtcatttttattctgttctttactgctctaatttatctactagctcattactgatgccatttgaatctaaatttgtttccttcactctgcaatcttttcatcttattctgtggtgtattatcttgtctttgagcttttgttatattatatttttacttctcttgaatcatccatagcttgagatagccatggagaagccactttctcccaggctgagttcctgggttttcttttcctttctcccctcctcctttctgtccttctgttggttgtggtatgtttgcctagtttccatgccatttgttttcatcttatccatgcttgatgtcaacacctacattatccccaccttttacttgctcagatacagtgtaagtggagtctccttgtcattctccccacttatgtggaactggttgtcttccccacttcaaatgttaggttgctttctctctattctattctagcctgaagaggtgtgggagagaactggagctcagctcatgctgagcgagccccttgtgggagggctagcctctgttctatcttcccagactcccttaaagtcttgtcccagagccccctccaccagccagtggtgtccctctgtcaccactccaggctctgggtagtccccaagtatggcccagcaccctggaaggtggccagccctgcgtgcctgccctgccactcccgagcccctgtgatatgtgtgggcttctgccctcaagggctttgttttcaga

SEQ ID NO: 40122 - DNA, 1070 bp, Homo sapiens
ccaggtacctgaggggttgactggttctgcctgaaccaagataagaggtagggagcagcgatggctgggaattgcagtgtccagacattctcacagtggggatcaccttcaagaaggatggcattccttcttgaagtggctttccctcccaggaggctaggagggcctggggacgtgtctgccagaatcacctgggtgggaagggggtcatgttcagcatgtgtgtgtgtgtggtacatgtctgttctgtgtggtgaggagtgccccatcccagatgggagcctctgcttgcagggagactggccacttgacctgggcaggtgagtcttcactggcctttcgatgtaagcaaattaaagtggctccatagagacccaccccatctgcaatcacagtggtacattcctgcagttctgccccttctcggggggccttgtgggtgggtaagctgctgctgtcacatacagagcaagggtggccaggagtgcaccgctaagtggtttctcatctaggtgggcagctgtctgaccagaggctgccgtgcttacatcagcaacaacagcagtcaacagatttgtctaaagtgtttttcgagtgcttttctgtatgtggcttaaaggccgaggtgaggctgccgggctgtcaaagccactcaagcagacatctgagcaaatctctgaccaagaacccaggccatcgatctggtgggatggccgctccacaggaagctgagggtgggggagtcacctttcctcactaggagctgtttgcttcagcaaagcaggatttgaggagttggggtctgaagggggaaaagcttgctgaggtggaggtggcgataagcctggacttgccctcacctcaccccacaggccaggattcgtctttgggtttcagggtgcatgtctgtcttagcactgactgcgtgccaagccctggatgttgatcaggcagacacgggctcagcccttgaggctcacagtccggtgggttgcacaggcagcggcagctgatccctcttaccgggtctccttctcgggactcccttcagtccacttaccccgtttctg

SEQ ID NO: 40123 - DNA, 1043 bp, Homo sapiens
actttgggagaatgaggcaggaggattgcctgagttcaggagttcgagaccagcctgggcaacaaggcgaaacctcatctctacaaaaactacaaaatgggcctggcgcggtggctcacgcctgtaatcccagcactttgggaggccgaagtgggcagatcacctacatcgggagtttgagaccagcctgaccaacatggagaaaccccatctctactaaaagtacaaaattggccgggcatggtgatgcatgcctgtaatcccagatactcgggaggctgaggcaggagaatcacttgaacctgggaggcagaggttgcagtgagctgcgattatgccattgcactccagcctgggcaacaagagcaaaactccatctcaaacaaaaaacaaaaatcaaaaatcaaaacttagccgggtgtgatagcatgcatcctgaccctggagttcgaggctacagtgagccaagattgtgccactgcactccagcctgagtgtcacagtgagaccctgcctcaaaaaaaaaaaaaaaaaaaaaaaaaaaaaaatatatatatatatatatatatatatatatatcttacaaaaggttccctgatttccttccttgtcatttcttgctcttcccccacccctcactttgtgataatgctacatcaaatttggacgggccaggcacagtggctgatggggcacagtggctcatacccataatcccagcactttgggaggccgaggcaggcagatcacttgaggtcagcagttcgagatcagcctggccaatatggcaaaaccccatctctactaaaaatacaaaaattagctgggcatagtggtgcacgcctgtaattccaactactttggaggctgaggcatgagagttgcttgaacccagtaggcagaggttgcagtgagccaagatcacgccactgcactacagcctgggtgaaaaacaaaacaatgataataataatttgtacatctctttttacttttcttttcttttctttttttttttgagacggagttttgctcttgttgcc

SEQ ID NO: 40124 - DNA, 1077 bp, Homo sapiens
tttctggggtgaggcttgacttggagaaaggcagaagagacgtcccgcttctgtgatttggtgcccccatatcagacaatgaatttggaagtggagaggggccttcatttcttatctacttggcatgaaagggtgccctggataggagggtgtgtacagggcaaaatgccaaaaagcactgtctagttgaaagttcccttctccacccaggggcagtgaaggaggaggggcttatagagctgggattggtggagggagcaggtgccagtcccctcactctctgggagctgtgaaagggatccctgtccttgggtcctgggttaggcacctgagattgacatgatgggatctagatctttcctccttgacatcacctgagcccccacctagccatccatgggagagagaaggcccagccccttctagaatgactctttaggcatgcgtgcatatgtgtgtatgtgtttgtgcccgtctgtgtctaggtaccaccgtgggtacattgttgggcaggagtgtgtgcaaacacaggtctgtgtgtgcaatctcacatatctgcctgtgagactggattgagacccattcgtttctatgaatgtccgtgtacgtcagcgtgtgtgtccaccttcctgagtgatgtgttcgcttgtagggtgctggctgaatagactctgtccagccctgttctgtagtctcaagctgcctgcgatggcctgaaattccacctttcatcccctatggatgacggagagcttacagatgaccctattgaatgcaagcacctttggtgaggagcatcacagggctccttctggagcatttggtggggacagctgcagagaagaggcctggaactcgggcagcactgcagtgccaggaggcaggcggggaaccgaggcaaaggctgcccatctccccctgccaggcctgtgtgatcattatcaccaacagctggtgggtggccgggccaggatgcagcggggccttctgatgcccaatcagcacggctgccttcctgacccagtcaaggcctctgtctgaaatgagtcgctccaggttctcagcatacacttccat

SEQ ID NO: 40125 - DNA, 1040 bp, Homo sapiens
aaaggcctggaagctaaggaacccgagtgtgtgaggagttcgtgagctgttcagttgggctggagcataagctgaaagggaactggggccgttagggctggaacagtaaaggatttttttttttttttttgaggtggagtctcggttacccaggctggagtgcagtggcacaatcttggctcaccgcaacctttgcctcctaggttcaagcaattctcctgcctcagcctcccgagtaactaggactacaggcacactccaccacacccagctaatttttatatttttagtagagacggggtttcaccatgttagccaggatggtctcaatctcctgaccttgtgatctgcctgcctcagcctcccaaagtgctgggattacaggcgtgagccactgtgcctggccaggaataatattaaacattgctaacattgactgtccagcctgtgatcataagtatgcattatcttcagtctcatcacaactccttgagaaagtcatttatcagtcccttgtccaagtggcagacctggacttgaacccagaactgctcattgcaaagctgtaaggaggatgtcaaacagggagctgggttgatgcaagccatattatgggccaggtagccatgccgctgtgtgtgggaggaggccgtgctggagagactgtcaggaggctttgcagttgtccaggggagtcctagggagctttgtgggcatctgcaggaggtgtgttccaggcagaggaatagccgctgcaaaggccctggcctgttggagcaacagtgaggagtccaatgtggctggagcagaatgagccagggggagtgcagtagaaggtggggccagagagttagtaggtccaatcatttggagccttgaaggctatgaaaggattctggattttgttctgcatgagataggggaccatggcagggttttgagcagagaagggacatgaactgacacctttttaatagaacctctctggctgtcatgtagagaatagatggtaggggtttgagggtggaggaaggaaacca

SEQ ID NO: 40126 - DNA, 1060 bp, Homo sapiens
gaatgggcctccatagagtgttcattctgctggaatacattgccctggcaactaaatgattttttatttgttttagttattctccactcagtgaatcataggtgttccggatctatttgaaatgctcaaacagcaaatcactagttttaatcccttttgatgctataattttccttccttggttttgaacggttcagcttgcggggacagagacccatcgtgcatgtctcctaaatgagacacggatgcagctcatcctggcacttgggccacagaggaagtgccacaaatgcacacaagcaaatcaacctgtggacactggagttaatagtcactcgtgtggctgagttactcacctgtcattcctgacatggatccagcctttaagcttgggaggctgacaaggaaatagttactatgcccgctgctaattcactgttccgaagtccatgtagataaacatataccgagttctggcgtggccaaacctgccggggactgccgtggcttagctgcccctccagttgtgtttatcgaagcattggagaggcagccacctgcccatcagcgtcaggaacgcagaactgggactccgtgcttcccccacaccacagtactcaactggggactgaaaaatagcagttccaagaagcttttctcctaatcctcatcaaaaggacctcatttgacgatggtggcttgatgtggctccgtctcctacttagtgatttccattccagtgctgcctgccctgggtaactgcgcacaacattgcctgcccctccgctgtccccagagctccggcctctgtcgccatcagcatcagcctgggagtctccccaggacggcatggcacgtgagcagcactgcagtccttgggtcttcggcgccaacctgcaaccctgatcaaaggagggtgagggcgtgggagtttcctttcaggtgtgtcaaagacatatcagctgcgctctagaaagagccaacgggtcagccgcttcctcctagtttaacttgattttgagtgatttgtccatatggaaatagtagggtagcatcaaac

SEQ ID NO: 40127 - DNA, 1019 bp, Homo sapiens
tgagcatttaggtggctctcttgctgttcaaatgatgctgcagtgcaatccctattcttcttccctatgctgcaaacacatcataaattaaagtagtataagggaattgctggctctaggggtatgtgcatttaacattttgctagttgagggtatgtcaacttgtacttcctctggcaatatgtcagagtgcctgtgtcaccctaccttgtccaatataacacatggtcagacttttagattttgaggcaaacatattcatctcttttagacttcttttttttttggtctgtatcttcatattctaaactatgtgcttattctgctatttcctaattacattactggaattatctattgtgttcctactttgaaagataaggatttagtttcattgccctctgcccttgcaagtacacacatgcacctgtctgcttcatcctcctgtttagttaaatcacagtttttctttgtatcagatttcttgttggcattaggatgactatgtaactatcgttcagagccaagccatgtagtgtactatgatcacctttttttttttatcatttgttttccctagagttaaaaagtggccaggtgcagtgtctcatgcctgtaatcccagcactttgggaggctgaggcaggtggatcacgtgaggtcaggagttcaagaccagcctggccaagatggtgaaaccccatctctactaaaaatacaaaaattagctgggcatggtggcaggtgcctgtaatcccagctacttgggaggctgaggcagagaattgcttgaacccgggaggtgggttcaagcctcccaagctgggaggcgaggttgcagtgagccaaaatcatgccactgtactctagcctggcaacagagcaagactccatctccaaaaaaaaaaaattgcttagttttctgtatacctatccttcattaattttctgtgtactatcactgattcttcccccacaacacaatttgtgttgtcagagcaacacaaattcttgtaacc

SEQ ID NO: 40128 - DNA, 1049 bp, Homo sapiens
actcagctacagagagcaaagcaattagtgaaggcatacgagatgagggcttaagtacaagcatgtccaactttggaaaataaatgagttgcatagaagatatatgtaaaattacttttttcttttccaatctattttaatttatctgatgtaagctacaaaccttgaatgtaagtaggttttggttaaataacttaaatgtctgaagaaaattaaaggtttttgttttaaacgtgcagaaaaggtcccaggggacttaaaaggccctcaccttttattctcttctcagtgtttagagaacttacatcatagtgagcatccatcattttgtggaagttcttgacttttataaatgagcaggttgatatagacttgagttatatagagagagactcaaaatcagaacagctgggtttttaagatgcagcagttcatgaacaatgggaagagcatatatgttgcaatgcacagaatagtagacaaaaaaaagaaattaatcatggctgagggcaactgtatattctgaaatgggtttggtaccaggtctcagatcactttcctattatgtgagtttcaaaattctgaatttaacatgtttctttaaacagactttcagaataatagatattattcagaataatagaaaatatctgcagcttagagactactaataaaacaaatacctatgtacctaccagctagcttaagatatagaacaagagcagtatttattagacataaaatcaattaaaaaaaattttttttgagagggagtctcaccgtgttattaaggctggaggacagtggcatgacctcggctcactgcaaccattgcttcccaggcccaagcaatcctcccacctcagtaggccgagtcgctgggaccacagatgtgtgctaccacgcctggctaattttttgtattttgggtagaaatggggtttcaccacattatcctggctggtcttgaactcctgagctcaagctatctgccctcctcagcctcccaaagtgctggggttacaggtgtgagccaccgtgcctggctg

SEQ ID NO: 40129 - DNA, 1067 bp, Homo sapiens
aaagccagattgcaataatattatccttctagagaggaatttttatctctttggtgattatgtttgagcaactctgccatcatatcatggttatttaattctgttgtatttacaagcagttctccagcctgctgacagttgtcacttagaaaccttactggtggttttcctttcttctgctatactcatcaaatcctgctgccactgtacatcgtaatgttatcccaccagtatatggctaccttataaaaaggatttttgaagaaagaaacactgtctaattgagatttatatgtaccaagccttaagcatcacgtttcatactctataccactgggaaaattatttgttctttgggagtaatttatattcttctaagaaataatttcacataaatattatttgctgtggtgaatcttagcaatcttttaaaattattcttcagttcttacaatgattaccatttgtttacccacattgattcattcatttagtaaacattttagtgcattccgtgtactgtactggacactgtatgggtactttgaaaaggaaaatgaacaaggaatggtctctgctttcagaaagatcaggtccagtagaagaagctgaaaagtagacacttaactttgatacaacgtgagacacaccataatagaagttatatgagcactgatgagggagaaattaatgcttcttggggtgaatcagtactcaagagaaattacataaaatatgtgacatttgagctgggcgaaagttatagttcactatgggagtaaggagagaaaggcatacctaggaacagaatccatgtgagtaagccaagacacctgaagtacttttggggaattacccatgtttcaaacatagagcatatgatagaagtagctagtaatagagccagaaaagcaagtggaggtgtgttgggtcctctacattgaaaaagtagaccagcagtctgttaatccaaaggacctttaacctcaaagtaattaatctttgcttttgaaatacttgtggagttgtttttgttttttttttttcctgtggtgttgttttttgtt

SEQ ID NO: 40130 - DNA, 1013 bp, Homo sapiens
tgaaaacaaatcattataaaagtctaagtagactgtaatcctaacagctaatacaggcactaagttataccaaactttcttttaaaaacagaacaaaacagcccctaatgttagagagctaatgctgctgttactgtacaagtcaaataggagaggggccatagttaccaacaacatggtctggctccagccagttaaactgtgaacctcaaagctgttgtaataaagtagactttttttttttttttttgtcaggggcagttacaccagaagcattttcttggaacaaagtgcatatctgaacaattaaatccagatgtgctaacagatgtctcttgagcaagagcatcataaaaccagatttcacttgagtgaggaaattacttattccatcattttttatttttcacttggagattacatttcactctagactacagtcccagggactgtgattagaaagggtatctgagaaggtagaattggtatatcctatcagtgtgaagtgagtacatgcatttcaaattgatgctacctagttctgagaacatagaatgctaatgaagcgggccgttatttttctctcttggttttcaggcctctttgccacaaatgtctgacaccctgtgaattagctcttctcctttatgattctgcatggatgtatttggcatctgggcaagtccttttcccaagaatttatctattggcagatttctcctctgggcataaatggaacaaaatgaattatatacttttagaaggtttcttgcagatccatatgttatattttgtggccattactcacagtgtctgtcatactgactagataccaactgctgaatcatgcatattagatacatgatgccttcatatggctttggtcttatttatttattattattattgttattgttgttttgggtttttttgaggtggagttttgctcttcttgcccaggctggagtgcagtggcgtgatctcagctcaccgcaacctctgcctcccaggct

SEQ ID NO: 40131 - DNA, 1049 bp, Homo sapiens
gacttgctgtcccctctgttggcagcttttttcttcagatatcttcatggcttatttcctcactcccttcaggcctccacttctattccgttttctcagtaaggccttagtaaggccaaacacccatcttccttctgttttgtttttctgcatagtattgatcaccacataaccaaatatattttactaatttattttgtctttttaatctgttgtctctatctttccccactaaaatgaagctctctagcacctagaactatacctggtacatagtaaatgctcaataaatatacttgtaagattgaaagaatgaactttcacccttccttgtagtttccaaaggaaaggaatctgtccatttaattgagacctaaatgacggaaaggtttatttcctggtagtgttgaaaatgttgccttgttggtagaaacaggagatattttaattagtactttttatttcttcctccactgaactcatgcactgtcccatcactcccatgcctctgccagaattataattatctacttgccatcttagttctgaaaaactatcagctatactctgcaccttgtaccatttctccacttcaacggtttttctgctgcccaggcttatgctgaggatccaaagtatgtgaaagcagttttttgtgtactaaattgccataagctgcaatccagtagtagtctgttccttccttccttcctccctccctccctccctccctccctccctccctccctccctccttcctttcctcctttcctccttccttccttcctttttttttcctgtttggccttactgaatcaagtagtagtattcttcaagctagatcctttctacaaatgttttcaggcttcagtcagtgctgttgatgtgagtgaaaatatcctcgcttcgtatcccaggagatccctgggttttggaaccagtagactttgtttaaattagaattccatcttcaatacttacatagctctatgtgaccttgaaaagatttcttaaaatctgagactgagtctgacatgtcacctttcaac

SEQ ID NO: 40132 - DNA, 1176 bp, Homo sapiens
gaaaaatatgaatgttgcactgaagaattattagtactgattttttttaaaccaaggagttttgaggatcattcagactttctaattagccatgtgtacaggaattttgcctgccctggtttaatttgtctagatttgtatgcagggtttcactttaggactttgcagtacgtgctagaaagactgatcccgctctgcctagctatttagtgtagtatagtgagcattggctttgacgtccaacaaactgggttcaagttcaactatatgaccttaggtaagctacttgtttaagccttaatttccctgtctgtaaaatatggctaaagctcgaccctgcctcataattattgccaggattaggtgaactcataaatgtaaaaatttatatcagtgcctggcatagagttaccactcaataaatgccaagtatcagtgtgactagggtcgttccatgaaacaatgggaaatacgagtggacatgccaaaataaggggagagggagaaaggggcagggcatgccttgtgaaatgaatgtgaaaacacgtgacagaaacaaaagtgaacagctacctcacagtccactggtagagacagactctcaacaaatccttataaaactagttgattagggcaacccatttctccgggacccctctctgcatcagagagctattctctttcttttgcctattaaacttctgctcttaacctcactcttaaaaaaaaaaaaactagttgtttaattatgattacctatgctacatggcagaagtacagggtgcatttaaaggggctacctttctgtggtcaatctcttgtgatggtttacactgactgaatgtgctgtgtcttcagctgcccacatacttctgctagaaagtggcaagtctgcagttatctgagccatgtgagtggagccctcactactcacgtgtcttactttttgttttgctctaatcttttacccttgggttcagtgagaactttcctcagaggaccagtaaggcctctgtctaagggggatagaaattgcattacaaacatttaatatactctttcaactaccgtctaaattatgtgcttctagaaatgagttttctaatttcttttccttttcagcagtacttggcatgatattctatatttagcctctcaataactttatattagcca

SEQ ID NO: 40133 - DNA, 1031 bp, Homo sapiens
attaatcactgcaccttttgatctcctttgaaacacttcctagcatttatttttctattatctccctcaataaaaaggagccacttttgtcctgctgatgcacgacctggtgtggtgtgtatcgctctatttcttaaatatatagaatatacaagtttggatttggaatgtgtcttcaacattcgcccactatttgaaacttatccctttttccaatgtcttcttccaaaaagcagcttgatttatttatatagcggttattgcagttgtagcattttaattccctttatcatcttctctctccatttgggatgataggcagagggacatttgatgttccagttgagatcataagagaatgttgaagagctaagtaactaaggggcattctttacacagaatctatccagttgtcaggctgtcctcaggggggtgttgctgtagctacaccctcaactatatcatagcattttaaaaaaacttgtcatttaaaagtgataaaaccaaatacttaaaaccactctgatgtttactttgctgatccttactggtgattttgttgttttatggaatgctgtagaggagtccactgttaatcacttcctaaccctataaaatatgtaacaagctgctgaacagaatgatgacaacagagaacggagtttcatttgaattcatgcaaatgtggaggtttcccagaaagccattttaaaagtatgagccacattttgaaaataaaacaaagaataacgccttggaatagaaatccataatgaaacccatataatagctgaaagatgacaataaattctacggggagagctttccattttctgttccttttcaaattctaatactaaactctattagtggtctgtataaaataatgagacatgaagccctgctggtataaaactattactagtctgttactttgcataaattttcactcaaactattgtctgtggtcttcttatgaaggatctgttatacgctttctagctaaacagatgagacctattagctatttc

SEQ ID NO: 40134 - DNA, 1025 bp, Homo sapiens
tctctctctctcgctgactctctctctgtctctctcgctctgtcacccaggctggaatgcagtggcgtgatctcagctcactgcagcctcgacctccctggactcaggtgatcctcccacctcagccttcagagtcgctgggattacaggcatgtgccaccatgcccagctaatttttgtattttttgtagagctggggtttccccacattgctcaagcttgtcttgaactcctgaattcaagtgatctgccctcctcggtctcccaaagtgctgggattacaggcatgagctaccacacccagcccaccccctcctaaggtaggtcttcagattataaataaaataatccttcagaatgacaggagataatttatataatggataaccacaagcacataattttgtctagttcttcaaatgtctttataaccaaaagctcaaagatggaatctaccttacacaggactattttaaattgttctttatattgtgtcctttgtgctgttcctgaaaatatgttagaatcctagatttgggtacagattcaagtagttaactctcatgctctcagcagggcccatctcaactctctcttgtaaacataagtgttaagcacagattttagagttaaatggaccgaattcagtcccagcttggtcatttaccaactatctgaccatttcaagttaaaatgagaatagtgctacaagcatacccctttttgttacactttgcagatactgtggtattttgttttgtttttaccaactgaaggttatggcaactccgtgttcaacaagtgttttggccctatttttccagcagcatgtgcttacttgtgtgcctatgtcacattttggtaattctcacaatatttcaaaacttttcattattattatatctattgtagtgatctgtaatcgatgatttttgatgttactattgtaattgttttggaacatcacaaaccacacccatagaagacagaatttaatagataaatgtgtgtattctgactgctcc

SEQ ID NO: 40135 - DNA, 1028 bp, Homo sapiens
atgtaagtttaaaaatcattattttagttgctttattcttctattttaaattcataaataacacaggtggcctgtattttgaaaagagccctttcctccatttgaactttataaacactgaggcagtaggtgtaaatattatctccattttatattgaaggaaatggggccataggaagatgaaaattactttcccaagatcatagaaatagcatgggctaaagctagggctgagcttcagttacctgctcctggtcagtgttccttcctgcacatctccctcctttaaaaacttagggtgcagtcctgaaggggtgctgttgaaccctgaatggagactgtgaaccgagatcccaggagaggcctttggatggaaaggctggcctttgtttctttgtgtattatagattgatttaggctgtttctgtgggcccattttctcatctctaaagtgggacccggttaatcttttttcagttgtatccacaacagagtaaacaataatggagatttaatttattgagaactttgagcctgagggtaaaagctatttgtagtgtagtttttgcccttctgtgttttttggaaaaggaaagttactctttcctttttatttacatgaaagacagcaagcttgaaaaaattaagtattggaagtgaacagatgagccatccttcatcacagaaacccaaggaaatattactttaatgattcttaatacactccataattactcttaatacaccctgttgggccaggtgaaagactcaggatttgtttttcttccttcattgcctcattgctttgtggtttcttctcatttgagaatgagattttttttttaaagaatgtatttattggtgtgtgataataggctaattttttaaagagatgcaatgtcatcagtgtttgactgctaagattaaaataaaccataaattaggacataacatttcctaaagacattttatgttttaatcagtgctaaaataaaatggaaaggataaataactactaaagtagcaat

SEQ ID NO: 40136 - DNA, 1071 bp, Homo sapiens
tgattttatcaatcttaaataaaaataaatgctttataggtttgggatttgcaagtgtgtaatatgctgcaagccagcggaatctgttgtaatacaataaagtttattgtaacataaaccaatttatcaaaaatatggctcatggattactagcctattccataaaattggaccccctatggagtatttcatattaatttattatacctccaccgtgtgtgttattacttagcacttattacatgccaatgatttcttaggctctgaacaaaatcaaaagatggaacttgacccaggccaaaaagttgtttgatactttggcacagtagcaaggtagaagaagaaaagtcctgctttcctatatgccgcctttttggcgcctgtgcccctagtatacttttgagtcctaaactatctcagccccattttaaaatttggagtacatatagaagtgcttatgattgtcatgtcccattcattttaggtactgataaagaaccttgacttttaaggaaaaagcactaataacatcaacatccctgccctctgagaaacctttaagatcggtaatccaaccacctaaaagttgctagaaatacttatttctcttagcctgtgaactctaatagagcacaatttttctttagttgcacatctgtgagcctgattccatatagagcctaacatggaatcatgttttaaaatatgttatttttaacacctgtagtcaaatctcatttatctcttacaattggtttactttctattttatttgtggtgggtttttatacccaaattgaattggtttagccactagttttgcttttatcacttggcttgtacccaaggaacataggtcgtttttcatattattctgagaaaaatgtaatcaaataaatctcttttaaaaattaatagaccattcaaagccaactagtagtggtttgcaagttatttttgatcatccgtgtttctacctttggttaatatcaaaagttgtttgtggcacaatataattcttgagcagaacagtggtcttctggttataatacttataatatcagccatctg

SEQ ID NO: 40137 - DNA, 1053 bp, Homo sapiens
ctggtttcctgttgtaaaaaccttcagtgagtttgaccattgtgctcttggctcttgggctggagtaccgtggtgagggagtaaacactagaagtctttagtacaaaactgctctagggacacctggtgattcctacacaagtgatgtttatatttctcataaagagtcttccctatcccaaggtcttcatgatgccagtagccatatatgataaattatgttcagtgataacttagttatcagaaatcagctcagtggtcttccccgccatgattcacatttgatgagtttttaaaaatcaaagtgattttgaaaatctctaatggctcagaaaataaaaacatccagtttgtggatgactatatttagatttctctagactctagtggaagacctttggaaaggccatgccaaccgtgcttgtactgctagaagcactttatgtttcctttttgggtgaaatggatttatgtgagtgctttaaacaaatagcaatacttatagactgaaataaaatgaaacttcaaataagactatgtttaatttgtaaacctttgtccatcatgttctttctttaaaaaaaaaaaaaaacaactccccttagtgagtactgaaaggatttgaaaaggcttgtaggctcattctgaagagagaacaattgtgattctgtacagcccgtaaagcaggtagtgtctatggataagggagtgtgggaaaggtgggaagaagaaagtgaatacggaataaaggattgtggtagataaagtgcaaacagaagaatatcaaaaggtaaggaacttatgaagaccaatttcacatgttgagtgctagaactgacaaacgggagggctaatacattcacaaattcagtaatttaagctttatttccaaggaaagaagccttctccacttgctgagtaaaacttgccaaaagatagcccttgctcattctttaaattcattcctatatgcattttttttaaatgtacagttggcccttgaacaacataggtttgaactccactggtttatttatacagggatttttttca

SEQ ID NO: 40138 - DNA, 2051 bp, Homo sapiens
gacacttccgatagtgttattccctagccctgggcgtggagagagggctggggagatcattcggccctaccagtttttctcagtttctcacaagcacaaggctcctgcactgcccttgtttactggtaaggacatctgaacaagcgagagggcaggtgccgatgcacacagcagtgagggaggagcaagagcaaaactctgttctctcgcagccattatgcactgccttctggtccaggccagaactaccacctcccacacagcccaagttaaaacagtcacccggccccatcctcacccattctccccagctgtcaccagccgggtttctttctttctttccttttcttttcttttcttttcttttccttttcttttccttccttccttccttcctctctctccctccctccttccttccttctctctttctctctttctctttctctttctctttctctctttctttctttttcctgcattttccatctatgttcctctaggattgatcttggagaaaggaggcagagataagagtcaaaccaattcaacataatggtccccaaataaatttctgaggtcatatttttccatttaagcaaacagctctgacatactagactctcaatctcagttttgaattcctgggagaaagactctcgcagagcttgggttgcctaggatagtatttaaaagggtttgtatgacccaagcatctgggtcttttggttgtgggggtaagccatgctaccagctcccttcagcacctccctattttctttttcttctttaaaataagacaatttctgtaactactgaactggtagtgtggtatcatgaaggtgaggcaaatgcctgatacctaaaagatgcagccagtcccacagtttatttcaggagggctggtatttgcaatgtgtgcaagataacattttagtcattatgaaaagtatgacttttcatacttttctgacaataagaatttttaaaatttaaaactgtaaacaaaataatgtacttcattaaaatgcaaagtaaatctttaattaataaaagtttttaaggccaggtgcagtggtttgtgcttgtaatcccaccactttgggaggcaaggcaggaggattgcttgaggccaggagtttgatagcagcctgggcagtacattgagatcccgcctctacaaaatcaaaaaattagccaggcaaggtggtgcgtgcctgtcgccccagctacttggcaggctgagctcaggaggtcaagcctgccttgggccatgatcatcccatgcactccagcctgacattcagagcaagaccttgtctcaaagaaagaaaaacatttttatggtgttttcttttttagtcttttcaataatgaaaattttcattttacaggtaaaatgaaaggcctggcatttattcaagatcctgatggctactggattgaaattttgaatcctaacaaaatggcaaccttaatgtagtgctgtgagaattctcctttgagatttcagaagaaaggaaacaatgtgattcaagatatttacataccagaagcatctaggactgatggatcactgtcccgattcaaattattcttcagtccatttccccttcctatttcagctgttccttttcacctaactgttcagtcattctggttttcaagcagtgctttatctcatgtccttgaatatagttgtgtaactttattttttaggtaataattagaacagttcccttcagaggctgcatttgccttcttctgccacctaaatattacttcccttcaaatctgcctttgaatcatcatttttaaaaaaaaattaacatgtttttgttgtagttatcttctggggtttcaattcctcagaaacaacttttttcacaacggaaaggaaagaacactagtgttctttcagtaaagtacaaagtgtttattttacaaaagagtaggtactcttgagagcaattcaaatcatgctgacaaggatactgatagaaaaagtgatttcttcttattataaagtacatttaaagttcaaggactaa

SEQ ID NO: 40139 - DNA, 1710 bp, Homo sapiens
aattcttgaggactcttgatattccagttgttttccagaaagattgtaagataaggatatgatagactatgggatagaatagttaaggttgtctaactttggcaagtacttggcatggcatctacaacaaaaaatacatgctgtgcctaagatatatggatttgagtatagcctgtatagtgtgaacagaagtaatgataaagtcgttggtaaagtaccaatactaatgttggtactagaaagatgttgaagaaacaaaacataaacagggtcactacaaagcagattttaaaagatagtttttagattttatccttttttaaaaaaactgagcaacaaataatgttgggtgcagcttggttggaaatatattatctcataattccataggctagaggtccgacttgggtctgtcccactgtattgacaggactgtgttccttactcagaggctctggggaagaatctgcatctaaatccatttagattgttccctgaattcagtttctttccactgtcggacaggggtcccagcttccttgctggctgtcaggcgtggatgggtatggtggggtgggagcagagggcagctgcctttaactcctggcacatgtgccccatgtctcagagccagcacctgcaggttggccccttctcacacttggaatctgtcccacttccctttatgccacactcctcttctactttctttgcgcgcgcacgctcgctctctctctctcctgcttttaaggtcttgtgtgattacattgaatccacctcagtaatccaggctaatcccattttaaagtccactgatgagtgaccttaatttcctctcagagtctctcacagcagcacctaggttagtgtttgagagaataaggaaggacatctttagaatttagtccttgcttgcacctccctccagggactgcagtgctccctcctgagactgagaaccagtgctgggaggacagatctcccccatgaggcctgccagctaaagtctgtgtgattgtgtgtggtcgggcctgacagatcatacataagactttgtcctgcaggtggcttcctcaagcaaacattgtaatcaatagagaagcagctaccactcatattagctgggaaagaaggatgtttgttattttggtagtgttcatagtgccttgttttaatgtatacttagaccggaatatgaagtggacatggtcttgctgctttaaattttttttttttattttggtatcacatcatggcagccacagagtgactttatatatgttcaacaggagaaaaccaaggcccagctgtgagtaccaggccagcacttggatgtgcagagctacttttctctttctcagctgcttgataaaatcgagacctttaggactgtagcatctgactgagaaaagcaacccaaatgttctagaaacatgtaacctgcctggcatgtgattataagctgcgaataaagaatttaattattatatttattaagatcagttttaataagataaagtagtttttaggctagttttgttttaaatgagaattttaatgcctaaaagagtatgtttcatttacttaaaatttagcaaaagagaaaaatataatttcctaatgaggctgaatgaactatatttgtattttatatgatgtgagttatataggagaaagatggcatgtggctccaaagtaagtggtcagaat

SEQ ID NO: 40140 - DNA, 1035 bp, Homo sapiens
ctgaaaggtggtgagaagaaggtagactggctagggaccttgagaccctaggaacaacaaggcaatgagtttcctaagttttctttttgcctcatattgcccagacttgaagctgaagaagctagtaacctggaaatgctgatggacacagaccaaaaaaaagcctaatgaaagcctgctctctagccacaggacctggaaatgggcagcatttcctggcaagaaagaaaacttttagacaataactgctctactccaactaaactccatagagaaaactgtggcctcagtcccacccatgccagcaaaagctgagtggggagcctagattttcacccaaccagatgtaatgagctgcccagccttcccctgccaaggtgatgtgggggaaggctgggtagggagccaggactttcatcctgccaggctttcccctcttgccatatcaatggagacacatgaggaacctaaaattccaccccaacccagcagtggaaatatttaagataattataagcgggagaaggtacaggaatgtaaagagaggtgaggtttctgtaccttgttcaaactaataaaatgatgtcaccaaatgactgataagttatgtgtgtgtgtgtatacatatacatgggtatatgtatatacatatatacatgtatgtctgtatatatgtgtatgcgtatatgtatatatatgccatatgtatatacatatatagtaacacctagagccaccatttaaaaagctatacaaagagatacatgcaaaaacactacagataaatgaaaattgaattttaaaaagttccagtgacccagagaaaggcaaaaagaagacagaaaacattaaaaaaggaagaacaaacagaaaacaaacatgaataaaatggccaacttaagccctaacatttcagtacttacattagatacaaatacattaagagacaatgattgatagaatggattaaaaaacatgccccagctgtatgctgtctacatgaaactcacttccaatatgatagagacaaggtaa

SEQ ID NO: 40141 - DNA, 1874 bp, Homo sapiens
atgagggtctcgtttgtaaagaagacagcagcaatggcacaaagtcgacttgttttttgatcatttgcatcttcattataaaggaagtccagagaatgtatggctatgtcacattttgggcaatctctctgggctaactttctttaaaaggtcagattctcctggcaacagagagagactccgtctcaaaaaaaaaaaaaaaaaaaaggtcaggttctccttccaagtagtgatctggagatcttttcttttttactatctgtatctgtctccactaatacagtagacaatgtcctcagtgttgccattatttctaccaccactgccaatgtccattttcacatcgttccatatataaatatatgaatatataaaaatataaaaaattaatatatattaatatataaatatatctataaatatatgaatatatatatatatgatggggtccctctccaatcaggtagattggtggaattgaatgcagtagaaaggagaatagggaatggaaaggaggaaggaagaaggacaatggccagataaatggctgactattcaaggcatagagaatcataatatatataaaggcataatgacatcagagaactgaggcagggacctacgggtaacacagtgaatgaagttataagcagtgggacttgagggaagggtgaccaaaacaatcattagggtactcaaagaaaagatgagaattcccattatattcatttgtttttctcaccctgtaatggttgctatttaagtgataagggtatgaaatagaaaatgtttgagatgaccggtttaggggagtggtgataaccgttggtgttagagaagtatgcagctacatatgtggttgcttttgggactgtctctcaaatgtgttgaggaaccactgaagtattgatttttaagccaaaaatgacatgacagggttttctttatggaaagatcactccaaattgcatgtagataagcctatgaaaagcaaagagataattgtctaggcaggaagtagtgaggacttcttgctttcctcaagatacactgaaggcagttgaaaagctcatttttaaaagtctggtgaaaaccactttgttcacttttgttttgtgggagatgtgacacctagtaataaagagttaacaaaccctttccccttttatgaaaatttgacttttcgttaactccctagtttcccagaaaacaatgaaaaattgtgtttgttgcttatggtaaaaataacccaattggtaaattgcatctggagagggagaattgtaaatacttgaaaggaagccatagctttggacttccctgattgtagtgactcttataactgtcccttgtggaaattctagaagttctgcctatggagttgctactagagatactggctcctgtggtacatggggccttctgccctagggtgattctcattcatatccagtgtgaatcttctccctgtacctgatctgtgtcgactcctgtaaggactcccactgaagaggaacacctgatacttctttgttggcaatctgtgttttcctaacagataccgttttgagtaaactggcaccatgtatggcctatggctatggttgtcttataagtctggatgtttagttgagccttaagaagactttctgggccaggcccggtggctcacgtctgtaatcccagcactttgggagaccaaggtgggtggatcatgaggtcaggagttcgagaccagcctaaccaacatggtgaaaccctgtgtctactaaaaatacaaaaaaattagccagacatggtggcgcgtgcctgtaatcccagctactcagggggctgaggcaggagaatagcctgggaggcagaggttgcagtga

SEQ ID NO: 40142 - DNA, 1033 bp, Homo sapiens
gctttctatctatacatttgtcttttccggatgtttcatgtaaatggaattatacagtatggtaaacacattttttgtctattaatttttatattcaactaggttcaacatgtagccgtagccaaatattttaaattttccttctggaagtttgaaaatatttatcttttttgatacttacttctccttctgctttctctttttcatactgaaacagtcttttaaatgattgcattcattgattaattccttatttttcccttctagcagaagaccttccttttcactctcaagacagcatccttggatattaattaccttttgttcattatcccctttcttatgagcaccatctagttgttgaagcaacagattttcatgttgtagttgagatattctctcctctacgtagtcccactttccaaaggatttacttggcttaggtccttttgtacactttataaaaccaaaaccttttctctgagagaatttcttgtgtcatggagtttactttttagggtattgaattcgagcttcggaaagttgctcagttaaaaactcattattatcttttagttcagaaatatcagaactcattttctttcttgtaaagaaacgtcttgtgctctctgtaaagcaagttctaggtctctttttgttttcacactttgatcacactcacttatagcagcagccagtctagcatggaatgactcaacttcagcttccagtctttccttgttttgattttccttctccagtttagacttgagcattgtattctcagttttgaggtcgttaagctgttgaccatactgggatactgtttttgttaatgtttttccattcagttttatagtctcttgaaggtcatcattcatttctttaacaatttcaatgtcctttttccctttcgaggttcctattttttattgtgtatacttacatacacaataaaggcaatatctctcttcaacaagcaattttcatgcatcagatctttttttttcttaaagtatttcttcaagccttc

SEQ ID NO: 40143 - DNA, 1045 bp, Homo sapiens
cttgtgacatgggaaacagacactgctactctgtcctgatggctttggtccctgcatcatccttccaacattgactgttctctggaacctaccagagctgatctaactagaatatataatgcctcctctgttcccattcaagaggaaagtttgcccccaggtcaatgttctgttgagcctccccttgagagaagggagtctggattccctcaccagattccctctcaggggctccctccatcattgctccccgtgctacacaggaactctggacaaggctgtggacctctccagtctagatctggaactgttctgtgccagcacatgggtgcccatggtaggggatggggagcagggccccttcagcctggggttacctggcctgaggccatccaaggcagcctcagaataatacctggggccagggcacagaaggaatcatgtgaaggggagataagaggagccccttaaggtaagcgtggggagacacctggtccagccacacacagccccccatcccaggacccagcccaaggctctaaaccaagcaccaaatggtttaaatatcaccacctcctccactcagccccattctcaccagtccctgtctcccggcctcctgtgtggctagttccccaggtcaataatttagccggtttattgcccgctcccgggtaacttccagggcctggctccctgatcgcttgcggctgcgcttgagcttgcataagtccttgtcgaagacctccccagagcgcagggccgacaccaggtcatcgaactctcctccctcctccagcgagctgcctgcagccaggaccttccgctgccgctgccaccgctcacgttccctctgctccttcagctgcgggcggggggccaaagataggaaccctctcagggagaggcgctgaggccagggcagccccccaaccctgggctaactcctaggccatggtcatgctgcctgcctgtatctgttggccccactttcttcctgcctaggacatacaggcccccagcttcacaccactctcttccctca

SEQ ID NO: 40144 - DNA, 1053 bp, Homo sapiens
atcttttgtcaggtggtggccaggggtgttcaaagctcattgcttgcattaccagctattagagagatcagagagggcaattaattagaggctcctggttctcacatcccaaacacacacagttctggcctgctgggctctctaacttggatgtctttgagtcctcagtggtgccccctgcctgcctcccctctgccctatgccaaggtgtgctggcaaatattaaacaaccagctctctggaaaagacaatttgtgatataaatactcccatgttgaataatttcaagctaccagtatgtcaaatggcttgcaaaatttctgaaaatgtaaacaattggttctcacagagctggtacaagctggctccagcacactctcagcccaccccagatcccctcataggaagaaggcacaagtttaaaggcagactgggtagggatggtatgaatttaatattttttagtattacaatatattcttataaaaaaggtgcaagtgaaaaaggacactgtagattatgtccattagcctcatttgtcatctgaggcagctggtgagaacagccttggcgtgaaggcatccctggtagaagtcgggggagatagatagtcacagttccccagttggtggaaatgggatgggagtagggagaggctggaacagacccttccccattcacctggagaattttctcctcccactgccctaaacactttatttccatcacaggggagaaatgctgctgagaaggttgtgtttgttaggttgatgacgaattttacattggccacaaaattagctagagaaacttatctaaaggtggcaggagcagtggggagggcatgaagaaagcaagaccaagaaacaacctattaaggaccagctcagccaccccgactgggcaccagccccttcttactcagttgagtatgagtccatggtccaaggcactgttggagatctggctacagtggcatctagcaccagagccactggccagatgtagaaaataaatagaaaaatatctttcttttagagtgagaaggctgag

SEQ ID NO: 40145 - DNA, 1060 bp, Homo sapiens
ttctgcatctcttgtgagttctcaggtggtgctggtgctgctggtgctgctggtccataagccaaccaccctttgagtaacaagagcctgcaccattccctaggccctctgcaccatctgaattagcccgtcagtttgtatgtgcttctcatgtgcttcaggggacttgaaaaacatttaagtagatcacaaattccccttattatcttgtctgtaaactaagtggttatattaactcttcatggagaatgtgaagataaaaataggtgtaattggtaatttagagtgagacctagctctagttttaagaaaatgaagggacattcagaggtcatgtgatccaggcctcaacttggtgctgcttgagagaacttgggaattgagaaggttttcatgtggagggaaccctgtgccacggtggcacagcagtttctaggagggctgttaccctgtacatcactgggtgagaagggctgtgaacttggactctgggtgccatctatctgtggatcttctactttgtcttgtcccactatgctttttgttcttcattcctctttccccggtatgaaagagaacttgaggtgggatagggagagggttggggagtagaggtgggaaaaagaattgccttttggacttagtgtttcttctcttttcttcttgccttgcagagttatttttgatgttccccaattccccaccagccaatccaagcattttctcctgggacccgctccatgttcagggtctaagacccagaatgagtttctccagccaggtggccactttatggaaaggatgcagggtcccccagacccctcctctagcccagcagcggctggggtctggctcctttcagagacactacacttcccgtgcagactcagatgccaactcaaagtgccttagcccaggttcctgggcttctgctgccccctcaggaccccagctaacctcagaacaactaactcatgtggactcggaaggacgggcagctatggtagatgtgggcaggaagccagacacagagcgggtggctgtggcttcagccgtggtc

SEQ ID NO: 40146 - DNA, 1058 bp, Homo sapiens
cctcgcaggaggtgtccaggcggaggcagttcctgcgggagcatgcggcccccttctccgccttcctcacagacagcttcggccggcagcacagctacctgcggatctccctcacagagaagtgcaacctcagatgtgagtcaccttcctgggccctctctgggctggtgtccatctgctgaagcagcccttgaaatttccctgtgcctggaaatcctcctgtgtcctccagttctgctttctaacttcttcacctgctaccccttgcttaccaggccaggtgggcttcaggggcaagataggggtcaaggctgagttgtatgattatagaagctgtgtcctacttggaattagatttgaaaacataaatgcagttggatttagaattaagattggatcctggacctctcattcttcaggggtccttcctcctgtttccctgtagttcccgaagtccaggacatggccaggggtggggtggtggacattataaacatttgaagtagacagccatgcccatgccagcactgctgactctggaggtgccccagtcccgtgacaaatcagctggggctaggctaataacaaagaggcctcatttcataatcctcccaaagagtgctctggatctgtagccactgctggagggacttccaaaggtgatcttccttcccctctgttccttccttctgcctctccccactttccccttccccccttcccccccttcttttcctccccactttctttcactatacctcacgataagaaataaagttacttcatggcccaataaatgcatgcatgtatgtttagtaactttttaaccaaacaagatgtactatatgctttacattctggtagtcttacttattctcttcagtctcaaaggactggttctggacccaactgagtaatttgccttcatgactctctaacagatcttgacccaaaccttaatgaaactgcaccacaggaagtgatggtggaggatggtggcccttccacagcctgccgctgctcacctcatttaccccattctgatacctcaccatgaa

SEQ ID NO: 40147 - DNA, 1047 bp, Homo sapiens
ataagattttattgcattgaaaattcacattctttgtacagaaagaatattaagttaaacaattgtgcatattgtttgtattcttccagggtgaaagttataaattaattggattcatgggcctgtacaagagggaaaaacacacttaaaaaggccttaagtgcttttttcttctttccggctttcaagatgttgaagcgaggacgtggtgggtcctctggtgtgaaattccagatttccttgggtcttctggtaggagtgtgatcagttgtgctgacaacacaggagccaaaaacctgtatgtcatctccgtgaaaggggatcaagggatggctgaacagacttcccactgctggtgtgggtgacacggtgatggccacagtcaagaaaggcaaaccagagctcagaaaaaaggtacatccagcagtggttattcgacaacgaaagtcataccgcagaaaagatggcgtgtttctttattttgaagataatgcaggggtcacagtgaacaataaaggcgagatgaaaggttctgccattacaggaccagtagcaaaggagtgtgcagacttgtggccctggattgcgtccagtgctggcagcattgcatgattctccagtatatttgtaaaaaataaaaaaaaaaaaactttaagcccattaaaaagtcttaaggtggggcacttcaaaggcaggggcctatggatttgccagtgacctttaaaatgtgactgtgttgctgagagttcaatgattattgatgtatattccctttctcctcagtctacttaactacacattaatattgtttcttcccttgtaggctctctttatctttacctctgtgacacagacatctaactgcctatccagtatccaatattccttcataactacaattcccagtcccccaaaaagccaacaacaataatataccacctacctatccccacctctcttattcaggatggccatctgactaacttctaaccatgagtaaaaaatggtgggcagagctttcaggaaaccctaaaagggtctggctca

SEQ ID NO: 40148 - DNA, 1035 bp, Homo sapiens
tggaatccgcaaaaggtgggccatgtgctggactcatggagacctcgcctcgggtgagtgaggaggcactgtctctacagtgagcttccagctgccccatcccaaaggcttagaggcctgcacaaaacgaagtctttgcattgtggcagagaggctgtaaggcacacagatggggatgggggagccagacttggggaaagggagacccgaggaggcatctggcctcgagtgttgattatgatcctggttattattatgtctctaattcttaaggagctcactgtctgaagtgatgtggattagacaaaatcaaaggatgccttgagctggatttgtgtcttggtagatgaaagcattggtggccatggcctcaggaattctgtgagtgggtcaaacttggggtcactcagacaggggaacaggagttcaagaaatcagccatccagaaggtggccaagagcatcagtaggagtgtgtgcgtgtgtgtgtgtgtgtgtgtgtgtgtgtgtgtgtgtctatgtaggtaagagagagagaaacaaagagagagagagagagagagagagagagagacctggttctaattcactctccacactgactagccatatgcccttgtggccatttaccttacctcccctctaataactttccatcctcaggacaagcagtgtagcatccccagaatgactaatggcaaagtcttctgcagaatcagggtgcaggtgagctccttctgtgagtgactgcactggggctctctccccttccctttcctctgtcctttcagaagtgcaggtggggcttcatgccccttatcctcactgctctgtgccctcagcacagcctcacatcacattatccttctgagcagaagggcccctgctgtagggcaagaggggcctgtcagggtgtcagagccccagaaaagggcctgtgttcagtcggggctgggtccctgctgctagacaggaaagctggctacccagtctgggccaaggtgtaggaggggctgtgggagggcctctgatttcc

SEQ ID NO: 40149 - DNA, 1050 bp, Homo sapiens
ccccaggaagccttctagggcccttaggtctgcattagacaggtgcccctcctctgtggtccttaggcagcgtgtacttccccaagcccagtagttcattgcgtagtcatggttcctccttccgtctgcccaatctctacctgaccctaaccaccatccacaggaagccttctgtgattgctatagctcagccttgcccacaactccatctcattcatgatctgtacccctcatctgcctcttatcatgtgttgatttttaaatgatccttctctatcactttccatacgcccaagttggactgtcattttccagagaacagattctatgctctctaatctcaactccattcattcagtcattcattcggcacatacttctagaatacctgctatgagccagacactggggccgtggggctgaataagactgatggttttctgcttagggactccttgactcctggtcatcatggtggagggggagatgcctagggttccctgaggcctgagcaaggaagcctgagcctggggtgggcctcccaggcctgctgtattctacccgcctctccagccctctggagcttgttgtcatgagaattctcccttccttcctgactctcccaccagggataggtgtggattaagcggggctcctgtttttctagtatctaaaaaggctgtgcctcccttgcttttatgtcagcttttccatgctgagtaagtttctatcaaactctagagctcaggcaccttctgtggaagcccaagaagagagtaaccagtgaatctctttgctccctagtaccccatgtactgacaagatccacagcagccagcccctgtggagggaagggcactgtgtcagtgtggcctgcttgtttgcccagtaggccagcccctctggcaggtcccggcagccatagaaacagtgctcatggggaagttctaggagacatggattctattcccagatcagtccccaaccggccattgcctttctctgtggagacttcagtttctccatctactaaataagggtcactgcaaa

SEQ ID NO: 40150 - DNA, 1022 bp, Homo sapiens
catgctgggctgccctgccatgctgctgcgctgcaatgccaggctgatatttactgtatattggtttttaaattacagtacaacattgattcgctgctctttcagttcagccctcactctctgtccctgttctgctcggcctttctctgcctctctgtctctctctccatctgtcttgtctctctccaattcagtttttaatgcagagtattatcttacattgtatcatgttaccctatggaattaggcttatgctgctttgtatttattggaggatgcattatattaatcccttccatgcatacagcactttatacattttaaagctctacctgcagccatacctgtcttctttggaccccatgacagtgaggaagtagggcaagcagacttgtctccatttaaacgcgaggaaactgtagctcaggaaggctaatggaatgaccaggtcatgcttgcattatattatattataacataataataatggccactgggtattgaatgcttgctgtgagccctgtgctattctaaaataagctttatgtacttattttatgcccacattcattctgtgcagtaggtattattacttcattttacaggtgaaggaatgaagattcagagtgggttagtagcttgcccaaagtcacacagctattacagtaaaattcaactttggattagctggattcaaaccccagcagccagctcctgagccccctctctcaaccaggatgcatgctgtcacgtgctgtgatccctgagttggattgggggtgggagagtggggatggggtgggatggcttcatggtactacaagaggcattcttgtcctcacatgacttctgtttctttatgttttcactgcacccaggggaaaggcctggggaccttgcaacagcaggaaatgtccccagggcaaggggccaagttcctttaccccaatatccacagatggttagggccccaatatccaccattttggcccccaagcaagggcagaagggcaggcgcagag

SEQ ID NO: 40151 - DNA, 1049 bp, Homo sapiens
aatgatttgatgagttggtaaaaatgaaaatatctataatggtgactggcacacaatagttactcaataaacattagcaatttttttcctgttcctcaacagtttctaactttggatagtttgtttgctgcgtagtttctgtctctcttctccactaaaatgtaagctctgcagcacaaggacgtgcctgtcttgtttaccgctgtgtttcccaggctgggcacacagtgtgctacagatatttgtgaaatgaatgagtggaagtgcaaaagcacgtttttaaaggatgggaaggaactctgacaatgtgagaatgctcacattggatcagccccaagggggacccggagctgtgccaagaaccctattaggggtcaagagagttggcctctggtcctagctctgccgctcaactgctgagccacctccgggcaatttgttggccttctctggccctctttgtgtttcctccagagcgtgggagccctaagactccagggcttccctcttagaggctgacctccaaggagctctggccagctgggaagtgtgggatttcgggataattcagggactaaatgaagagaaaggagaagtgggagaggataaagaccgggaaggaagaaaagtcaacgcgtggctgcggcgctgggcagctacgggtgggggtagattgggggaaggccgcgctgggccaaagcacggagctgctgtgcgctcccccaagcatgtctccgccgcggctgatgcgcccgagcctccgcctgcccctcccttccttgagcgcctcgccagttcccgccgtcactgactttctgacttcttaacttgtcagcaaatcccagagttaaaaatgcacacgcaccccggccagccgccagcagggccgtctggccgaggctccagatgtggggccaccgcgcgggccgcccgccccgccgcgcagactaaacaatcggccttggccgtgagcgcagcgcaattccagatgccgcgtccctcgcgccgcgcgctaattgggccgcgggcgcgaggctctgtcagcgcca

SEQ ID NO: 40152 - DNA, 1084 bp, Homo sapiens
aaaaaaaaaaaaaaaaaaaaaaaggaaaatacagaaaagcataaaaaaggaaataaagatcagccataatcttcccacccagagataaccatggtacgactttagtgtatctcctagttttttttaagctgactctcaaacacacatttacacacactcacatggacacacacattcacacacacatattcacaaatatacactcacacgcactcacacatttacatacacatatatgtaactttttgttacatgtttaatgtacacatgtctttaaaagttcagaaacaagatcatggaatcatgaatacatcaccattttgtcaactaatatttttattaaataaaatattgataactttttccccaggtcatgacatattcttctccaacataatttaaaatgactgtatagtgctctgtctttgggcataaggcatatcattttatcagtcatcacctgttggtcatccatccatttctagatttttgccattataaataatactgaggtgaacatccttgcagagaaatcttcgagggggtcgctaactttccaattgtctattcatgtctgtctactcccggcttcgattttgaggctttctaggcaggatctgtgtctggtttgttgtgaccccaaagtctagcttggctgctggttcactgtaggcatccaataatggttgaattgagttgcttttctagagcatgtgccctcggctgaggaattgggaaggtggatagatgaggaaagagcccacctttcctgctagaacactcaggggtccccagtgcctctatgctggacctgctaacttctcctaggaaaacaccttcccaagcacagagccactggccatcccagaggctcactgaatggccctcctgtatctcttatcttccttgcctggaccctcccccctcatccccttcccccctccgcccccgatctctgactcttgagttcttttgttgtgttttcaagctgaaggcccagcagacagagccctctcacctgcccgtgtctgctggacaatgttgcggcagctcccagctccccatacagtggcctcctccgtgg

SEQ ID NO: 40153 - DNA, 1048 bp, Homo sapiens
ttaactcctagactcaagtgatccacctgtctgagcctcctgagtagctgggactataggtaccactgtacctgggctagagtcatagcagttttgaagattatctctgatactgtttgtatggcttgtcagcactttcttaggtggtgtagacaattaactattttaagaaggaagagcacttagaaacagtaatctatttttattgtttcctgttatctcggtgttaaaattaaaaaaaaaaaaaaaaagactaagaacagaaacaggccagatgtggtggcttacgcctgtaatcccagcactttgggaggctaaggcaggtggatcacctgaggtcaggagttcaagaccagcctgatcaatatggtgaaaccccatctctactaaaaatacaaaaattagccggacatggtggcgcatgcctgtaatcccagctactcgggaggctgaaacaggagaattgcttgaaaccgggaggcagaggttgcagtgagctgagatcacgccactgtactccagcctgggcgacagagcaagagtctgtctgaaaacaacaacaacaaaacagaaacagtaatctctttttagtatttccctcttgaattgctctggagtagattagattattatggactattctatctgctgtgaccatagatagtgaggctattttagaaggctaaaatataaaaaacagaagttggctgggcgcagtggctcacgcctgtactcccagcactttgggaggccaaggtgggctgatcacaaggtcaggagttcgagaccaacctgaccaacacagtgaaacccccatctctactaaaaatacaaaaattagatgggtgtggtggtgtgtgcctgtaatcccagctactcaggaggctgaagcaggagaatcacttgaacccgggaggcggaggttgcagtgagccaagatcgcactattgcactccagcctggcaacagagcgagactccgtctcaaaaataaattaaataaataaataaataaataaatacagaagttaacatttactagtatgtat

SEQ ID NO: 40154 - DNA, 1082 bp, Homo sapiens
ttattccctaccctcattcaaataggaatgttatgacctccgtaacctagagctactgttcttgattcagttttggattgttttctatcctgttccccacccccactgaaacgttgtgttgtgggatttggggaggattagcacggcagtctggcatagtttagagcccaggaagctggtcttcactgctccctcccatcatcagaatacagagctttcagtcattgcctttagaacccagcagtgcttcttttgctgggcaaattgtgtgaaagatgggagggcagcactgttgctagtgagttaggaggatacttttgtatgatgcttgtatctatccaagggaaggatgggctctactgttgtgttagctttttcaaaatgcagcagagaatggccaaaaggtaatttatagcttggctttagcattttgtcacattggtgtcctgctctttcctgcctcctgctctttctttcagtctctgacatgggaaagaagatgtgtaggatatgtcatatgctcacttggatggaccatgtgggtgcattaaaatagcaagaactttgactttgaaataaagtctttaaggatcaatttgttttgtagatatacattgtagttgaaaatgaaaggaagagtagataggggtttactgatttatcaactttttttgagatagagtctcactctgttgcccaggctggagtgcagtggtgcgatcttgactcactgcaacctctgtctcccaggttcaagtgattctcctgtctcagcccctagagtagctaggactacaggcatgcaccaccacgcccgactaattttttgtattgttaggtggagatggggtttcgccatgttggccaggttggtctcaaactcctgacctcaggtgatctgcccgcctcggcctcccaaagtgttgggattacaggcgtgagccaccacggctggctttgatttatcagttttgagcccagacctttctagaatgccaggtaatttatggtacttatttttgcagttatggatattaacttatcaggacaataaggtcaaagtccctgttagagctaattag

SEQ ID NO: 40155 - DNA, 1032 bp, Homo sapiens
gttcttttttttttttttgtgcttacctagttctcctgtttacaggtgtgtaacttgagccactactatagctaatgtctgtttcttttacttgtccttatatttaaatgtaagtctttatctgccttagctatgtgttgggtgttgaaattgttgatcttattttgggagactcccatcccctccccccactaccaccccgcaagtagtttcaagacagtgcacctaggagactgcttaacctaagccttttgtagcttaggtgctgttctgtttcccaatggaccactaccaagtcagtctggtttatttcccaagccttacaatctgctgaacttcttcagttccggcagcgatcctctaacttgtgggggatttccataaaacagctgaatctctcttgggtcatctgtggcaaaagccagacacgtgctcacccgcctgggagccaatagtaacttttgcaaacgctgcctccggaaaccccacggtttgagggctgctgctttaggaacaacacagaaataacgtcttttaacagaataaaacaaaacatacggacgggatagtgagaaagcctttgtccttcgcagtggggagaggtgttaaaggtgaaccgaaaagagtatgggaaactcatgtaaaatacctttacagttccccgggaagaagggggcggagatgggctcgggagcgtctctggccctttaaggaggagggacagacataagagtctgtacctttaagagtctctttgtctggaaaccttcttatttaccctcctgtgcttcaaccaaacttcgaccagctattcacaacgtccccctacgccgccgccccttacgccaggctcaaagcggccgcgcgtttgtggctgaccctaaactttgcgcctgcggcgcgaaccctcggaacgggtgccggtgccggggtcgcggcccagcgctgcgccgttggcgcaatgcagggcctgaggggcggggctccagcgggcgggccaatagacgggcagggggcggggccgtgttcggt

SEQ ID NO: 40156 - DNA, 1032 bp, Homo sapiens
ttttgctcttactgcccaggctgaagtgcaatggtgtgatctcggctcactgaaacctccgactcctgggttcaagcgattctcctgcctcagcctcccaagtagctcggattacaggcatgcactaccacacccagctaattttgtatttttaatagagacagggtttctccatgttggtcaaattggtcttgaactcctgacctcaggtaatccgcctacctcccaaagtgctgggattaaaggcgtgagccaccccacccagccaggatcatatgtagtaggagtgagatttaaatttttttcacttttttcctaagtatagaaatgcaacatgtcattgtagaaaataaataacatttttaaagaaaggattttaaatcacccctaaccacccatatagagatgaccaatagtaatatttagagtatttctctctgggtgtaaaacaggggcacaagtcatagctttcatgaaagaagcacaggacgccagatcagtagatagaacacatcagcaccacacttcccccaacacctccccacccatgttttgtattttaatgtggtaggaatcctcttttcaactcaggtagttttgaggggtttgttgttgttgttattgttgagactaagtttcgcttttgtcatccaggctggagtgcagtggcacactctcggctcattgcaacctccacctcctgggttgaagcgattctcctgcctcagcctcccaagtagctgggattacggggatgcgccaccacgcctggctaatttttttttttttttgagatggagtctcgctctgttgcccaggctggaatgcagtggccatctcagttcactgcaagctccgcctcccaggttcatgccatcctcctgcctcagcctcccgagtagctgggactacaggtgcccgccaccgtgcccggctaattttttatatttttggtagagatggggtttcaccatggtagccaggatggtctcgatctcctgacctcgtgatccacccgtctcggcctcccaa

SEQ ID NO: 40157 - DNA, 1024 bp, Homo sapiens
taaagacaagcctggaaagctcccagcttttagagatttggttaaaagcaagaggtgctagcaaagaaaatgagcaatgagtgaggctggagtgaaatcagaggagtgtgggtccttgaaatgtagagtggagaaagaacttagtttggtgaactgtgatgaatctgtggcaggttaggttaaaaaaaaaaaaaaaaaaaaaaaaaaaaaagtagatcattggtgaccacaataaaagccatttctgtggagtgatggggatgaacgtccagttggagtaagttgaggaaagaataagagatttaaaaagaggatgcaaaataggtttgagaatttcccagttatctattgctacctcaaaaaacacttaacacttagtagcttaaaacagtgactctgcagggatagtgtctgctccatgtggtattagctggggtagctcagaagctggggctggagtagctcagaagctggggctggagtcatctgaaggctcattcacccatgtctggtggttgagactggctttcagccagaacccctgcatgtgctctgggcttcctcacaacatggtggctgggttccaagggcaagttctgagaaagagagcctggtggaaacctatcacttttgatgacctagccctggaagtcacattgtgtcatttctgcagttatcttcaacaaggcagccagaaagtttcctccgggttgaagagaaagataatagactcctccctttgatgggaggaatgcgtgaagccagaatgatcgtcctgccattttctgaagatacatctgccacaaggggctttgttgtaaggggagcaaaatttaggacaatagctgggcaggggatgtgggcaggtcagtttacccagtaggcacagtgcctagggcccaatattttaaatttcttttaaaaccaaaataaaggccaagtgtggtggctcatgcctataatcccagcagttgggaggccaaggcaagaggatcacttgaacccaggagttcaagactgggaa

SEQ ID NO: 40158 - DNA, 1033 bp, Homo sapiens
aaagagcctgtgctccagactccaggtggacaggaggcctttgagaattcctcctccattgtcacaggaaggaagcctgaggcacagtaggtgtgttctgtccccatccctttccttgtaatgcttggagaggaaggaagagaggtgacaggtcacaggggaaggaggtcctagaagccgagcagccagggactttgtcagaccacacacccccattccccgtaggacacctggatttccaagaactcagatctccttctaaattctacacacctctctttctttatttttagagtcttcttcaagatcaaaagccgaaatgcacacatgaaaactcacaggcagcaggaggaacaacagaggcaaaaggctcagaaggcggcttttgcagctgagatggcagccacgattgagaggactacggggcccgtgggggcgccggggctgctgcccctggaccagctgagtctgatcaaacccatcaaggatgtggacatcctcgacgacgacgtcgtccagcagttgggaggtgtcatggaagaggctgaagttgtggacaccgatcttctcttggatgatcaagattcagtcttgcttcagggtgacgcagaactataaagccctgtgtgtcacttagagacagtgaaaacccacggcctccatcttcattaatcaggaaacctggactgcctgcttgttttgtaacccttttaaactacctgttttaaaagtggtcattttattcaggtttagaaaaaaaaatcctatttcttttccttttatttaaaaaaatttgtttttgtggggggttgggggaataaataattggcacaactatctttaagaggtgtttcatctgggctaccttctcatgaaatcattcccagtagggactgaagctgaccttcatgttccattgcattcagatgtcaaccatcccggttgccttttatcccaaagcttgctgtgagtgtgtgtgtgtgagacgcaggcgaccctcttagtactggggtcttggggccaacttttccca

SEQ ID NO: 40159 - DNA, 1030 bp, Homo sapiens
acacctgtccatctccaagccctcacccccaccatgccttctgcctgccctgctgttccccagctccaggagggctgactcctttccttcacttagatcttgctccaatggtgcatcctcagaagagtcttctaaaacaactgttctctctcctcttatcttacttggttttcttagcagttacaacctcagcaataacagtaccaactatgttccagacagtgttgttaaagcttttcgtgtgtgaatgcatttgatcctcacgttaaccttataaaagaagaagactgttactctgcagacaaagaaaccaagtcctaagggaggttaatgggatagctcggcactcggagttatctattcagtaaacgtttatggggtcctcattatggactaggctctgtgctaggatctggggatacagaagtcatcatctttgcattccagtcatcagcaaaccaacgttccaagaccagattgggtcaatgactcctctctgagaccccggacaaattgcctacacagatacctgtgctttattttacccatctgtaaaagggaattaaagggacaacccccagctcctcctctgggttggttcttgtgagatatatgggtgaaaccactttgggacatgcacagtggggcacagatgcaggatgtcactgggtatacttattctgggaccagggaacaacaagcacatccccttctcctacctggatgaaggaatggtggagaatcagccactattgacctctatcctggtggtattaagtttatcagattccccccacctcccgcccttacttgtgggcattgtataacatcagaggattcttagatgtctcaaggattctgactagaatctcaaaatcattttttggcctgctgctagaagagatactatgcttctacacctggccagtaggattatggcatttgaggcaacagtcccgtatgattggaagtggttggttatattgtttggaagaggtgaccacccaaaagtcccttgtctgttgatggc

SEQ ID NO: 40160 - DNA, 1048 bp, Homo sapiens
tggaagctggtacccctcatccgcttatctccacctcccttcaacccctcacctgcccctcaacctggccaatgagctgttataacacagcagtaatagtcccactagctttgggaagatcaccaaattcttcccccttcccaatcccttgcctcttacccagaactagttacataatttactgagctcagtgcaaatgaaaatgtgaggcctcttgattaaaaatcattaagactttcaagatggtgacaagagcaccttcagcaagcatggggtcctgtgagaccgcacgggctgcatgttcctaaagccagtgctgcccttgccacttccatcttaggttaccaggaccaaccatggagatgtatataacacaatttgagaggcactgaacattccctcggaaggaatttgagttatttctatcatggcctgtgagattcagggctgctatcctgagccactgtgcgtttggaaaatccgtacaactgggtagggagggtttggacagtgcccatgagtcctggtagaaggggcagagaaggatgatttataaatgttcatactgcccaagcagccccacggatgctgacagcatcatttgttctgtcctttacaaagtattttcatggataaatgaaatgtgttatatccatacaatggaatgttattcatccataaaagcagttggagtactgatacatgctacaacatggatgaaccttgaagacattatgctgagtgaaagaagccagtcacaaaaggccatatggtgtacaatcccatttataggaaatgtccggaatgggcaaatctgtagagatagaaagcagctgtcaggagaagagaggaaaagagagtgactgcgaatgggtacggggtttctttgggatgatgagaatgccctgaaataaagtagtcatagtagtagttgtaccaccttgtgactatcctaaaaatcagtgaattgtacactttaaaaaagagtgaagtttttggtatgctaattaaatttttatttttaggcctggcacagtggctcacgcct

SEQ ID NO: 40161 - DNA, 1218 bp, Homo sapiens
aatcctagcaaatcaggaggctgaggcaggagaatcgcttgaacctgcgagggggaggttgcggtgaaccgagatcacaccattgcactccagcctgggcaacaagaatgaaactccgtttcaaaaaaaaaattggccgggcacagtggctcacgcctgtaatcccaacactttgggaggccgaagcgggcagatcacgaggtcaggagattgagaccattctggctaacgcggtgaaaccccgtctctaataagaatacaaaaaaaaaaatttatctgggtgtggtggcacgcgcctgatatcccagctactcaggaggctgaggcaggagaatggtgtgaactcgggaggcagagcttgcactgagccgagatcgcgccactgcactccagcctgggtgacagagcgagactccatctcaaaaaaataaataaataaattttttaaaaaattaaaaaagacttttcgccatcttttgtctttctgtggagctgtcgccatgaaggtcgagctgtgcagttttagcgggtacaagatctaccccggacacgggaggcgctacgccaggaccgacgggaaggttttccagtttcttaatgcgaaatgcgagttggcgttcctttccaagaggaatcctcggcagataaactggactgtcctctacagaaggaagcacaaaaaggggcagtcggaagaaattcaaaagaaaagaacccgccgagcagtcaaattccagagggccattactggtgcatctcttgctgatataacggccaagaggaatcagaaacctgaagttagaaagactcgacgagaacaagctatcagggctgctaaggaagcaaaaaaggctaagcaagcatctaaaaagactgcaatggctgctgctaaggctggagtgcaatggcacgatctcggctcaccgcaacctctgcctcctgggttcaagcggttctcctgcctcagcctcccaagtggctgggattacaggcatgtgccaccatgcctggctggttttgtatttttagtagaggtgtggtttcttcatgggcaggctggtctcaaactcccgacctcaggtgatctgcctgcctcggcctcccaaagtgctgggattgcaggcgtgcaccaccacgcccagcctgagatttatatatttaagatgtgataaaatagtagtaatcaaaacttacatgtgaagaataggcttctacttc

SEQ ID NO: 40162 - DNA, 1045 bp, Homo sapiens
ggagcccctccaagagcatatcccaaccacgcactttccatctcctagatcccctcagtgtcctggcatgatgtgggtgggctgcaggaggtgaagaaggagatcctggagaccattcagctccccctggagcaccctgagctactgagcctgggcctgagacgctcaggccttctgctccatgggccccctggcaccggcaagacccttctggccaaggcagtagccactgagtgcagccttaccttcctcaggtggccagggggcctggaagggatggtgggtggatcaggggctgcagcaggctggggagcaggaggggctgcccaagaggtcaattgtgtgtatgtgcatctgacggctctcaccttctcacatcctctcactcagcgtgaaggggccagagctcattaacatgtatgtgggccaaagtgaggagaatgtgcgggaaggtgagtgagcagggaggggcagggcgtcccatgcttcccaaaccccgatggcccccaagccaccccctactcccaggctactcatgatcattcctaatcctcctttctacaagtcaggttcctgcccagctgggtctagtacctgggatgccagtgctgtattgtcaggccccagtttccctccctgctctcacctaacttcaaccccccacaagccgagctttgccctcctgtgggcccctctctctcttcagtgtttgccagggccagggctgcagctccatgcattatcttctttgatgaactggactctttggccccaagccgggggcgaagtggagattctggaggagtgatggacaggtaggggtctgagtgggaatgaaagctgaggggtccagggtgggaaggatatgagaaagctcacagcagtcttcagagtccagagatagaagttcctgctgtttcagttctgagataatataatggaagctgaaaggggccatgaaattgggcagggtccactgaggagaatgggggcctacctggtggggcacattgggcacagctgagtggagggccctgttgagact

SEQ ID NO: 40163 - DNA, 1063 bp, Homo sapiens
tgcaacctccgcctcccaggttcaagcgattctcctgtctcagcctcctactactggctcgcgccacgacgcccggctaatttttgtaatttttagtagagacggggtttcaccgtattggtcaggctggtctcgaactcctgacctcaggtgatccacccaaagtgttgggattacaggcgtgagccacctcacccggcctattgatccatattctgtaatcaaaatatcataagcctccataatgtagtggggcatacaaaaggctttcatccattcaggtgaaaggtgaagtttgggtgtggtggtgcatgcctgtaatcccagctacttgggaggctgaggcaggagaattgtttgaacctgggaggtggaggttgcagtgagcccagatcacaccactgcactccagcctggacgacagagcgaaattctgtgtaaaaaaaaaaaaaaaaaaaagtgaggtttcagatgtgtatgttaatctactcaatctaattagtttattgaattgctacaatgtattcagtattgtgctttataatatggaggatgatgtctctgtgcttttgctcattcttatccttgacttcaaattgtttcctattattctagcctcatctgttaaaatcctaccctcctttccctcaagagccatctaaagatgacacctttatcacaaagcctttcatgatctcacagccacgaatttagaacttcctcctatagcattttctatcttttttatggcatttattttattctatcttgttatgattacataatctgtttaatccccaattatatattgtaaataccttgaaggaaaggagtctttattatctttggtgcctggtgtttagttttaatattttattaaatacatccaaggaaagtttttggtttctgcctttacttcaagaagaaagttgtagaacagataatagttgttccatttccatgggttactgagtaaagactcaccagttcgccataacagacataagagtgacaaaaaaataaaccttcattgtgtaaaaaaaaaaaaggccaggcgcagtgg

SEQ ID NO: 40164 - DNA, 1031 bp, Homo sapiens
cccaaatccaggtgagaagctttgatttcaggcacagtccagccttctgtcaccagccaggaaggacatgaacctttctctccctcagggccatccattctagagggcagagagttggcctcatttctgagataacttaggggacagaagttcactaccctgagcccattgtgaggccatcctcacagccgtgactccttatatttctactgctgggttgggaccttggcttgtcaagactaagtagtcagcccccaccaccccaaaaacaaaaccaagcaaagaccacatacagattccatttataggaaatgtcccaaataggcaaatctataaagacagaaagtagatgagtggttgcctagggctgaggagactgaggatgactgctaaggggcataggggtttttttggggggaggtgtcaaaaatgttccaaaattgtaatagttgcacaattctgtaaatttactaaaaaacactgtataccttaaatgggtaaactgtatagttaagtgaactgtatctcaataaaacaaaaacaaaacccaaaaaccaacagctgaagctcagaggtttccagtatctccccttggtccctgttgaaggggaaaagcaacaatttgaaggcttagagtagccaacactgactgccttttaatggacattcacattttataaccacatcatctgagcccatttcccatgcttgggaaactccccgccacaaatctacacaaaagatagggctcacttcctaccctataaaagaccagatcctggttttcccagtgctataaagccatgtgaccaagacttagctaatcagagcaaagcaagaaagtagagaacacattttggtggctatgtgacactttcgtatcaacaccataattctgataggctttatcagccagaatccattatttgactttaaagtaggattgacatatgtgacaacagggaccctgcagcactgggtccctcacttcctcctgtcccagtagctacatccctagggttaaaatcacc

SEQ ID NO: 40165 - DNA, 1051 bp, Homo sapiens
aggcttggcccgggctgcatgcactgcaggcactacatggcggaccgtctcctgggcgtggtctcgagctggctggagggggccgtgctggagcagatcggtccctgcttccccaaccgcctcccccagcagatgttgcagagcctgagcacctctaaggagctgcagcgccagttccacgtctaccagctccagcagctggatcaggaactcctgaagctggaggatacagagaagaaaatacaggtgagtgccttggaagggataagcaaataagagggtagggggaagaggggcgtggagcagactggaggaggccatggcatctgggaaccctgtgctccttcaggtgggccttggggccagtggcaaggagcacaagagcgagaaggaagaggaagctggggcagcagcagtggtggatgtggcggagggagaggaggaagaggaggagaatgaggacctctactatgaaggggcaatgccagaagtgtctgtgcttgtcctgtcccgacactcctggcctgttgcctcaatctgccacacactgaaccccagaacctgcctgccctcctacctgaggggcactttgaacagatactccaacttctacaacaagagtgagcagccaggcagagggactggggactggggagagggtgggctgctaggaaaggacctggggttgggggcagaccctgatgttgggaggcttgatgtaaaaagagatagtctttggctgggcacagtgctcacgcctgtaatcccagcactttgggaggccgaggcaggcagatcacttgaggtcaggagttcaagaccagccttggccaacatggtgaaacctcgtctctgctaaaaatacagaaattagccgggtgtggtggtgtgtgcctgtagtcccagctactcgggaggctgaggcaggagaatcacttcaacccacaggcagatgttgcagtgagccgagatcgtgccactgcactctagcctgggcgacagcgagactccatctcaaaaaaaaaaaaaaaaaaaaaaaagagttggtctt

SEQ ID NO: 40166 - DNA, 1048 bp, Homo sapiens
tgtcgcccaggctggagtgcagttgcgtgatctcggctcactgcaacctcgacctcccgggttcaagtgattctcttgcctcagcctcccgagtagctgggactacaggcacgcgtcaccacacccggctactttttgtatttttagtagagacggtgtttcaccatattggtcaggctggtttcgaactcctgacctcaggtgatctgcccgcctcggcctcccaaagtgctgggattacagacaggagccaccgcccagggcctgcctcccctttttctgtgaagacatcagcactcttttagacctggctgaccccagttctcactattaccctctctcacatttttgttttgttgatacaagggcctctctgtcgcccaggctggagtgcagtggtgcgatcatagctcactgcagcctcggcttcctaaactcatgatcctccagcctcagcctcctattagcaaggactgcaggggcacgacaccatgcctggctcaaaatttttctgtagagattgggagtctcactatgttgcccagtctggtcccgacctcctagcctcaagtgatcctcccgcctcaggcctcccgaagtgctgggactatagatgtgagcccccatgctggcctcatattctctttcaggccattattgtgttctgctcctggctgctgggtttttctttctctttctatttatttagttatttatttggaaacagtcttgttctattacccatgctggagtgcagtggcaaaatctcagctcactgctaacctctgcctcccgggcttgagcaatcctcccacctcagcctcccaagtagctgggactacaggtgtgtgccgccatacctggttaagttttgtattttttatagggacgggattttgccatgttggccaggctggtcttgaactcctgagcccaagtgatctgcctgcctcagcctcccaaagtgttgggattacagacatgagccgctgagtctggctggatttctctaaagcatatttgatgtgctggtctggaatcttgcaga

SEQ ID NO: 40167 - DNA, 1039 bp, Homo sapiens
cttctacttctcctttgaacagcagtgcatcccaagaggagttgcatcaagatgagggtttggtcgctgctcctatagttagcaactctgaaaagcccattgcaaaaactctggtggccctagggaaatggtcagttgtagaacatgtaggcccaaaaagcacaggcagcacctatggcttcctacagcctctgacaaggttgtgccaaagcaggccttatgaaacaattaccccaaagacagacactttggccatatggacctctagttccttccagagtgacactagtagggatatatctccagagaagagtgagcttgacctgggagagccaggaccacctggtgtagaaccacctcctcaactgttagatatacagtgcaaagaatctcagaagttggtagaaatccacctcagagaatctgttaaccaggataaggaaagccaagagctccgtaaatctgaggattgtagagaaagtgagatagagacaaacactgaactaaaagaaagggtaaaggagctgtctgaggggatagttgatgagggagtaagtaccagcattggaccccacagcatagatgattctaatttgaaccatggaaacagatacatgtgggagggagaagtaaaacagcccaacttgctaatgattgacaaagaggctgaacagtccaataaattgatgacaggaagtgaaactccaagtaaagtagtgatcaaattgagtccacaggcttgctctttcacaaaggcaaaattagactcatttttatcagaagctaggtctttactcaacccacaagatacacctgtgaaaatttctgccccagagttgctgcttcattccccagccagatcagctatgtgtttaacaggtagtccacaagagcaaggagtttcagttgttagtgaggaggggctagagaattcagctccagaatcagcttctagaacttctaggtacagaagtctcaaactcaagagagaaagatcaaaagactttcaagttaaaaagatctatgagttggctgtttg

SEQ ID NO: 40168 - DNA, 1070 bp, Homo sapiens
agccacgtgtggaggctcacgcctgtaatcccagcagtttgggaggctgaggcgggcagatcacctgagatcaggagttcgagaccagcctggccaacatgtgaaaccccatctctactaaaaaaatgcaaaaagtcagccagcatggtggtgcacacctgtaatcccagctacttaaggaggttgaggcacaagaatcacttgaaccagggaggtagaggttgcagtcagccgagatcatgccactgcactccagcctgggtgacagagcaagactctgtcttaaacaaaacaggctgggcgcggtggctcatgcctgtaatcccagcactttgggaggccaaggcgggctgatcactaggtcaggagatcaagaccatcctggctaacatggtgaaaccctgtctctactaaaaaatcagaaaaaaaaaaaaaaaaaaattagccgggtgtgatggctggtgcctataggcccagttactcgggagactgaggcaggagaatggcgtgaacctgagaggcggagcttgcagtgagccgagattgcatcactgcattccagcctgggtgacagagcgagactccatctcaaaacaaaacaaaaaaatcccattgatctggactggtgtttctcaaactttaaagtacagacaaatcacctggagatcttgttaaaatgcagattctagttcagatctgcttggggtggagctttgagaagctatatttctaaaaagttcccaggtaatgctaatgctgtttcgtccgcactacactttcagtagcaaagagctagaatttagcttgtgtggagttgtgtaacttccatgatattctgcatgccctaagtctagtcggagaaattacccaagagatctatctagatatgttggtaatattacctcttggttagaggctaaagctgcttgttcccctggggaaagggagaggaaatgttcttggacttcatgattatagtcttttgccctaagcattttatagcccccttgacaaacaccagtctcttagccttgtctgctcttattctttccaagtccatttgttcaatg

SEQ ID NO: 40169 - DNA, 1107 bp, Homo sapiens
cccaaaggagaagaaagtggtcagagagagtctgattagggtcgctgctttccttgtccttccttttctgcactcctgtggaacttggccccctggttttctgcagtggagaagatgaggctgcagatgaaaacccagagtctcaagagatgctggaggagcaactggtgaggatgttaacccgagaagtcatggacctaatcagtaagtggcatgtcgaaactggggctatagaggattttcctggaagaagagctggtcgctcagccaactccatgaaggcctgactaatgcaaaggattcatgtttgcggcgggcatggtggattgcgaggtcaaaagatcaagaccatcctggccaacatggtgaaaccctgtctctactaataatacaaaaattagctgggcgtagtggcgcgcaggcctgtagtcccagctactcaggaggctgaggtaggagaatcgcttgaacccgggaggcggaggctgcagtgagccgaaatcacgccactgcactccagcctggcaaaagagtgaaactccgtctcaaaaaaaaagttcatgtttgtagcaacactgacagatccaaaagaaataactagatagaagcaaggcagtccttaagtcaacctaaggatactttatgaattgcaagctgaatatggggaaacaaaaatagcagaaggaatttggattcattaggaataacttcctagttttgtcaaaatagggaaatgttttaaattcttggacatggaggctgttaattttctttttatttttactgtgtcattttgtttgtttgagattcaaagtagaccagggatgtatcaagcatcctttcctagtcactcactctcagagaattctgtaattttctctcagctagttgaacttgaaggaccaaaacagttcggtcatcagaatgcctctatttctattggtgaagctaattcttgtgccttggacggtacccccatcttcctccttcctcacctggccagagacaggttgggatcagtgggcctgaggtggctgttgtggtagtatatacccacccttcacctagtaaccctgctttcttgctttagcggtttgctgtgtttca

SEQ ID NO: 40170 - DNA, 1048 bp, Homo sapiens
ttaacacttcattctcattcagacccttattaatagttgaatctctttctttcttttctttttttttttttttgagacggagtcttgctctgttgcccaggctggagtgcagtggcgtgatctcggctcactgcaagcttcgcctcccaggttcacaccattctcttgccttagcttctcgagtagctgggactacaggcgctcgcccccatgcccgactaattttttttttttttttttttttttttagtagagacggggtttcaccatgttagccaggatggtctcgctctcttgaccccgtgatccactcgccttggcctcccaaagtgctgggattacaggtgtgagccaccgcagccagcaaatctttcttacctgaaattataaggagaatggtgaaggagagtttgttacaaggatgtcctccttcctatttttttattcctactttttgggccagtgaccataatgtgcagcctgacggaaatgcagctaaactaagagtataatggaattcaatatcagtgccatttaggattttaggaaaagaactttaagattttttcactgttaacacaggatatttttgacatctggcaaatcctttagggattgattctgcccaggggtgcaacccaccacctggcaggtgagagatgtgtgcctatgcactaaaatttcttaacttgttgcagcacgtgtctttgtaaagcctctggtgctcttctgtcccccagagcactatgaagccctggtatcccccatcctcggacctcttttcacctacctccatatggtaagagataagtcaggaacaggaagcaaagagtactattaaggcctctggccatttctgagctttgcaagtcaggagctcctagaagtgttgtctactagccctgccagactggctgggcagagcttctaccccagctgactatccttgctgtaggatcgagcagcccccaaagaactaaactgatttaattgccacaagacagcttcagttgcagattctgctcctaacctcctgttaactgaggag

SEQ ID NO: 40171 - DNA, 1059 bp, Homo sapiens
tggtggtcaaaaaactcctgggaccacctcagatttaaaagaattttgctttctagctttggactctgatactgtcctgtgtcttggggtttagttctcatgttaatttatcttaggtattgtatactaagataattatatctatacaagtctgttccctcctccagcgagcattcagatatttataccttcttttctttcccctgccaggagttgatgggcagatctgtgtgaaactgtagtatcactggattacaagcaaaacccactctttccttctgcatcagatggaaaagctcaatagcattcttgtttctttcagaacccacaatacattatatgcaccagaaatgctagccaaaatggcagagcctttcaccaaggctctggatatgcttgacgcggaaaaatctgctatattaggtaagaaatgtaaccttttttctcctaaggtttatcttatccctaatggatgtccccttttttgttgttttttaagagtcatagtctctgtcacccaggctagagtgcactggtgcaaccatagctcactgtaggctcaaactcttggactcaagcagtcttcctgcctcagcctcccgagtagttggaccacaggcagatcacaacgccagacgaactttaaaatttttttgttgagacagagtcttgctatgttgcccaggctggtcttgaactcttatcatcaagcagtcctcccaccatggcctttaaagcactagaatcctagtgattacaggcgttcttatgggttccttgagcagcttcagcctatcttgtgcttcttccatcttgtcttgcactgccttgaccatctatttgttcagaaatgcagaatgtggagttcctataagctctatatgaacaagtgtatttacttcattatcttagcatacagagaaaatcgaaggcaatttattttttttccccgttaaccccttcttcaatttagccagtaggttgtggtgggtgttacagccattcaattataaataaatcatggcctttaacctgaaggatatttgtatactttcctgc

SEQ ID NO: 40172 - DNA, 1049 bp, Homo sapiens
ttcaagtctagtctgggcaacatagcaagatctcatctctaaaacaaataaacatgagtgaccttttttcctcctctcccttagctattttcatctgtcacttttgaaactgttgaagaaagtaaggtaagaccattaattaaaccaatagattctaacttcttgagtacaaatgtatgaatacctgatactcagtttatatttttatataaatgggagggggtagtaagggtggtagattatcatatatgttgttttgccactatagggcatacaagaaacatggattcttggtggctataaatgttactccattatactcttagggttgtgaaaaatcattgtgaatttgcccctgactgagatattcacatgagtctatgcagcacctgtatattatattaaaagcagctccgagtttgttgaatgtctcttttcaggcccccagaacccgggcagtgaggaatgtgaggaggcatgcttgttcctccatcatcaagatgtgtcgtgactacccccagcttgtgctggtaagctgctggaccctggctgaagtagccaagtttggttacatttgtgtgtaaatccagctttcagtgtacctcacataaagaaaaaactagaaactatagctttgcatcatataagcatccttggccgggcatggtggctcacacctgtaatcccaacactttgggagactgaggtgggtagatcacctgaggccaggggttcgggaccagcctggacaacatggtgaagtccggtctctactaaaagtacaaaaaaattagctgggcatggtggtgcatgcctgtaatcccagctagtcaggaggctgaggcaggagaatcacttgaactcaggaggcggaggttgcagtgagccaagatcacgccattgctccagcctgggcaacgagcgaaactccatctcaaaaataaataaataaacattcttgaattggtgttttcttagtatacttagtagtatagttagaaatgtgatggcaaatgtaatctctcttcaaaatacaaatagttctctgc

SEQ ID NO: 40173 - DNA, 1025 bp, Homo sapiens
cttgtgccttgctatttgagtgctgtgctgtggtaatagttgtaaacttgaaggatggcacccttctctagacatagcccttaaggctgtcatgaggctattggatgtgaagcagtattttgtatattacattgtttccttattgggaagattctttatggtctcaattttaattatttagattctcatggaaaagattataaagggggaggaggggagaaactaattcatgtttatcaagtgcctactaatgggccaggcaatgtttttgatgttcacctgcgtattctcattcattactcaaaatggttttactacaaggctcatagaggtgaattcagaccgctcattgttagaggaggaggaggcatggtaggaaccttcacctacctcattgctttcagcacacatcatcttttctttgccccagctgagaggggttagattaccctgctccttcaatcatgaaattctcaggtgttctctaaggctccattgtctctctgtgtcttctgcgatctttcaatgctgataattgtgtgtgtgtgtgtgtgtgtgtatgtgtgtgtgtgtgttttaaagcttgttctgcagttggaactggagaaggaagcctctgttccgtcttctcaccttcattcgtgcagtgggaagccatgactctttttttggaaagtgttatcacccagatgtttcgaacactaaatagagaagtaagtaattatttcccatgctgactgcatgattattttgacctttttcttttcttttctctttctattttgggacgctatatctctctgttgctcaggctgaaatgcagtggcacaatcatagctctctgtaacctccaactcctgggctcaagcaatcctcctacctcaggctcctgaggatctagaactacagttacttgccaccacacctggctaatttataataaaaatggagtctgtgttgcccaggctgatctcaaactcctggcctcaagcgaccctcctgccttggcctcccaaagtgctgag

SEQ ID NO: 40174 - DNA, 1016 bp, Homo sapiens
tgtcccaggtggtttagtactaaagttataaagatttttgaaacaaaagtctgattaattgtattataaaattaatttcactctgttcaaaattgtccttctaatatcactctgagattccagtatccttttttgcaaagaagagaaagtagtaaaattcagctcacattccaggtaatttccttgatccacagcctgtcttactaacatgtggtccatagtgggtggtcattactgataaattgcagtagagacagcttcaaagtattgtacagatttatttctatgaaaaaatgtagttgataactgctaagtaataatctgggttatatagaatccaaatcctttgacgttttcttttttttttctctttagtttctacgctcttcaactcagatgacttggggagccctcttcaggcatgaaatcctgtcccgtgatcctttgctattagcaataataccaaaatatcttcgtgcttccatgactaacttggtcaaggtatataatgggaatctaaacatgtggaatgtaggtgaatacacataataagactttgaggctgggtgcggtggctcacgcctataatcccagctctatggaaggctgaggcgggaggatcgcttgagcccaggagttggagaccagcctgtgcgacatggcaaaacctcgtctctactaaaaatacaaaaaaattagcagggcatgttggtatgcacctgtagacccagctactggggaggcttaaggtgggaggatcacctgagcttgggaagttgaagctgcattgagctgagatcgcagcactgcactccagcctaggcaatgagagtgagaccctgtctcgggggaaacataaaaaagactgattggcattattaacagcccttcttcatcactaagattcctttactggacatattttcttattccttaggaagaaatcagtccttactggttattataactgctcttccatatgagagtacttaatatatcataagtattgggctagg

SEQ ID NO: 40175 - DNA, 1028 bp, Homo sapiens
ctcaaactcctgacctcaggtggtctacccaccttgctctcccaaagtgctgagattataggtgtgagccaccgagcccagccctaggtgttattcttaattttattttcagaagttctttaggaaaatactaattttttttttttttttggagagggagtctcactctgtcacccatgctggagtgcagtggcacaatctcggctcactgcaacctccgcctcctgggttcaagcgattctcctgcctcagcctcccgggtagctgagattaccggtgcctgccaccatgcccgtctaatttttgtattttagtagagatggtgtttcaccatgttggtcaggctggtcttgaactcctgacctcaaataatccgcctgccttggtcttccaaagtgctgggatggtaggcgtgagccaccgcgcctggcctaattttgtatgcttgtaagttaacattatgtgcctttgtatggatttgaaatataaggataaaaatcaaccatatttgtatattcactgaatagccactattctgatgtatttaacatcatatatatatgtatttttttttgttgtttttttttttttgagacggagtttcacttttgttgcccaggctggagtgcagtagtgcaatcttggttcactgcaacctctgcctcccgggttcgagtgattcttctgcctcagcttcccaagtagctgggattacaggcatgcgccagcacaccggctaatttttgtaattttagtagagatggggtttcaccatgttggccagactggtctcaaactcctgacctcaggtgatccacctgccttggcctcccagactgctgggattacaggcgtgagccaccacgcctggccaacatccagtatttttgagtacatggttttcatatacttaggctatacatacatgttcatgaattgtattcatttaattatgcttctgactttacttgttctccctaggggaatatcagttatgcgtgcttagtaaagttgtgttattttccaag

SEQ ID NO: 40176 - DNA, 1035 bp, Homo sapiens
tttagagacaaaaggtaatctggtcccatatttttcaagtttacatagcctaaattactcttggaacaatgagggccacttgaccaaaccttagtccctgctcctgtttccatgttcatactacttgattttgacattttatgggtaaataggggccaaagtcaactgtaaatagaaactgcattttgaggagaccctggaaaagaaatatgtgacccaaagtcctatgtggcattctgcctctagagtattaaagtgatagcttccctaccactcaggctgttttataaaatgtaactggtttaacttgctactaacaagcctgtagttgaacaacttcctcctgtattaggggctaagctgtttacttcctctctatagctgctgatagagatgaaagctttgtccacaatttacttatcttttgcctgtattgtaaagaaaattttggaaaatcacatttcagtacttaataagacatctccaggaactagtgagcctctctgcaacattaatggaacatttagggggataaaaagtatataaggcagactcccaaggagtttatacatgtttatgatcccaattgtggtaatcagatctaaaattcttcactatatacattcatccaatgagtatcagcacctatcatgtgcaaagcactatgaagaatctttgcctttaagaagctacatagctagttagggggaaaaggccacgtatacagtgaatgtagtcttttttttttttttttttttttttttttttgagacagggtctcagactgtcacccaggctggagtgcagcggcacaatcatggcttattgcagccccaaactcccagattcaggtgatcctcccaacctcagcctcctgagtaggtacgactacaggcataagccaccatctttgtattttttgtaaagactgttttgccatgtggcttaggccggttttgaactccagggctccagtagtccacccacctcagcctcccaaagtgttaggattacaagcatcagccaccgtgactg

SEQ ID NO: 40177 - DNA, 1048 bp, Homo sapiens
cgagagcgagaagtggattatgatagcgacatgccccggaagatcaccgaggtgctagtacgaaaggtccctgacaaccaacaggtgagcacacacccatccctgtctctcatgtccacactgtggaagggccctgtggtggcaggctgtctcctggcctgggatcctgggggcttccagttcatcacttgctccctagggagcgtcactgcccttgacccagtcttcagttagaggggtgagagattggagttcttatctctggcaattcatccacagttcctagacctccgtgtggccgtcctggggaatgtggactctgggaagtcaactctgcttggagtcctgacccagggagagctggacaatgggcggggccgggctcggctcaaccttttccgccacctgcatgagattcagtctggccgaacctccagcatcagcttcgagatcctgggctttaacagcaagggagaggtgcatgggatcaatgggacccaatggggccagactctgaggatgggatggtagtagtgaaggacataggatgggggtagagtgtggagactttttgaaatagtatagatgaatgccctgaggggactgtgaacaagctctgcccctcttaggaaatcaatggggaatcaactaaattaaataaaaaatggggtcaagattaagaggcagggtcacccagggaatggtttaggtcctggcaactctgaaggggttggaagggctggcaggaggcactgagggccctgggccctgggccaggtggtgaattacagcgactcacggacagcagaagagatctgtgagagcagctccaagatgatcaccttcatcgacctggcaggccaccataagtacctacacaccaccatctttggcctcacatcatactgccccgactgcgccctgctcctcgtcagtgccaacactgggattggtacgaggcattagggcagggacagggctgaaggggggtgctgactctcctaccctgggcctcaaatcttggagacagaccaatgctcctcttctt

SEQ ID NO: 40178 - DNA, 1033 bp, Homo sapiens
gaggctctaaattccccccaagtcctagaaaaagaacatagcgcgaggactggaagtcagactacagctcccttaagcctttgcgcgccaaggcgcgctccttccccacgcctccgacgactcccgcggccacttgcgccgcgatgcctcctgggagttgtagggcggcgacgtgtcatttaagtgaattcccaggcctggggactctatatcccgtggtgccccgcggctgtttctgacgcgacccggaggccagggaggtggggggcgtagcttgtgcagagccccaccccactctgctcaggccggccggacacggcagtggcagtaagggcggcggcgacggcggcggcggtcgggggaggggccgggcggggggctggcggcagcggcggatggactcgcgggtatcggagctgttcggcggctgctgccggcccggagggggcccggccgtgggcggaaccctcaaggctaggggggccggcagcagcagcggctgcggggggccaaagggaaagaagaagaacggaaggaacagagggggcaaagccaacaaccccccgtatttgccccccgaggtgagcacctgagaagtggtagggcgggaagaagccactctttccggcccaggactctagggaggcgggacccagataattaatctccccttccggtgtcgagaccccagggaggaggggcacgggaggagaacacctctttcaggtcccgggaccccagggaggaagggcagagactggactctcaggtgacaggacctcagggaggaagagtggagagggaggactcccccttctgatctagattaccccaggagagaagtagagaaaggggatcccaggaagagcaccccgaccaactgcgtgtgccgccatagggcaagagagactgcatcctgggacgagaggcagacagtaaccaccacttcttctaaacttgttccacagggagaaggggagtacccgggaaaagagcaatatgttccacacggacacacacacagtactcggga

SEQ ID NO: 40179 - DNA, 1059 bp, Homo sapiens
ttcagaatctggaaccagacggaggtggagttaagaagataggacagaacaggcaggccaagttcactgaagcttaagaaaatcatgtttagactctgtttaaaaacatccaggctggctcccattctatagcatgaagggcaagtccatgttcttctcgccagtgcccacgtagacgtagccatagttcttggtgcggggagcatggtagaaggtgaggcccggccagagcaggctgcgcagcaccaccagggcattgcccctctccatctggatgctccaggaccctgagataagacaggcaggaggtgaggcctggtgctgctggagccacagctctgcccttcatgctgtggcccctggctccttgggcagccaggcccaggtgctatggttccactggggagagaccatttaattctccagatgctttactccctgattgtcttttagccattattcttttcgttttaagagacatggtctcactctgtcacccaggctggaatgcagtggcgcaatcacaactcaatgcagtcttgactcctgggctcaagcaatcctcccaccttagcctccagagtagctgggaccatgggcatgcaccaccatacccagctaacttttctgattttttgtagagatggggcctcactgtgttgcccaggctggtctcaaactcccgggctcaggcgatcctcccaccttggcctcccaaagtgctgggattacagatgtgagccaccacgcccagcccttttagccatctcactgctcattaaaaccactttcagagggagggcaaaggaaatgaaaagaggcgaaactcaaaccagtctgttttgttcctgtcagcaagtctagctaaaggttgagtgggggaggaggctgaatccaatccacaggcagaggggagttgggctgggccaagggagacaccagctcctcccacactatacctagtgcagtcaccagttctagtgtggtttgccactacttgccattttgctgtgtcttccccatttcctgaagcctctcctgagttggattagaccagac

SEQ ID NO: 40180 - DNA, 1020 bp, Homo sapiens
tcctttgacctgtcccaggcagcctggtgggcatgtgatggtccgaaggaggcccaagaatccactcagatctggtcacagggggcctagatcatgtgagattaaacttcacaaccctggttccttcctccttggcttttatgccttcctcgcacttcagagggaatggcaggaggtggaggggctgtttgcatatactctggcttgtggtatatagactttgaggtctaaaatgttacaggtttttcctcttgtgtggaaacatatggcatgtctcctaaccctatctgagcagacattttgtccaagaaagatgcttcaggtacataaaagattggtgacccttcttgaagagtttctgttctctaacctagtctatcagaagatgatctcaggaggctgggtgtaggggcgcacacctgcaatcccagaactctgggaggccgaggcaggcagattgcttgagcccaggagttcaagaccaacctgggcaacatagcgagaccccatctctacaaaaattagccaggcatggtggcacgcacctatagtcccagctactcaggaggctgaggtgggaggatcacttgagcaagagattgggaggcagagattgcagtgacccgagattgcgccactgcactccagcctgggcaacagagtgagcccttgcctcaaaaaaaaaaaaatctcatagagaagctgggagctcttggggttgataatggggtacagaaaatcttactaagttgggattaacctttgttgggtgaaggtagcagacccatgtgcaaagctctgtgtggaggaagtgatctcagctaggttcccaggagatatcagcctcccctgtagaccatgaagccctagcttcccggcatcaaaagcaagcccagctgaccctcatcccctattttcggtttccactaggatgttctgctgcttagccagttcatccggcctcatggaggcatgctgccccgaaagatcacaggcctatgccaggaagaacaccgcaag

SEQ ID NO: 40181 - DNA, 1115 bp, Homo sapiens
tcaaacagcaatttcaatagagtggcaaacaaggaatccagtttggagaaatgaaagagatagttgatgaagagatggaaatagtaagtatgtttgaagaatttagcccgtaagggaagtggagcatttgctagaaaaaaaagtctggatattgcctgattaacttatccattagtagacccattaataaagacactaaagaaatcatgcagatgatagagaggacttggatgtttcatttgttcccatgctgcaaaataggcatatctccataccattttggggagtctaccaagtgtcaaacactattggctacaatttgcatattcttatgaaattcaaagttgaggcagattttgctatgcttccagaaaaaaaggcaagaggaatcgttttgttttaacaacaaatatttgaagttagacttaattttttcctttggagagtttgtgaaatgatggactgtaagccaggtacagtggtacatatctttaatcccagcactttggaaggccaaggtgggaggatcacttgagcccagaaattggagtctaacctgggcaacgtagtgagaacgcccacctctttaaaaaaagtaaaaaaggatggactgtaaatcaaatgggtctctgaagtccttcatctaaatgttaggttgaattaatatgattctacatgaaggcactaccatattctatattcttaagaatcacctatcttcaaagcttgtaaatgaaaacattttcttttgctagtctatgcattatgtgtaaggcataaagtattatacatatagctaattttgactagtctcagctggtatatgtgacacccaaacaatattgtacacatagaatttaaagttgtgggaaagaagctggttctcttgctgaaaatattcaggcatcctacttttcaaagtatcagataataatacataattttagtcagctcttgaggactgagcaccaattttcctgtctatgaagactttcagtctaaaacagtgattttcaactggggggcaattttgtcccccagtaacaattggccatgtctgcagacatttttggttgtcacaactggtactactggcatctggggggtagaggcga

SEQ ID NO: 40182 - DNA, 1027 bp, Homo sapiens
gctgttgtgggccattctccctctccaaccccagagttagaatgtgaatcagcaaaatcggagctacagctctgtctaatcatctgtgtatcctttaaccactaagatttatattttgtgactaatgatcttgtgctggaagtgccatctcccacacaagtccccaaagaaaactggctttaagggctctgacttagaaaccaatttttccccctctcgtttttcctgcaggatctatcttgggatcccatggctttctttactgggctctggggccccttcacctgtgtaagcagagtgctgagccatcactgtttcaggtaacttttcccattaagttcttaaaactgtgtctttgtgtaagcttcctatcagggctgggtattacggtgactagaacaggagtaaaaactcagggaggtgggcatggggttggggaaagctaaagtgatcaggctgagctggcctggttggtctggtcacaggatgggggataggtaaagaggtgatgttgctgttagaagtgtgatggggaatggcatatggcggaagcttttactcttcagtccttgcaagactcttacagtgaatctgacatctctcaaccctatcattcccctagagcattaaaatccttttaaaaacggaatttttttaattacaaaaataatacatgcttattaccaagaacttgagcatgatagaagtgtgacaccctcccctccttgtagatgctaagccaggagagcacaggaggcacgcttgttggcagacatgcctcctggccccgtcatgccctcatcccacaggcatttcctgagcaccgcacctggggttggccatacagagatgaaagagagttgctttctgtcctgaaagaattctcactgtcagccacaggagcaaacttgaaaataagtaactctaagaaaatgtgatagaatattataatagaggattgtacagtgctttggaaggcgtcatataggagctgctagtggaggaagaggaggagaaagagtggagg

SEQ ID NO: 40183 - DNA, 1022 bp, Homo sapiens
ctgtttaccaatgaaggagaatttcttacatccccactttctgctcatcctagccagtttagaaaactctttttattccttagatattggtgttattttattctgctcttgtatttaagtacatctttatatgtaaatatttcaaaaaatataaagggccatggaaaggtattcaaatttattgaaaccattcctatgaggagggctaaaggctgatcccttcctgtggtctctacacatagaaaaatccccaagtccttgatgcttatttccagaattccatcacatgaattaaattcagtgtccatcacgtacaccatctgtcagaggtcacagccatgtcattagaccttgagctcccaaaaaagagagaacttggtctatgggtgggttcctactagcaaatcttgaacaaaccagaagctttatcagaaaccgctagataaaccagtagcttattatgaatgctaatatgactataactgagaaaactgaaagctataaatggtggcttcatagcatctatatatgtttgtacatacaaggtacatttatagatagatagatagatagatagatagatagatagatagatagatagatgtatataaaaccaaaagcaaaataagcccagcttccctggattctgactgacaatgaacaaaataattgaaaaaagaaagttcagtatttcagtcataaacttccaagactcctttctatttgagaatgtttttgtcttgctaaccacagagaacagttggagtgagtggatcattttattttgattgcttctcctgcactggccctgagggacagacttgatgatctaataagtcttttccatctctaatatctataattttggctattctgtggcagcttcttattgctttaaataagccatcttaattcaaaaaacatacatctggatttgacctgcctaatatatgtcaagaagagtgtgtccctttaaagccccaccagggaatttctgagagactaaagaaactgaaaggaag

SEQ ID NO: 40184 - DNA, 1095 bp, Homo sapiens
ctgcccaaacagctgcccagttttgtgcttgaaacccagggccctggtgatgtaggtacccaagggaatctcttggtctgagggttgcgaagaccctaggaaaagcatagttatctgggctggaatgcatcattcctcacagcatggtccctcacggcttcccttggctaagggagggagttccctgaccccttgctattcctggtgagggaacgccccaccctgcttcggcttgccctccgtgggctgcacccactgtctaaccagtcccaatgagataagctgggtacctcagctggaaatgcagaaatcacccgccttcttcattaatctcactgggagctgtagaccagagtggttcctattcagccatcttgccatccacacccgagagcagctataccattttatattactacgagcaatgcgtaagtgttccagtttctccacaacctaaccaatggatgaaatatttttaagcaagggattcacacacatacacagtaacttcaacacgatcttctatttctcaaaactctcattagtttaaaaaaaaaaaggctttagtgcaagcccaaatatctccaaaaaaaggcctatctcacgatttatgataggagattagaaacatacccacaaatggcacgttgtttttaaaagagtttaggttccattaaacgttacaaatacatgtatcttctcatcataagcatcacatttgatgatggactttgcttcaaacagtgtcaaaatcagtaatgcatcacattttagaaaacaatttcaaataaaaccttgttacaacactgctctatattactttatcactatttaggatcatacctaattgtttacaacagcatatgaattacttaggatttgttagacttaaaagcaaaatgctggcagctagggttcagtgtttggcccatgttagcattctgtcctggaaggactcctttagttgggtgtcaaaatagctttaatgcttcaccaaatgaagaaacggcatatcatacattttatattaaattccttttagacatactaaggaatttacaaacaggatcaggttccaggatggaaagcacatca

SEQ ID NO: 40185 - DNA, 1049 bp, Homo sapiens
taatctagaagcaattaaaagatagcaaagggaaacatgatttttgagaaataacctaaaatggtaactaaaagtaatgaataagattacataaaggaaaatgtatctgatacaaggagaaaatgccctaatcatgaagtctgcattatttcctcaaaaagaagcggtagctgcttctctcttcaaagtttttgtttttaaaatagactggacagatcacctgagagccatcgtggttgatgacactatttacatacatgtgtgtgtgtatatcttttcccccatgtccaacctggtacttatgtattactacttttacaatctaagactgttagtattagtatatgataaaaatgcactttaagctagcttcaggtattgcctaagctaatttggatctaataaacataaagaatgggctttttaaaactgatgacacaattttaaaatgcttaatttaaatacatctagaaaataaaacaagccatgacctggaaggttcagttagccgctagtagaacaatcaaacaaaatcaacaacaaatggtaacaaactccaccccagaggggcacccaaggtgttattattcctcaggaggggaccaccacctggaaaggtctcctccattttcttcagctatgagaatttgcgcactacaagagtgaatatgcctgcactttttttttttttttttttttttgagacggagtctcactctgtttgcccaggctggagtgcattggtacgatctcagctcactgcaacttctacctcccaggttcgagcagttctccctacctcagcctcctgagtagctgtgattacaggcacctgccaccatgcccaactaatttttgtaataatttttttttctttttttttttgagacggagtctcactctgtcacccaggctggaatgcagtggcgcgaactcggctcactgcaagctccgcctcccggattcacgccattctcctatctcagcctcctgagtagctgggactacaggcacccgccatcacgcctggctaattttgtgtgtgtttt

SEQ ID NO: 40186 - DNA, 1026 bp, Homo sapiens
atattggacttaaattggactttagaccaaaaggacttcaacaatcatttacagaacattctacccaacaactgcagaatatgcattcttcttatgagcacatggaacatttgccaagatagatatcacatgttaggccactaaacaagtcttaagagatttttaaaatcaagtatcttctcagaccacagtggaataaatctgtaaccagtaacaagaggagcttcagaaagcataaaaatacatggaaattaaacaatatcctctggaatgatcatgggattaatgaagaaattaagacacattaaaagattttttgaaacaaatgaaaatggaaacacaacgcactgaaacctgtggtatacagcaaaagcattgcaaaagggaagtttgtagcattaaatgcctatatatcaaaaaagcagaaagatcccaaattgatgacctatcattctgtctcaaggaattagaaaagcaagaaaataccaaacccagaattatcagaagaaataacaaagacctgagcagcactaaataaaaataaagacaaaaaaaaatacaaaagatcaaggaaattaaaagttggttcttcaaaaagataaacaaaattggtaaattgctagcaagactaactaggaagagagaggatccaaataaacaaaaccagaattgaacaagagatattacaactgataccacaaacatacaaaagattgtcacagactattatgagcaactatacactcacaaagtagaaaacctggaagaaatggataaattcctggaaacatacaacctcccaatattgaacccagaagaaatagaaatcctgaatagaccaataacaagtaccaagattgaatcagtaatttaaaaatctcccaacaaaaaagaattcaggaccagatggattcacagccaaatgtgtacaaagaagaattaataccagtcctcctgaacctgccccaaaaaattaaggagtagggaattctccataaataattctatgaggtcattaccatcctg

SEQ ID NO: 40187 - DNA, 1024 bp, Homo sapiens
ttcgacaatgcccttgagaacaggtaggagaatctcttgaggctgggagttggagaccagcctgggcaacattgtgagaccccatctataccacaaaaaaaaaaaggcaaaacaaaacaaaaaagctgggcccagtggcacatgcctatagtcccagctactaagaaggcctaggcaggaggatcgcttgagctcaggtgtttgtggctgcagtgagctatgattgtgccactgcactctagcctgggcatcagagtaagactctgtctctaaaaacaaaaccaccaaaaacaagaaattattctcaactctcctccctccctttttacctcccttctctctacctgtcttcctctctcttctccctcttcctttttcctctctcactctattcactctcatatcacacatacctttttacccccttctgcattgcctgttctatctgaaatgtccttatcctctttcatactcttctactcacccctccttttctggtctgtcttgcccattaaactatgatctacctaaggtaaggaccacattttagtcatctttgcattcccagcctctggtgtagtgtccagtacaggagtttagggtaaggtgtagtctatggatttatttctcatgactttaggactaaggtaatgtctgttggtaataatggggcattttctaagaaccgtatttatgtagaggttttgttttgttattgctttaaatttagctaaataagagtgtctgagtcaaaggtgtctaattacattgacagtcatccactgagaaacgcagtcaatacaaaatgctactgtttgtatgactggattttttgcaaagctactgaaaggtagtcatgccataatctggaaattgtatttagcacattcctataaaacctttcaatgtaacttggtatagctatgtatctgcaacagtccttagctcttgtcacctgataaacaagtttcatgcttttctttaattttaatttaaatttcagaatgaatatcacaacataaat

SEQ ID NO: 40188 - DNA, 1067 bp, Homo sapiens
cagcaatatatgtaacaaaataatagctgaaaacttcccaagtatggggagagatgtggacattgagatcaagaaagcacaaatgtcccatgttagattcaagtgaaaaagattctctggagcacattataattaaactgtcaaaagtcaaagacagagaattctaaaagctgcaaaagaaaaacactgagtcacatataagggaatttccattagactatccgtatatttaccaacataaactttgtaggccagaagagaatgaggtgttgtattcaaagtgctgaaaggaaaggaaaggaaggaaaacaaacaaacaaacaaataaaaaaacctgtcagccaagtatactgtatccaacaaagctctcctttcgaaatgaaagagaaaaagagaccttcccagaggagcaaaagctgagggaatttatcaccacttgaccagacttacaagaaattcttaaaggaatgctacaacaggaaataaaaaggtgagaatcattgtaatgaaaacatgtgaaagtataaaactcaccaatagagctaaatttataataaaactaagaacaccccaatgctgtaacgatactgtgtaaatctttcagtcaactaatatgaaggtttaaggtcaaaatggtcaaaaacaacaactgcaatgttggctaaggaacacataataaataaaaatgtaaattaaggccacagaaatataaattgtgtggcagagtggaaaagtcgagagtatttttatgtgaccaacatttaattaattacagcagatatacaaacaaaaaagagaacaaaaccaaagcagtaaacagtagagcatgaaaggaagaaaggaggtataaaatgaccggaggactggacatggtggctcacacctgtaatcccagcactttgggaggccaaggcgggcagatcacttgaagtcaggagttcaagaccagtctggccaacatggcgaaactctgtctctactgaaaatactgaaattagccaggtgtactgacagtcctgtctttcttatgttttagattgtgtgttcccccacccccccaaccagtc

SEQ ID NO: 40189 - DNA, 2048 bp, Homo sapiens
tcttttggggctcaggagtcacctttatagtcaggcccaggtaatgcttccttctggacacaagagttcatcagataaacattactgtgttagtctgttcttgtgttgctataaagaaatacctgagactgggtaatttataagaaaagaggtttaatggactcacagttctacaggctgtacaggaagcatggtgctggcatctgcttctggggaaacctcagaaagcttacaaatcatggcagaaggtaaagggggagcaggtgtctcatggaatgagcagaagcaagagagagtgttgggggaacacacttaaacaaccagagctcctgagaatgaactcactatttcaaggacagcactaagccatgagggatccgcccccatgacccaaacacctcccactaggcccacactccaacactgcagattttatctcaacatgaaatttggagggaacattcaaacttatcaattacctgtttcagaggcaggaaaattttgtggtgtagttaaaggattttatagggggagattcatatcaagacctagaatggaaactttgggtatccatattttttcttgtataacaaatttttgtattgcctacatattgtatttcttttgtgtctatgagtagttttactgtgttcattaatttttttcctttgtactttacttttttactctaccttcctcacttaaatttacaaattttatggattttttttttgtttcaattcagtatgcatttcaggccttttggaaactcaccgtaattcacttatatataaaaaatgtttttcccagctaaaacaatatttttagtttcaggttttgctatgcttgcagaatctgtgtgtgtcgtgctcattcatttctatggaaaatctctttatatcttgactgtggatgtagtacttacgtctttggtcatctaattttagactgattttcaagaaaacatttggtcatgcatttattttgtcctctacattgaagcactactgttatacgactactgtgaatacttgctgtagatctttttgtaagtcccttttaatattccagaaactttaactgccttgtttgaagacctgcctcatattaacaatttttcaaaataaacaacattttagtgagtttgtatttctttgacaagaacttgaatgtgagtcttagcctgccaaatggctatttaagagaaacatttcggtatccttgttaatgaccttggctttaaccatttgagaggtacatgctatgctttatattagttcttctggtacctactttgcaatactattttaaagttctattttatttctctgatgactgtaccataaattaattatttgaacccagatttttgttagtttataactcgcattaatttttgggattgtggactatgttgtgttatttgggtatatgtaggtgtgggtgtgttttaactgtgacttctggtcttcaagaaaaaagctcagaccaataattgtttttgaaaaattcctgacataactgaactgtaatttattaatattttacttttacattttggaaacaaaataaagagcaagaacaaccaacaaaccaaaaaagtaataaggagaagctaactaaacgtggatcttgttgtagtagctaaacaaagaaaggaatttgaacactttaaacatgagaaatttatgatagagttgtgtagcaagtacacatttataatttatttaaaacaggatctctgactgttcagaaactatgtagatgaattgtgagttatgggtgaatctacatggttcttgctggcctccatgactgaagaaagcttgatgtttagatattgggtgaggctattgatggctctagatccaaggatgacaacctgtctctccgtaaaccctttctctgggatgactattttgatctgtgcctgagataactgatcatgctaattgattttgaagcctagaggcctaattaggcagccaattaagtaatttcgaatagtgacttcatgataagtaatttgagccagttacgttcaggtg

SEQ ID NO: 40190 - DNA, 1048 bp, Homo sapiens
ggcttaaacttttgtttggtatgagagaacagttattgtggatctctacatcctgaagtagaagcagaacttccgaaaaattttactatactttttaaaatatgaaaaaagtgggatgaatttttatgacaaaatataagttcacaaagaaatacctatttatagcaagctgctttgtgaaacactcctcagactttctggtatacatggttgtcttctctgaccttaggggaacttttgtggaaactttgagaagtactgaggcttaggccaagcaaaaaacaaaggcggaaaaacccaccttaaaacactggtgagtcatcagtgaggcagacacttgtaggttgactaacgaagcactcattccctaacacctctcctgtctacctgtataaaggagactggaaaagctaaatacagtcaatttttgtaattcttggtagttagattctgtaaagtcaccatgatgactgaattagcaaattctcaactattgctcctaaggaaaatatgaacaaacacacatacacccacacatttcatgtaggctatataatcttaatcctgaaaactactcatcctggtagagtctctctttatttaacaaaagagaaactgaggttcagagtgttaactgactttttgatgccccatgaataggtcccagatttgggattcaaactcgttcagctggttctagagctggagctacttgaactacactgcactgccccccacagctctgtcctctggtgggcatctctgtgtgagagctgaaacaagaaggcagagtgtctccctgttagaccttagctgggaatatgtgtatcagctactcagatttttcactgctctacatgtttgttaatgatcatgaaaacacagcaagtactgattttggggttacaagtaaattttggtgagtaggctgattcacaaatacgggattgcaaataataaggatcaactatttactttttaaatctccctaataattaggggtaggtatgtgacagagttcttctggttaaaggtaagtaattaaatg

SEQ ID NO: 40191 - DNA, 1024 bp, Homo sapiens
gatttttgaaggttttttgaaatacgtctttgatggttactttaaaatcctgtcagataatttaaacatttgattcatcttagttttgacatctgttggttgtttttttcattcatattatgatttcctggttcttgggatgacagtgatttttggatattatgaggctttgaatgttttttgttgttgttgaagtgtaacatgagggctaggtgagtatattctcaccttcccactgcctgccctttcccccagtaccactacagcaaagtgggacactgacttacattgcctttacagataggatgtggatgttcacctcctcagcccactgatgccttcttgcgaaagtggtctacctcccttcctgtttgcctctggtttgagtttaacattggtcccctgctgaacccactgctacaggagtaggaggggaaagtggagtgcccaccagctctgcattccttcacctttttggcttcattggtacaaagtgggttgggactctgcttccctctgggctttgctgatcctgatgggtggagtggagaacaggagtgctgagtagccctgcttgacactgcctcttcagtctgtcagcatgaaataaatatatagagacaagtctccaagcaaaggttttatttggaaataatatacaggaattgcagttcagaacacaaaaactggggtagcccctaggtgtgtctgaagaacaaaggaaaagtctggggctttactgggggaacagaggaagcttatgtaatttgttttgcaagttcattggtgttggcagtgtcttacaggggctggtgaattctgattggtgagtgacagtttctaggtaaaacttgtaagcttaaagttatggcaggctgttgcggttttggactgggcttgtgagatagttcctagaatgtttttccctaagactcctcccactttatttttgttgggtatgacaaaaaaatctcctttgcataatcagttttcacaagtctctttgcttctgggtaggtatgga

SEQ ID NO: 40192 - DNA, 1031 bp, Homo sapiens
tattttttagagcagttaatgtttacagaagaattgagctgaaagtacagagttcctacctgccaccctccctacagtttcaattatatttgttgagccaatattgatatgttattattaactaaagttcatagtttaggattcactcttggtgtttcacattctgtgggtttggacaaatgtataatgacatttatccaccattatattactacacagaatagttccattgccttaaaaatcccgcgtgctccacctattcctccctccttccctctgaatttctggcaaacactgatctttttattgtctacatagttctgcctttttcagaatttcatatagttggaatcatatatgatgtagccttttcagattgacttctattacttggcagtgcacatctaaggttcttccatgtcttttcatggcttggtagctcatatctttttattgttgcataatttttcattatatggatataccacagtttatccatttgcctattgaaggacatcttggttgcttactagttttggcaattataaataaagccactataaacatttgtgtgtaggtttatatgtggacataagttttttactcaaacctttgagtaaataccaaggtatttgattgctggatcatatagtaagaatatgtttagttttataagacactatcaaattattttccaaagtggcaaatcattttacattcccaccagcagtgaatgagagttcctgttgctccacacctttgtcagcatatggtattgttagtgttttgggttttagccatagttgtaactcattgttgtcttatttgaaacataatgacatatgttgagcatcttttcctgtgcttatttgctatgtgtgtatgttcttgggtgaggtgtctgttcagatcttcgggcccatgtttgagattcttattttcttacttttgaattttaagggttctttgtatattttggttaccagtccttgatcaaataagtgttttacaaagatggtctatggcttgtc

SEQ ID NO: 40193 - DNA, 1033 bp, Homo sapiens
aacacactcagctaacatgaaataaattattttagagatgggagctcactgtattgctcaggctggtcttcaactcttggcctcaagtgatcctcctgcatcagccttctgagcagctgggattacagatgtgtgccaccacacctggcttttcagtctttatttcaaaattgtctgtactttatgatccatctttaaatatttattttcagtgttttacatgaagagtttaattattagatacaagtttctgtatttctttcctttctgtattttttcatttttttttgtatgtaattcttttctttaatgctgatttcctttctccaagtaatcctgattttcttgccccagcttttactatcattagttttctgaatactgtcaatcacattacattcccatttggcaatttttgctttttcttcatttttagattatttttttctctgttattttcacttttctcagcatggattgagaatgtgtgtggtcacttatttaaatttttttcataaggtgttgtagaaaactgattttttccttctgagctgttatgtacttgggtggtcactgaatcgtttgatactgtagctgtgagctgtgtttgctcatttatacattggtttattgtttaaaatctcttcctggagttaattgcttttagtctattgacttgttttttttttttttttttttgcatttcaaaatctcaaaaggctttcgagtgttattaacatgattatggacatggctgattacatttaaatagtaaattatgtaaattttaatgtattttagaaatttgaaataagccctttttagtaccaactttcaaattgattcccagacgagaatttttatcttctgtttaaaatgatagagatttggtaataaagactgctgtcttaattcaaaatttggaataatttttgtgtgacttggactaaaaacttataaaaatttagatttttttctagcttttaataaataacgaacatttaatgggcttccttgttcttaataatttgat

SEQ ID NO: 40194 - DNA, 1071 bp, Homo sapiens
tgtggatgtaccagtttctttaatagtcacccattgaaggacatctgagttgtctccagttttgggctattaaaaataaagcttctgtgaacatttatatacagaattttgcgtgaacacatgttttcatttctctggaataaatgcccaagagcataattgctgtgtcattatggtaattgtgtgtttaattttttaaagaaactgataaactgttttccagagtatctgtacaattttacattgtcatcagaaatgtatgaatgattcactttctccatattcttatcagtctttgttgttgtcactgtttttaaattttagccattctgatggtcctgtagtgataatctcctgtggtttacatttgcatttccttgttggctaatatgttgaacaccattttgtgtgcttatttgccatctgtatgtcatcttccatgaaatgtccattcctgccttctgtcattttctaattggattgtttgtagttttactgtcaagcgttgagtgttttccttacggtttgtagtttatctgttcatcctcttaacaggctcttttgcatagcaaaagtttttaattttgatgaggtgcaatgtatctaatgttagggatcttgcttttgatgtcaatcctagccttagattctaaagattttcttctactttttttttaagttttatgttttatatttagacctgtgatacattttttagtttttatatatgctgtgaggtttaagtggaagtttatttttttgcctatgaatgtccaaatgctccatcactatttgttgaaaaggttatatttcctatattgaattatacttttaagcttctaaaaaatctgtgagccattatttgcttggtccatttctgcgttctgtattctgttctattgatctatgtttttgtccatctacagtaccacactgtatttattgttgtagttatatgtagactttaatattaagtagagtgagtcctttcatttgttcttcttttataagattgttttagctgttctagaagtagctgttctacaaattattattttcttaaattattgt

SEQ ID NO: 40195 - DNA, 1052 bp, Homo sapiens
gatacagaaagcctagtgacccccaatcacatgcaatgtaaaaaggtttctccaccccacattatagtgaaattgcctaaagtcagtgacacatagaaaatcctaaaaattgtaagagaaaagcgtttagtcacctataaaagagccccatcagactaagagcagctttctcagtagaaaccttacaggtcagcagagaatgggaggatatatttaatgtgctcaaagacaaaaaccctgccagccaagcataccttatctagcaaaatgattcttcatgaaggaaggataaataaagtcttttccagacaagcaaatgctgagagaattcatcactactacacctatcttacaagaaatattcaagggagtcctaaacctagaagcaagcaaaagggtgacagttaccattatgaaaacacttgaaagtataaaactcactggtaaagcaacaaatgaggaagaaaaaaagactcaaatggtatcaccacagaaaatcagcaaactacaaggacaatcaatcagaaaataagaaaggaacaaagaatattcaaaacaactaaacaacagttaacaaggtgacggggaaaaacctttcatatccataataacctgtgtgtaaatgatttaaattcttaaaagatatagattggctgggcgcagtggctcacgcctgtaatcccagcactttgggaggccgaggcaggcagatcatgaggtcaggagatctagaccatcctggccaacatggtgaaaccctgtctctactaaaatacaaaaaattagccaggcatggtggcacatgcttgtaatcccagctgctcaggaggctgaggcaggggaatcgcttgaacccaggaggcagaggttgcagtgagccgagatcgtgccactgcgctgcagcctggtgatagagcaagactccatctcaaaaatatatatatatatatatatatatagactgaatgaatttaaaacatgatttcactatatgtttactaccagaagtgtacttcacttgtaaagacacatacagactgaaagtaaaggga

SEQ ID NO: 40196 - DNA, 1030 bp, Homo sapiens
cccgtgaattgcttagatacgtgttttacaatttctgattacttgggggatttcacaggtaccttccttttgttgatttctaggttatttatggtcagagaacatactttgtaagaagtaatagcgtcttattttcctattttgaatctgcattactttctattttttacatgctagtaggagttaaatattgattcttaagagcaaatgcttttcataatttggagaaaacaaaccatgggactgataattttaacttagtgcaaagttgcactctacttcctgttacgatgatggttaaaagttcacctgtgttgataaaagacctgaatgtaagagctcaatctgtaaaactcttaaaggaaacatagtgaagaagcttcaagacattgaatttggcagtgatttcttggatattatactaaaaacacaggtaacgaaagaaaaataaaaaattagacatcattaaaatttaaaagttttgtgcatcaaaggacgctgtcaagagagtgaaaaggaaatccacagaatgggaaaatatttctaaatcatatgtctgataaggggttaatatccagaatacataaagaactcccaaaactcaacagaaaaactcccaaacaacccaattaaaaaatgggcaaaaatgttgaataaacattctccaaagaaaatatacaggtggccaattagaatatgaaaatatgctctatattaccagtccttagacaaatgcaaatcaaaaccacaatgagttaccatttcatacccattagaaaggctatttattaaaaaaacagtgttggcaaggatatggacaaattagaacacttctgcatggctggtaggaatttaaaattgttgaactgctgtgaaaaatggtatagtggttcttcaaaaattaaacagaattaccacatgatccagctattgtatttctggttatatacccaaaagaattgaaagcagagtatcaaatggatattggtacaccagtgtttgtagcagcattattcacaatatccaaaag

SEQ ID NO: 40197 - DNA, 1036 bp, Homo sapiens
tgggtagatagcctatatagtgtagatctgctggacaaatggagaattcattccagaggggaatgcagcaggttggcatgagatttcattatgctgctccgaatggcacacaattgaaaacttatgaattgtttatttctggaattttctgtttaatgttttgagactgcagttgactgtaggtaacttaaaccatgggtaagtgaaacttggataatggggagcagaggaaggaattttttagagttggaaaggccttggtccgctctgctttgggattacttatgtgataaaaataaggcatgtgattcagcgttttctgtttcttgcaatggaaggcattttacctgatactacagctctcttctgtaattttatttattccttatcagaacaataaaactgtcactttttctgaacttctgcacttagaatctttgccaatctttgacctttctgtatactaatgtgtgtgtgtgtttagttttagtttttatctcattactgattaacacttctttgaggacatagactgttttaaattttagtgtcctttgtattaaattgctgagcacagatttgagcttgctaatagtaggtggttaatcatgtattagtacaagagaaaaggaaatggcttttaaattgtgtgcctcctctaaagtttactaatttctgctgtttctatcctgtgtttgtcagtgtttcatggtcgaagtctccctttgttggtttaatacaacttgggttcctatttcaattctgattaaagtagaaatatctctaaaatgctagtaactatctgccccagacttttatcccagttgccaaatagagtgggtcccattgctgattataaatgtagtaatactcatttaaagatataaaatataaacatatgaggtacatttcaaaagaatttgtttgttgttcggtgcctattgcttcacatatcagtaatgatacaggtatagatatgaatgtgtgtgtgtctgtgcatgtgtacgtgtgtatatatgtatgtatttttgttctg

SEQ ID NO: 40198 - DNA, 1057 bp, Homo sapiens
tccagatggacaatgcaaggtgtccatgcatctgtcatactggggtctagaggatggtggccctcttctcacagctccaccaaggagtgccgcagtaggtactctgtgtggaggctccaaccacacattttcctttcacattgcctgagcaaaggttctccatgagggccctgcccctactgcaaacttcagcgtgggtatccaggcattaccatgcatcctctgaaatctaggtggaggctcacaggcttcagttcttgacttctgtgcacccacaggctcaacaccacgtggaagctgccaagacttggggcttccaccctctaaagccacagcccgagctataccttggcctcttttagtcatgtctggagcacctggcacgtaggacaccaagtccctagactgcacacaccgcggggaccctgggcctggcccaggaaaccattttttcctcctaggcctctggaactgtaatggcaggggattccgtgaaggcctctgacattccctggagacattttgctcattatcttggggattaacatgtagctccttgttacttatgcaaatttctgcagctggcttgaatttctccccagaaaatgggattttcttttcagtcgcattgtcaggctgcacattttccaaacttttatgctctatttcccttttaaaatggaatgcctttaacagcacccaggtcacctcttgaatgctttgctgcttagaaatatcttctgtcagataccctaaattatctctctcaagttcaaagttccacaaatttctagggcaggggcaagatgccactaatctctttgctgaaacataagagtcacctttgcttcagttcccataaagttccccatctccatctgagaccacttcagcctggagttcattgttcatatcattatcagtattttggccaaagccatttaacaagtctctagggagttccaagctttcctacattttcctgtctttctgagccctccaaattgttccagcctctgcctgttactcagttccaaagttgctttcacattttcag

SEQ ID NO: 40199 - DNA, 1069 bp, Homo sapiens
caggagggagaactgatggcaaaggtcatttcaagcagagatgaagcaattatcctcaacccctgcctgcaccaaaaagacccaaaacaataagagaaaaaccctaaactaaaaagaataaggggaaaaacttaaagggctaatgaatagaaaaaagagaacttcccattatgttttaataggttgaaattatataaagctggaatggaaaagagcatgagttataaggtaaagagaataagtttcaagttccaattgtacctgctctgtgtttccagataagtcactcagtttttgtaagcttcctttttctcgttgcagtagatgctgttagtaccccatccagtccctttttatctggatggtttatttacctatccctcacccatagtgttggtgacttacagctctcagttctcactagtgccacagaattgccaggacctgcctgcccagaaaccccagagatcttaagcttcccactttcccagggggtaggtaggtgacttgtagtcaatgactggttgatataagggtataaggccttgtctttgtctcaatatgtgacatctccctggtgccagttagactccagagctcactctgagatcaggttgaggctagtctttagctgaacccacagttttgttgcctcattcacttctttaaattttttactaagagcagttcctcaatcatgtgcacagagttcttaggttttgcctctcagggacttgacctaacacccacccccactttccccagccctttaaaaaatctgcgatcaggtatacataatttaaaatgtacagttttcaccattttaaagtatacaattcagtggcattaagtatattcccaatgttgtgcaactgtcaccactatctcttttcagaactttttcatcaacccataggataactccaaacccattaagccgtcgcttcctatcttccagcccctaagcagccactggtaacaccaaggagtagaattatctcatcatatggtaatttaactcactgaagtacttgccagctgttttccaaaagggccatgtagttttata

SEQ ID NO: 40200 - DNA, 1030 bp, Homo sapiens
tgtattttagatattaacccctttgcagatgtatggtttgcaaatatattttctcattctgtatgcttgtttctttactctgttgattgttttctttgttctgtagaagtgttttagtttattgtaatcccatttgcctatttttgcttttgttgccagttcttttggggtcatatccaaaacattattatccaaaccaatttcatagagcttttcccctctgttttcttctagcagctttgcaatttcatgtcttatgtttgtgtttaatgcagtttgagttgatttttgtgtatgttgttagataaggatctaattttattcttctgcatgtagctaaccagtttccccagcaccatttattgaagagactatccttccctcattttgtgttcttggcatctttattgaaaatcagttgacagtaaatgtatggatttacttctggattcactgttctgttccgttagtgtgtgtgcttttatgcccgtaccatgctgttttgattactgtagcttgatagtagattttcaaattaggtaatgtgaagcctctggatttgctttttgctcaagactgctttggctatttggggtcatttgtggttccatatgaattttaggattttttttctgtttctgtggaaagtgtcattagataaagattgcattcagtctttaggtcactttgggtagtctggacattttgacaatattctttttttttttttttttttttttttgagacagagtcttcctctgttacccaggctgaagtgcaagtggtgtgatctcaactcactgcaacctctacctcccaggctcaagtgatccttccacctcagcctcctgagtagctggaactatctgtgcatgccacgatgcctggctaatttttgtattttttgtagagatggggtctcgccatgttgcccaggctggtcttgaacttctgagctcaagtgatccgcccaccttggcctcctaaatttctgagattacaggttccatatggcatgagccactgtgcc

SEQ ID NO: 40201 - DNA, 1028 bp, Homo sapiens
ggttggaatccaaataattttgattagagtccatctataaattatcttcaatctcaatatttaatttatttacttttcattattactaataagatgttaagatttatgtacttattatccacagaaatgttctctcttttagagttcactacgtttaatgcctaagcatgaaatattttagcagaaatcttagtaacaactatgatcaactattttccctctgttttatccatatttgaatttcattgagtggaaaaagtaactagttatatttgatattactatgtatttccagaaacagtcattgcatcttccattggacataatatccaaagtaaattcattttctgaggatttacctacattaggtagactttgagtattatttgatgatggtggttactactgagtaagaaaagtaatattttatgtatttttattggtaaataaaaattgagcttgtattctgatctgaatttcagatctttagcctgttaacacttaaggttttatataaatgggatggctttaagtaacagcttacagttcaaattattgtgtactttattttgtccatgatcattttaagcaattctaattattagatataccggcaagaatatgtctcaagtaattttgttatggaggaggaatctttctgcctgcttcctcctgccttacaaactctggtgattgcctgtttgccctcatttatgataaagttccaaagtgattgtttgtacctcccatatttaattataagacacatcataagacacataattataagacacctatttaattataaaacacataaatcattgcaagcagtaagaaagatagctcgtctgagagagaaacacacacatatacaaacccaaaaagcatcttcaagggtcatttaatgtgagggcagattgattgccctgtctgcctcagtacattttaaaagatatcagtgtaggaatttaatgaactagttgacaagaggaacatttttttaaacatacttttttatgaaagactgg

SEQ ID NO: 40202 - DNA, 1619 bp, Homo sapiens
gttttgatcttgaaatcaatttcaaagaaaaaaagttgttggtatcttgcttctccattgctttgtagtgaataaaatgtgttagaattggttgaacttttgaaaataccaaggtatttgtgtttaaatgctatgtgtgtcttcattgtaaccatttgagtaattttttattttcttaactaatgatcatattttaatacattagttttactttatcaatattgtgctcatttctatgcatttttttaaggattattttagacttatttgctgctaactctattcttttatttgctgctcattctttgaaaaacaaaggagaaaatggtttgatgcaggaatttttaaactttagaagtcctaatttggcttaaaatgttctgattatgaggttttacgaaggaagtttttaacttattgtttcatcttggtatgtgactgtttcttattttacttttttttgacaatttttcttttttttggatttgatgtatagctgtttaagcttacacgggatctatttggccttatattgactacttctgttagtaaaatatgtatagtttcatctgttaaattatggtgactgtgcagtattccatttccttgtttaatggggtatatgtttatgtacacaactgcatgcacatttgtcttattgcgtatgtatacaaggcattgttttgtagtactttttgtaataagagcatttttctcagtttattttaattagatcaggtaaaaacccaaactagcaccatttccctgattgtttgaacaacttcatttgattagttttagcagctgtctaaatgtgagattatgtggaatgccagaagagaaaatgctaagtcaatctctcctgccttccctccctccctctccctatctctctctctctaccaatctctctccctctacctgtctcccccattcctcctctttccctttctttctccttcaggcttttttgggttctcttccttttttccctcatttctatacagcctcaaagtagattcttaagttctagtaggggatattgacattaatcctcactaatgaatactcggtagatttggagctcttaacattcattagaaattgttatattctaatatgtaatgcctcagttgttagatagtattggcatctgattatagagacttaatttctttcagctgtttttaattgtttcttgaatccttttatgctaatttactttaatacattgttcacatagtattaacactttaattatgaggattacttttttttctttgattattctttgaagtgcagagtgatccatacttgtttaatgtagctgtataagtaattcatgtttcttgtaattattagaacaattcatctttgaatgctgtcatttttgtaataataaaaaaaggcgagaacttgcagaaaatatgggaaacatgctcatatgacagctgaggatgtggctagactaaagcaggaaactactacccacaatgcaatgttacatacactaccacttaatataatttatatcaaacatgctactgacaaaaccaaagaaaaataatatcccagctatgctatttaacgtatctagggagaagtgaaagtaatctttt

SEQ ID NO: 40203 - DNA, 1026 bp, Homo sapiens
tagtgacctgcggagattaaccatttaaaaaccagagacttcttgctgtcctcctggagaaagtttgcaccgcacttgtggttctgtggttgtttgtgaggcgaatgaagcattcacacaatccaaaaaagcaaaagctttaaaactccttttttttgcaagcactattactggagaggcagaatcatgtggtttgtgacctcacagtactcttaagtaaagtgggactgcctaccactgtggcttttcccccttgctctttctctctctctctttctctcacaaaaggcttgtggtaaggcctttcctggcatccagaaggatatagctttttaatttttgtgactcatgaggatttggatagaatacaaatgctgaaggagcccaaactcctgtaaggttaagcatttgtagagcagagctctgcagttaagggctttcctttctactccccgctcaacctctgcctttttgcctcctctttttagttcattattgtgtctgtggaaaaatgaacaaaattggctcaagagtctgtgtgaaattctgaacaacagtgatgatatacaataattcacatctttggactgtatcacattctggggtctgcttcatatttgctgggtggctggattccttctgttttcctttttcttgtcttcttaaacttgtgaatctgtaactcattgtaaaaaaaaaaaaagtttaccttaaggtctggttgcaaactgcttgctaggcttgactataattggctgtcatgaaagtgttagtctgggcattcttttacaaattttaaatcacgtctgtctagtttattatcaatctattagatggcggcctttacaataaagattaaatgtaatgtttcatgtataccattatctcatgcctagtttgaagatcttaaaaaaatgaatgacagggattgtaatatagtttattggatgaatcttagttttctttatgattgtaatattttttgtctttcattgaagtgtattcagtttatatagttctttaagt

SEQ ID NO: 40204 - DNA, 1050 bp, Homo sapiens
ctggtgcaaattccttgtattttattgtgtacttgaaacagtttttagactagcacctgttgggcagaccacatttaatctagaagattattatatacaaatgttttttgtttattcattcacaattaccaagtgggtgcctactgtgtactatgcaccattctaggctctggagatatagcagtgaataaaacaaacacaaaatccttaatctcagggctacattctaattgtattagaaatatcaattttatttctcatttctcagaaatacttttgtttttgtagtaaactgtattcttgcagtttatagttttgtgtataaaaactttagacttaattgtatgtatctttacatatagtggcaatactactttatatttttggctctagtaattttttttcctgtgactaataaaacctttgaaaacagtaattgcttatttgagtcacttcccaattttacttgaaattagcttttctgaagcaaagatctttttatttaaaaggagatgtaaaaggaattaattttgaataaaagagaacattgacaacatgaactgattatgcagtggatggaattgtatgttaagcaatcattgtttggttgcctttcttatattctgacagatgacctgtttgtcagacttcagagtattttagagactatattgaaataatataattttaatgatgaaatataaagagcagcaaattgatgaaaaccagtgaaacaacctatgacttaaaaaaatgaatcttccagtgcaatggttcccaaaccttagtgtgcattagaatcacctgagagccttgctgaaccattaaactgctgggtctcacctccagcctttctgattgaataaatcaagggtgaactcagcaatttgcctttcaaataaattcccaggtgatgttgatgttggtgatccagagaccatacttggaaaactagtgcttttatataatgtcatcttgtagtgccccgatttatcaataagtagctaatttaatcatagccgtagcagatggtgacttaaagaaaactca

SEQ ID NO: 40205 - DNA, 1161 bp, Homo sapiens
ttcaaattgtaatgtaagtgagaatatgtataaaggcagatttcctgaaagtgatattatgtataaaagcagattgagaacataaaaacactgcataatggaaagtcttttttcctttcagaaatgaaataggaaatgtttaagtttctagatccagtgaaattaagtgcttgtgttaaaaaatgttattttataaatgtggctacataaaataattgatttttttatttaaatattactatcaattctctcatgagaagataataactagaactttcagtttaggattatatgtgtaattaccagggaaaaaagtgtcttgcttacttacagaaatgaattcttgaaattcaggtagatgaagttatttgagtaattctgtgatgaaaatccttagttatatggggaaaaataggtaaaaattcacagacccatcagcctaaaattgcagtataattgctgattatcacactggagagtggcagtctctgttctgaactaatttgatggtagatccatgctgtaattgatatatagctatttatagtctttttttatttttagagtgaatattcatacgtttcaccatgttcctgaatgcttctctagactctgctgaaagtattatgtgatttatgtacagtattaactttcaaaaatctgaaaactttatattctgcaatacatatttcagataagagactgtgaacctgtatctacctcacagggttagtacgaagattaaatgagatgattgaattaaaacacatagtgtagttcctggcagatgataaacattgtgctcttgttaccattatctttttaaaaaataaatatcatcatcaacatactgattaaggagtttataaaaagtaattcaagtatagggggaaatatttgcaatttaatgggaagaatttcataattatagagaagaaaggatttgtctacattatagcatgctgtagaactttccacagtgatagaaattttagttcctttttatccggtgtgatagccactagccatgtgtacctattgagtatattaaataagccaggcagctgagcaactgaattgtagattttatttaagtttagccataaacttagcaaacagctaccatattgggcagcacagaagaaatatagtaaatacaaa

SEQ ID NO: 40206 - DNA, 1030 bp, Homo sapiens
aatggaatgctcttcattgtgctatggaaagtttcttatctcaggatattcgggacgttggagcgaagtatgcctaagtctagggctgcacttttcactagcagtttctgccttgatggagatgttccataatctgtgcctttaggcactagtggtagcctaggcacagtggctcttcagcacttgaaatgtgataagtgtcactgaggaacttaatttttaattttattcataaattaataaattgatttacgtttaaatacccacatgtggctagtggtagctactgcattggacagcacagggctacaatttagattttgagagtccttccgagtcttgatatggttgagttttaaatcagataagccagctctttggaacatttattgccatagggaattgtaattatattcaaataatgcctttcattcaaatactgcagttcagaccatgggtctgttagtacttatttacatcttgacaaattaaagcaaaacgttgtctcctaggttgtacagctaatgccagattcagagagctatgacagtattaactggagttttctttaaacattattgtactattttgtgattgtcggtttctgctatcttttaccactttggttggtttttcagtgagaagtttccagctcttattcaagtttttttcttttttaaccttttgtgtaataaagcgatttgaaaaattgtaactcttgagcattaggacattttagaactagttttatggttatccaaatcttttggagagataagtgaaattaggtaatagatgtttcacaaaattactttacttgaaatatgtgcatctgttttttttttttaaagcaagtgtatataaagtcaaatttgaaaataaaactaaaagaacaaataaaaaacctttataggtagcggtagcacccttaaccttggcctgatgtctgtaaaatggtgcccttgggccaggcacgttggctcatgcttgtaatcccagcactttgggaggctgaggccagaggatctct

SEQ ID NO: 40207 - DNA, 1024 bp, Homo sapiens
aaacagacctgagtacactgaaattgaggggcagcatggtcagtccccattattatataaattcaagcaaggacactttcttctggggaagaggtatgagggatcttttgctgtgcctctctctctcaggacatctcaatacctttgataattagagctctgaagatggatggatttatttgcacaaagaatccaagggaaggcacctgaatctctactgtctcccccatgttcaaactgtagggggacccttgtgggccctgacaaaggcccaggggtgatcagcaacaaagtccctaaagcaaggcagaaagagacagttctgtggattggtccctgcctaggttggaaggacagaggagggacaatgattctgggtccatgaggttctgatccaaacctgttggcaaacttgtgctccagggaagagttttgtgagtgaacagaagaagcagtaactttcccagaatgttcaacccactgtggacattgggctcctcatctgggtctaatttaactcctgggaacgtggctgtactttgtaccttcttgattatactaggctggtggttcttagaatttaatgtgtataagaatcactgggaaacttattaaaaatgccaagacctgtgtcctttcccagagattctaatagactttcctggaatgaggctcagaaatatgcatgcttaacaactatcccaggtgtttctcatttgggtggtctgtgaagggcgtcttttaaaaagcaccttgccttccatagggaatagcaaccaagatagagacccagccattcttttcttacaaatgttagggctacaaatggcaccaccattttaccctgctgctgtggggcagtggcccctggagctctgggcccggtctctcccaccatggcaaggtggggaaaataccctggaatttctgggccagtggatgagagatgctgatcctcatccagacgcaaatctggaatgactgaagatgctctttgctaaagttaaatcactgatcacattgt

SEQ ID NO: 40208 - DNA, 1033 bp, Homo sapiens
gggttgtagaggagccaggtgggagtaggaagcatgatgaaggctgtcaccctggaccaggtgagaaatattcacggcttggacaagagtggtagcaatggagatggaatgatgtggatggaagtaggatttagtttgcaaataaaaacaaattttgctgattgtttaagggagttaaagggaaaggaaggacaaaggaaaactgtttctctacacacaacacttctgacaccaaatgtgtgggttttccacaccaaacaattctccagttctcttcagatatcaactgggtgtcctagaacttaattcaattctgacactaactgcatgacattatcacagacccacaggttaggggctcagtcccgcaagactctccccaacttcagatgcccattgaaattagtacagccccaggttattcacacttctgtccaacttgtctacaaatcgggagttttccacaaccacctctctagattcgataatttgttgtaagggctcacagaactcagggaaacactatgcttactatttctggttcattacaaaggatattagaaactatacacatgaatagccagatgaggaagcacatagggcaaggtttggaagagtcccaagcataggagcttctttctctgaagttgggtgtgttaccctccggcacatgcatgtgttcaccaacccagaagctctttgaacccctttattgagggattttatggaagttacagtacaaaggcatgattgattaattcattctccattggtgactagctgaatccccagcccacctcccttccccagaggctggggaatggggctggcagttccaatcctctcatctcatggttggttcctttgacaactagcccctaatttccaagagtcacttcattagcatagtcaggtgtaatcgaaaggggcttatttgctgggcagggtggctcacacctgtaataccaacacttttgaaggctgaggtgggcagatcactagaggtcaggatttcaagaccagcctggccaac

SEQ ID NO: 40209 - DNA, 1025 bp, Homo sapiens
tgcctcactcctatcccgtttgcattcagctgctaaagcagccatgaggcagctgatacagagcacatcgtctctaccatcctaacggaacttgtgtaatttgtaaatctttattgccacctaggggcaccaaactgtttaatgctctcaaaagtttaatatgttgattaacactttatattttataggacttcataaagattttgatcagtgggactgcttgattgaaggagatgatgagaatcttattccagggaccaacattaacacaaccaatcaacacatcatgttacagaactcttcaggaatagagaaatacaattaggattaaaataggttttttaaaagtcttgtttcaaaactgtctaaaattatgtgtgtgtgtgtgtgtgtgtgtgtgtgtgtgagagagagagagagagagagagagagagagagagagaattttaatgtattttcccaaaggactcatattttaaaatgtaggctatactgtaatcgtgattgaagcttggactaagaattttttccctttagatgtaaagaaagaatacagtatacaatattcatatcagcctaaattttaattttaaagatgattccttttcagtgtcgaagttaaaaactgtttttacattactttgacagacaagtagattaaaacaggcaaaatcccagtgaaaacctgttgcaatgatacaagactccctaaacatagagtaaaaaacaatttcttgccttttattatctactatgggcagtggagtttaattatagcaacatgatattctaggtagaatttggcagctcttctctttgacttttggtcacggtaagaaaaattagaacaagcaaaagccattgtttcagcacaggattggtggtactacacaatttcaaatgatgactaaaaggagtagagaagggttaagaatattagagatgaggcaaaggcagtggattaaattggtaattttttgacactttctttaattctttaaggcattctacttgctaaagaaagg

SEQ ID NO: 40210 - DNA, 1095 bp, Homo sapiens
cttgtctcattcatcttgcagccctgatgtttcttcctcaaagcacttgctgggcaaatccttgttaattaataaagggattttcataccagtaggtatgggcacacagcacagttctgagagcctcagtgttggaatcagatggacctggatgtgtcatattcctaccacaagactaagtttgtgaggcttagcaagttaactacctttcaaagcattctcatttgtaaaataggaagaagagtgtacttattccatagagttattctctttatgcatataaagggcttagcacaatgtctggcttacagaaagtgcttcatagctgttagctattacttttggaaattatgaaatacattcagatcagagcagcaactactctgctacaggcagtaagaattacataaatgacctaactatacagagtttggagcatacaaattcaagacggatcccagacctcctttggagagagtccttaacttgtttgatttttcttcctgttccccaaaccaacagtatgtcctcatctcgggctaatgtttgtgtctggctttctaagatgtcacttctttgtctctgggtctaagcctaccttccccagcatcctgagatactgttgtagctcttcactccgcccttcctgacagtattttaccttcctattctccctttcctctggtcctgggtgcttagtttcccaaccagaaattaattgctgcttcctttgaacagcattgcctttgtgtgtgtgtaaatatatgagtatacatgtgtgtgtaacagggaaagaaataagtcattttggcatctcctaattatccaggcagagctggttggtgggtggccaactgcaaaatcattcaaatctgatatgtatttgttgctattaggacatgtgtaaagaacagcctcactgactttaatggcacctctatgctgtatcaggcaccctgttaaaggctgtacttacattgtcctatttactactcacaaaggtcctattataagattgatgttctcatcccaattttctaaaagagaaagcagaaatagagattagtaacttgctttaataccacaaggctggta

SEQ ID NO: 40211 - DNA, 1203 bp, Homo sapiens
aaataatttagaagttacttaagtctaggcaaatgtcacattaatgataactcagcaagccattcaagcaagaccttgtctgatctctaccaggcaaatcttgtttgctatcttacacgtgcaacacaagtaaaaactcttgtgttgtttcgaatgtgccagaggatcactcactctctcactgtaatggaggatggagaataataggctgggggggacatagatgtctctctctctaggaccctgctctccttcctccaggccttgccagtacagtcaccttacagctgtctttgcttccctctcttctctgcagaaaagaaggacacagtgttgcggcaggtacgcctggacccctgtgacttgcagcctatctttgatgacatgctccactttctaaatcctgaggagctgcgggtgattgaagagattccccaggctgaggacaaactagaccggctattcgaaattattggagtcaagagccaggaagccagccagaccctcctggactctgtttatagccatcttcctgacctgctgtagaacatagggatactgcattctggaaattactcaatttagtggcagggtggttttttaattttcttctgtttctgatttttgttgtttggggtgtgtgtgtgtgtttgtgtgtgtgtgtgtgtgtgtgtgtgtgtgtgtgtttaacagagaatatggccagtgcttgagttctttctccttctctctctctcttttttttttaaataactcttctgggaagttggtttataagcctttgccaggtgtaactgttgtgaaatacccaccactaaagttttttaagttccatattttctccattttgccttcttatgtattttcaagattattctgtgcactttaaatttacttaacttaccataaatgcagtgtgacttttcccacacactggattgtgaggctcttaacttcttaaaagtataatggcatcttgtgaatcctataagcagtctttatgtctcttaacattcacacctactttttaaaaacaaatattattactatttttattattgtttgtcctttataaattttcttaaagattaagaaaatttaagaccccattgagttactgtaatgcaattcaactttgagttatcttttaaatatgtcttgtatagttcatattcatggctgaaacttgaccacactattgct

SEQ ID NO: 40212 - DNA, 1045 bp, Homo sapiens
ctgacctcaagtgagctgccctcctcggcctcccaaagtgctaggattacaggcatgaatcaccacgcccaacgaaaggcaattttttaaatgatagaaaacaaattctcactgctctaagacaattatcttcaaatgattttatcttccagtccttatctgtgtatgtatgaatagtttaaaccaaaaagtacatagaatagcttttaaaaaccatactctcggccaggagcagtggctcacgcctgtaatctcagcgctttaggaggccgaggcaggcagatcgcgaggtcaggagatcaataccatcttgactaacacggtgaaaccccgtctctactaaaaatacaaaaaattagccgggcgtggtggtgggcgcctgtagtcccagctacttgggaggctgaggcaggagaatggcgtgaacccaggaggtggagcttgcagtaagccgagatcatgccactgcactccagcctggatgacatagctagactccgtctcaaaaaaaaataaaaataaaaaaaaaaccatactctctggcttcaaatacttgccctgtcattgtctagctctttgatcctgagcaagttatatctctgtgcttcatccgtatagtattacctatcttatgaggaagtttggaaaatctaatgaaaaatatttctaaagtacttaaaacagaagctggcacatattaagcactgactaaatattagttattgttacacatatttgtatcgtcaggattctccagagacacagaagaaacagaaccaaattggtaagcttactctccactcatgtgtaatatctctcaatgaaaagaaaatctcacttgatgaaaaggatattccagtgctgtactactcattcattcagaaacaacataaatgggaattgagcataaaaagaactagaaatactttcctagatgtcaagaaccactatataatgaaactaatatataactaaaaacttcatttatatattcattaaaataaatcataataaaagtttaatttaggtaaaagttgtgagaaag

SEQ ID NO: 40213 - DNA, 1078 bp, Homo sapiens
taccaatgagaatggcactaatttaatttataactcattgtcagcctttttttcacctcatttgctttatgtggatgtgtttcctctttctggaagaagaaatatgggctaatattacacacagatgccaagctggctcattctgtgctttgctgatattctatggatagttgccaggaacagtagtagcctcggatcactattatttttttgtccattctgagtctgcgttatgtgtaaaagtctcacttcagtcagcttgacaccacaggacacagtgatggctcgttttttgcaagtaaaaacaagcctttcagatacagattttcactcatttttccaaactgagactcatttaaattgtttattaattttcaaagatttattgagcatctactatgttcaagaaatttttgggttctgaagtaaaaggcattgaacagaaatgatcaagttgtcaccctcatgaaccttacgttttaggactgcaaaagggatgaataggacaactaaatagagaaatataaactatgttatatgatttctaggtgatataaataaaacaaataaagcagaataagggataaagaacataagtggtcagataaaagcctttctaaagagtaaaattgaagcagagagctaaacgaagcacctgagatgagtggctctggcagagagaaatatatgtgctaaggctttaatataggaccttgcttggcgaagctgaagaagagcaagaaagcgaatatgtctggatcagagtctgatctgagtatgagtgttacaagaaggggtctaagaggtagtattgggtcaggtcatataggacactgagaattaaccttcgggtgaaattaaagctgtttgaagtattttgagacaagagggtgtggtctgacatactttataaagatatttttgtctacattacataaattaatttgcaatggggcaagaataattctacagagactatttaacaggttattgcaaattttgcgtgggatataatggtgatgtgaaatagcgtgggagcagggatggtgataaaaaggaattagactcaggataaata

SEQ ID NO: 40214 - DNA, 1067 bp, Homo sapiens
gctgtcaaatgtttttaagttatacaacattggaattctctactcagatccctcaaaaataacagatcagggattatgagagaccgagttaaggagatccaaaatctacttcgagcaaaattttgtggtccatattcatggccattctcaagttgatgggagtgaagagtgaatatcatgggatgaaaattctgaggaccaatgatgtgtcctaatctcaaagaacttcttaagtaagctttgtttattaatttatttcaatgtttctgcacagagtatactccattcccctacctctgtataaactaaaaccttcctgctgccacttagaaatatcctctaatttttttcatctttggtgaaaagaattaatgaatagccttagtcaagattatctcatcttgtaagttttcctccagctatacataaatggtctagaaaatactatgtaggtggtgcgtgtgtgtgtgtgtgtgtgtgtgtgtgcgcgcgcgcacatattctttcaaagagaagatcaaatctgggaataaaggcacgtaagtgcttagcaacaagactgatgtgtcttatcagaaaagagatgatgatagtgatagctgttggttcagcaagagggttctacacatcaggtgtgatgtaattccctatgtgtagtgatttagagaatgagctgcaaatagcttattggtggtgaactgacatgagcaagacagtcttcatattagacatcttagggcttgctaggggttttgctaaaactgctggtgaactaattaggtaatggaaagatctatgaggaaaacagacaattatatattccatacaaataaagagaagcgctacctctcctgatgctggattgtaatatatgtcctatgaagccagagaagtgttttcattccttaaacaaaataattgtttctcaccctccaggttaaaatcagctctgaattacagctttattggcaaatttaaaaagatgcaggcgtgtggtcagaaagtcttctaggtgacataggccctttctttttcaaccttagcaaatgtttttgagaatgaaaata

SEQ ID NO: 40215 - DNA, 1052 bp, Homo sapiens
cactcttccacaaattagtagtgagctaaactactcactactaaaattttctgacctaaaaatacagttacagcagcatttttgtgactatgatgaaagtgcaaaggaattttcatatttcaaaatccatttaactgcaactgtggagtttccatctaacattcaattggaagtgattaatctgaaatgtaatcacatgttaaaagtcaaatatcaagagaagtatccagtagaatacagagattccttttatttaagatataaacaaatccaattaaatcatatgctttgtagattgctaacagtagttggcaatagctgtgtgaaagaaatttcatagatgaaacacacaaaatttcattccagatcaacattaagagattaatatttgcaattaattttgatggttgagaacgctaaattcgaaccccatataggaggttttttttttaatcactgctatagcaaattaccacagacttagtggcttacaactcccatttattatctcacagatatttagctcaaaagtctgagtataatgtggcttaactgagtcctctgcttagaaatctcttgagacgaaaatcaaggtattaacatagctgtgtttctttctggagacgctggggacaattctacttctaaattcattcagattttaaacaaatttgatttcttgtggttgtataactgaggcccccatttctttgctgactgtcagccaggggctaatcttagctcttagatactccagacacattctttttcatgctttccatgtggcccttccacctctggcaggttaagtgcctctcatgcttctaatctctctaacttattttgctgcatctctctgactccagcttcagaaagttctctgtctcaaagtgcccacctgaataattctggtaaatcttccattttaacccccataatcctaattatatctgcaatgtcccttttgttatagaacatagtcaaaggctacaaggattaggatgtagacatatatctagggccattattctgcctaccatatccaactaagc

SEQ ID NO: 40216 - DNA, 1037 bp, Homo sapiens
ttgctttgtgttttatcagatcaacaaaacactacatgctaccttataaaacttatgggaaatggcaaggaatctatgatcctgagttcccttattgatggtcttgtaacctagcatgcccacttaaaattttattttgatttttgaaataaaattatggctacagtcttactttactgcagccaattgggttatatatttttaaataacattaatattcttactgataagttagttgtttttatgtcaacatgttctgtatactacatgatttaactaaaatctaactgcttaaggaccaccatataattgttccattaagactaaatatacatagataaaatgactgacccttgtcttactggcctaactcaaaactgagagctgaaggaaaggagagttcacacaacagtaggttaattcttttagataggtatgactttttccatttgctttgtcagcttcctatttaaaataaatatgcaggctttgaagaacgataattctgaatttgaatccaggctctgccatctagtggttatgagaccttaagaaagttatttatcctcttagagcttcaattagtttacctagaaccctgtaacaatgattactgcccacctaggactattttgaagattaaataagacaatgtatgcaagggtcctgtctcttagtaagggccccatgaatgtaaattagtataattaacatcattaatattaacagcatcattattacattataattccttattagtaacttatattagtagacaattttgtttatgaaatttgttattttattgcttaaaagcataaagatattagttatagtcatagaggaaaaaacaactactaaatataagactcagagtgttggagctgctgaaaatactggatagactgaagatactggatagatcagaagaaactggacagaccagaggagaaaaaaactgaaagatggtcacaaagagttaacattaaatccatttcacatttttctgggctgaggctagacctgtcctgaaacaa

SEQ ID NO: 40217 - DNA, 1049 bp, Homo sapiens
gtatagtttgaagtcaggtagcatgatgcctccagctttgttcttttggcttaggattgacttggtgatgtgggctcttttttggttccatatgaactttaaagtagttttttccaattctgtgcagaaagtcattggtagcttgatggggatggcattgaatctataaattaccttgggcagtatggctattttcacgatattgattcttcctacccacgagcatggaatgttcttccatttgtttgtatactcttttatttcattgagcagtcgtttgtagttccccttgaagaggtccttcatgccccttgtaagttggattcctaggtattttattcttttgaagcaattgtgaatgggagttcaactcatcatttggctctctgtttgtctgttattgatgtataagaatccttgtgatttttgcacattgattttgtatcctgagactgctgaagttgcttatcagcttaaggagattttgggctgagacaatggggttttctagacattcaatcatgtcatctgcaaacaggaacaatttgacttcctcttttcctaattgaatgccctttatttccttctcctgcctgattgccctggccagaacttccaacactatattgaataggagtggtgagagagggcatccctgtcttgtgccagttttcaaagggaatgcttccagtttttgtccattcagtatgatattggctgtgggtttgtcatagatagctcttattattttgagatacgtcttatcaatacctaatttattgagaatttttagcgtgaagcattgttgaattttgtcaaaggtcttttctgcatctattgagataatcatgtggtttgtgtctttgtttctgtttatatgctggattacgtctattgattttcgtatgttgaaccaggcttgcatcccagggatgaagcccacttgatcatggtggataagctttttgatgtgttgctggatgcggtttgccagtattttattgaggatttttgcatcaatgttcatcaaggatattggtctaaaattc

SEQ ID NO: 40218 - DNA, 1007 bp, Homo sapiens
attcactaactgcagacaaaatacctaggagaaaatagttttttaggctcaaacttatcacatcatactaaatttaacacacataatgacaactagtgaaaatttaggtgagagaaaattatggcttaaggctcagaagttctcagtcaggatatccagcttcctaccacaagcaacacatagaggcatttagaaaatgggcggagtgttttgttttttaaataacttgggctgggaggctggtgctgatgactattagtagcactcccaatcaaggaagaattttttagccccaaatgccagtagtataccagttgagaaggttttgggtaattgagtgacaaagaagaaaggatagggttttatttccgtgaaaatggaaatagtggctcttattaattaaacacattctttcaacaggattatgaatttctgtttgaagttggtgtttccaatgtatttggtcctgggactcgaattccaaaggctgccgttcaggtgcttgatgatattgagaagtgtttggaaaagaagcagcaatctgtataatatcctctttttgttttagcttttgtctaaaatattattttagttatgatcaaagaagagagtaaagctatgtcttcaatttaatttcaatacctgatttgtactttccttgaaagctttactttaaaataccttacttataggcctggtgtcatgctataagtatgtacatacagtttcacttcaaaaataaaaaaaaaatccctaaaaactctctatactctctataacaatactttatcaagaactctggacaatggtattatttttaaaaatcatggtgatgtatttattagaatgtttcttataaatctgtttactttttatattaagaattaaactgtacctaaaaaaactctgactattcccatttgtcagtttagcattacattgtcttgagcaccagaaaataaaatccatatattaataaaaacctatcttgaaaaactagtggagtg

SEQ ID NO: 40219 - DNA, 1049 bp, Homo sapiens
gatatagagatatagtaatatctggcacatattaggcacacagctaatgttggatgagttagtgaacaaatggatggaatatgctaaaagatttacttcttatcaaaaaatatttatgggagtgttgctgtttatccatttgtgttaagtggtgaattattcagcaaccttcaggtacttgtctatatatataattattaggtcattcagtcatttcttggttgacaaatgttgaaaagagaattggatgcataaaggcatccagaataaatttttcttaagtaatttcagaagagatgctttcataatgcattaaaaaattcttattttacatttttacagtcatttacttatgtaataaaatgtttaattatattgaatattatggtaaacagatatctttatcacaaaataatgaagttaatggaaccaccatttcatgtttcagatgtacagtgggagaaatcacagatgccctgaaaaaggtatttggtgaacataaagcgaatgatcgaatggtgagtggagcatatcgccaggaatttggagaaagtaaagagataacatctgctatcaagaggtaatatgtaaggtttcttaggccagaatttcatcttttctgttagcacaatccccttgaatctactgggagcttaatttccttacatacaactgagaaaatttttgaattttataataataaatagtaaattaaatattaattatatagactatataacatataatagagtatataatttattcattacatataatatataattagaaatatatcatacatgatacatattatatatctatactatcattttaataggtacatgataatatttaataataaatatcaaatattgaaactaatattagttttcatataattaatactattttgaactttcaccatagtccccttcaggagtttctcatgtcaaacagatgtttaactaacaatgatattgcttcatatcctccaggtatttatatttcaatctgcttactatggtagagtttcatattttttgaagttg

SEQ ID NO: 40220 - DNA, 1027 bp, Homo sapiens
atgtttgcaaaaaaaattcagatttgattttatagttttcaaaacaatccatttaaaaatacatttctattaaagtattttattaaaagaattaaaaagacagctagtattaaaaagctcatacaaagaacagcagtttttgatcatccacttgttttttcctgcttcctggagtaagatacatacttctttgcttatttttgtttttatctgcatagtttaaaatcacatgtatactatttcttgtaattttatcaactgtagacattacacatgagaccttagacactatctattgctttcctagtagggtagtttagattttggctgattcatacccctacttttcctcctcccttactaccaatataattatatctcaatgtaatcttttctgaattcttctaatgttctcatttgacttaaattgttttttctctatttctgctcactattgctgttctttgactcctctttgccattatagtaggaatatattttcatttctcctctgtttaattctgaatcttgaatcccatgtctatctcttggttatttggaagtacatctcatagaaacctgctaaaaatggtgcatgggagataaattatttgaaacttttcctgtttgggaatgtctttattctatttttataattgattaatagcctgactaagcttgacattatttccattcaggaaattcataagcaagtttataagcattgatctgttttttattctagatttttattctggctttcaatatttctgatcagaaatttgatgccattctcattcaggatctttctttctgaaagtattgggacctcttctttattttttgtattgatgtataacttggtgtattttttcctacatggtactgaacctttattgggtctttttcatctcacctttttttaaaaaatatttttatagctctaggaaattttcttgtattatttctttgacagtatttttcttgtcattttcatatgggttctctttctagaactcctagtcat

SEQ ID NO: 40221 - DNA, 1028 bp, Homo sapiens
agggtaagtggaatcaggccccaaccattgtcctcaccttcatttggttttgctgactaactgggctgagaagtgtattctaggtgacccaggggaataataggccaaagactaaaagtaaggccattttcttgttattgtcctttgtttagagcagtgttcctcacccattcctgcacagcagaatcccctggaaagttccttatttaaaagtaactttttaacagtacagttaaacagtccatttaacatatttaaccgtccattaaataaaaggactacatgcatgtggcgggagaatttctaaacagaacaggtatatagtatgaaaacgaaaagacttgcttctctctcctgtcactttgccaagaaataacagctttgaagtgttgcaggaaacaaaactttaagcatgtaccagcaaatacactatttccttgttaagaattatctctgtttttaccatgactgtgatgtgctagatataatcttttatatttgtctgtgcgtggggtttgttgagtttttccttttaaaaaaatagatttctagtattccgtcacagggatgtatttaactagtctccatctgatgggtatttagtggtttccattttttcctccctattttgaatgaagctgtagtggccatccctttatgtgtgtggatagatttgggaatatatctgtagtataaatacctagcaaggaaattactggattaagagttatgtgcatttttcttttggtagagattgcaaaattaccctctttaaagattgtaccatattaatacttctattaatgaatgctcataaatgctttgtatttaccaactccttttatcctatcagtaactacctcacaatgtgtagttatctttattttacagatgagaaaatggaggtacaaaagattatgtaacttgctcaagagccacaaacttgaaaatcgcagagccaggatttgagcccagagctcatgctgtgtcctggcagtttataatcaatcccacagtgtatgggaaca

SEQ ID NO: 40222 - DNA, 1077 bp, Homo sapiens
ccaaaaatgagagttattggtgacaatgattacagcctcatggctttcctgggagtttctcatttaattacacttcgtccccatacacagttctgtctgaagttctgtgggtcaattccagaggtggggcatgatcagcatatttggatcacagacagaaccagttgtttaattcacaatagctacctgccccctccccaccaactctaattggctggtctagtttggcagcctaaaaaggcttactcctgctaggggtactagctactgatgttaggaattgaatataacgggtttcctctttattctgtttgtcccaggactgtcctgattgcctgtaatgttaagcagatgagcaaggatgctcagccctctttctctgctgaggatatagccaagatcaagaagttcagtaaaacccgatccaaggtctgggcatcctttagaaatttgagggtgggaatggatttctaagagttgtgttttggtgcatggctatttttgtactagatcagaaggaagggttgaggtttggtgttagctttttctatttttgtctcaatcaacaaatgaagggtgtttttgctgtttgttctttagtaattctgttgttattaaacaattttaatacctgctacctgctgggctgctaaatgagcctagtacaaatattaggataggtgttaacttgcccgtgtaccagtaagtctatttattactgaaggcgttagtgatgcattactacttaaacattttttctttgttttagttctccaacttgtttttatctttttaagataggatgtatatccacatttagaattgaactacatatatgaatgtgtgatgataaaggttactgttcaagcacagtacatgttcttattaaacctaaaatgttttgaacctggggatacttttttcccttaaagattaaacctctaaacaagttttggaatccaggctgctctgtgcctactctgataatggcctgatagtgtaatttgtcttagaaaataattttttgcagttaggaacaatgtacctgtttgtgtgtttcttcaagtattttctttt

SEQ ID NO: 40223 - DNA, 1116 bp, Homo sapiens
ctccggggctcaagtgatcctcccaagtagttgggattgcaggcatgtgctacgccacctggcttcacaattcttatttttttttttagagacgggatctgtctctctcaggctggagtgcagtggtgccattatagaacactgcagcctgaaactcctggactcaacgaatcttctcaccttagcctcctgagtacctgggattataggcatgcaccaccaggtccgctaattttttttttcacttttttctagagacagggtctcgctatgttgcccaggctggactggaagtcgtggcctcaagtgatcctcctgcttccatcttccaaagtattgagattacagacatgaaccaccatgcccagccacaactcttattatttttttaagaaaacacttgttcattttagaaaattaaggaatagtcaaaagaagaagtcatctacatagatgttttaacaacgttataattttagaatctgctttttaaaaagtagaaaaataatgctagactgttatgtaatctttacaaatattttgttgcgggtttgggagcaggttggcataggaaaatgctttcttcttggtgttcagattgatctggattgaggacaatgcaaggttttcctctggagacaaaagatcatttatatggattacttgatgtctgaactgattctatcaaacaattcctctcctcccctcatcaaattttaattgagaactactgtattcaaagcactattaggcgctatggaggacaaggatataaataagacccagtcctcgtcattagtcttcacagtggtggagaaatgaaacataaacaaaaacgaatgaatatcttagaattataacttaaacatactttagcatcatttagtctacctccagatgaaatgctgagatcagagaagttaaacaatttgcttacggtcccagttagtgatggccttaaggactaggacctgtgtctctttaattcatgccagttgtattttctaagtcattctgttgtcttcttcggaccttaagatctccacttttttagaatttcctcttcaggaagtacttgggaagtactcttctgttgattactgtggccaagcttct

SEQ ID NO: 40224 - DNA, 1051 bp, Homo sapiens
taatgtacatatttggggaatacatttgatattttgatacatgtgtatcatgtgtagtgatcaaatcagggtaattaggatatccatcacccacctcaaacatttatctttcctttatggcggaacattccaattctcttctagccattttgaactgtgtaatacgttattgttaactatagcctactgtactatcgaacactagattttatttcttctgtctagctgtatttatgtaccattaaccaacctcttttcacatcccattcctctctacacttcccagcctctagtaagcaccaatcaactttctatttccatgagatccacttttttagctcccacatatgaatcagaacatgcagtctttgtctttctgtgcctggcttatttcacttaacgtaatgacctctgtttctgttggtgttgctgaaaatgacaggattttgttttcttaatggctgaataatattccactatgtatatatacgtttcttttttaaaaatttagtttgatgaagaatttctggaaacaaaagaacagttgtacaagttgcaggatggtgagtatgaaaatgaaacaactgcctctaatactgattttcctttaagagctgctgtttatgtggaagggcaaaagtattcaatgacactgaacattcagaacagtatcctaaaaccaaaaaaagcaagagggaataaatagttgaaattgccaggaaatcacttcttattcaatagttccataaaagctggccgaagggggtgagcagttccttccacatcccggtgaacagctcctctccatccctttcttctcccctctcccctccaatctcttcctccccctttctttctctcccttgccccttccctccttctcatctttccctacttccttcacactatctgaggcatcctggcctgcttgaagtatgcaaataaatatccccatttacatggggtactttctgaagtaaatactacacagaagtgaaatcaacgaactgccccctcccttcacctttaattcctggtcagccctgctccc

SEQ ID NO: 40225 - DNA, 1078 bp, Homo sapiens
tctgaataaggactgccccacctcgccctcttgtttcagggtgtgtttgctaactgttaagaggaaagtgaaaaacattcatggtcccctgaacctgctcaacttcacttgtgtctgtcatttttctaacccccataggcttctgagtttgtaattcttgatttatttcataggttttgaatggatgtcttatatatgtatgcaatataaccctttgtcaaatcttctctcttcattctaccctgcccctcctactcacctatgagtcaacatttttagttacagtaataaaaactcaaccctaaataagttaaacaaaaaaagaacatgagtcatctgacccacctaccccagtccaatcacaggaacaggctgatcaggtagagtaatgagcccactcctcagaccagactggatgaagctagattggtctctctcccagggtgaccacatggtttacaaggtggtggggaggggccctccccgtctctttgccagctaagtttgtgctcacatagatctgagacagtcgggagggaccagctggcagccaccagacaagtccatgattctcaatatcccacgattgggttgaacctaaagttgaagcacacacatctgagtaactaggtcactaaaacctactgaaaaacagccttttctaattcagggagttctcaatgctggtcagtcacttaatttgagtcatcattgacattgctctatgttggttgtttcttccatgcttggaactttacttgcccgaagaccccttaaaacccaggcaaatcccctttgagacgtggaggatttacaccatttctaccattaactgggagcatcagttgagcaccttgtccctgcatatatcatataaactttctgagctaaatgtggtggcttgagcctataatctcagcttcttgggaggctgagggtggcaggatcccttgagcccaggaggttgaggctgcagtgaactgtgattgagccactgcactccagcctgtgtgacagacctctaagaaaaaataaataaataaccctttctgttaactaatatgatgttttgactttt

SEQ ID NO: 40226 - DNA, 1033 bp, Homo sapiens
aaatgctcccccccagtttcacccccgagttgtggtgtgaagatggtctatagtgcctacccataactggcatatacatgataaaggtctgcttatcccttgacagtaacttaacagagtccaattcctgaacactcagcctggaggcctagagaaccagggtaaccatgcagtgaatccttagtaagtattatcctgcccttacttaaaatggcttgagcttaggttattcctggctgcagctctgcttctgggatctgttgctgtttttccatctgaaccttgccaggaacactactgcttaattttttttttttatactgctcctcttgcagcagtctcctccatttcattttgtaggatcttgcagagttggagtggtacctagccgttctattgatgtctgcccttataaaatgcatttttctgcttgtgggatctatgtgagtgtgtgtatttgcctggtggttccttgggagaattctggatataatgacctctctgtgtatgttgatctgaaagcctgtgaatagtatctcatttaactgttgtctttcacctgtggtctttgatgactgtggctttctgagaagggcctatgtttagagtattagaactctcctatctgtgaacctcagtgtttatggttgatgtggttgaatcagggagaatgcgcaaacagaggtgtgtgtgtgccggatgacttatacacgttttgggattacagtgtaattgtgtcttagtttgtggttgtgcttacctttgaaatacagttttaacttccttataaaagcacatgtgttctagaaaattacctagtaaaaagaatttggtgaaacaaatcattttctggggcaaattgcattaaaatgctaaggaaatgttgtggcaggaagaaaatcagagatgcctttgattgcagccaaagaagtaaaagcagcagctcaggcctacctcaaggtggtaaccaaggttgatatgggcatcttcattcaatctgtctgctcctagttaactgctgtccaatattagg

SEQ ID NO: 40227 - DNA, 1030 bp, Homo sapiens
cctgcacttaaatgccaccttcccagagaggcctccccaactaccagatctaaaatatcattcctcacatccctccccacacacacctctctttgacttggctttatttttctctgtaatatttccattgtgttgtatctatattgaaatcaagggctttttcttttgcctgccacataggagagtctcaaatattagaataaatgaatttgtgaatgaatgaacatgagatgattaacgttgatgttgcccaaaccctcccttgtgggagctgtaaccttatctcacatatgaagggcactgtgtttttaatagccctgaggttgtcagtaggacatcttaatcatctcagaaaagtggacccagacatatttcggaacagagcatatgatggtgaaccatcaaatcccaccaatgttaagaattaatgagctttctgttctcctatgaagttaatgtataaatttgctgctctgtacctttcacatttagaactgaagacaaaaataattgtgaaggtgaaggatggcattggaaactatttttagaaccctgcaacaactgagattttttttaaaggcactcagtctaaccttatttgattttatgacctctcttaactgttcctcagattatagcttgggactaacaatcaccacagtttttctagttgttattagaactaacaaacagctcctaataagaagagaatggagagatagtagctcagtccagtgaagaaatgaaagaaatccataagtcacaatactgggaataatccctaagcttattaccctccccacgaggtcaacactagccgggttgtggggatgtacccacaggtaacacagtgcaatgatttgccaaagagctttatgggcatgactccagatactgtgataaggatccctcatcgactgccctgagaaataagttttcaggcactgagcagagacagaaaacatccatcagcagctggtgagacctgggaggtaggttccaaggtgatgagtagggcaaaaacaaagaa

SEQ ID NO: 40228 - DNA, 1033 bp, Homo sapiens
tatggtgacatcaatgtgattgtaaattatttataaagtccacattatctagtgaggatgttccgctcacggattagcgaagagacatagggaaaatccttcaaatactatttcattcattctgtgatgccattgagcaaaagaaactgccaagtcataaaagtaattaccgagtaatacctataaatctaataaacttggccaggcacagtggctcacacctgtaatcccagcactttgggaggccagggcaggtgaatcacctgaggtcaggagttcaagaccagcctgaccaacgtggtgaaaccccacctctactaaaaatacaaaaattagctgggcgtggtgacaggagcctgtaatcccagctacttgggaggctgatgcaagagaattgcttgaacctgggaggcagaggttgcaatgagccgagatggcgccaccgccctccggcctgggtgacaaagtgagacgtcatctaaaaaaaaaaataaactttttttgagataacacattacatgtttgtaattctgtatttaaaaactgagtagtatcatgtttatacaactatgtagcactttttaaataataagagtgaagcttctgagattaagctcctgccagacattaaagacagttcaaaatcattttggccatggttaggtctacagaatctcagaagcatgctgctctccccaacccttgcttgcaatcctgcagcattcaccgagggccttcgcagctccaggcatcttgccagtgctggggaaacaacaaatgaaaagataacctcattttgggtgaaggacaaagacaattacaaattataggaagtatgctgacggcaacaatcagaattctgatgtgagaataatctcttaggtacttgtaaagataatttggaggcacgtcaaaagatactggagttttacctatgtggttaaatgggtagttcctattgtctcaaccaaataagatattcctggaagtttcacatctctaaaaaattatctggaagcttctgattatctga

SEQ ID NO: 40229 - DNA, 1115 bp, Homo sapiens
catattattgcttagttctcaatgaggaaggaccctgcataataaggcatagtggtggttccaccctaatgctgtcccctctgcctcctccaggtaatcccactaaaggttccagctctaaatatgctcctttgtccttcctccccattggccccaatctctccccttaccctgagaatgttagaattactttcctaggtctagaccataggtcttctgcaaaatttttttctggaaagaaccagttggaaaatatttcaggctttgcaggacatacagtccctgttgcagccacttgactgtgccatcgtggagcacaaaaacagccatagacaatatgtaaatgaatgggcatggctgtgttctaataaaactttatttacaggcttggaaaacatagcaagacctcatctctacataaaatttttaaaaattaactgggcatggtggtacataccagcagtcccagctactcaggaggatgaggccaaagatcgcctgaacccatgagttcgaagttacggtgagctagggtcatgtgactgcactccagcctgggcaacagagtgagaccccatctctttaaaaaaaaaaattacaaaacagaaggcctgtgcctatagtttgctgacctctactctagagtaatgaggtcccctccccttggacctaaagctcaatcattttatttgccaaagatcattttatgtcccagattgtggcccttcccagcgtaccctacttattttgaatttacaggtacattcacgtctacaacaggagagatgacatggatggtccatcttccttccatctacttcataccatatggtccccagtataggctcttaggtactaaactagaaagcacctaagagccaagactaagcctataccgttttaaatgagtgctcatgaaagtcatgttagttgctgaaattacctgcggatgtgactgcagaattgtcagaactccagagaaatgtcacctaaaactgcatttagtacttgggatattatccagaaggtgtaagaggattgttggggagttgatgggaataaattatatccctgtctttcccctctaagttcagaacaaattgaaaaaatactgg

SEQ ID NO: 40230 - DNA, 2077 bp, Homo sapiens
tgggaaagaccaatttggccacataacccctgtcatctgccatccagatactaaaaggcaaagcaaagtgtaaattgaattttctatgtgacattttaaatagtatttctgttgcagcctgtgattcagttaacttacctcaggctaagcctcaaaaaaaaaaaggaagaatgattgaaaccagtgacaaaagatttagtcaatgaggacttgacctcaggagtttctccttgataagatttgatcttgaaactaggcctagtgttagggatgcaattctcagtaaagttccctataaagaaaactgtggtcatttggttctcatctgcccttacacattttagacctacaacaagaaaggggcctcccgaaggaaagaccacctgaaggaccaccagaatgggtccatggctgctgtgaatggacacaccaacagcttttcacccctggaaaacaatgtgaagccaaggaagctgcggaaggattgaagtcaaagaattgaaaccctccaaaccacgtcatctgattgtaagcacaatatgagttgtgccccaatgctcgttaacagctgctgtaactagtctggcctacaatagtgtgattcatgtaggacttctttcatcaattcaaaacccctagaaaacgtatacagattatataagtagggataagatttctaacatttctgggctctctgacccctgcgctagactgtggaaagggagtattattatagtatacaacactgctgttgccttattagttataacatgataggtgctgaattgtgattcacaatttaaaaacactgtaatccaaacttttttttttaactgtagatcatgcatgtgattgtaaatgtaaatttgtacaatgttgttatggtagagaaacacacatgccttaaaatttaaaaagcagggcccaaagcttattagtttaaattagggtatgtttcaagtttgtattaatttgtaatagctctgtttagaaaaaatcaaagaccatgatttatgaaactaatgtgacataatttccagtgacttgttgatgtgaaatcagacacggcaccttcagttttgtactattggctttgaatcaagcaggctcaaatctagtggaacagtcagtttaactttttaacagatcttatttttttattttgagtgccactattaatgtaaaaaggggggggctctacagcagtcgtgatgaaacttaaatatatattctttgtcctcgagattttaggaagggtgtagggtgagtaggccatttttaatttctgaagtgctaagtgtttttatacagcaaacaaaaagtcaattttgctttccaccagtgcgagagaggatgtatacttttcaagagagatgattgcctatttaccgtttgacagagtcccgtagatgagcaatggggaactggttgccagggtctaaatttggattgatttatgcactgttatctgttttgacacagatttccttgtaaaatgtgcctagtttaccaaaattaacaaagggggggaaaggaccttagaactttttaaggtaaaatcaaatatagctacagcataagagaatcgagaaatttgatagaggtaacttgtttaatgtaaatctaatagtacttgtaatttctttctgcttagaatctaaagatgtgtttagaacctcttgtttaaaaataatagactgcttatcataaaatcacatctcacacatttgaggcagtggtcaaacaggtaaagcctatgatgtgtgtcattttaaagtgtcggaatttagcctctgaataccttctccattgggggaaagatattcttggaaccactcatgacatatcttagaaggtcattgacaatgtataaactaattgttggtttgatatttatgtaaatatcagtttaccatgctttaattttgcacattcgtactatagggagcctattggttctctattagtcttgtgggttttctgtttgaaaaggagtcatggcatctgtttacatttaccttatcaaacctagaatgtgtatatttataaatgtatgtcttcattgctaggtactaat

SEQ ID NO: 40231 - DNA, 1033 bp, Homo sapiens
gtctaagaacagatgtaccgtttctgacaaaaatcgtttcttgcgtgtgcttttgtagagaacacatttcattttataaagatgaaagagtgctcctgtgcctgccagcttccacagggcctcttcaagatggtttagactcagattatttgggacagatggcttgtaacaggattcttcaatatctccaaatactaaattccacagtctcttttggtagcctgctgctggttcagtactcttggactgaaattttaccttatgtttaatcaagctgcttttctgttgccgtgatgttagcctagattctcaaattggactatgtcctaggcatttgtccttatagtaataggtcatttatcgcaattactgggcttcatatttttccggggccactactgttaccctctccattcctgccccaccaatctgtattttcactttgaaacatttcttcactcttgtttccagcttctttatttcctcattacatagaaactgaccctgactacagccctctgaaagatctaattaaaaagtgaaatgattgattcccttatttttgttagacatattcctcctgtttgatctcagaatacttttgtttgaattttgttacagcatggttttgaacatatattcagcttatattcatatcatcattctactgtctgctcatttgcaaactggattttgtttttgctttactatatctggatccttttccccattatgaatgtctcattttttctaggtcaccaggtatgctcctttatgtttatccctattttggcaatcctttgtattaatatacagtaggtgctagatatttgtgtatttaattagtacattccttttagttttgtctttcatgtttgggtaatatctgtttctgacaagttcctctcctgatatattatcaactccccccccccgccttgcccccaccttctcttgctgtctctctaggggtgtgttagggcttacaagtggacattgtgggttgtcagaatgattggagctcactgatggc

SEQ ID NO: 40232 - DNA, 1865 bp, Homo sapiens
gtcctgtccttggataggacatctagacacttgtgaagtggtcattagtaaattgagtgtgaaacatggcattttggagaataaattgtgaagcaacctccctgaaaacttattagtaggataggacattcatgttagcgagtggacctagggtgttgggcagagtcagggagaccaggtgacttttagcacagtgcttttctaccttgtttcggtctagatggaacagggttatcagtgtccagaaaaaaagtctttggcttccggttaatctgtccgccccagccattgaagagagtggggtacttatttatgcaatatcaccctaggccttttctagtgtttgtatatcatctctctgcaagtttcttctgtcaaacctcaagctaattcttttcctttttgatacactttggagatgaagaaattctgatttttttttggtatgatagcccattcctctgctttctctccaaactaagactaagtagttatcccagagtcgttgctatagaccagtattctgccctccttcctgattctatttcttttcctttttttttttttttttttgacaggatctccctcttgtcaccaggctggaatgcagtggtgccatcttggctcactgcaacctcacctcatgggttcaagccatcctcctgcctcagcctccagagtagctgggaccacaggcacacaccaccacacccagctaattttcctattttttgtagaggtggggtttctccatgttgcccaggctggtctcaaactcctgggctcaaacgatctgcctgtcttggcctcccaaagtgttgggattacagctgtgagccactgtgcctggtccccaattcttttaactctacttaatccatgtttttaaatgttacttttagttatataaacttatgtaatcaatatccatagatagagatctgtaactgtttttcttttcttttttttctttttttttttttttttttttttgaggtagagtctcgttctgtctcccaggctggagtgcagtagcacaatctcagctcactgcaacctccgccttccaagttaaagcacttctcctgcttcagcctcctgagtagctgggattacaagcgtgtgccaccatgccgggctagtttttgtatttttaatagagacatggtttcactatgttgaccaggctggtcttgaactcctgacctcaattgatcagcctgcctcagtctcccaaagtgctaggattaacaggcatgagccactgcacccgacccataactgatttccttaaattctgcatatccgtattttaaaagggatatgggaaaagcttgttacttatcctggctttagaaactgactaatattgggccgggtgcggtggcccatgcccgtaatggtcgggcatggcccgatggtcggtcagatggtcgggagttcgagaccagcctgaccaacatggagaaaccctgtctctactaaaaatacaaaaattaaccaggtgtggtgatgggcacctgtaatcccagctactcgggaggctgaggcaggagaatcgcttgaactcgggaggcggaggttgcggtgagccgagatcacgccactgcatttcagcctgggcaacaagagcaaaactccgtctcaaaaaaaaaaaaaaaaaaaaaaagctggctagtattggacgtggtagagccatttctcattccatgaagtttctatttgagacttttttagtcatagcttcactgagatcatgttatcactgtatttgcttttatgtcatgtctaggcaggcctccttacctgagaattaatatgaccacgtttatcctgttcctaggatgccaaaatctgatgattca

SEQ ID NO: 40233 - DNA, 1613 bp, Homo sapiens
agttcctgattccagagggtttcctgatttagtatatactttaagcctgtatacacatacttaatctacaccttggaccaaaagagagtcagaagcagatttctgggacacttatatctttatatctgagaaagctttatggcagagctatccatgttaagggcctagcattcctgaattggtcaggatgcttttggtgcaagaaacagaaaacccaactgagacctacctgtgcatctgacctgaaaagtcctgagggcaggacttttgctccatttctctgaagtcccctcagatgtctgttatgtcctagactgattttccaagatgactgacagcagctgccaccataatctcacatggggattccctgacttcctgccaccctccaaagagtcctttaccttaaggtgattgacttaggccttggttacttgaagcaataactggaacagtggacatttgataagctgggggcccatcccagaaccagggaagtgaagttaaatctcctcagctagctgcttcacctttaagaagggcctgcagaacacaggaagtcagctacagcgtctgttttaaggaccgaatggatgattggattaaactaaattgacttgaattaaaattagaatttagccttacattttgtaaaggactcttagttgataggcaggaataggaggacatgcgttctaggcaagagggagtttggagagtaagcgagtgtggaatcattgggcaaaaagcaaatagcacaattggcagaagctggtttagaaggcaggagtggaagaaaaggtgagaaaggcaagttattgatgtaataataatggctaactcttactgagctattgtatgtcagaccttgcactgagcccctcacaaggacttatttctattattaatggatgctacagcattcccattttacaggtggaaaaaggcccagagtttagacacttgatttggggtcacaaagcattccagctcagatcaccttgacaccctggcctgctccgtctcctaaggtgtttggtagaataccaccaataagcttttgaataagaatgaggacattatgagtgctgtgctccagaaagacagtcttgttagagtgtagggtggattgttgtgggtttgttagagatggccagggcagtgaaaaggcctgacctgaagccacagccatgagcacagacttgagagaggtaattgtgagagactgtgtccaggataagacttgaagaccagttggatttgagggccagcaagaggagggatactcttccaaagagaagagggagctttgtgatcagatggaaatagccccacagcctagatagatatccagactagctgtttcttccaattcctcctcttcacggccaacctttgtcttagctatttttttggttgcctttctgcaagaacatgtttctaccacatttcatctattgtcagcttttcacatttcacatctgggtagagatggagcttataatcagtggcatcttaaaatcactgcaggtaactttccacattttaatattacagaattgggatgcctcctacacttttccctggtgagaaaaggaaagccccaatgttac

SEQ ID NO: 40234 - DNA, 1004 bp, Homo sapiens
cccgtggcaggaagtgcttcatagaattgtacggaagagctgatgttgcttgtcaggttttgtaactcattctcctaaccgcttggcagataacctgttggtctgcacttgttttgcttgcacgtctcagccaaaagcatttcgtgcagaatctacagatagaaacaggcggttttgcattagatggccgtggacaaacattttagccttccatctgtgattggggacaagtgggttacttttctggtagctcagacactgcctgggattctccaggaaagctctgcacttgaaagggaaatgttactcattttccttttagatttttaccctagattctaacttcttattgccaggaactttttctgtactgtttctctttttgcattttcgtttctatttctaattgaagacaaaggggaaatttttattgatagttacagataggtaatgttacagaatgtagtacagaactttgctgaaaagcgacagtagaaggcttactaaaatttgatgtttttcaagaaaaatatcttgtaacttcagatattgacctcacctccttgactcaatttccttgtctatacatggggattttatgtggcaggatcattgtggatttcaagagataatgcaaatgagagcccagcattgagtctgccaaatggtggtttgaaaatgtttccttcccattccctgaaatcaacagcttcttcttggttacagaccttaatttttggatgttctgtttgcaagaatctttttttccactacctcttcttttgctccctgcataatggttgcttgtcttcctgcttctagaggtgagcatccatccttgggtgtcttatttccagcttgaattacacaaatcaaagcaaaactgtttacttttcttgagggtaactttggtgcctaggtgggtagttagtgtgaagagagagttttacctcttgctttcctggctacattcttctctcctaaaagattttgtaatttttttt

SEQ ID NO: 40235 - DNA, 1072 bp, Homo sapiens
tcctaagtaaccagagaagatagcagatgtgcacctgttcacatcttcagtacccccaggcttcttggttgttgatgcgtgcaccaggcttgatttgtcaattctccaagtcgtcacaaagttattcgctgagccactgcgaataactcttttaatagggagattattttcagtcctaggtctgtaaatgcctactgggattttttttttctcttagttatttctccttttttgtcctctctaaccatcagtatctgtgatttgcccatcttactctatataacttataaaataggtgcagtacctgatatatataataggcactctcttccattaacttcaagttctgttggtttgttgttcaattctgaggttttaagttgctttaaggctctcactagcctgatcttagctttgtacaatgcatgctcatctgtcatcctgagcctaggctcctgatccagagtgggaacatggagacttctcagcgttcattcctttaacaggccctcacgtttgctatgtgcagagccttttggggaagacagatatttgtagacgtagtttctaacttcatatgttgtcatgtgtttaaaggaaaataaaaataattcagctgctcaagaagagatagattatgacagatgtcaaaagatgcaccagaaatccttcttggagaaagtaaggtgcttctgactgagggaatcaaagcaggcttcacggaagaggtggcatttaagctgagtctatagcagcactgcccatagaaacatgtaattgtaaatgttctcatagccacattaaagtaaaaaccagatgaacataattttatattttgtttaacccaaaacgtccaaaaatgttatcatttgatccatgtaatcctttactcacaagtaattttacattttttttgtacggagtcttcaaaatctggtgtatattttactctcacagcatgtgcatgttttcattaggacaagccatatttcaagtactcagtggccactgtgtgcctggtagcttctggactaaacaagcatgagtctggaggataattattaatcctgca

SEQ ID NO: 40236 - DNA, 1019 bp, Homo sapiens
ctctgtgtgcattttcagttacttataaagattttgggttgggcatggtggctcatgcctgtaatcccagcactttgggaggccgaggcaggcagatcacttaaggccaggagttcaagaccagcctggctaacacggtgaaaccccatctctactaaaaatacaaaaattagccaggtgtggtagggcacacctgtgatcccagctacacaggaggctgaggcacaagaatcacttggacctgggaggcagaggttgcagtaagccaagatcgtgccattgcactccagcctgggtgacagagcgagactctgtctcaaaagaaaaaaaacattttggacccaatacttgttgacccttatgtagttgaatagctatggaaaagtaataatcactgagaactgtgaaggacttcttagcttcatttatacctaatggtttctacacttttaaagcaactttaaaaacttaaaaattgagcagactatagcaaaagaataagatggaactaagttatttctcctccgtagccatcctaccctttggagaccagagtatgggagttacatgattgaagggacaccaggacagccctacggaggaacaatgtccgagttcaatacagttgaggccaacatgcgaaaacgccggaaggaggctacttctatattagaagaaaatcaggctctttgcacaataacttcatttcccaggttagttcctatattaacatgccccagcagatctctcagagatacaggtaatgaaaagagcaagtcacgacccgggcattccaccttacaatcctcatacgttacagatggtttatcttttatagactgcacttgatagactctgtaacagtagagctgcagacacagttgcatgccagcttctgtcagctgtggtggctgcaccgtggtgagtgcactcagtgggggctcagtgggaaagaccaggatactgtgatgacagaccagcagtgtggccgtgtctgccgcaggcgagggtggagggag

SEQ ID NO: 40237 - DNA, 1030 bp, Homo sapiens
tgttaataaatgtactagtgcaccctgcattgcaaattttatatggtttcagagtggagaagttgccttaaattacttgagataaaccaaaattaaattgttgaaacccctcaaataacttctccacacggtatatttatgattatgatttaactctccaaaagtgggactggtagtgggattatgaaagtgtaatctaccttacttattactctgccagtaagtaagtgtaatctaccttgactggaatgtccagataacctctttcttaaacttatagtaagccaactgaggaaataaattttaaaatgcagcttcttttttacaacagcaatttacagaatctttgcttcaaaacacatcttttttttgaagtacagcttgtcaaaatgggtatcgacctttccataggatattaagtaggacagaggaaagaagggatggaagtggcactactgactgatcctttctacaggtttccatattatgcatatgaacacttatgtgctgtactgtaaacaaatgtgactgtctggagttactgtggatcctttacagacttcacgtttccctgcctttttcttctggaggccacactgaaaacaagtctggaagaatgttaatttttctcacctttattttcaataggtggaatacatgttggtatcttttgatcatgaaaataaaaaagtccggttggtcctgtctggggagaaagttcttgaaactctgcaagagaagggggaaaggacaaacccaaagtaagctctcatgtgctgatttagtgtttctgaaactgctaaaacttctagaatatagagttttttctcaattattggaggcaggatagcctaacagttaagagtacaggctctggtttcaggttgccatagtttcaaatcatggttcctttactcaatagctgaataaccttgggcaagttacttaacttttctgtgcctcagttctctcatctgtaaagtaaagatcatagcaatacctacctaaggtgttggaattaaatacatta

SEQ ID NO: 40238 - DNA, 1045 bp, Homo sapiens
ggacaaatgctaacaagtttagtaatgtgactgcagccttcccagctaatctgctggcaagcgagccctgtgaaaaggcagatgcaggacgagccctttctatgaaaatcaggctgacctcatttgatagttatgcagcctgtgtcgatctcttcccagggcagcaggtagcaggccagaatcagaaccccaagtcaggagctttaacttatctgagattttcatcctttagcatgaatttcaaatatggcagggaaggagattgaattcacaaaaacctaaatcttccaaatcccacaggttacagttactctgttggtgggatccactataacacccaggtacgattcctgaatgggaacctgatgctgcctttgtgagatgtggttatgacacagtgtctgcactcagattcgtatgatggtggaatggcattaaacttggaggtcttgaagccctgtcgtcctgtccctggaggcataggtgacccccagtgagcactagcagtcactttggacttagaattcctgtatttagcattgactctcacttagtctctttagaaaactctcttttttctctctgttaggttgattagtctaacttcagttcctaggaactaaaatcctgaatttctcataggcagtctgaatttagggcagcctaatttataacatgccttagaaggaaatcatgtgtgcattcttgcttgctcagcccaagaagtgtatcaggccctgagcggggcaccgcccactgggggatgtgttctctgtcttgtccccatgctaaagccctaaactctcctgcacctagagggaaccgctgcagaaattctccatgattctcacccactacagtgccccagctctggctactgcagggcagttgatccaaagcagcttctgtctggggatcaggatactgtttcttgtcaaccacgtggtgactagaactctagcaggggaatacgttcttaggaaaaagccaaggaattcatttgtctttagaactcagaacctattgtactgaagtacagatgatt

SEQ ID NO: 40239 - DNA, 1037 bp, Homo sapiens
aaaacgcattgacacaggctcaggctaggcttcttaaaataagatatagagcacaaattaattatttcttaataggcattacaaagattcaggttccttctataggtcatagcgtattctgtaacacaaaaagcaaagttgtcgcatctctctatcttttttagctgtcactggacattgattcaacagcatttattgtccgttaacccctacccacccccagaagttcccttgtgccctttgcacgtgtgtgcatgcgtgtatgctagagagagagggggagagcacttcagttgattctggttttccttcagacaccacctttgagaaactgccttaaagagtgtgtggtcattaattagatgaaggggagaaaggaaggcattatggtcaaaagaacagtgtaacaaaggaggaaaggtgagaaataccattggatagtatgtgaaggttattgtgcagtttagtgttgtaaatgcagtgaataggtttagccagcttgtagaagtctttgtctagttctcaaaaagtagaggttatgttgtactttaaaagcatgagaaaagtagaatcgaaaaaaagtgtattagtcttctatacctatctcctacagaaaaaatcttttaagacttatcagttactgtgacctaccatatcatggttgaattcctccatgttaagaccctactgtctagaagtatggtattagcagatgtactcattgattggtactgtctgtagtttcattttgaagcataaacctgagtaacattcagtaagactctgtatgttcagaaaagatgtcacaatattaattgagcctctaacatcactatttatgtttctgaacatttttacatactgtcaaggcatctgaatatattcttaaagttagaaaactgtatatgaagcattactgatattgctggtattactggaaagaccatatcctaacgagcttgctaattagtactctgtttctacatttcatgatataatcaggtgtttttaaaaaaacattttaacagctttattga

SEQ ID NO: 40240 - DNA, 1082 bp, Homo sapiens
ttgcccctccctggttgcatgatacacttctcctcctcattcataactcagctatcaggactctcccaggaacaactgattattcccctttgtatgctctgctaaattaaaatttcaaaacatgtacccctttgtaaagtggactttcattcaaggtgcacagttcagtaattactaccaaaagaactactggtacaactttcaccctggtcaaaacagaacattatcactcccttataaaaaaagttttacctttttttatagtactttatataaatgaaatcatatcatgcgctttctgtgtctggtttcttttgcataatgttatatgtgtgagatttacttgtgtcgtatacagcagttcatgcattttcattgccgtgtagtatctgatttatggctacaccacgtgttggtgtgttttttaagattgtggatggatattagggttattttcattttgaggcattgcaaatactgctgttttgaacatttatacccaagtcttctggtgcatatgtgtgtatgcatttctgttggacatatacctgaaagtggaattgctgggtcataaggtatattatattcaaatttagtagatactgacagtttcccgaagtggtgactgtatcaatttatactccccccagcaactttgcttgtaattggctttttaacctaagctatctttttgagtatgcagtggtatcacatttttgtttcaatttgaattttctctgatgactaattgagaattatttcatataatatatatttattgaccatttagatattctgttttctgaagtgcctgttcatatcttttccccttttttctattaaattatctgattctttaggagttctttataacttattttatttttattttatttttgagatgggatcttgctctgtagtccaggctggagtacagtggcacgatctcagctcactacagcctctgcctcccaggttcaagaaattctctcacttcagcctcccaagtagctgggattacaggggtacgccaccatacctggccaatttttgcatttttagtggaggcggggtttcaccat

SEQ ID NO: 40241 - DNA, 1028 bp, Homo sapiens
tttgcaataaatggaatcctgttttaagtaggggaagccgaaacttaccttgtagttggaaatctagccttttctatattatgtctacttagagtaagcctgcatacccttgtgtaatagagaaaggctgtgaatccacaactgttttctgagtgcctactacacaccaggaaaaaaagttaagattaaaggtggcatcgggtttcaaaaattagttgcagatggacccaataataagggtgagctgtctctaccttctttcctcagattccaagaagactcccagccgaccaggaagtcgagctggaagcaaagctggcagcagggccagcagccgccgaggcagtgatgcatcagactttgacatttcagaaatccagtccgtgtgctcagatgtggaaactgtcccccagacacacagacctacaccccgagcaggttctcggccatccacagcgaagccttcaaaaatccccacgccccagaggaaatcacctgccagcaaattggacaagtcctcaaagagatagtgcaattggttctaccaaggcccttccttgagcatttattatttaagtttgaacgatgtaaaatatggtgtagaaattcttgtgaaatattgcaagaggcgagtttaaaattctgcagatggccttatttgtgtatttgtctttttattttatctgtataattttttttgtcagatattctggggttaaagtcacatcatatgtgaggaggaaaagtttaacatgaactaacatttctgcactgtaacgtgccgggcacacactaaactcagttactgtacctacaggtaagtctacatcctctctgacagccacagcactacatcaatccctgacgttagggatacctcatgacattttcctgtttttatggaaactctgagaagctgaatgatacatgcaggggatattttttgagatgatttaaatgtaaaccaaaagatggaagacaaaaagacaaacacacccacacgcagtctttgcagtatctgacagaga

SEQ ID NO: 40242 - DNA, 1025 bp, Homo sapiens
tgactaacaagccatcaatcattgtgtgtaattatattctttaatttatccccatgttgaaatactggcattctctttacctcaatagtacatgcaaaagacacagtccctgccttactggtctgtcttctcagtgtgatgagagggtaatgaaaccatgtgggcatctgtagctggtggattaatgatattttagcatgagctttccattttcatgctgacactttctttaatagtggttattcttgctggtgtctagtgttagaataagcacactttattttttcctccccgaactcacctgtatccaaaaggaatgcattgtaaaggaatgcatttaactttttgttatgctgagttggagttggcatggcaaaaagatgttcttgaaattctcaacgtgatctctggtgccaggtggccgttcttcccattaacgattgagcgcctcttcttttccgtcttttctttgtgtgcattgttgtgtgtgtataacccagccaaaggaaggacaaacatggaactgcgtgagaagttcattttagcagatggtgccagccagggtatggctgctttccgaccccgaggccgaagatcccggccatcatcacgaggcgcttcacccaacagatccacttctgtgtccagtcaggctgcgcaggcggcctccccacaggtccctgccaccaccacacccaaggtaagactcaggatgaagacttttcctccacctttgcaatcaatgtcccaagtagacttttgaatgttctatttagggccctagaatttgtaggaccagctatctccatttgtgcaccttctcatactgtgggaaatacaggaatttttttttgaatgtatgcttttgcctagtggcccacatagagatgatctatttaggaagcctttgtgatcttccagattgatttttctttttaaagcttcattcatttttttggtgtgtatgatttgccattggatcttttcacttattttaaattattattcttactgtgaaatgtgac

SEQ ID NO: 40243 - DNA, 1011 bp, Homo sapiens
tcttagaatcattttattttggataagccctgggcaagtgggccagtgcttactttcatggctatgtttaattcctagaaacattttaaaattactgccttactaatattgtttctgtcataagaaagaaaaataatttttagaccaaagctttggtagtatacttgataacctttgtaatcttttttttttcaaactgtttcctttgggctaaatcagcatgcagccgtctaacacaaatcattacaaacccccttttctgagattttactaatcgctatgaactaagcaagaaattaaagtcggttgctttagctactgcaaattgcacatcatcctgtagtttagaattattattgacaactagaggttctttctttcttcactgaacagtttggagactcccagcaactgcgactggtccggatcctgcggagtactgtgatggttcgtgttggaggtggatggatggcacttgatgagttcttagtgaaaaatgatccttgcaggggtaaggagatgcttatcatgataacatcatgaaagtatttcaattttatattatatccagcaccaaaacatactgggcataattttggtcatttattccaatagtgaatgtttcacattggtctgtcagcctaaagttcccaaagaacctgtggcagtcatgtaaaccatattcttctcatttttttctttcttttttttttttttttttactttttctggataaatatggtgggcgggaaatactagaatccattttctttaggagacttttacatctacgattttccaaacaattataccaaccaaggaaaggattttgtctgttatgacatagcaaagtaagagaaaagaaaattgaggtgatgaagaccgaaaatactggataataaaagtttaaaggtcaaagtttttatgaaatgaagagcaggtgaggaaagccataattaaaaaatttttaaataataatccaatgctaacttgactctttgaagttgcaga

SEQ ID NO: 40244 - DNA, 1025 bp, Homo sapiens
aattatttgtattcattacacttgaaatatcatctctataaggaacttttagttatttccttataacttttgttttgagtataatcttgaaccaaaatcatctagtcccattatctggttccttaagggtaattttctttaaatcccctcctttccctttgcttattagcggcaccaatttttttctaacaaaataaatttacacttttatttttaaattttaattaacatttcaggaagaattataggaaagtttaagtctcaatgtttaaggaaaaaagatttagaaatagtggtttttaaaagtttgatggaaaaacacatgagttcctgctggtgcattttacatgctttctaggtccttctgagttttaggatcctgagggatttggttggtattgtttttgggttttcttcttgaaactcagtattaaaacactgaaaagtagcagatttttttctacctagagttttctgtttatccatcatgagcccaaataaagtcacaattgtatgttacctgctttacaaagaagccatttatgtttaattgactgttcattttgctttcttgtctgctgggatgacaaccgtgaaattcagtctggtagtttttatgagttggacatgaacctattagaaatgatttaaagtataaaatcatttctcacaggctttcaaaacataaacctgtgatcagaaacctggaatctagaaatttattcaggacttgcagaatttgtagcatatctacattattggagatctattgaaagggcaagaaaaagatgattgcctgttagtatcaacagttatggtacagacaactatgagagaaaccttttagatttggcagctgtatcattaataatgtgtcattggctattctaatattacagtaatctaaaatggcatattaatccagcctttaacaaattggtttaccagatcattagggatgcagaaattttagttgactgtgaaatttatatgagtcatactcatttactttattctttttaagt

SEQ ID NO: 40245 - DNA, 1073 bp, Homo sapiens
tatttttattttcaatttactctctttacaagcattaacattttatttatttatttatttatttttgagacggagcagagtctcactctgttgcctaggctggagtgcagtggcacaatctcggctcactgcaacctctgcctcccaggttcaagcgattctcctgcctcagcctcccaagtagctgggactacaggcgtgcaccaccatgcctggttaatttttgtaattttagtagaaatggggtttcaccatattggtcaggctggtctcaaactcctgacctcaggtgatccacctgccttggcctcccaaagtgctgggattacaggcatgagccactgcacctggccacattttatattctttagaaattagtaaatgcctgcagtatgatggtttagattttttttaccctaaagataaagcatatgatttattcttcttcagaaataataacatggttcttttatccttctgcttttagttcatttctaaagacggttttctgtagtaactcttatttgattgacatcatttctttcatttcagaccttcatggaggaaatgaccagaaaacagcctgatgttgataaagtaacgaagacctataagaggagagctgctgatccttcctcattacaatcccatattccagtcttggataagggacgagcaggaagtaagcagtgatcaatttctttaaaatgtcaataaataagggagctaattttcttttattttgaattatttgaaatttgggggcaattggtgattttacatgagcacttgatatcatgaaatactttctagaaggaatacgtgtgctcaagtattgtagaaacttatttaaaaataaagaaaaaatatacccaggtttctatacgtaactttattgtcttgaagtgtatctttcatattagctagaagaaaattgaaaaaatttacagtaagaatggaaatcatcacaccctttgcattgtctcatttgtcttccattatatatataacattaaagctgaacataacaaaaatgaccatgacgtggataatcttcatgacttagttgttca

SEQ ID NO: 40246 - DNA, 1022 bp, Homo sapiens
tttttacataaatgccatttctgtaaactcactgtctaaatatttactactctaggtaattgccagatcttttatatattaaaggtcatcaagaatgaattaatcatttagcattagtaatacaactggaaggctcaagaagttcaagtatgtaaaaatgctttggaaagtcttctgaaaactattggactagtcctatcataaatgggatatttagatactgtaccatttgcatgtgtgcttgtgtgtgtgtgaatgtgtgtattggtgtatacgtgtgtgtttgtgtctttctgcaggcacatctcattttaactgttagagttgaatcagtcaaataatcacttttgtgataggctcacttttgtgaatgatctgagtatcagaatagaaacctatagatatggccaaatggtaatattcatttatgatgatttttttaaaaacacattaattttattgtgacagaatgttggttattaatgtttgaaagatctagttgcatacacagactcttggatcaaaaataaagagctctgggctcacttcttagatcagtctgtggccaaaataaatgaatttaattcctggcacatcagtttgtcaaaattaggcaggaaaaaaaaaaaaaaaaaaaaaaaaaaaaaagcaaacccagaagcttttcctctaaggtgaaagacaaggatttaagcctctaaaatttgacattatgagttagtacctaagatattatgaaagaccaaggagtgttataggaataaaagaccatctgccaacttcctatggaattccctgccattatctctaagacatccgtggtacacacatcaagattgcttagtcctctgttaggttcttagatacatctcttagagtagtgccaaagccagcatccacttgacattcacactagtgatttgagagaaattgggacaccatattaaagaatcattaagaaaaggaatttgttgcattgttttatgaaattgaaataatgaaggctggctgccattatttaa

SEQ ID NO: 40247 - DNA, 1027 bp, Homo sapiens
actgtttgctaacctgttggttggcaaagccaagatgattaactatgtcagtgacttagaaagtagaaggagagagaatagcattctgtgtcagcagtgggtgaggcataggaatattaatgaacacagcacagctacagaaaacataaaattatcaggggatacaagatgtgtgtgtgtttcagagcaggaaatactaatttgagtttcttaagacttttttggctttcatatgtgtcaacatatgtttcattttcttttgtataattttaaaactcatttttcaaatgcatatattggaataagttcagccttgaaatttatttttttattgtagagaacaaaatgaaatgaaatgtcaaaattataaatagaaacatctatccatccaaaaatattgaataaagagaaaatattttccttattttttttgcctataattcttccattggtaagcctcatgtgagatttttactttgcgtcacctcccctcagtaagtagtgtgaattagaataatgatataaccaatagatttctttgtttggagttagtgatttttaacaatattttctttgtatatctcttttaaaatagcaatttaagtctgaggcctatcaacagcagatagaaatggaaagactgaatcatcaagcagagcttttgctaaagaaagtaacagaagagagtgacaaacacactgttcaagacccattaatggaactgaaattgatatgggatagcctggaggagagaatcatcaacagacaggtaaataccaagacttttcttaagaaattataaattttcaatttcagatattaatgtaaaataattattaaagataaaattagaattatttctgcttctcatatattctattttaaccatgaggagcgtcaaacttaaaacatagaaggatatgatgattaggcttcactggatacgtttatggacttatacaacatgaaacaattatttttgtccttgttttatagacatgtcattcataatatcaaatttataaat

SEQ ID NO: 40248 - DNA, 1050 bp, Homo sapiens
atacgtgaggcaaaaagaaaatcccagagaactcaccactgtgttcttccttgtggcccaaggtccatggtagttctgtcctcttctctcccctttgtggaatcttcttatgtatgttttatatataatgcctgggatttgtaggtgtacttaccacgaagaacagagaaaagctaatgtactccatcttcccatgagttggcatagtgttgcagagtttttaaagtatgaatttttaaaaatctagtttcttatctccacccatctttctccccacctacctgttctcccacctcatctggatttccagattcctttgaaaagttagaagatctggcagtactggacttgaatagccaaaatgttcattcctcattaattcttccaactgaggtcatttcagtgatcatttatggttggtactgtggtgtcacaggcccattttattcatgggaggcactggggtttatccgatggaagacattgaaaatgttcgtgctctttgacttgatagtcacttctaggaatctacactaaggaactaactagagatgccaacagaaatttatatacaaatatattcattatagggttgtttgtataataacaaaaatgcagaaagcttaaacgaaaatccaggtatgctagaatataatggtattatttgaaaatcacatttaaaggagtatgacatgggaaatgttcatactaaatgaaaaagcaggatatgaagctgtttatacagtgtcatcccagacattttttttacaaatctttctctcttgatttgtggaagaaaattcactacaataccagcagtgttaaatctaggttttaattttcttctgtatgtttttctctgctttatgaatttgtactgtgcttataaattactgttttaattactgttatgatcaggaaaataacatttattaaaatatttaagaatgctcttaaaaatgttttctgccattattaaatgagatgcttaaaaattatacatgaatcatttaggggtatactctgcatatatagagatgtatatttaca

SEQ ID NO: 40249 - DNA, 1052 bp, Homo sapiens
aatttggtctgtatccttccagtcttcgtcttgaaagaggaggagaatttatatagtaaaatccttttgaaagtgaaagacaatgtatatagtaaaagtcttactaccaacagattacacatcttaatgccactgatatcttctggttgttcatgtgtgtatttttatcttcatttctttgaaatacctgcaagtctgtccaatgaaaatacctccaataaggctacatagacacacagatgtttagagctgggaggaacatgcccagcatgcatgggataaagtgacttgcatgtggtctcacaagcagtaagtggcagagtagcaactaaaatttaatccctatctcattctccctcactgctgtgcctcctcataaattatatatagagaaaaacccttgagggtggtaaaccattttttttctaaaattcttcaataatccgaaggttccattattacaacaaagtggaggtatctaatgaaaatatttccagctgtaaagactgtggaggatgaggatacaacactaaaaggatcataaaacattaccgtgtagggaaacgtaagaatagagtagtaggtacctgtcttcctggtgtggcagagattttgcacttaaaagataagtttccaaactcataattttcaagtttataaagaagctaatatatccctgaaatattttataaggttgcctacttatagatgtttggaattaggaccagagtacagtttgataaaaatgtttgttttctgttttacccaataactacatccatgaaatataaaaaggagtgattaaaaaaagcatatctttagacctggacattagccacgtattttggactatctgttttgcattgtttaaacaaattaccattctgagtctcttctctgtatgaaatagggacacgatatgacctgagctcatctttttagacacacctttagtcatatgcaatttgttttattaacagtgactctttccccagacccctgcccccagcctaccaacagccacacatgatggggtaaggacatgtgtcttg

SEQ ID NO: 40250 - DNA, 1031 bp, Homo sapiens
tataagataacatggggtgggttttctaattatatcacaaacgtaatacactgcatggtaatcattcctcttttccaagatatcagcctctgtttttatcatccttgaagtatgatcacatgtgggtgaaagggagttggtgaggtcaggctcactgagcctgtaatgattctactgtcatgatataaagccagtttgtcatcattttgagggtcacttaattctggcttggaatatcctcttcattttacttttctgttacctgattacttagaggttcccagaaagcaaagaataatacaagttaacttgcttgtttttgcttctgaaattttaaatatttatattaaatttcaaagataaaatcttgccgtgtcgacaaatgaattgttctttgaacttctcaggaaacatttttctttttgcaaaatagctttagataaaaaaggtttatttaactcgactgaaactaagggagggggggagtggggcaaagcatcacattattcgcctgcaaaggacttgagctccaagaacagttaaaggaaaagtctgttgaagctcttaagtgttactaacttatttgtatgttttcaggaactgaaaaaggaagctaagaacaacaaagccttactggactcccttaatgaagtgagcagtgctttgctggaactggtaccatggagggcaagagaaggacttgagaaaatggtagctgaggacaatgagcgctaccgattagtgagcgacaccatcactcagaaggtggaggagatcgatgcagccattctgcgatcacagcaggtagggaaaaatggtttgttgtttaggcaataaattttctccagctgttcttggagcttttacctgaacaaagatgactgttaatactgtttccattcatttgctgtgcttccaaaatgaaagagtggatttgaaaagaagttgactgggcttcttcgacgtctgagcaccagggcaaggctaatctgcacattgttcacagccatctgcctcattgtttcacagat

SEQ ID NO: 40251 - DNA, 1027 bp, Homo sapiens
cgttcatgtttaagataccaattcaaacataatacttaaagcaaatgctattctaaaccaaatgtcctaactcactcagtgaaaactatcctgagattttgaaagtagattggtgttatcttttgtgttagttagcttgacgttttaaaactattttgattatatataagttctgttgtacataagtttttctacttctgaatactagtcattggactaacatgtctgaagggtgaagtgttttctatactgttggtaagttagagtaccattttccacttacacttatttatgattacggttaaattctatgcacactgttataaattggtggaatgaatagcagggcgattctgtttgtctctaggcaggaagaaagaaactcctttggtgttccctctatccctactcctatctgaagactcctagctcaagattatcttcaaatctaaaccacattattaagtaacattaatattaacacattattatttatcaaagacatatgtaactgactgtatacaaggaatgcctcccagtaattcctattatgtgattaacagccaatcaggtcttctgatcattatgaagtaaccattatcaccatattgcatgatttaatttcaatgaaaatcaaagagacttgatgctttaatgagtcctagctaaatctgtaccttccccacctctatctaggccaagcttgtcccacccatggcccacggcccacctgtggcccaggatggctttgaatgtggcccaacacaaattcataaactttcttaaataacatgacaagattttttttgccatttttttaagctcatcagctgtcattgctgttagtgtattttatgggtggcctaagacaactcttcttcttccagtgtggcccagggaagccaaaagattggacacccctgatctagaccattgtgaaaaaatgccttacctcagaacctgcttacagtttatttctggccactctgttgctgccccaattgtaattcattttgtccccacaaat

SEQ ID NO: 40252 - DNA, 1108 bp, Homo sapiens
caattgggatacatttaataagcaggtgaaagaaagagaaaacaagttaaaagagtcattggaaaaagcccttaagtataaagagcaagtagagactctctggccatggatagacaaatgccaaaacaacctggaggaaataaaattttgcttggatcctgctgaaggagagaattctattgccaagttaaagtctctgcagaaggaaatggaccaacactttggtatggtagaattactgaacaacacagccaatagcttgctcagtgtctgtgagatagataaagaagttgttacagatgagaataagtcactgatccagaaggtggacatggtcactgaacaacttcacagtaagaaattctgtctggagaacatgactcagaagtttaaagaatttcaagaagtttccaaagaatctaaaaggcagcttcagtgtgcaaaggagcagctagatatccatgattcgctgggatcccaggcttacagtaacaaatacctgaccatgttgcaaactcagcagaaatcacttcaggccttgaagcatcaggtagatttggctaaaagacttgcacaggaccttgtggtagaggcctcagactcaaagggaacctctgatgttttattacaagtggaaaccatagctcaagagcatagtacactaagtcagcaggttgatgaaaagtgttctttcttagaaaccaagcttcagggcattgggcatttccagaataccattcgagaaatgttttctcagttcgcagagtttgatgatgaactggatagcatggctccagtggggagagatgcagaaacattgcaaaagcaaaaggaaactataaaagcctttctaaagaaactagaagccctcatggcaagcaatgacaatgccaataaaacctgcaagatgatgttagccacagaagaaacctctcctgaccttgttggaatcaaaagggacttggaggccttaagcaaacaatgcaacaagttactggaccgagcccaagccagagaagagcaggttgaagggacaattaagcgccttgaagaattttacagcaaattgaaagaattttctattctgctccagaaagccgaagaacat

SEQ ID NO: 40253 - DNA, 1088 bp, Homo sapiens
atggtcgggttctggtgagggcccttttcctggcttacagatggccactatcttgctggtagagagtggtggagagacatcatttctctcctgtttcttcttctaagggcgctaatcccattcacacgggctctaccctcatgacctaattacctcctcagagagagaggaaacctgattctttttgctactcactctcatacaccattgaacatgacacagaacacttctgtgaccagatgtgtgtgtatttctccccatacaccaaacaattctccaacagataccagctggatgtcctataattcaattcagttcaattcaattctgacactgtctacctggaattagcttcagaccccacaggttaaggggtcagtctcataatgctgccccccacttcagataccaatcacaagtcccaaattgtgatccgtatttcagactgatcagctataaattaggattcccatgacccttctcacgttcaattaattgctagagtgactcacagaactcagagaaagactttacttacatttacccacttactataaagaatattacaaaggatacagatgaacagccagatggaagagatacacagggtgaggtatgggagaaggggagcagaatttctgtgccctctatgggcatgccatgctcaggactccatgtgttcagctattcagaagctccccagacgaatcctattgggtttttatggcagcttcattacataagcatgattgattacatcattggccattggtagcagctcaatcttcagcccctcttccctcctcagaggttgacagggtgacagttccaactgtctaatcacatggttgattccctggcaacatctgccactgtcccctgctccccctaccctaagactatccaggaggccaccaggcgtcacctcattcaaacaaaagatgcccctcatgaaggaattccaagggacttaggagctctgccatacactcctgtcacttaggaaatcacaaaggtcttaggagctctatgtcaggaactgaggtcaacgaccaaatatcagaacaaaagattctcttagtgtctgt

SEQ ID NO: 40254 - DNA, 1053 bp, Homo sapiens
agagcagaaaaagaataaaacccaaagaatgtgatggttttttaattaaacagatatgtggataaattttaaaacggaaaaacctatttagtaattgctgcagaagactcttacagtcctaagacagttaaagaaatatgaaaaagaaagagatctcaaaggagaatgaattctaattaagtcatagcgtaatttgaaaaattaaatgtacaattaaagttgttgctgataatgcacatatttttctctcagaagatttcagaatgtatcaaggataaatttttatgaggattaggtggcctccatttctttgatgtttattaacattttacaattacttttaacaataatataaacccatgagactactacaaaaaatcgatctttctacatgtagcatactatcttctacttatattctgatgaatcataaatgtaatttttggggcatccaatttgttcatttcatttgaaatgcttttggccaatagcatgttgttattagcattattattcaaagaactgtgaactgtgttgtcaacaatctgatactactaggccataataacactcctcaagatccccttccagggaaattagtggataaaacaagattttagccccataagaggtgcagaaaacaggattttgggaccagtctcaaggcctgggtgtggaaccagcaatggggattgcattgactgacaatgtcagccttccagacttgcgctaatctttggggtggtgttaagtcaggaaacttttatgaattgtacaaatgcccagaagtgtatagacttcgctgtcttctggtcccaacaggtattctcttgtcacagatccttctttcatgtcttaatttccttgaaatccattcaaaacaatataaggtacccatttgaatactgtaattaacagttttttttccaaaatagcactataaacaactattattgttaaattaggaccttgatacttgctaggaattaaaaatgattaactctcctgaatataattgtcaagagtaaaggcatgtgatgttttgagaagaag

SEQ ID NO: 40255 - DNA, 1026 bp, Homo sapiens
ttgaacagatacccaaagaagtccaattccagccaccaggggctccactcgagaaagagaaaagccagcagtgttactctgagtacttttctcagacaagcaccgagttacagataacttttgatgagacaaaccccattacaagactgtctgaaattgagaagataagagaccaagccctgaacaattctagaccacctgttaggtatcaagataacgcatgtgaaatggaactggtgaaggttttgacacccttagaggtatactctgtgttctgagaccttatcagctacctaatgtcaagtttcctcatttgtttcctttctctcctagactaaatttttaaaacaattttgaatgtgattggctcattgtagttctgacaggaaaataatgctatactctttctggtaacttacttgaatctttatcataaattaactttaatttttgaatgtttgagattaaacatacagatgtaatagatatactgttatatctgtggagatacattctgaaaaatgtgagtatcaaaaaagctagaagaaccaagcagttagctttaacttctaacatattctgtggctagactttgtcttagtcttttttaaagatataattttaatacctttaattgtcatctaagataaaattcagactctgaaaataatataatacttattcctgaaccctccttggtttgaaatttttcttcttttcactaatcttgtctttgtaattcaaagaattatgtttggattgagaatggataaagtgacataatgttcttgaggtgacttttaacattttataaattcctgttacagatagctaagaacaagcagtatgatatgcatacagaagtcacaacattaaaacaagaaaagaacccagttcccagtgctgaagaatggatgcttgaagggtgcagagcatctggtggactcaagaaaggggatttccttaagaagggcttagaaccagagaccttccagaactttgatggtgatcatgcatgttcagtca

SEQ ID NO: 40256 - DNA, 1032 bp, Homo sapiens
aaaaacgtcatctgaggaaaaggctcgtttgctaaaagataaactagatgaaacaaataatacactcagatgccttaagttggagctggaaaggaaggatcaggcggagaaagggtattctcaacaactcagagagcttggtaggcaattgaatcaaaccacaggtaaagctgaagaagccatgcaagaagctagtgatctcaagaaaataaagcgcaattatcagttagaattagaatctcttaatcatgaaaaagggaaactacaaagagaagtagacagaatcacaagggcacatgctgtagctgagaagaatattcagcatttaaattcacaaattcattcttttcgagatgagaaagaattagaaagactacaaatctgccagagaaaatcagatcatctaaaagaacaatttgagaaaagccatgagcagttgcttcaaaatatcaaagctgaaaaagaaaataatgataaaatccaaaggctcaatgaagaattggagaaaagtaatgagtgtgcagagatgctaaaacaaaaagtagaggagcttactaggcagaataatgaaaccaaattaatgatgcagagaattcaggcagaatcagagaatatagttttagagaaacaaactatccagcaaagatgtgaagcactgaaaattcaggcagatggttttaaagatcagctacgcagcacaaatgaacacttgcataaacagacaaaaacagagcaggattttcaaagaaaaattaaatgcctagaagaagacctggcgaaaagtcaaaatttggtaagtgaatttaagcaaaagtgtgaccaacagaacattatcatccagaataccaagaaagaagttagaaatctgaatgcggaactgaatgcttccaaagaagagaagcgacgcggggagcagaaagttcagctacaacaagctcaggtgcaagagttaaataacaggttgaaaaaagtacaagacgaattacacttaaagaccatagaggagcagatgacccacagaaagatggttct

SEQ ID NO: 40257 - DNA, 1737 bp, Homo sapiens
tgatctcggctcactgcaacctctgcctcctgggttcaagtaattcactgcctcagccttccgagtagctgggattacaggcgcctgccgcctgccaccacgccgggctaatttttctatttttagtagagacggggtttcaccatgttggccaagctggtcttgaactcctgacctcatgatccacccgccttgggttcccaaagtgctgggattacaggcatgagccaccgtgcccagccgagattcttaacaaatcactgcattgcctaaggcattgagggttcaacaacagatatttttttctgagggaatttttagtttttctaaatctgagcatgagaaatagctcagaatttcttagcaatagctaagttttaaaggaggtttgataagcaactgagactgtcttagaaataacctcctcaagaaatactgaaaacttagtatttaaatagataaaatgctcatgtgtcacaggattgaccctgatactaaaataaagaaaatagagtgctgaagataacagattatgagatttgtttctgtatgaattattattagaaaccttatttaggttagcaaagaaaacaactgaaattctcatcaaaattattggagatcaagaaattagaggaagcaaaataagatgtatggtctgtaatagaaattaaattcttgaaattcaccaaagcttctcaatgaaaacaaatctgtctaaaataatttctgtattcctgtttaaattattttatggtgatcttgagttgatgatacaaaactaacacactagaatattaataaagagaaattaaattgtaattataaactaatcctgatcatgtagttctataatcaatgtaaagcatactcctcccagctgacattgattctgtccctagtagagtaaaaattttttcttataattttttctatacattggagctgaatccctaagtatatatttaaaagctattatacttaacaaatatctttatatttatggagtatttaaaggtgcttgtcaaagtgattcatatgaggcatgttattaacaacagcaacaaaatctgtgagtatatgaagcgcatcttttccagagccatcaggactgtagctgcctttgcattagcaattctgattattataattgtcataatatggcaagtataaacaaataagggatctgactttagaaatttcaagtttttgtataattttccttcttccccatgttatttcctaatttggctctctgttctaaagttctgtgctttgtttttttaaccataagacatgggaatataagtatcatttttaatttctattaggttagaaaactaaattctttagcatcatttggttcctatgtgttgggtgttcttcctacctcttaggattatgttgcatgcaagagaagaaagggcaccgtcgtgagagttttatttcccactttgtcactcacccaatgtgagtttgcaaaaatatctgtcctcctcgtttctccctttcctcatctgttgtaaattcccttcttgctataaaattctaagctagctaatttttaaaataaaattattcctgaggggcaaaaagatattcttcagaaaacctgtcgtgaagggttttttgtcctcttctgctgactttctgaggcttcctctctgaagaaggtgatgctgctggtggtggtgatagcgcttgttctgcatttgagttcacttggttttgtaagta

SEQ ID NO: 40258 - DNA, 1053 bp, Homo sapiens
agtggtgaaactattgcaaagcaatttttaaaagttatctcagtgatttttaatgcatgtatttctttttaacagtgggattagtaggcacttaaaagcagacaatgaaaaagacatattttattaatggaggtagcaaacttgcttatggaatatattttattttgttgatatgcaaattttattaggctgaacgttataaaattgtcattaaaaaatcagagtacaaatattgaaaatttcataaggtttgaactaatataatattgtgcatatgaaagatattctttcctttatcttattttctacctgtcatttgtaaataaattgtaaaattaggtaaataatatatttacccagtgagtggttaacatttttataacttttaccaattaatgtattttagcaatggagatctgaagtagatgaaaagagacaggtattccatgccttagaggatgagttgcagaaagctaaagccatcagtgatgaaatgtttaaaacgtataaagaacgggaccttgattttgactggcacaaagaaaaagcagatcaattagttgaaaggtggcaaaatgttcatgtgcagattgacaacaggttagtatccttttttgttcagttttagcacagatttaatgtctatctatggtaaatgagtaaaatctacacatatgaggctatttttttacttccatagttaatttgttaattacaatacctctacttagccatatttctttcttacttggaggactttagtaagacatttaacttaaaataagcattttttcaactctgttactattcatgtattctagcatttatatagttaatctgcttgccttttctgaaggaaaaaacaatgtagttctctaattattaccaacttataatattcaaataaccatgacttagtaagagcatgaagcatgcatgtgatagggctgtgtgtagcttctatactggacttaagaaatgtaaataaatggaaatgccctgatgttcattttaattgaagatacaagaaagtcaaaattctcagttactgaa

SEQ ID NO: 40259 - DNA, 1030 bp, Homo sapiens
aatgtggtccttcagaacatgaaccaagtctattctatgtcttccacttacatagataagtatgtaactgctatctcaatatataaattgcttcatacaactctcatttttatttactattaatttaaaattttatttttattaatataaatattaacttttattttgtcttaagaaatacattattggctgggcgtggtggctcatgccggtaatcccagcactttgggaggccaaggcaggtgaatcacctgaggtcaggagttcggtaccagcttggccaacatggtggaaccccatctctataaaaaataccaaagttagccaggcatggtggtaagcgtctgtagtcccagctactcgggaagctgaggcaggagaatcacttgaacccgggaggtggaggttgcagtgagccgatatcgcgccactgcactccagcctgggtgacagaggaagactccatttcaaaaaaaaaaaaaaagaaatacattatttttatggattgatgacacttctctatgttgatagtggatgtgcttcagagatgagtgtgtaatgtatggtcctcccacattttgcatgtaatttgggtagctcagcagttgtagccaatgaattttcatctcatacttaaacaaagttagaaagaaaccatcttatgttgcagtctcttgctgaataccacttgtggggcaggggatgggttggagcacatactctctattaagaagaaagccagaaaaatgtcagtttcatagtaaatgtatcagtgttccaaggtgaagaacatgttatgtcatgtgtcataatggtgcttcaggactacattatgcaaaaataaacatttaaccataggtggctattgtttaatttcctttttaaggttgaaaactgttaacttggtgttaaaaaacactcaagctgcagaagccctcgtaaaactctatgaaactaaactgtgtgaagaagaagcagttatagctgacaagaataatattgagaatctaataagtactttaaaggtatg

SEQ ID NO: 40260 - DNA, 1060 bp, Homo sapiens
tttttggttcaggatttggtaatgttgtgtctgcactaaagcactcttctcttagctggcatttttctttctcttagttaactttaattagtgtcctctctgccatgtttctaagtacttcctttccaagtactttgatgttgtttcatgctccttgcagttgagtgtattggtgtttgccatgatatattgtggaagccttcagtggtctgttgtgctaatctttttttttttttttttttttttgaggcaaagtctcgctctgtcacccaggctgggatgcaatggcgcgatctcggctcactgcaacctccgcctcctgggttccagtgattctcctgcctcaccctcccgagtagctggggttacaggcacccgacaccatgcctggctaagttttgtatttttagtggagacagggtttcaccatattggccaggctggtctggaattcctgacctcaggtgatcctcccatctcggcctccaaaagtgctgggattacaggcatgagccactgcgcccagcctgatctttagccatttatatcactgtagaagtcatatgttcctgcagaatcctatctaattctcatgtgagctaatgtattaataaagttttggagtactgaaatgttaccttggaggtatctatgccaaaaaaatctctcatgcaatttttatgttcagctagctttggctacctgttaatgtaggtggtgatatccttatactatatccatatatctatctatctatacataaatgccaacatacctgtatatgtatatatacgtgtggagatatatatatatatatatagcctaggggagattgctcttttaagatgggtgttgtatgaaagataaacattacttttatccaaaattattttgtattatgacaatagcatttttctatacctctctgccctatatttttaaacaaattcagggcaccaagcttgcatataagtgatttgcaatttttagtctcacttccaatttcattttaaggccttttcttggttttatacttctaatttaaagtttatgctatctt

SEQ ID NO: 40261 - DNA, 1021 bp, Homo sapiens
ccaaatttgaagggcactttcctaaatctctcctgactggtgtttgctttctttttgctctcattcgttgaaccaccaaatagtttcaaaggttaagtgcaaacttcattagtgtatctgcatttcagaaaaccgaaggttaaaaacagtcataatcttctcatacagtgaagctaagggtttgccttgagagctcatcagtgttgtaatttgacagtgagcagtaatgtttgtctaagaggattggtggccagaaataagccacagtgtctaatgagacacggaccggctgggcaggatgccacggcatttcttgtgtgtgcctttctcataagcaaaatggcctcagactgaagaggatggtcataaagtctgtgtggaacagatgtcagagtggaattttcagacttaatggagaggatctaagtaagctctggattttgaaatgagtgaatctatggagctgtgatctcctacaaatcaaatggggaatgtctgtggatgtgtaagagctgagaaagaagaacaatatgtagatcctgccaaaactcctttgaaccctgaaaaatactctcctggaagaaaatatttcagaagaaaaccgatcaaaaaaactggaggtgacaaagagtcagttggggcaaacaatgaaaatgaaggcaagaagaagagcagcagtcagccttcaaaagaacagccagctcctttatccaggggactggtacagcaggaatctgttaccctaaactctgcactgggagatggtattcagcaaaagaagacagaagttgtagctgacagcgttaaacagaaacttctgccgagtgctgtaagcagttggtctgactgtgtgaacacttctcctgctaaagacagtgaaacagaagtaaaagttagtgaactggatgaaaggatttcagaaaaagacagcactccatattgcgcaaagaggaagaaacatttagatgatgtcaacacaagcgaaataacattccaggaaaaaactgatgttttttctttc

SEQ ID NO: 40262 - DNA, 1050 bp, Homo sapiens
ctcatactcttcacccagctcacgtctatggatttctaaaaatgttcctcggcatccttgaacctgttttaggctagaagtagaagatcaactgcgggggtgaaaactccaccctcttgttaaggtggcactggtcactgtatcgggaatcatgaataaagtcagggcattgtccgtatttgaagaattgtaaccccatgtagtagtccaggcttatgtttgttctggtgtcttaaaaatgtaataatttgaattgtcttcttgaattattaatctgaaattcacttttttaagtttttaaattaaatttagtttttaagtaataagcattttaaaaatttaaaaataggtgcatgaatgaataccatgtgaggaatgttttctacttgtctcctttttatgtttaagaatgttaaggataattctgagttctaggaccccaaattttgcttttctctttataggttcgaaaacatgtgaatgatctctatgaagacttaagggatggacacaatttgatttctcttttagaggttctttcaggagataccttggtaagttttaactttcttattttattttgaagaacgtgtaatcttttctgcataggaccagtatgttttcagtacagactattcagatttttgcaacattcatcttttgagctatgaattctgcctgaaaaagaagttttggttagattcctaagcattttcaaacttcaaatgatgtgaatttgagagattgaagcactttgattacttcacttatataatcagttctataattaaaatactatttttgttcttgcttcttttttacctttgggtttttttgcttagcagaagttggatgcataatataaccacatattaaaagacttacaaatagcaagaaaataaacattgctttctgaaaaatgatctaacccattccgcaggtgtcattttttttttttttttggtgaacattacttccccttcttgttacctgttctccttcattatgttctgttcatgctcttcttttcatttctggtctgtcttgtgt

SEQ ID NO: 40263 - DNA, 1033 bp, Homo sapiens
ttttgagatggagttttgctcttgtcgcccaggctggagtgcaatggtgcgatctcggctcaccgcaacctctgcctccccgcaatctccgcctcctgggttcaagtgattctcctgcctcagcctcccaggtagctgggattacaggcatgtgccaccacgcccagctaattttgtatttttagtagagacggggtttcttcatgttggtcaggctggtctcgaactcctaacctgaggtggtctgcccgcctcagcctcccaaactgctgggattacaggcgtgagccactgcccccagccaaaataggggaatttttgaagcatcaactttataaagggctaatgaaaaatactgcttggtagagtgtattgctttgggttcttaaaacctacaaataagacttttttccccagaccttagatttatgttagtagttcctaaactttagccttatcgaactcacttggaaatattttaaactttaaaaagttgcaaaaataaagtagtacaaggaacactgatagactgtttacccagattgagctcttgttaatgttttacctagtttgctttattattctcccttccccagtcgtgtgtgtgtgtgtgtgtgtgtgtgtgtgtgtgtgtgtgtactttttttatctgaaccacttgagggtaagttatatataccataatcctttacctctaaatacttcagtatgtatttcctaagaatagggttattctgttttggaccacacagttagcaacttcataaatttatattggtataatattttaatgtctgtatttcagtcttgtttgttgatcttttacatcatcctctcttccccgagggcaaggaccagttcagggtcaggtattgcatttaggtgtcatgtctctttaacctgctttatttgtttatttaattaattattttttttgagacagagtctggctctgtcacccgtgctggagtgcagtggcgtgatctcagctcactgcaacctctccctcctggattcaggtgattcttgtgcc

SEQ ID NO: 40264 - DNA, 1071 bp, Homo sapiens
cactttactaaatttgtgtgggtctatttctgggccctctgttatgttcctttggtcgacttgacttttcttttgccaaaaccacactgtttcgacaactgtagctttataataggtattgaaattgggtagtattagtcattcaacttgttattttctgggattgtgttgtctattctaggttggaataattttttataccttagaaataagcacttggtaaatattctgtgttgagaaactttttctcggtacacaatggttacctttttaaacacaagtcagatctgttattcttttgcctcagctccctccagtggcttcctattttagtgagaatcaaattgaaggtcttcgaaatggcttatatggtcctgtggtacctggctcttctgttacctctttagcttcatcttttaatactttttgtcttggtctctttatttcatacctaatggcctccttgctcttgtttgagtacaccaggcatatcctgtcttaggtctgtagcagtggctgttggctttatctgaatgtctttcttccagatatctgtatggctaactccttcatctcttttaagtcttattcagatgccccccttctcaatggggactctctgatcattttatttaaaattccatcttgcctctcacttgtccctcaacctccacaccctcaatttctcttaacctgctctgttttatttcacagccatcactatgaacatcctctaatacttatttgttttatttatttatttatttatttatttatttatttatttatttgagacagggtcttgctctgtcacccaggcaagtacagtcgtgcgataccagctcactgcaacttccgcctcttgggttcaagcaattctcgtatctcagcttcccgagtagctaggattacagatgtgcaacaccatgccacgctaatttttgtatttttagtagagatgggatttcgccatgttggtcaggctggtcttgaatgcctgacctcaagtgatctgcccactttggcctcccaaagtgttgggattacagatgtaagccatcactccctgcc

SEQ ID NO: 40265 - DNA, 1034 bp, Homo sapiens
ctttcttgtatttggtcagtataatcactgggcacttttaggttttatggtccagtacaaactggttttcatttttcttagtatagtgatagatttcctttaccctggagtgtttaaagttcatgagtaattttgaaaataaggtagtaaaatatatttaatttccagctgccagccagaaaactgtagtctatttctgaacaaatgaaactcagtacacagacatatttagtgattaatgacctattctaagaggaagcctgaaaggaggaagaaggtgtgttttctccctgggctgtgaatgagaagataaagtaagtatccaaagtacataaatctgatattctgagattaataataggctttatctggggtaggtgttagtgactgagaattaataagacagtttttaaaatgtagcatgcatagtgaaaagaacacaggctttcaaatatgacagacttaaggtccacatttggcttggctcattcaaactctgtgacactgggcaaattaccaatgtactctgagcctcaatctcctcttttgtaaaacgggcatgataaaacttactatctatcatagtagatagtaactatataaatgagaaatcacagatgattggacagttaaaaatttttttttttgctttctggcaagaaaaattccggctctggagaaataatgggaaagtccccagtgtcagcaaaggaaaacatgtccaggaagggtaacagaaggagaagtatgacctgaaaacctgggagcagtctaggcatgaagagaaatgagctcacctctttgagcttcactttactcatctgaaataaaagaagagagcatccctggtagagactggagtctgaaatatcatgaggtcaagctaggaagagttcctgctgtgtatgaatatttgtaaataagcacagatattgtacatagcagcgttatttacagtggccaataggtggaagctaagtgtccattgatgggtaaatggataaacaaaatgtcgtatgtacatacaatggaat

SEQ ID NO: 40266 - DNA, 1039 bp, Homo sapiens
tgtttttcaaaagaaactataacaaacagttgtggactttgttagggcttgggtaggtgggccagaagtcatggggtgttacttggatgacgtcatagctcagggtctggttcttagcccagggagactcaccctttctaggtaaacaaactccaaggtgcctgatgtttaaaccagaacttgtttattaacgtatagtgaaaagaattcaacagccaagtggtttggacattcatgttggatagaagactagtacatttttttctatcagaaaatctgtatgagaagccatagtatgcctggaattggaagtaataggaattatgttttgaccagcaaaaaatttttattgggatgaagtccagcctaccaatttttttcttttgtggttcatgcttttgatgacatgtctaagaagttgttgcctaactcaagattataaagatatgcagctacatttttttctagaagttttatagttttgtcccttacatttaggactgtggtctgttttgaattaacttttgtgtatgatgctaggtaatatgctagttacgtatgaatgtctagtttttccagcactatttgttgaaaaaactgtcctttcttccgttgaattaacttggcacctctgggaagaatctgttgaccctatattgctaggtctgtctggaccctgttcagttccattgacccgtgtgtttaattttatgccattaccacaccatcttgatgatgatagctttaaatgttgcaatcaggtaatgtgagtcccagtttgtccttttacgtaattgttttggctagtctgttcctttatatttccatgtaaatttttaaatcagtttatcagtttctataaaaatgtttgccatgattttgattgtaattgtgttgagtctaaagatcagttgggaggctggatgcagtggctcacacctgtaatcacaacactttgggaagccaaggtgggtggatcgcttgagcccaggagttcaagaccaatctggacaacatggcaaaaccctgtctctacaaa

SEQ ID NO: 40267 - DNA, 1132 bp, Homo sapiens
ccttttgatatagtttgcaatcatttattgcatttgtatttcattacttgtgctaggcttcaagactgtattatttattaatggtattcaatcaaggagtactttggggcattagatttatctgtaacattgccaagtcaaactttggaagaaactcacacttttaaaagtgtttttactctcattacatgtattaatgatatgtaaactttaagtgtgtgcaaatggcctcttttgagaagttttaaagttacctattttgtcactatgtgttgttcttgcatgtctaggtcagtatttcttttgtgtttggctaagtgatcaccatatacatgcagttttcaggaaaggcctaaatgttgtcccctccaaggctcctttttccatttccagttaatggaagatttttttcatagtacttttaattccactttagcagtgaacttgaacaagctatttctggttggccatttctttctccaagatttttaaaccagtgttctgagtcttgggggaactacagcttcaagactagggactgtggtcttcagctttgaagtggcttcattctgggggattagtgaagctttctagatttgtttttcccttctcttattctacccttcccctcctccccattaacagaactataggataatatagggtacagaactatagaactactcttgggtagttctgtttgtaaccctgattctgctctcccacctgcccagcctttgagaattaccattgcctgtagggaaaagatgtaaacattgagtatgctgattttcacttatttcattttatcctcaagaaaactaaagtccagaaaaggagggtcagtaaaggaaaaagcaagctctaaactaaggtctcctgattattagttcttcacattgctcagtctcctttgtttcttactggtgtatagaagctgctttcactggctatatccaagttaatgaaaagtaagggcaagaatctagaagaaatgagtggaaaaagtgaagcaatagcaaagacagaagtagtgatatcagtgttattctttacatgcaataagaggaatgctgaggtttcagtgttaccattgatgtttctgtattttagggccttgcattatgttggt

SEQ ID NO: 40268 - DNA, 1033 bp, Homo sapiens
actcatgctcggataggtcaggtgaagtcttttctgatccttcctatcagagtgaggtgcccttagttttgattctcagcactaggtacaaacctccaacatagcagctaccccagcaaaaaaggaggtctctgcagtaagactcacgtgggttcaaatcctgctctgtgtatctgcaggaaacagcacactaagaggatttaactgaagagagtttaatgaaggcactatttacagaaatgtgggcagggctaaggtgcttcatcagcctataggtggagcctacttaccttcaactcctggtctaaggggcagcagagggcattggtcttaattgatcctggtaggaagagctggagccatggaagagcccttccacaaggatggtgcctgagggttgcagctactgccagaacctagtgagtcaggagggagcagggcgaataaatatactgctctcttagctcgtgctctcagtggtatctcctgttgacccaacctacctagaagctggagggcaaaggaacttgggtgatgcagatcacagccatcagtctcccagggactgagcaaggaagagatggacagacaatctgagagggttacagtgacagcagagaataaaaacatacctacctggtggccgagcatggtggctcactcctgtaatcccagcaccttgggataccaaggtgggcaaaacacttgaggccaggagtttgagaccagcctagccaacatggcaaaaccccttctctactaaaagtacaaaaattagccaggtgtggtggcacacgcctgtaatcccagctactcgggaggtggaagcaggataatcgcttgaaccaggaggtggaggttgcagggagccaagatcgtgccattgcactccagccttggcaatagagtgagactacgtctcaaaaataaataaataaataaataaataaaaacaaccccccccccaaaaaaaaaccacttagtattctttgccaagatatttcaattctctgagaatcagtttccttattat

SEQ ID NO: 40269 - DNA, 1036 bp, Homo sapiens
atacagttttgtttactatagccttgcattatagtttgaagttggctaggataatgcctccagctttgttctttttgcttaggattatcttggctatacagctctgtttttgttccatatgaatttaaaattttttatttctaatgctgtgaagaatgtcaatgttagtttaatgggaatatcattgaatctataaattactttgggcagtatggccattttcacaatatgattcatcctatctatgaatgtgaagtgtttttccatttgtttctgtcctctctgatttccttgggcagtggtttgtagttacccttgaagaggtcctcacttttcttgttagttgtatttctaggtattttattctctttgtagcaattgtgaatgagagttcattcatgatttggctctttgcatgtctattgctggtgtataaaaatgcttgtgatttttgcatattgcttttgtatcctgagatcttgctgaagttgtttatcaccttaaggagctttgggcctgagacaatgaggttttctagatataggatcagctcatctgcaaagagagacagtcttatttcctctcttcctttttgaatacgctttatttctttctcttgcctgattgccctggacagaacttccaatgctatgttgaataagagtggtgagagatggcatccttgtcttatgctggttttcaaggggaatgcctccagctttttcacattcagtgtaatattggctgtgggtttgtcataaatggctcttattattttgaggtaaaaacattttaaacttgatatgctcaaaaaaacaatagcaaaatttaattgaaatattgtaattataccctttcccttttacaaacaaaatgttttgataaaatacatttattatacaccatgccttaaatgtatttgtgttaatcactggaactctagattcagcttttcaatgaaacatattcacagtatagactaattgttaaaggcagtactcattttcaagctagtcagtcaaattagaattgcttt

SEQ ID NO: 40270 - DNA, 1039 bp, Homo sapiens
ataatattactctgataaacaattctggggcaggaatatttccatgcctctatgctaaataaaacttagaacaagcaaacatagttgtatgcttgctttaggaaaatctcactcttgatggtgaaacaactaaaatagcttatttatcaagactgatttcccaaaaagacttgcttcaggacttcccatttcatcattcttaccaatccaaaactattttgtcagttctaaccaggttctcaccttgaaaaatgctgattaaagtggtccagcccacccaaccctaaaaccttgtaaatatccttctctgtctttcctcttcttgttcttcctcactgaagtcagtctgctaaacttagctttgctagatgagtgaggttttttaatgttgtttggagagttgacagtatataagctagttatgctgaataatatatggggaagaaatcaagaattcagaatcttaactttcttttcttattttttaactgtctgctagtttatctgtatggacatgcatgtctgaccaagctatgaaatctccattcttagattgaacttctttccttctcgcctccatttatttttctcatctacccccaccccaagtcatgggatagggagagttgtcctattccttttctgtctcctaaagtagtttacccttatagaagtcttgaaaccagattcatattttatctcattttagtaactagtatccaaatcccaccaagtttacataagaaatagcaaaacaaaaggaaccaactgggtatttatctaccaatgaagatactttaaatagcaatacatacaaggtaatgatctaactttgtatgttttgacatagaaaagtaaacaccgtgaaagtaggtgaaagagtatatatattacctcatttttaaatgctttcgtgcataaacaaaatctgaaagtctgtgtgcctcaggaaagaagtagataatcactttattttttttaaataaatatcttttattacctctgcaattaaaagtattacacatttttaaggatgaaa

SEQ ID NO: 40271 - DNA, 1026 bp, Homo sapiens
ccagagcacaggtccaaaattacttccaaaaatcatcttttcaggctaggtagtttcatgtgttacttcttttattctctcaggattctaaaatttacttccacagtcctgtgaaataagatgaaaaaatctccctaccattcatgatttcataacattcattgatctatttatatcaattccagttaaaggaggagcccaacacacttaactgtgcttactgggactcttctttttggatctggtcttgacaactctttagcccagttgtccccgcaacttggggaagatttcggggaaaaagagcttaggtttttgctaacatagatttcaactcttttatattctgaaacttttcattagagactcagttataatatttttcttcctctttttctaccatctttaatataaagttcatacaattgggagaaatatgttccactacttacagtgcttaggacattttttccacagaaacattgttttacctgacaattttttcagtgttgttagtactctgtttcaggaatagtatcacttgtataggcttttatggattgtaatataatttaaccactatatatatcatttatatatattattacttctatgggaaaatgttctaaattttctattttaactaacagggtaatataacctgcatttcatggttttggggtgtgtgtgtgtgtgtgtgtctgtgtgttagtcataatgtacttttcagtctcatttcagtgtaatagaataaagactttgtatttggtctaacaaagagtttcatttgtttacttattagtgaagacttttcaaatgctttgtctcttttatgtacatgttctcaatcaaatagtctcataatgaaaattcaggtataaatgcctggaattgtatactaagttaaaatgtatcttagattgtttttgttagatcattgtcatattctagcaactcatattgaatataatgattttgtgcttttaatatcaacttttagaactatattttaatgaatatattttt

SEQ ID NO: 40272 - DNA, 1034 bp, Homo sapiens
agagggaaggggcagagccaaatatattgaaataagtgatacagtgagtttggagaggagggagaatcattgagcaaagtacatagtagttaacacttcttatcaaacatactttttgtggaatgtttttacaaatggttatctctctccacataactctaccatgtattgggatcaagaggaaggtaggcataaatgtacacacatccacatttttatgctgaccttggttatcctatgtttattgtcatattgcagttgtcaggttttttttagtttgtaaatttgcctaaagagtgtccatcctgaaaaggttttgttgcctgatctgctaaatctgctgggtactttattaagatgttaatggtaaaacttttattttgttctgttatttgcagagcaaagatggtcgacctttgccagcaagggataaacgcgccttaaaacaatttgaagaaaggttacgaacacttaagaagagagagaggcatttagaattcattgaaaacagctggtggacaaaattttgtggcgctctgcgtcccctgaaggtaaatgaagtttttaaaaattatgctgtcactcttccccaagtttatgtagtacctcttggagagattgagctctccttttgaggcattacagcatggtacttaaaatggatttgggggtttaatctggttttaaatcacagctctctttggtagtttgggtaaggtgcataacctttctgagcaatgtattacaacaattgttgggaaattaaaataaaaatatagataagtattgcaatatgctgctagcatattcttcaagtttatactttcctataaattgatctgggacttagagcttaggagcctatgctttctcctagtagatttacagattcaggtcttatgttaagtgtttagtctattttgatttggtttttgtgtatggtgtaaaataagggcctagtttcattctgttggcgtgttcattttttccagcactatgttggattgactatcctttccttagtatgtattcat

SEQ ID NO: 40273 - DNA, 1023 bp, Homo sapiens
cttactaaatttaaaaaagtaaaacttaacaggcacggatatatatgtagatattctaattttttggtgccaccaagtggggaaatgttgaataatgatgtcttcagcaaaatgtatcgtatggaccagtgaactgcctatagaagcagtgactgctaaattgtttactatatacctctatccataaaactttaaatatgtccaccaggatatttatgattataaatacatatttacatattattatgctaatctttgtacatttaatgtaaaatataaactaataggttaaagaacattaaagtgataaagattcaaatatagaaataaaacatttaatattttcttcttgtacccatcaaatgttggtttgcctccatgtcttagttcaggtcagtataacagatgtaccatagactgggtggctcaaacaacaaacatttatttctcatggttctagagactgggaagtacaacatcaaggtgtctggtgtctggtgagggccctcttccttgatttgcagttggctgtcttctcattctatgctcatatgataaagagcagggagagagaggaagcaagctctattgtgacccttcttataagggcattaatcttatttataagggattcaccctcatgactcagttatctcttgaaaactccacctacaaatatcacactggggattagatttcaacatacgaattttaggggaaaacaaacattcagttcatgttacaacaccttatgaatcacagcagtggttctcaataatatttagagaaagaaattccctttaaaagtcaaatttctcagcctatgtgatagcatatttcactgaatatatgctaccgattgtaaggtgcaccgttactttatgtgtcactataaggaaaaatctgacaagtttttcttaatcatttataatctttgttttatatttagtgagtgagatttgttggatttgtctgcattcataacaaggaaaatatgaaatgaaaggcgttcctaaaacttta

SEQ ID NO: 40274 - DNA, 1032 bp, Homo sapiens
taatactgcatatttttttaaacttgagatgagaaaattatttatatcacaaagaatattatttatagctgtttctttaacttgctggaatagcaaatgttgtgtcaagtgtactcaaatttaagttggaatgaacacaaaagttaaagttcatttaaatgggatggtttataggacgttctcagcattgtagttagtacagagtaagagctcatatgtcagctgccacaattgttcttgacccagttattactattgttagaaattgctgtaaagttaacttgaattatgggttgttattctgataatactgttgatttcttgggacatgggacagaaaaggctatttgggcatcatgtactatatagaaagagttatgagaagagggaatcagataggggagtgaatttgttaagtgaatatatatacatatagatagataaccatgattaagtacatatgtatttagtaaagctcggtttattatttatttccacagctttatattctgttatattgttctgtgtgttcttctggatcccttttgtctacttctattatgaagaaaaggatgatgatgatactagtaaatgtactgtaagtatctttattttagaggccttagtttaggaaagaaaaataatattacctgctttttcagagaatgaatgactgaattttttctagagcagtgttgtctaatagaaatacaatgttagctaaattaaaataaaaagaaacagttgaaattaatttaattatacattgtatttagcataatatattccaaatattatttcaaatatagtcaaactattaatgaaatattaagtttcttttcttcacactaagtctttgaaatttgggttgttttttacacaacaatcaagctagccacatttcaagtgctttctagccacatgtggcttgtaactattgttttagacaaagcaattctagatcaggcatacaaaattttttctgtagaaggccaggtagtaaataatttaggatttgtgggctatatggtc

SEQ ID NO: 40275 - DNA, 1029 bp, Homo sapiens
ctttgtaatgactaattattctgtcacaatattgactgcttttctttgtcattgtgttttgatgtaaatgttagctattttcattggtagttgggaaggatatgtttaaaaaatttttaacaatttaaaagtctaatgtatccaagttaattttcatgtgagttataatttaatgatacgtggcttttaaaaggtagattgttgcttcgtatatgtttaaacatcttaggaattactatgtattctttggtacagtttttgtccatgacctttaagtggctctctattcacttgttttttgctagttctcgataagttgttttaaaaaaccaacttgtttcatgagtttaatttcgctcaatttctatggacatgaggcttaaaaattttttcttaatgtgttctttgatgttagtgggtctgctaaaccaaaaatctgtttatcttttatttgctagtagcaatcttttaacaaaaacatttataagtaaaagcatattttatagagatgttaggatatgagagtgtcataactttagagtcaagaataatttgcctttgaaaatggctgtgagtttgatgtagaacttttaaaaaagcagtttttcctgtttcatgatagtggaggcagcaatattttttcccccatttacagatatataaactcaacttgacattagaactgatcatatgataaatgttataaaataaatgttcatttaattctctctttacagttcaacatttatggactaaaagaagaaatctttataaaggacactgagaaagaacagattattagaagatagcttagaaggttgtatcagggaaacaaatatttagagcagttttaaacctattttgaatcattgactactagagggatattatagtctgttgagaattgtgtctgttctccacttcatttccccagatgttgattgctaaaaacttttgtgggcacttttaccagcaacatgggaattttggttgccatacatcttttaagtcaatagctgccccattttt

SEQ ID NO: 40276 - DNA, 1057 bp, Homo sapiens
ttagaccctttgctttatgttccctttgcttagaatgcttttcttccagttatttacttgactaatttaactcctttagcctttaaatctttgcttacatgttacctgtgaatgaggcctaccttcaatctctggctcattttatcctagtctattttttttctttacagcctttaattacattctgatgcattatatagttttagttatgtttattgtttgtatcctcctgctagaatttatactgtgctagggcaggaatctttatctcttttggtccttgatgtgttttaagcacaaagaacagatattggcacatagtaggtactcaaatatttgtgaaattcatgaattttttattttctatgtaatttagggaaactcacttgaatttcttactttgttaatgagagagaataatgtgtacttccgtgttgttaagattgagtgagtggggtgggatttcagccatggccaagtttgaaaattggcagattctctcaccagaaaacaaatatgaagttggacaaaactgaacagaaaacaacagcttcagttctttagcaatcaatgaaagacatacaacagtctgagaagtgtttatacttaaaaactgctaagggacagtggtagtttcttgtattttagcctagggctgttatgtttccctacccccaacttccagcttggttattgcagaagatctgccagggcagggtgggtccagggaggacctacagctgtactgctgtatcagaaggggactcactcagttgggtggtgctcacttctagtgctattgtttatggaagtgacaatcttggagtcaggtgagcggagaggacccaggattctactagcatgggattgtggtcataattgggacaagcatatgtctggctgaagctgcatacatgtgtattggagactggagagggcccaacctagtcatgtactcctggctgccctagaggctctacacgtgtgtaggagaccagaaaggaaaagccaggggcaattggcctgaacttttaatacactctcctaccaatatgca

SEQ ID NO: 40277 - DNA, 1021 bp, Homo sapiens
acaagcccctgacatatgtgtccttctcttccctctctccacctggtttctcttacctttccaaaagctcaatttaatctatatttagcttcttgaagcttttttcaaacgttctgtgtatgttctttactccctctttccttcctactattttctgtttccctgagatcattctccctcctttcaggtctcagtttagtcatttttgagaagccattcctcatcttcagtctgagttaggtgccttttgtctgtgttttcccagaactgtgttgtcttatctcagcatttacatactgaaatttgtctattgtctgtctctcacttattgaagacatagattgtttttatgtgggtggatagattttggaagtgatattcagtcgtattaaaacttgacttttaattgttaggcaaatgggtgtttcattaatatttctattgtttccttttatcctaggactgggctaatgctaatgtcagcagacagattgaggacactgtattatacggttactatagtaagtatctttcagtttctttccctatttggactgctaaccaaaatactgatacgactccgatgagtggagaaccccaggttcttcctcttgggtcgaattagaaaaaaatgacatggacacacatggagtagttttaaggagcagggagtttagtaggcaagaaagaagggggaagaaagaaataagctcccctgtacagagacagagggaggggagctccaaaaccaagagagggaaccccacctgccacggataccagtcaggtatatgaagaggctgaaggtgccagtgtttgatttgcatagggctcaggattggtttgaccaggcatgtcatccacatagcctgttaaaaaaaaaaaaaaaaaaaaaaaggaccctcccacctagccttttaatatgccaatacagggtgccatgatcttctacacaggtggggatatgtggggacggccatgtcgccaggaacatgtggggcaagggcaagaagaagagtgc

SEQ ID NO: 40278 - DNA, 1051 bp, Homo sapiens
tcatttgattaaatttattactgtgtatcccatcattaaggtaactaattttcagtaattaaactgttggtcttctgtttagccattattctcagttctgtgcaggagtgagctgaaacaaagttgtatagcccagagagtgagaagctgcatttcatgtctcccaacagtcagaaagggattatgtactgtttaaggaaggagtttggcgaatattttgaaacccttttgggaaagcatagaatattgaaaatccaaaattaaccaaatccgtgagtgtgcaagctcaaagctagagaccttaggaatatcttaggatgtgcaaaacaggaagaaaacaagaactgagcaggcagcactaagtaagtgtcatatagcctccccacccacccttccaaccctactcctaaaagagccataatttagtcccaagtatacttttctgatcttttcctgtgacatattatggtatcttcaaatggtactgggtttcctgaggcttgtgctgctgactgccaaccccatcctagagagcactgagcgacagatactgtaaacatcctacactctcagctgtggaaagtaagaaagctgggagaaggctgtttactctttctgccttggaagtcaactaaagagaaatggattttgaatatttctatgtcttagaattgatcctatcccgtgtttgtttctgaggtcaactgtaaaaggaaaaaaggtgaattgactaagtcatccaaagaaatgtaagataatctataatatcagttatatttgaactgtttcacttagtttaaaaagaaaaaaaagattaccaaatacccaagtgacaaaagttctggttaacttgtatgaggctacattttgtgggttgctgcagtctgatctgtaaaagcaacacattacctatacgttaagctaaacatttctcctttaacctgagagcattccacactgaagtctgcttttcttgaagcaaaaattctagtgtccttggacttgctattttatcagggatcaaaggcaccttggagccccatgctttagg

SEQ ID NO: 40279 - DNA, 1034 bp, Homo sapiens
aacttttatactggtaaaacctcttcattggaacaataatgcctcatcaaaatctgaactcataccactaagtattattataataatttggtattctatagcagtaacagttatttccaaagacattccaatatgcctgtagtaaatattctagatttaattaaaatattggcaggactaccgttttccagattaaattaaaaagcaattattagcattgcagattaagtttttaaatgaatatttcaattcagcgacactggctagaatatcttctgttttgtcacagtgtcacagatcccatcaccatcactgtaaactaaaattagctaacttttaaacataagacccacaattatttattatagcccaaaatatcagaatgttctttagcttataaccttgctcatagaatatactggggaaaggactccaaaaattgtctataagaaaatcttggttttttttttttaaatcactttcattggaaatccaactgtaaactcatattgttaaaaaagttcccataatgttaatttttttggaaatttgcacacttaaaaggaaactaatattgataggcagctgaaaaatatatatattcacatatatattttgaatatatattcatatattttcatatatatgaatgtcatatattttcatatatatgaatgtcatatattttcatatatatgaatgtcatatatattttcatatatatgaatgtcatatatattttcatatatatgaatgtcatatatattttcatatatatgaatgtcatatatattttcatatatatgaatgtcatatatattttcatatatatgaatgtcatatatattttcatatatatgaatgtcatatatattttcatatatatgaatgtcatatatattttcatatatatgaatgtcatatatattttcatatatatgaatgtcatatatattttcatatatatgaatgtcatatatattttcatatatatgaatgtcatatatattttcatatatatgaatgtcatatat

SEQ ID NO: 40280 - DNA, 1144 bp, Homo sapiens
agcccaagacccctattcaaccctaactgggttccttttcctattttccagtgcagcttatccttgtacctaaagttgagtagccccactaggaaagattggcagaaaggaatagttaagcaccccttggagcttgctgcctgcaggagcctacttctaggtactcagcttcccttccactctctagggatcctgtagaccacagtgtttgtgctcaactgcagaagcttcatgtgagaaaaaagtttccttttctccactgacatattcttccactttttctttatataatttcctgctggtctctttaatccccaggcttctttcaaactcctgtttctctatatagtagcttcctgtacaaatgtatgtcacatttatatgtggaaacttgcctaaataaaattaggcagatgtgtgatgccagatatacacatatgactcaccccgcccctccccttgcttcatttagtttctggtcaaataccactttactaagaaaggccttacctgaccaccacctccacctaaaatagctctccttcaaatggatcatttggcttactgcacttccccttgcagcagttgtcaccacctgtgaaattatataatatcttaattaattgtatttgactccatgaatgccaggatatcagggactcactgctgagtctctatagcctagaacagtgctggtacatagcccttaaattcttttacacaaagaagaacctattaaattttgtcaaataagaaacttgaggtttatcttaatgacagagttgctattatcaccaccatctgttttaaagttgagtatactaaaattcatagcctactcaaggtcacacaagtagtaagtggagccaagcttcaaacatagatctcctgactccattcatatgaccctataaactgtctcaaaacaaaaagataaattaatataaatatttattgaatatgtctttgtagagaaagcataataagcataaagggcaatgcgttaacctttatcacaagcaaccctattggaatgtgtcaacttatcagaatgaatcaggccagaatatcaagtataaatgaagcctgtagttaactgaaagttgcatatcaatcaggcactccagtttctctcctcaaactc

SEQ ID NO: 40281 - DNA, 1076 bp, Homo sapiens
ccccataggaaatttcttagaaatgctgcctaattaggttaattttagcccattgtgctaatctgtcacaggttttttggggatcttgattcactattccaaaatatgcactgccttctttaatgtcaaatttggaaaaccttattttcctctagtttaagatggtaatacaaattaaaatattgtatagaaaatgtccaaggaaggtcagagctgtaaaggctgaatctcaacgctctcctccaggttgataatctatagatcatcagtttcttcagttctttttttttttttttttttttttttgagatggcgtcttcctctgtcacccagtctggagtgcaatggcacaatcttggctcactgcaacctccacctcctgggttcaagcaattctcctgcctcagcctcccgagtagctggggttacagatgcgcgccaccatgcctggctaattttttgtggtttttttagtagagacggggtttcaccatgctggccaggctgatctcgaactcctgatctcatgatctgcccgcctaggcctcccaaagtgctgggattacaggcgtgagccaccgcgcccagcccatcagttcctttagagcatatttgtgcagcagttgtgaaatctccctaacggtattcggattcagactaaatttccccacgtggacatcttgagagacttagtcatatagactttgcctaatacattttctctgtctgcccatctagtgatcagataaaaaggggaggaaataaaaattaacactcttgttaaataaatatctgcgcaccttctctccaagcttctcagaaaagataaccgataattgctgatccaagacagaggatttcagacatttgtttgttcacttaataaatacgtattaagttgttactctgaaccagaccctatgctgagagtttaggatacagctgtgaactacttagatgtagccccagaaatggccgttactgcctggctctcagagaggctgaagggtgtggtgagagtgtaaagcagctaattgtgagtaagtggtagacagactagagctgggaaatagcat

SEQ ID NO: 40282 - DNA, 1954 bp, Homo sapiens
acatttctgccatatatttatgaaaggaaaacaaaatatttgctaggcattatttgaatatgtaccagttaaaaaaagaggtctgtggcttttgggttaccaaacataactactaaaaggcaaatcctggtgaagtgttaatttaaccaattaaattatatttaagagtctaaacataagggaaccagagaataagcacaggaaacatatttgtatgagtagatatgtacagatataaattcagttttatatattttctatttctttacatccctgatttctatatggaccttctgtagatggctagtttgttatttataaatttgagctgtttgcacagtagatgttactttaattgtgttattctaattatctatttatctatatatctaattatacatctatctgcttttaaaactatagcaatatatgcatgcttttataatctcttcacttttatatctgacttttgaagaggaagttaattttgatgaacagtgatgaggaaaatatccttgaagactaaaacactgcaataaaaagagaaaaccatgagaggtttccatgtcttggtctctgtttatattactaaagagatgttaaaaatatcatttggggactatcttatattctgtaactagagcataactatctgctgacacataggccacttccgaaatattgcttaataacacattttcaaataccctggtgccatctcaggcaaattaatctctgaactaacaagagtctttactgtgctgcacagatcttctcagagatatgtaataaatggtatgtattcaaggactgctgcagtaatagtatttatgtagcttggctagaaacatttgctctcttaacagtgggcatttaagatgaagactgtccctggcattgtgcagcacagtaggaacattggcctgctgactaaacaaatatgattgccaaagtgaattattaaattccaactggcctcacttgctagagaatttcactcctttttctcccacacagcttcctactttttattaaaggaacagttttcagctcttgcaaataattgcagtattttgctagtcattactacagcagtttcccactgtttatattttaaaactagcacttggatgagtcctgttgaagcagaacaaataactgtgtgtgcatctgtgtaaatatttatcgaaatttgctttattaaaagtcccagtgaacttttgttctaactgctataccttgtgtcacttctgacacagtcacatcatcaagctactgttactttacaaaacatgggtgacttcatttcagtatttccttcagaggacttatttgggagactcccttccaatagaggaagtgggttgatgagtgctggtgttctcattccagatccttcacatctctggaaagctgcatcctttgtagaaaatagatctgtatgtgtgccaaagtataaccctgatgttcatcagggcagtgggaggaggtcatatattccttgtctgtttgaacagtgatcctcccatttggcaggactttgagaggaagtatttaacaatgggattttataaaatttaatgtagtaaagactgtttttatatttgaatggatctaaggaagttttctttttctccctccgataagtggggggtgtttaagggtaatggtgtctacgaatttattgggaggatttggctgttttattggaccttgtggaataatttgctttcattttatcatttccatgaaaggtagtcctcagaagaaaaaaatgtggtctcttaacttcataccaatcttaaatgttttgcttaaggggaattagtgaggaaataacagtctcaggaaggttgaaaactgtgattttactcaacaaatattgctcttttaatctctccagccatgccagaaactatgaagttattttctttcacacatgcactgtaagacc

SEQ ID NO: 40283 - DNA, 1031 bp, Homo sapiens
caatttatttttcattaccattttatcagagaatgatatttaagcgatactcatttctagagtagaagagattttattccttataactgtaaactctatactatccaagataatactcttcttcctagaatttgaattcgttaacaatctttcacattttcacaatccatgggaaatcactcccagtaaatgcttacagcattcgtccactttcatgaggcaaggagtaggtaggtctgtatttgtattaattacaaagaaattcaagggaaggttcatcattatcatcgttagcaggaaatataatgaattagaagcccttgaattggactaaaagagtgtggagtatgtgtaaaagaatgaatcagagaaggtaaagattaattttaaagggcagaattttgtttgtacatttaggtcacttcaatttcagatcagttctatgtatgctttctagaaaagatatcaaagaccacctagatttcttgcctttaggtgtgttttaccaaaggaacaagacagaagatgaatgccaaaactattaatgcagctaccctggacactaagcccccaaagagatggaggattggaggatgtagagcctgggcactgggtccagtgctgacatggaacatgttcattcttagagtttcactgcaaacactccaaggatagagagcgagaaggttatgtggacatgagaggagaagggtggaagaggattgaatggttcagggtagctaaaaaaaatttttacactttatctcgggctgcttctaaaccctccaccagaaagaattaatcctgcaagcacttaaaacaaaactgatgtgaggaagataataaaacctgtccagggtacagacatccagatttgcaatttagggtgggaagactttagagaccttgtctaacagggctaaagagtatccttatggttttaaagtaggtacattgttttttgtaagcatttctagggttatataagacaaatcagagtctgatgtattgaacacaattggatcttattc

SEQ ID NO: 40284 - DNA, 1161 bp, Homo sapiens
gcttgaacctgtgaggcagaggttgcagtgagccaagatcgcaccactgcactccagcctggtccagagtgagattccgtctcgaacaaaacaaaacaaaaatattgagctaatctaaatggtaaaaatctagatttgaagaaatttattttaaaatagttgttcatttgtcaaatagaaaagtatgatcttagcaggtttggttagatccctatctgaaacaaagtaaactaaagatgtttttcttgatcaatgcatagcaataactgctgttcaaacatgtgaggaatcaccagtaaattgggggatagaaagcaggaaaaggagcttttttctcttattttttttcatttatcagtttttcccatttgtccatcctttcctataatcatggaaatttttattttttacactcctctccccatttttttatcctagattgccaccacaccaaggttttctagagttaggcagaaagagaacctgggcctagatgctaatggaaactatcccatgctttctcagactctctttcctccccagagacaagaggagcaaaacaggagttgatggctcattgctgttgcttctgtggctgccctgtttggttgacctgagctttttttaaaaacctccactcttgacgcttaactctatgaataaaattagggccagtcacactgtattttcatcatcagttatccctagtgattcaaatttagcacaaacctgctgtgagtacatattaattaggtgaatacagtagaatgcaatcataacatgagtcttttaataactattctttgtttgatttttattttagaagtttgaagttattttgttgaaaatctagaaaatctttatgtgagcaactgaggttcgggtagcccacaacagtttaaatcaaacattaacttgcagtaaaacactactgaaagtgtctttgattttgaggtgcagagagctgtttcaagttaagttgctatattagtctgttctcatgctgctaataaagacatacctgcaaccgggcaatttattaaaaaaaaaaagaggtttaattgactgacagttccacatggctggggaggcctcaccgtcatggtgaaagagcaagggatgtcttacatggtggcaggcaagaagtttgtgcagaggaac

SEQ ID NO: 40285 - DNA, 2600 bp, Homo sapiens
tgaagatcttactgagttcttggatggaaatgtcagtaatgggcacttagtgccttcaggacttgttctatactatcccagaaatttctgatgctaaacttggcaatttttaaatgtcatattccttttctccaaactctttaaccacaagaattcagggaaggttatggggggtgacttagttatctggataatacatattgtggacaatatagcattatccttgggaatgatttcatattgttgaataaataggatcaacttcttgataaaccttagtcccaagcatttcatcttcattggatagtgttacatagtaatatatttatgttttcttttaatcatttcataacttggaaaatactaacatagtcaaaactctagggtaggtgatacatgagtttctgtagtaatctggttggagacatgttgtaattctgtatatatatgtacatttatcccatgcatgttatgcctaaactaagacggatacccctgaattaagaggtgctgttatacattgaccaggcttaagaatatctctttaaagtgtgtcgacatttaattgacctttggaagttcattctgttaatcatactcaaagtgctaaagctatggttgactgctctggtgtttttatattcattcgtgctttagcatataaattcttcagcataattgctacttatttagcaagagtttcctttatttgaaaatgtgagttgtgcttgtatttttgtgtctttctttctttctttctttttttaaactttgcttcaggctgggtagtggtagaggtttgaattaaaatgttttcctgtcagtagttgtatgaggtgtggcttcttaatctagaagtaatggaaatttcttgcttaaatgaagtgcacttttcttcctgcagaagttagaactcttttagacaagcttaacacttcaaaactgtatatctttaacagaaacttttggaaatttttaaattccatttgtgtagattaaaaatatcaatgctaatactttctattaaataaggatttatctattttcataaaacctctaattatattccttgaattgctatgagtagaattttgttgtaaacacaatatttttaaaaagtcaaatatattttaaaaatcttaacattatattactataacttagagaacaggtgtttacatgtttaaaattttctaggccttaaatttgtgaaatcagtctttcagaagttatttttaatatagttatctgtgttacaggtttataagttgacatttcaatttaaaattttttcaatttatatttcaatgaccaggaaaaaatagttaaacttattcctaaattttaatagaaaaataaaaaaccacatagttgttaatttctggtaatttatcttgagactccaggcatgtttttagaacatttttaccttaaaagcaattttgaaatagggaaattaaagtttaaagcagagttttcactttaatgaggtaattttatacttcccagataggtaggcccatattcaagaacactctgatctctgtttatagtaagttttgatgccattatatcatttacttattcacgcattataagcatagtagatagccccattgtcacgaagctggcattattttcttgtctgtcattcaatattgtccccttttttttttctgttttcatcatagccgtccttttcattttattgtagccctgactcgaaatgaaagtaagtttgaactcttaaaaaagagttcctcaaactcttttttaagaatatacagtgaaatgtcttaaataatattatctaaataatacctaaagaatgcaaatgacttgcaatgctgaatagtcagacacaggatgttccatgctaagggtagactcatatttccactttataaaatgtggtttcagaaaacaaatagatgtgtttcttccttaataattagtgtttcaggaccaaagttgactaaatatggaagtttaagataaaacccggtttcttagggaatctttctcagtccttagtaattctgtagaattgatgatagagtggcaacttcaatacactcagtattcttttctgtttgaagtctgttttgccattggaaaaaacttattgttgtttgaatttgggtatatgtattcacagatggtttactttatttttattttgtttaaacaaatactttcatgtcccaaacactgagacatgtttcatgtcctaaacactttataaatattagaatatttaatccccttaactctgtagttataattatcttcattttacaattgagaaaactaagatacgacgttttatttaatggtaacgccttaagtaaggggagagtgataagtgtaagcagagtggaaaacttagtagtgctaaggagcaacagaagtatgtgcaagagtttgggaagatgtgtctgcttggaaaggatcagggactcagctgggatcagtcttaaagagcaacatgtcctcattcctcaattttaagcctttgggctctagaagtaaagggcaaacttagaggaggcactcctcaggtttcagctgcctgttccggcctggtgaggtggctgtac

SEQ ID NO: 40286 - DNA, 1050 bp, Homo sapiens
aagcagataatttggcaagcaagtgtggctaagcccaggcacctctgttcttggttgtcaaaactttaatctacaaactcatataatggctcctataatctctatctataaatgcccaacatgtgagaattttcaagcttatcagttaaaaaaaggtcggggggcagtgattgtttagaagagaggttcaaagcataggttgaggagtcaaccagtcctgattgcaatcctagttttgccatttactgcttgggtggcttcaacctacatccttgactctaagtttgtttccttacttgaaaaatgaggataatagtactgcctcataggagttgttttgtaaattatgtaagattataaattaaaacatcagctaataaatcacacggtatatatttaatatatgtagcttttaatttattataataactttttcaaatttcctttttagtcctggagagttgctgtagaagaaggaaaagagaggaagacaacacaacacaggaggggataagtacctctggacacaatggaagtagtagttgttgagcagagggaaagggataggagaaggatgtggactgcagtgctgcagtgccaggtaataactttgatcatgtacctccttggctcaggtgctgtctcttctactctcctccttacttgtactaccttatttagcacttaattatatactttcttgactcactttgagacacactgattatgtggtctgcctcaaagacagaatcctagttttggattttagcattactgatctatagccttgcaggggcttaaggatggcagctgtctctctcccttgggatctagcttttgcaaatattgaagggaagagatttctttgatcttataggaatagatccacagttcctctccagatttgcttttatagagaagtgtgtgtcaccaaaacaatggagatacggtcagagaggcccctacccccagaattttaatataattttactttctggggcatttattcttgacaaatactttctctcctatcagctcacttgttcctca

SEQ ID NO: 40287 - DNA, 1024 bp, Homo sapiens
tggcaaaaccccgtctctgctaaaaatacaaaaataaactgagcgcggtggtttgcgcgtgtaatcccagctactcgagaggctgaggcaggagaatggcttgcacctgggagatggaggctgtagagggctgagatcgcaccaggcactccagccagggagacagagtcagactctgtctcaaaaaaaaaaaaaacaaaacaaaacaaaaaaaacaaaaaccaaaccaaaccaaaacaaaacccaaaaaggcaagaaattaaagaacttttagaagctttgccattacctaagggagtagccatataataaaatggagactaatttaaagggcaataacccagaatcctgaggaaataatttgccactatgctaaacaagtagcattaaccaaagcagttgccatactgatggtttgtaaatatgttctagtcatagtctgcttatctccagaatggattgaggatattcctgatagacagacaagattttgatgataaaattgcttgactgttattctggacttaaggaattctagtgtattcttcagtgattggggggaggggttgtggtacacaaaagaacagctccaaatgttttttagtgtgaataaacaatcttgctgtaccaaatgaatatttagaacaattagaaagaaggaggggcatggtggctcacacctgtaatcccagcactttgggaggccaaggcgggtggatcacctgagttcaggagtttgagaccagcctggccaacatggtagaaccccgtctttactaaaatacaaaaaaattagccaggtgtggtggctcatgcctgtaatcctagctactcgggaggctgaggcagaagaattgcttgaacctgggaggtggaggttgcagggagccgagaccactgcaccattgcaatcctgcctgggcaacaagaactaaacccggtctcaaaaaaaaaaaaaaaaaaaaaagaacaattagaaaaaaatgaattctgtaaaactaagtttgagaatgttctccaacac

SEQ ID NO: 40288 - DNA, 1032 bp, Homo sapiens
gcaggagaatcacttgaacctgggaggtggaggttgcagtgagccaagatcaccccattgcactccagcctgggtgacagagtgagactccatctccaaaaaaaaaaaaagaaaaagaaaagaaaagaaaagaaaaaattatccagcccaggccctaaaatataaagatctctccctgtttttttcttttcccccccgggatggagtcttgctctgtcacccaggctggagtgcagtggtgccatctcggctcactgcaacctctgccttctgggttcaagcgattctcctgccttagcctcctgagtaactgggattacaggcacccgccaccaaacctggctaactttttgtatttttagtagagacagggtcttaccatgttggctaggctggtctggaactccgatctgaagtgatatgcccacctcagcctcccaaagcgctgggattacgggtgtgagccaccacgtctggccttctacctggctttttccttctgagattgtactaaggttctgtcaagatggtgtaggagggctgggcgcggtggctcacgcctgtaatcccagcactttgggaggccagggtgggtgggcggatcacaaggtcagcagttcgagaccagcttagacaacatggtgaaaccccgacgtggtggcaggtgcctgtagtcccagctacttgggagtgaggcaggagaatagcttgaacctgggaggcagagattgcagtgagccgagatcgctccactgcactccagcgtgggcgacagagcaagactccgtctcaaaaacaaacaaacaaaaatgatggtgtaggaattctaataaacttaggtttgcatgatcaaaagttttttctggtggacctttagagacaaattgtgcttttctatgagtagtgttgtctggtgttgacagtcaacactactcatagaaaagcacaatttgtaacctttttttttaaatgggattacactataaagagttgatttttcagtccacatccatatgtaccaaggacatcccc

SEQ ID NO: 40289 - DNA, 1030 bp, Homo sapiens
ggctcactacaaccttcgccttccgagtacaagcaattctcatgcctcagcctcctgagtagctgggactacaggcgcatgccaccacgcccggctaatttttgtatttttagtggagatggggttccaccatgttggccaggctggtctcaaactcccagcctcaagtgatccacccaccttggcctcccaaagtgcagggattacaggcgtgagccaccggacctggcctagagtggcatcttaaaatatgcttgaccagtatgcctcaaaactgtcaaggtcatcaaaaacaaaaaaagtctgagaatctaccacagccaagaggagcctaaggagacatgatgactaaatgtaatgtggtacactgtttgggctcctggggcagaaaaaggaccttaggtaaaaactaaggaaatcagaataaagtatgggctttaatataagatgttaataataggaaaaactgagtgtggagtaaatgggcactctgtactatcctcacaactcttctgtaaatctagaacccatttttttttttttttttttgagacgaagtttcactcttactgcccaggctggagtgcaatggcgcgatcttggctcactggaatctttgcctcctgggttcaagcgattctcctgcctcagcctcccaagtagctgggattacaggcgcccatcaccacgcctggctgattttttatattttaagtagagacggagtttcaccatgttggcaaggctggtcttgaactcttgaccttcaggaaatgctgggattacaggtgtgacccactgcacccaggtggttttttgtttttttttttgagagagtctcgttctgtcacccaggctggagtgccgtggcatgagcttggctcactgcaacctctgcctcccaggttcaagtgattctcctgccttagcctcctgagtagctgggattacaggtgtgtgccaccacgcctggctaaatttctatttttagtagagacaaggtttctccatgttaggctggtctcaaact

SEQ ID NO: 40290 - DNA, 1033 bp, Homo sapiens
ccagtgtatattacttgaagtaaatgactgtaggttcctttgtgggaaggaagagggaaccattactatgtactgccatagcattgccaggtccttcctcctggggatctggcctctccttcagtcattcagtttcagatctggaaactggcgtatgtctggaaactgggcaagggagcatgagactactgcttccagcctaatcatctagccttgatttctttgatgtacagattgaatagtacccttgttggctgcccaggtatttttccttagtcatttaataaccctctagtagtcaggtccctctgtgaagctgacttgccacttgttatgatgattgtgtctttctggcatctgagggttaagtggccttgactggcctttgggggatagtggctatcatcgcaattgctattagagaccagttttatcacggcatctcctactgtaagtcccggctctcagagaagagccactactgaacttagcagtgttggtgacattctcactagaacatttcttattgctttggtaagtaatatattttctgggtcctcttgtggattttccaactatttgccgtatatagtctatagcatactcacttttccgagccttttcattcatctaccttttgctacaattttggcatttctacctcacttagtgtgggccactgttatttccatgcttctgggagccatcctggtagtaggattgcgtcatctttcaggatcctagtcagggcattaaatcctgaaagcagtatctggttcttttttttttttttgagacagagtctcactctgttgcccgggctggagtgcagtggcatgaactcagctcactgcaatctctgcctctcaggttcaagtgattctcctgcctcggcctcccgagtaactgagattacaggtgcaagctaccatgcccagctaattttcacgatttttagtagagacagggtttcaccatgttcgtcaggctggtctcaaactcctgacctcaaatgatcctcctgcctcagcct

SEQ ID NO: 40291 - DNA, 1033 bp, Homo sapiens; identical to SEQ ID NO: 40290

SEQ ID NO: 40292 - DNA, 1050 bp, Homo sapiens
agagaaggggatttggtatgttgcttaggctgatcttgaactcctagcctcacgcaatcctgcttcggctttccaaaatgttgggattataggcatgagccatgcgcctgaccttgattacctcgatgatgtgtatgtcatacattggagggcaaagacatctctgaattcctcacaacagccatggcagggggcaggtacccatgttacagatgacagactgatgcatagagaagttaagtcgtggggagtttactttctcctaaattgtcctgttactagatgaatttgtttttgtttcattttgttttgtttttgagacagagtctcatgttgtcacccagactggagtgcagtggctccatctcggctcactatagcctccgcctcctgagttcaagtgattctcctgcctcagcctcccaagtagctgggtgcatgccaccacgcctggctaatttttgtatttttagtatagatggggtttcaccatgttggccagactggtctcgaactcctgacctcaagtgatccaccccgcgcttagcctcccaaagtgctgggattataggcgtgagccaccacaccaggccatgaatttgttttcaatatttatttattttgtattttctatttttgagatggagtctcgctctgctgtccaggctagagtgcagtggtgtgatcttggctcactgtagcctccacctcctgagttcaagtgattctcctgccttagcctcccgagtagctgggattacaggcgcccaccatcacacccggctaatttttgtatttttagtagagatggggtttcaccatgttggccacgctggtctcaaactgacctcaattgatccacccaccttgacctcccaaagtgctgggattacagacctgagccacagcgcccagcccttcaatatttatttaaatttgcctgctggctaacttctcattgcacctgggctctagtgtaattaaattacttcattctctttttaaaactttttacttttttcttttttgtgtttttcattctcttatcta

SEQ ID NO: 40293 - DNA, 1049 bp, Homo sapiens
aggtatgtttaataccagaaagggaaagatcaactaaaatgagttttaccagcagaatcattaggtgatttccccagaactagtgagtggtttagatctgaatgctaatagttaagaccttacttatgaaataattttgcttttggtgacttctgtaatcgtattgctagtgagtagatttggatgttaatagttaagatccgacttataaaagtttgatttttggttgcttctgtaacccaaagtgactaaaatcactttggacttggagttgtaaagtggaaactgccaattaagggctggggacaaggaaattgaagctggagtttgtgttttagtaaccaagtaacgactcttaatccttacagatgggaaagggctccttcaagtatgcctgggtcttggataaactgaaagctgagcgtgaacgtggtatcaccattgatatctccttgtggaaatttgagaccagcaagtactatgtgactatcattgatgccccaggacacagagactttatcaaaaacatgattacagggacatctcaggttggtgggattaataattctaggtttctttatcccaaaaggcttgctttgtacactggttttgtcatttggagagttgacagggatatgtctttgctttctttaaaggctgactgtgctgtcctgattgttgctgctggtgttggtgaatttgaagctggtatctccaagaatgggcagacccgagagcatgcccttctggcttacacactgggtgtgaaacaactaattgtcggtgttaacaaaatggattccactgagccaccctacagccagaagagatatgaggaaattgttaaggaagtcagcacttacattaagaaaattggctacaaccccgacacagtagcatttgtgccaatttctggttggaatggtgacaacatgctggagccaagtgctaacgtaagtggctttcaagaccattgttaaaaagctctgggaatggcgatttcatgcttacacaaattggcatgcttgtgtttcagatgccttggttca

SEQ ID NO: 40294 - DNA, 1024 bp, Homo sapiens
tttttcgcaacgggtttgccgccagaacacaggtaagtgccgtgtgtggttcccgcgggcctggcctctttacgggttatggcccttgcgtgccttgaattacttccacgcccctggctgcagtacgtgattcttgatcccgagcttcgggttggaagtgggtgggagagttcgaggccttgcgcttaaggagccccttcgcctcgtgcttgagttgaggcctggcttgggcgctggggccgccgcgtgcgaatctggtggcaccttcgcgcctgtctcgctgctttcgataagtctctagccatttaaaatttttgatgacctgctgcgacgctttttttctggcaagatagtcttgtaaatgcgggccaagatctgcacactggtatttcggtttttggggccgcgggcggcgacggggcccgtgcgtcccagcgcacatgttcggcgaggcggggcctgcgagcgcggccaccgagaatcggacgggggtagtctcaagctggccggcctgctctggtgcctggcctcgcgccgccgtgtatcgccccgccctgggcggcaaggctggcccggtcggcaccagttgcgtgagcggaaagatggccgcttcccggccctgctgcagggagctcaaaatggaggacgcggcgctcgggagagcgggcgggtgagtcacccacacaaaggaaaagggcctttccgtcctcagccgtcgcttcatgtgactccacggagtaccgggcgccgtccaggcacctcgattagttctcgagcttttggagtacgtcgtctttaggttggggggaggggttttatgcgatggagtttccccacactgagtgggtggagactgaagttaggccagcttggcacttgatgtaattctccttggaatttgccctttttgagtttggatcttggttcattctcaagcctcagacagtggttcaaagtttttttcttccatttcaggtgtcgtgaaaactacccctaaaagccaaaatgggaaaggaaaagactc

SEQ ID NO: 40295 - DNA, 1051 bp, Homo sapiens
aaaatagtgctattgtcaaaagatgaaaatagatgctgaagaaaaagaaaaccaaatatccatggtacctaccttataagatcgttgtgaagattaaatagaacacgcacagaacactttgctcataatgcaataaaggtatttgcatataatgcaatagatgtaattattttctggctaactttgagtcaggtgtggtgaccagggtcacagatcaatccaagtaaaatattaaagtgatgattggtgtgctttcagaaaggaaaatgctgaccactaaagagccaccattgggtcactaagagccaaaatggcaaaacagtctaacttctcaacataatttttagcctaatagaataaagaaaatatagtagatttgatatgtcaggacttcagccaggcctcctatgatagatgccgttttggacaaggtggagaaagatgaattggatgtacaattagataaatttgtcactactaaatttcagtgtaatagcatgctcattaacggatctagtcatttgagaaacactgtgccaggcactgtaccagatgttgaagacacaaacatgaaagtaacatgattcctgctggcatctgtataagcttaagctggcctggatgatggtgggtcatgtcatgaagtataatgctggacaggcagcagggggatcctgtgcctgagcttcaagcatcaggtgggtggttgaagtctacatcttaaagacccaggtccaaccctgaaattttatgagtcttataagccgaaaaagacatttatctagatatcataagaagctaaacaggtttagtaacataaatgatgccagcaaatagttgtagcagttgggaggatggtaagcaagtgcctttgtgcctcagataatgaggactgctgtactggttctcagctgactgagacacaactattccaaatgtaagtaggcccggtgaggtggctcatgcctgtaatcccagcactttgggaggctgaggcggttggatcgtttgaggttaggagctccagaccagcctgaccaacatggtgaaa

SEQ ID NO: 40296 - DNA, 1050 bp, Homo sapiens
agtgacagagtaagactccatctcaaaaaaaaaaaaaaaaaaaaaaagaatgattcattaagctatgtttatgtggttttctgcatctgcattttattttatagtaaaaaaaattttttttaaataaatgagtgagaatggaagatgaaaatgttcagtagggagaatccataggctaacaggaaggtttgtcttctctcacaacccagatcccagagaaacagtcaagattacccgaagcagacaggactagggcaaggcttatttccctctgagacagactcttagggactgccttggactgaaccctataatccttctgacagccagacttatttactgtaattatattaaaaaattaacaacatattgctatgcatttcctttgctttcaagtggtggtcattggctgtgatgaatgtgtatgttttgtttttttctctcaccgtaattaatcctgtatcttcttattccttccagaatgggtttttatcttcattgccttatttaggctcttggttatgtatgatcctgtctggtcaagctgctgacaatttaagggcaaaatggaatttttcaactttatgtgttcgcagaatttttagccttataggtaagtgaagcaatcaggttttgttttggtttacagttatttaccatgtttacagttataggagataggaaaacaaagtgtgtttcccacttttacacacagttaacacaatactcaacacagaacacctcgctctaatcaccaaaatgtttgtggggatttctgcctacacataaccagttctgcagcggacaccagctaggtatcctgtaattcagttctgacactgtccagctggcggtagcatcagatcctataggttgagggctcagttccacaagatcgcccccctacttcggataccaatcacaagtcccagcttgtgacctctgcttctgactgaccggctataaatcagggttcccatgactgtcttgtcaggttcagttaatctgctagagcatctcagagaactcagagaaacactttattttatg

SEQ ID NO: 40297 - DNA, 1048 bp, Homo sapiens
actcacatgggtgtggttggttggttgcagtattaaagttagggtaggcttcaacaggaaggtcagattatttcgagacatccgaaagtgaactggtcagaaacagtcatcccactgtgttagaaattggttctgggacctcccacagatacggaaatctgtgaatgcccaagccttttatataaaatggtgtagtgtttgcatgtaacctatgcacatcctcctatatactttaaataatctctaggttggttataatgcctagtgcaggataaatgctgtgtaaatatactgtattgttttggggataaggaccaataagaaagtctgtatgtgttcaatacagatgcagccatttattttttactaaatgttttcaagctgttggttgaatccacagatgcggaacccacagatatggagggctaactgtatatgggcaaaaggcactctaggaaaaggaaacagcctagagcaaatgtcctaaggtgcctggcatgttcaaagaacagaaaggcaagagtagataccactcagtgggtgatggagaggaagttagtagggggtgggccacatcaattagggccttgtaggttattttaaggactggcttttgagtgacatggagagccatcataggatttctcaatgaagaatgacttacatgttttagaggactagcctgattgttgtgataaaatagaccatagaggggcagcggtagaaacaggcagatcctttaagatgcttactgcagcaacctagatgagaggtgatgaagactaagagcagctgttagccatgaaaacgatggaaagtgttcagattatgagcagaggaggatctttatcattcacttaaaccttacccttcctcatccacccatcccacaatttcttactgagtatgagtctactttgtataaagcactgttgtaggctcagagaatacagctgtgaaatagatgagcaagccctttcatgggtcttacattccagttggtggagatagacaacaaataattcataagcctgatactgtcctatag

SEQ ID NO: 40298 - DNA, 2487 bp, Homo sapiens
atgtagataattcatctagtacactggtgccctgtttcctaaatctccttaacagcccacccttcactgccactgttagctatcagctgtgtcacagagtgagttttgccattgctccaaatcagcaagttaaaacttttttattaccatgctttttgatcttttgctcagagccttttcatagtctcataactacactcttgatacatgtgttctttgagctcatggagacttctagttcctgatttttccattttctcctggtctgtcagtctccttgtgtgggcttcattgttcacttgaagtatttttttcacattgcattcctttgaggccttttgccccttccatgtaatgagagcaaaagcacctgagaaactacataacctttacatttatttgttttggtaaaatattttggcttttactactaacatttagtttgctaaatcagtctttcaagataatactttgtgtgtgtgtgtgtgtgatttagaacgtaggagtgaggtacctgtatatcctagaattacacaaatgaattaccaacaattaaatggcaacttttaaaattgtattttaaacatcaagtaaccagagatggaaaaatcttcctataccctcttcagattaccctgtacattattttgatggacgaaaacggatgatcttgagcactatttcatggatgggaggaaaaaatccatttttggggattgcttacatcgctgttggatccatctccttccttctgggagttgtactgctagtaattaatcataaatatagaaacagtagtaatacagctgacattaccatttaattttatattatgaaagcaaatcatctgcatgtgcatcaaggccagtcctattcaacctagctttcgaatgctgatatctggttagtatgtcattttgaagttggcacataacttttctaaaaaaaagcagtctttgttgtttgcttcttccctacggatgacttctaaaaatatatgacgggtataaaaaaattagctatattgatcatatcaacactgtaactgctgaaatggcattctaatgtttgctttttattcggacaggccacatgatgcatagagcctctttcatgtgacttgtgtctactgcttaaatctttatgctgtgttgatgatattatattgacatatgaagctgtatatgtgtatgtattttgtggagaaagggattacaagatgtatgagtataatgacttgctaacctttcaggattcagagaaagatgaagaaagaccatatctaaataatacacttcatcattttcatgtgtataaatgcttaaagtaccatctttgttgaggtggttcatgtatccagtttatccagtacagttatttgtcaagcttagctttgatttcaaaggacacgcttaccttgtctggcataagaattaatgctcatgtctgcagtggttgggtaggtcctgcttaggagaattaaaaaattcctctttccgtttggttgaatgttgcagtcaggaaccccaactcacttggaatgtttttatatgtaatcatttcccttgaagcttatactttataagggaagaaagaattcaggtgatatgggaaaactgcttggcagaccttcatcttctgcctcaactgtaaaccacatgtaagtgcttaatggagactgttttcattcttgtgatatttaacattcagaaaattacttcagctttggaaatactcaggctgtttttattctgcaggtaagtgttttgacttaagtactaatattccagaaatttttgaaagcagtaaccttaatttcctatgtatttcattccacttttgcatataggtcaaatagcaatgtgtatgcacattctctttagttaaggcaccaattgttttggttggttttcctaagacatactttaaaaagatgttctataaatttcctaattaaattatggggattttggagtatgtacatgataaattataatatgtatatggttgaagttattttattttttactaatgaattattttaatattccttattgaataaatgctgtaacttgtttgctatggaacttattcttaaagttctagttaaaaataatttttccacatgcatgaaaatatgtattaatcagaggtggcttaattacattgaaattgcttttttgttgttgtttttttactgaaataactcatgtttgtgtagaagaatgcctgtttactcagagtttatattttccttcagttatattttaaatcaaaaggtctgggtaatgtatacttttgattaatatatactttttttaaaaaacaaaaaacaatgtaatggttaatagtagaaatgtgccacacttttcaagttttatataacatatgaaattcagttaaaagaatgtgtgtttcataatgacttttaactggtaaaaatattacttgcacgaagtacttgatgtatggttatcctgaaatttc

SEQ ID NO: 40299 - DNA, 1111 bp, Homo sapiens
tgttatctatagcctacttacattacagacctgtgtattataagtgagaaaaatataggtgttgaattcttaatcagtaatttagggatagctcatagttctcccaaaggcctggataataatttctctcttcttttccttgtaaaaaccagaatcccagtaaggaatgtgaaccttatcgaagaaatgaagacaaaccaattgctccttgtggagctattgccaacagcatgtttaatggtatgatatagatacaaatatagacatatataattaggacaatttgcataatttcattacagatttgatagtttagtaaacatgaatgaaattgagaaactcaaacatttaagactaaatcgagtattgaatggggtattataatgatttgtgattttcttttgagcatacttacattttagagtggatttctgtctctgagaagaaagaagcagaaacattctgctaatcttatttcatataaaaataaaagtcaggctgaccttcccactgacttcatttttatcattgaaaaggagctatagttgatcatttagagcagcactatctgatagaaatataatgtgagctataaatacaagtcctgtaggtaattttacattttctgtctttttttttttttcctttttctttttttgagatggagcgtcattctgtcgcccaggctggagtgcagtggcgcgacgtcggctcactgcaacctctgctccctgggttcaagcatttctcttgcctcagcttcccctgtaactgggattacaggcgcccgcaaccacgcctggctattttttttgtatttttagtagagacggggtttcaccatattggtcaggctggtcttgtattcctgacctcgtgatccgcccacttcggcctcccaagttgctgggattacaggcgtgagccactgcgcctggcctggtaattttaaattttctaatagtcatatttaaaactatgaaaagaaacaagtgaaattaattttagcaatatgttttatgtaacagtatatccaagatactgttatttcggcatataatactatataaaagttgagatacttcatattctaattttttatactaagtct

SEQ ID NO: 40300 - DNA, 1031 bp, Homo sapiens
tgcactcaaactttgttatagctaaaaatatataaaggtttttaatacgacagaagtttgtagagttgttcataccatccttatgccttaatcgtttctttttcggttttgactaaatgtttcctctgaataatatgctacttttttggaggcaaattttctcctccctaaggtttggtgacttcatttgatatgacaccaatgttaaccaaggaaatgaacactgactatttaaaaaaccaaaaagagaagatgttttaaatgattgggcagactcttggcatcaggtttttagaagcaactggctcaattagccagctcaggaaatgtgccacattgtgtgtaaaaaatccaactccccaaattacagaactgttggaacgttgtgcacccagtttacatttgctggagaacgtcatccttggctcagatgtaatgaaagagtcatcattttcccaggtgaactggggcaaaccaaggtttagtctccttttattgccagggagagattgatggttgcggctagaaactatgcaaaagttggcagttgtagcttccttgagctttcaggtttgtccaagtgaaagtcaaggagtgtgaacccaggtaaacgaaatgtttaccactaaagaagccaccatggatttgaaaccactgaggtgcatagcactttcacaggaagcatgccattctgcagagctacagtcttctctgtgaatgactgtgcaatgtagattagctcatttaaattttaggctaaacatgcaagagggagattttactgagatggctagtggttacatccacagcattcaattactataataagaaacagatatgtcactctagagaatttgggctttgccttgattaatataggagtttataatattttataatgattgcagctgcaaacactactccatagttgttagcatattatctaccattagctatgaaaaggaagattcaaatggtgaatggaacaactagaggatttgtttttaagaataaatatattctaataaata

SEQ ID NO: 40301 - DNA, 1064 bp, Homo sapiens
ctccattctcttttattattatttggtttgtgtatactattttaaaatcactatgaaataagatggaatcaaatgattgctatttttaattaattaattttaaagacagggtcttgctctgtcacctaggctggagtgcagtgatgtagtcatagttcactgcagccttgaactcttgggctcaagcaatactcctgcctcagcctcccaaagtgctgggattacagctgtgagccaccatacctggacatggctgtttttgtaggtcaaaatgatcaaatgttggtactttcatatgtctctatctaataatcaatagctatttgaattaagtcatgtgatttttttttttttttttgagacagagtcttgccatctctgctcactacaacctccgcctccagtccaagcgattctcctgcctcagcctcctgagtagcttgaattacaggtgcacgccaccatgctcagctaatttttgtatttttagtagagacagtatttcaccacgttggccaggctggtctcgagttcctgccctcaagcgatccacccgcctcagcctcccaaagtgttgagattacagggatgagccaccgtgcctggccaagtcatgtgatatctttactctggtgaatgaacagtgactatctggggctggtaacatagggttaagaaaaatttaccaagacagttgtagataaataaagacagatttattacagaaagtatgaaaatacattgcaagaaagcaacaggcaagtcagcaagagaagagctaactgcgaagagacaaaggcctgctggaaattttacaggattttatagaatggagcttgtgctctgtgctgaagagggctttgtgcagtatcaatgccaaggttgcagtgagctaacttaacaatttttctgtcagctgagggtctagtgataactggtcacaggaaggttgtgagttgtttgcagaggacagctatgtgtcctggaccatgaagaaaggcagaattgtattgtagcttatttgcttcttctttttgctttaccctggtcccaccagcctgact

SEQ ID NO: 40302 - DNA, 1143 bp, Homo sapiens
aaaaaccataccctaccttacaagtgaggccttttttttttttaacttcttttcctttaaaaattttctcttattataaaaataatacattctcattcaaggaaatatggaaagcacagaaaatgattataatgtttcacgactgaaactcaactcctgtaggtttgtagtcctctgatagcatttttcttgtctttcagtatcgttctttaaaaaacaaaaatgagcaaaaatctatgctaaatgtcaatgaaaagtcaacagcaattaaaatgatgcagaaaaccgacatgattaagtgcagtctttggggaatggactgttctaattcagttgtgctattaacgaaggcctaagcggaaaggcttattgtttaaaacgtcctttaaaatctttttcctaatgcgaaccaataatctttcctgattggcaagagtagtgtaatgaatgtaatttatttttgttgcctgaggttattgcatgatcctgttgtggtgttctatgacatcgtctgtgccaatgacagtataatactgagaagtgtaggtaataggcaaatgtgggtaactggccatttgtacagacttcaacatgtagttttaaaaaaatctttaaggccgggcacggtggctcacgcctgtaatcccagcactttgggaggccgaggcgggtggatcacctgaggtcgggaggagttcaagatcagcctgaccaacatggagaaaccccgtctgtactaaaaatacaaaattagctgggcgtcgtggcacgtgcctgtaatctcagctactcaggaggctgaggcaggagaatcgcttgaatccgggaggcggaggttgcgatgaacggagatcgtgccattgcaccccagcctgggcaacaagagcgaaactccgtctcaaaaaaaaaaaaaaaaaaactttcagcagcttgattccatttggaaaaattgtttttttaattaaaaataaatctttgcttttaaaatgcatatatgctggctttgaaaatggaagaaggtgccaggagtcaaggaatgtgtgtggcctctggaagctggaaaaagcaagaaaatcagttctcctcaagagtctccagaaaggaaaactgacactttgactttagcccaatcagaaaggtatt

SEQ ID NO: 40303 - DNA, 1033 bp, Homo sapiens
ttttcttcattttaaatctattgatatatgcattttattttattttattgccttatttcccatgcttgaatttccagtactatgttgaaaaaggtagtgagaacagatacttttcctggcttctcatcttagaagtaaagcatacattctttcaccattaaatataatgttagctgtaatattttttacatatttttatcaagttgaagaggttttctctattcttatttttctgagagttttgtttctattttgtttctaaaaaagtattgcattaagtgaaatgtattgtttctgcatgaattgatacaataatgtgattttcaaaaaaatatttagcctattaatatggtggcttatattcattgattttcaaatattgaagcatttttgcatccctaaaataagatctacttgatcttggtgtataattctttttatttattgctgaattctatttcttctatttttgttagttttgagtctatatttatgaaggacatcggtctgcaattttcttcttccgtactgactttgctttggaatcagtgcattaatagcttcataaaatgaattggaaaatgctctctccttttcttttttctgaaagaaattgtacagaaattcttctttaagctgttggttgaattttccaatgaaatagcttggctatatttcctttgggagtggttttaaattataaatgtaacatttgtgggtctttaatagttttagaactattcaaattgctatattgggagaattgtagctatttgtgtttttaaggaactaattgatgcttatctaagtgttctaattttaggtatagagtttttttttttggtagtatcatttcttatcatattgatgtctgcaggctctagatatcccgtttcatttctaatattggcaatttgtgtcttatctcttatttgtcagtctttctagaaattgtcaaccttactttactttcaaataacgaacttcttgttttattgattttctctattatttatctgttttcaattttatt

SEQ ID NO: 40304 - DNA, 1005 bp, Homo sapiens
ttataagttacccagtctcaggtatgttctttatagcagcttgagaacaaactaatacaatacataaaaatataaagattttatctgtaccacgaaaaaagtgttaaaaatatatattactttgattaacctcagagaaatattttgatcttaaaatttcctgaaagtatttagtagttatgtgaggttcacccattcctgcagaatagaaattaagaacccagagctatattcaaatttctgttctgattactgactgtatgaccttaggcaagctgctttatcatcttgtagctcagttttcttattcacacaatatagacaaagctatacttacgctaggatttttgcaagaataattatatggaaagtccttcgctaagacaattcctgaattacagtaagccatcacaaaatattagcaattgttctttaaacatacttaagaaatttctgctcatgaaagtctatgtatattttgctgtgggaaatggaaagaaaagaccaaactttctgctggtcagtccccaggcatcacagacaagcagacagtgatgatggtagtaatgcctccttcgagctacttcatttccaaaattcctaagtatatactaccaattatttgcaatgcaaaaccgatgctcatgcagaggaaaatgctgaaactattatgttaatcttcaagtagaataaatctcaagcccgaatatatatttcacttgcatttttattaaaagtgtttttgtttatttcttttgccttgcttttgatagttccataagaagttattgccagtaaatgagaacacacatggagagtatgcagaatgtcacttttatcagcagttaaaagagtaaaaactttatatgttttgtacaattatttaagtgtgaatcaccagttctttctcaatctattcagtgttctctctagagggattctcagcagatctcttgatggttccaatgcactattctgaagaaaaaatggtttccactggaattt

SEQ ID NO: 40305 - DNA, 1082 bp, Homo sapiens
tgaatttatctatttattccatttagttctgtcagtttttaattcatgtatttttaaactcttttatcaggtacatttttatatcttcctattgaatttatcctttttatcagcaagcattatacttctttatctctattaatatatttggcttgtaagtctactttttctgatattaatatgaccacatcagctttctaatttttagtatttgcaagtcatggcatatatgattttctatacttttagtttcaactggattttgtttttataattaaagtgtaatttttacaaacatcctatgtaggctaaaatgctattaagataatcattgcattttatttaatttatacatagtataattatttgtttatttttaagtctactgtactgttatttgttttctatttttgccataaaagtgagtagccaatttttattaagttcttacatttcaatttgacatccacaaatattaatgaacaacacatctaacaccactggaaaactgggcttaaataacacaaggccattattaaatgatcaattcagaagagttaatcgtgaagtagtactatgctgaatctagcagactgtggtaagttaagaatttttattgtaatttctaacataatatggaattttataaaatattatataattaatataggaaacaaaataaaatattagaattattaaattttacttaaaaattttaaataaattttttaaattaaattatcacaaaagaaagaagagaaaaaggaacagaaaaagtataggcctttcttgttcctactggtgcaatattcctagaaaatttgtttacagttttgtttcattatgttttgaaacattaatcttagaagtttatgacctgtgtatctgtcagtcctttttctcttaataacatccttccttggaagtcttaaagtcttttggaaagtaaaattcctggagacttgctctaatttcctaaaggtcctatgcaaagtacatatataaaacccccattgttacccttgccataaccagaagaaaaatagtaataataactattagaaaaacatattatttgttta

SEQ ID NO: 40306 - DNA, 1050 bp, Homo sapiens
actactaaaacgttcgctaatttgagaagcaaaataaagaaaatctcattgcttttttgtgggggctgttttactttattaatgagctgcacaattttcatgatcactatgttttataaatctatttatgatttcatatgttacaaattgtttatatctttgtccctttttaaaattaaattattctattttttaatttaaccttttttaatgttaattatattaaatccttttacatttgtggtatttctctactttctcatttatatttttattttctttgatatatatagaattttttttttagatcactacacgtatgttgactacaaccctaagtttattacatgttgtgtttatcaagctataaaatgttctcctttttcttccttaatatgtatttggtatgcatagcttaaaacatacagtgttttatttcacatatatgttttatttaaaatattatttttattaattttgattctatcttgattttgaaatctacttatgatgccatgtgaaaataggtaatggccgtgtagcactaaatcgcatgttttaatcacagtagcagatgttgttggtgttctgcccatcccctcagacttccttgctatttctgtgtttatcagattgatttccaatgactagtacttgaggtctgtcagtggtttgccgttgacctgcaggaattcactttgctgaaatgcatagcattccagagtgcttggaaattcacatccactgggcagctcttcacaattgctacttggtgagagtgtataaatacctttgctcctccgttggctgagattgttctgagatgtgtgtttttcacaattttccacagcctgcctgcggattaagtttcagttgcccactgtagtagctggcttaagaacgaagcacttattggctactttcccttgctgttttaacttcccacttccctgaggaagtctgggaatacttgcccttctagacattataaagcagaattgattaaaactgtgctgacacccttttggtatcctcagtgcttgtcttaaa

SEQ ID NO: 40307 - DNA, 1083 bp, Homo sapiens
tgatgagcattttttcatatgtctgttggctgcataaatgtcttcttttgagaagtgtctgttcatatcctttgcccactttttgatggggttgcttgttttttttcttgtaaatttgtttaagttctatgtagattctgcatattagccctttgtcagatggatagattgcaaaaaatttctcccattctgtaggttgcctgttcactctgatgatagtttcatttactgtgcagaagctctttagtttagttagatcctatttgtcaattatgacttttgttgccattgctttttgtgttttagacatgaagtgtttgcccatgcctttgtcctgaatggtattgcccaggttttcttctaggatttttatggtcctaggtcttacatttaagtctttgatctgtcttgagtttattttcgtataaggtgtaaggaaggggtccagtctcagttttctgcatatggctagccagttttcccaacacttattaaatagggaatcttttacccattgcttgtttgtgtcaggtttgtcaaagatcagatggttgtagatgtatggtgttatttctgagggctctgttctgttccattggtctacatatctgtttttgtacaagtaccaagctgttttggttactgtagccttgtagtatagtttgaagtcaggtagcgtgatgcctccagctttattcttcttgcccaggtttgtcttgggtatgtgggctcttttttttttttttttttttttttttttttttttttttggctccgtatgaaggttaaagtaattttttctaattctgtgaagaaagtcagtggtagcttgatggggataacactgaatctataaattacttcgggcagtatgaccattttcatgatattgattctccctatcaatgagcatggaatgtttttccatttgtttgtgtcctctcttatttccttgagcagttgtttgtaattctccttgaagaggtccttcacatccgttgtaagttgtattcctaggcattttattctgtttgtagcaattgtgaatgggagttcactgatgatttggctctctgtttgtct

SEQ ID NO: 40308 - DNA, 1033 bp, Homo sapiens
ttacaatcgcatgtgaatatgcaattatctcaaaatgaaacgattaatcgaagctagcagttgtgtttctacacacaattaacaatcccaaaacaatacagaatacaacttaattcacaacagcatgaaaagagtaaaatatgtagcaacaaaattaacacaaagtacaaatgaaatttattgcttatacactgaaagtgacagaatattgtcacagtaaataaaggaatacttaaataaatgaaggaatattttgtattcatgggttggaggactcattaatgtcaagatggcaattgtccccaaatttatctataaattcaacataatatcaaaattccagcagacatttttatagaaattacaaactgatccaaatacttatatgaagatacataataatttagagtaatcaatttttaaaaattaatgttggaggacttccactccacacccaacactttaaagctgtagttatctagacagtatggtactaacataagactagacatgtagatcaagatatctgtactgattaaattgagagtccaaaaataagtcattatatttaaggtctactgattttcaacaaaggatatatgccaacttattgggaaatcatacacttttcaagtaaagtttctggaacaattagatattcatgcacaaataataaatcatatacaacaactgtgtaattcacaatgttttcagtcacagataacttttaaaaattggttttgtattgaataataaagtcaatacatttcaatagcttcgtatcataaatatattttttggctgtaacataattaaaatagaacaaaatttatgtatgtttacatgttaagaaacattatttccaaataatctctgaataaattagaaagggaaaatgatcaaaactgagtgattaaaatgctacttattgaaaattggatacagttaaattagtatcctgagtggaagtctggagtcttaaaatcttacttaaaaaaagaaaatcagtgactgaattatctattttgagtca

SEQ ID NO: 40309 - DNA, 1049 bp, Homo sapiens
agaaaagaaaaatactacaaaaagctggtgaaataaatcaaagaaaatcacactatttatattttggaaaacccaacataataaagacttaaattctcccctagctggtatacctattttaaaaaatccaagaaaaatctctgtcaaaatgacagcattatttttaggtataaataagattattctaaaattcatatgaaaaagataacaagagaaactcctagaatagtgaaacaattttgaaaatgaagaatgcagtgggagaaatgattctccagtttttaaaaatgtattatataactacagtagtcaatattgtatggtattggtggaaatttagatataatagattaatgaaacagtttcaaatactgacacttaggaattcattgagtgaaatacaaaatatatttataaacttcaacaatagactagatcaaacagcgtaaagaatctcagagcttgaacaccaagacttttgaaagaagaagccaaaaattgcccaatgcaggcatagcaagatgaaaaagcaattcagtggaactttgaaaagtggctttttcatcagattgtgagagaacaattggacattcataagcaacaacaataacaacaaaaattaaacttgacctacatctcacaccttgtataaaaattaatgcaaaatgaacatgtaaatttaaactaaaaatcttttagaaaaaattagaacactttcagaatctaggactaagcaaagaattgttgacttgacaccaaaagcaaaattcattaaaggaaaaaattgattaattgaacttcatcaaaattaaaaattttgcactgtgaaagatcttgttaagagaatgaaaacacaagctacagacttggagagagtatttgcaaaccagatatatgaagaactagggtctatctctctatcttccatcagtctatctatctatctatcatctatctatctatccatctatcttctaatctatctatctagtaagcacataaaatgatggcacaatatcattattagagaaatccaaaccaaaaccata

SEQ ID NO: 40310 - DNA, 1033 bp, Homo sapiens
tgttgatttaaagaaagttatatttggtattatagtgcctaagtacatcagacatgactattactatcttaaaagcatgtgttgttatgtgatatcaggacatctgaacattccactgtcgtaggaatttgtccttgtgggaaagcattactaaactgcttcagtagttgtaaacatctcatgaccattgctcatgactatcaaggaatatgctttgctagttttaagatgatgttgattttaaaatgatgttgccctggctctcctatggtcctttttccctaacaaaagcatatgcatgctcaggtcaccacactgctgaaaccctgtaaacgtccctcctgcctgggtaaaataagtttgagtttcttagcttatgagtgagagtttccatgatgtggcctttgtctatcatggaaaagatccatgatacccatggtttccaaaacttgccatactcttccacattaccttacctttgcagaggctgattctcctgccttagctaagttccttttcaatgccctgacactaattacggaatgccaatttcttcgtaacaactctgttacatttgtattttggtccatattttttctattttatgttgtctttttaaaaattatgtttatttccccctactagattgctgcaaactttggagttcattgttttatgtacctgccatgtagcataaggcctggaccattgtaaattctcagtaatgaatattcagtgtcattaaattgtattactattatttttcctttgaaggatgacatagaaactctgctggaccaatatcctagctgataaaagtcatagttgatacttgaatttgcctttttaccttagctcaaagaagttctgtctaccatactgataatatgaatagtaacaataaagttattctttaaaattttacttttaaaagatggaattagaacaaaaaaattaagaaagggtttcctttttaacttgagtcagtcaatttaacaggtttaacattgaaaatcttataaaaattcaattt

SEQ ID NO: 40311 - DNA, 1095 bp, Homo sapiens
gcacaatttaaaatcatatgtttctttaagcatttaaagaaaattattagaaaatgatacttgtcaatagatgcacttccttatttgtcagcctcttttagaagaatactccttagaaggactccaggtgtgattttttttcggtgagaaaaacatacaaagaatctttgtttctggtccttcatctgagtaacatttcactacatatctttttgcctcatattaactatgtaatcaactggctttgtgatttagaaaacaatgaaatacctgttaagttttccataaatctctttctgtaagaattatacaccccaactgtcatgattctattccatcgtttttcccaccatcatgcctacagttgattgaaccagttaaggatgtctactcctagctagaccaattatttttcaatttgaaatttggtataaagactaagaaaatttgtatttaatctggttagatcaagaaaataaagaaactaaactcaggaaaccaaggtttttcatttgtatatgaagaatcacagagaacaagcatgcaaggaaagaagaatgaatcagacaatggaaagataaaaggatgagagagtgaagaaggtgtgctgtttaggtttctgatggctttctacttattagttccaatcatggccacagttataaggatcaactgcttttgatttccatgaaatggcaaaagcttcatcaaatgcatttacttattttgcttaagctcacttcagtttggtcagaggcgtttcaaccagtgcaactccatgttgaataggggctgggtaaaataagggtgagacctactgggctgcctccgcaaatggttagacattctaagtcacaggatgagttaggaggttggcacaagatacaggtcgtaaagaccttgctgataaaacagtgtgcagtaaagaagccagatggcgaccacagtaacccctgatcgtcctactgctaggctcccaccagcaccgtgactgtttaaaatgtcatggccatgtcaggaatttaccctatatgtctaaaaggagaggcatgaataatccaccccttgtttagcatataatcaagaaataaccat

SEQ ID NO: 40312 - DNA, 1110 bp, Homo sapiens
aatacattaggattaacaaaagtttatacattattcaaatttttcagtgttacctaatgttctctttttcctctaggatctcatccagataacatgttatatttagtgtcttagttccttaggctcctctagactgagtttcacagatcttccttggttttttttatgaccttgacaattttgaggggtactggtcaggtattttatggaaaggtaattggctggaatttgtctgatgtttttctcagtagcagattgggttcatgggttttagagaagaagaacacagaggtaaactgacattctcttctccttaattttaagctgcattcaaaagtacaactaccccacctccaagcagatctccaggcattcagagcacatgcttgcccgaaccagcagcctgacccaccccactcttcctgtgcagagatcctggtgtgtgtgtgtgtgtgtgtgtctttgtgtggggggccctctgctctatcaccaggcagatactatcaacttgaattatcacggatgatgctaacttcacatacctgactgagatattgcttgtcagatttctgtaaagttactcttttactcaagttcctcttttttaactgtaaggtgtttttttcaatacttctttttcatactgcacctctgggagaagatcactatgcgcagcctaaaattaaggagtggggagttctgttgcaccataaatgcatgtacataaattactctggattcttctgtatgtgatatttgtttaaactgcccatttatttatttaatcatttagttatattaatatgaacttatggctatttgttttgcattttgtgttataaaccggtactcctttacttattgctaaattatttccagctttggccattgagagctttttcagttgactcctgtgtcccattgacatacccccattaatgtgtgtgactctgtgtgtgtgtgtgtgtgtgtgtgtgtatgtgtgtgtgtgtgtttgttgaagcactttctctctttctggcattataagatgttccacaggcatcttgtacattccctgccttagccgtagaatcaatcatatctccaagaagtcctggttcattttat

SEQ ID NO: 40313 - DNA, 1041 bp, Homo sapiens
gcaattaatttttttaaactccttcagatcatgaggattaatatatcaattcttatgaaaaacattttggaaattgaagaaaataccaagtcatttcagtaaaaagcagaaaaaaattatctgaataatatgaatcattgagaattcttgacaaggtgaacacaccttatctccattttagtcagaaagaagaaaagaaagaaaatattatttcagttgagtcatttgaacatttaagcaaatacaagtatgatgacttaacaactcttaggtgtgagtaagagtttagtgttctattattactaacaagatagacttttgttaactttcttctaagaactgtttcttttcacttattcagcacatgtggcaaaacaaagtcatcaagcaaaatggaccctacaaaccatggataatataaattgtagaaaattctaagatgaatttttacacattgccttttcagtgaggaaaacatttattgacagaagttgttgtaggaaaattgagctgcttcttttgggtgctgaggaaagagtacaagaatctcaggccgtatattttaaaaatttcataggtctattctgaactgttttaatatatcttatttttggatagtgaaaactaaatcactttaacttcagtacccagagctcctcattcatgttcacatctatgcagataccttaacaattactatgtttatatccataatatccacaaataaacagctttaattttttctttctaatttttgtgactttttcttgccttagagcacagactaagatttgcaatataatgtcgaatagaagtagtaagagaagtcaagcttgtattattcctcatcttaatatttcaccattaaatatgattaaagtattttgttagtaaatgccctttattggatggaagaaaccatcatttattgcaaatttgctaagattttttttttattatgaatgattgatgaagtctaacaaatgttttctctatatctactgtagactcacacatttttattatgcttatgtgatgcat

SEQ ID NO: 40314 - DNA, 1099 bp, Homo sapiens
ttactctccatgacatataaagcccactatgacttggttgcttactatccctctggcttcaacagtgatcattcttccactcattttctcatctccagccactctggccaccttgctattcatcatacatgccaagatttctctcatcttggagtctttgtacttgctgttttccctgtctggggtgcttccccactatacatccttcgggcttgattacttatcttctggggtttttgtttttgttgttaaatttttctctttaagaaagactttctgacctccatctataaaatagcacttatttgccaactgccactctctattctattttttattctttttaaaaattatacttaatgccacatgacataatatatgtacacatgtacacatgacatgtaagtgcacacacatgcacacatagccacttccaggttacttcatctgccatgtatatgaacatctaaaaatctcctttgtatgtgcatttgatcaggtgacatttattaggaagcagttgatgattatgtcctcatttacagttttacaaaaatgagtttatcattcaacaaggcctctgatatttgataagtagagtgactataaagtttactattcaaaggaacctagagaacagcaccttgagaatcaaagatatagttgataatttctttaggatacaagcaaacttggattttcttaggcaatccatgaggcatagttatcctattgataagtgaagctggttgggaattcaggcaagaagcttcctcctgtgtcaggattgccccactccaccaatattttatgcttctgtttatgcttcaagactctcctcctacttcacttccttcctgagacctctgaggatgccattatgcccttaagggtcagaagagacagctaccattgtctttctctcagacttttttacatatctaagttcagttgtgacccctcatgacctagcagtgcctaactcccattagacactcaataaatctccactgtatgatttaattaatgacttgaggctaacttcttacagaaatgtgcagatccatctgggaatggggcttgggttggaatatcagac

SEQ ID NO: 40315 - DNA, 1058 bp, Homo sapiens
ctctaaatgttaaaatgctgtgaaaagttctacacatttggtatttgtcaaatgtagtccaggttactttgcctttagtccttttcttaaaaaaagttaatttcgtaattaacaaaaagcaattacaaagtactcataagtactcatgtctataactcaaaagggttttagacatactcaataataactttgaactctgtatgccttttataatttgtaaaattttacattggataaaaaacaactaccctagaaaataatggatagctccactttgatgcattcagtaactgtggatagcaggttgaggggtctctgaggaagaagttataaaacaatcattgcactgatggcagtgggggtacagcttgtgtattttcccaaccaaatcccttcagtaatgaagtatagcttttgctctgggtaaacccctctctggatccttgaattttagacccagcatttgtgctgtggaagagattcatcccaaagtctcccatgcttctgttgaattctggaattacatttgtgctctgggttgagttacaattatttgctcctagcagtgtgattaccttattagaaaaaataaaagggggaaagctgatttctggtggcaaatactcaaaatatatcttctttcctatatgagagattgttcttttcaaattttttagttctacataaacagcaggtaacagggagtaaaagatatctgtgactataaagaatatatttgtggagttttaccctaccatgtgtgctgtttgaaggctgtcttgtgctatatgtatgagacactgattgggggaaaatcatgaagtaaaagtttgtctttacctctatctctgcctttgcctctgtattgcaaatctgggaaggagacaaataaatccattttggaagaaattttttataacatgttgttgtctgcactcagaattaggttctaccccttccccaaatgttaccaaagaactatttcagttgatgcagatcaaatggaagattatttacaccttgaatgtgagttctgtaatcattagtttctgaacaga

SEQ ID NO: 40316 - DNA, 1029 bp, Homo sapiens
atatgttcctcaggttatttggcttatcctaaatttagactgagcaatttccaaattgcgaaaatgtagagtatggaaacaataggaatattccccttggtatgtcatattatatgtgagactttaattattttaagtcaatacctagtgtatctgtggaaactgctttcttattttctataatacaaattatagtagcaggcgtatgaatattgctgctcaataaatattactttgtggcaagaatcaataatttctccccacccttctataatttctctatttagtgtcatattggaacatcaactataatgatacaggtaaaatatatatagaaatacaaaatagtacttactattctctctctagaaatttttatctactttcacattttcagtttgtcagactcatagtctgacaagactatgtcaaagtattctgcaacaggagcatagaatagcagggagtcattcttattattaaattgtatttttttgttgttgttattgtctatttgggtaggggaacgagagaaaatagtttgttcgggattaacgttgttctattaagcagttagtattttattctgtgctaaggcccatgcattaggctggagactgcagggagaattctgtactatccttcccaatgatgcctgtcttcaagttaaatgtacctctggtgcagcatcagaagcatcatcctaatatttatatcagcttataccagattgaagccttacagatgcgccctctggtgtgttggtcaggtcctgaggaacgacccctcatctccacactcagcctcctccagaaagagctccttgcattggctctgggacttgtttccataaccttttatggtgaccgattcctagactctattctgttatctcaagcagatggacaccaatattacttgatgggagaaggcacaaagcaacagtgtcaagaaatacaaattaagagaattaggaacgttcccattcgtataagagctcctaatgggaaggaaggcagtggagtttag

SEQ ID NO: 40317 - DNA, 1034 bp, Homo sapiens
gctagctcttcttgttgaattgatccctttaccattatgtaatggtcttctttgtctcttttgatctttgttggtttaaagtctgttttgtcagagactaggattgcaacccctgcctttttttgttttccatttgcttggtagatcttcctccatccctttattttgagcctatgtgtgtctctccacgtgagatgggtctcctgaatacagcacactgatgggtcttgactctttatccaatttgccagtctgtgtctttgaattggaacatttagcccatttacatttaaggttaatattgttatgtgtgaatttgatcctgtcattatgatgttctctggttattttgctcgttagttgatgcagtttcttcctagcattgatggtctttacaatttggcatgtttttgcagtggctggtaccggttgttcctttccatgtttagtgcttccttcatgagctcttgtagggcgggcctagtggtagcaaaatctctcagcatttgcttgtctgtaaactattttatttctccttcacttgtgaagcttagtttggctgcatatgaaattctgggttgaaaattcttttcttgaagagtgttgaatgttggcccccactctcatctggcttgtagagtttctgctgagagatccgctgttagtctgatgggcttccctttgtgggtaacctgacctttctctctggctgcccttaacattttttccttcatttcaactttggtgaatctgataattttgtgtcttggagttgctcttcttgaggagtatctttgtggaattctctgtatttcctgaatttgaatgttggcctgccttgctaggttggggaagttctcctggataatatcctgcagagtgttttccaatttggttctgttctccccaccacttcaggtataccaatcagatgtagatttggtcttttcacatagtcccatatttcttggaggctttgttcgtttctttttactcttttttctctaaacttctcttctcgcttcatttcattc

SEQ ID NO: 40318 - DNA, 1110 bp, Homo sapiens
aaactttaaagcagcaattttacttgtgcagagagaaacagattacagagaagtggtaaaacaagtcttgggagagtgaagggttaataaaatatatttaagaaatttaagtaatttgagagaaactggttgttagcatgaagaagcgatcattgaaagattttaatttttttttcttgtagtaccgatctaatatattggaaaacatggtaggaaatagtaaagagagagaaattatttagggtcaagtatctcagaggaagtggcagagtatagtatttagggcagatgtacaagttaaccttgggaaatagaagggaatttgtcattttttctcttagtgaagtggacaaaggagtgactcagaatttaaagacagagaagtatattttgtgtaacaattatgaaaattgtactaaataattgtattattcagggttatccatagaaacataaccaataggatatatagtatatatatgtgtgtgtgtgtgtgtgtgtgtgtgtgtgtctgtgtatgaggaaatttattatagaaatctgttcacaaaattatgatggccaagatgtcccacaatatgctgtcttcaagctggagaacgaagaaagtcggtggtgtaatttagcctgaggttaaaggcctgagaacccagtgggtaaaaggactgctggtgtaagtccctgaaaccaaaggctccggaacctggagtcctgatactctcttacacaggaaaagatggatgcaccagctcaagaagagagagagagagaatttgcccttcctcacagattggatgatgtccatccacattagtgatagtggatggatcttctttactcaatctactgactcaaattctaatgtcttacaggaacacccttgcagacacactgagaaatgttttcaccaactatctgggtattctttagctcaatcaagttgacacataaaattagccaccaccacacattcttaaacttaaggagtcctttctggaatgcaactctgcacacttgaaattttaatgaatgttaaaatcttctggtactgggctgaggaatcacttattatgaaaaagtttgatgacattctgcaacaaaaatttccta

SEQ ID NO: 40319 - DNA, 1044 bp, Homo sapiens
tccttcatttctgattgtgagtcctttgtcttagtctagctaagaatttgtcaattttgtttatcttttcaaaaaacaacttagttttgtagttttttctttactttttactattttagtttttctctaatctttattatttattttcttcttctggctttgagatttgtttgtccttcttgtcctagtttattaagatgtaaacctaggttatgtatttgagatctttcttctttctaaaggtaggaatttcttgctccatcttgctccaaaagcactgcttttacttatgggttataatttccggtatgatgtgttctcacttcatttgttgctagatactttttaaattcccttttgatttcctttttgatccgatggttgttcacagctatattatttagtttctacgtatttgggataccaaaggtgtatggtcctttcaatgtgctgttgaattctgtttgctagtattttattggggatttttcatctatgtttattaaggatatgggctgtagtttttctttttttgacatgtttgttgggctttggttttagagtgatgctggccttgtaaaaagaggctgaaaatgttccttcttctcaataatatgtgaaacataaaatagtcaaactattaggaaaagagaatagaatggtggttgccagaggcgaagggagggaaaaaggaaaaatgttagtgaaggggtataaagttttagttacgcaatatacaaaagttctcaaaatataatgtacagcactgtgactatggttaataataccatattatatgttttaaatttgctgaaatattctcaccacacgcacacacacacagatacatccacacacaagaagattgtaactatgtgaaatgatgaatgttaattatcttgattgtgataattaattcataattcatgcctatataaactcaacttgtgcattttaaagctaaaaatagataagacactactggaaaggtagagctttgtgtagaaatcatcttttacaatatgttaatatactacaaagtct

SEQ ID NO: 40320 - DNA, 1138 bp, Homo sapiens
ttagctgattgtattgttcagcatatcttagttttgctatactttatgacattcttgagtgagttttttgttaactatatatatgtatgtgtgtatgtgcatgcatgtgtgtatttgtagttttgacaaagtgaaaaattaatttgaaatgtctgaagttgttatatctatttataaaataaatgcaaataccatgtcatccttaaaattaatatatgtaaagctcacaagatattgggaaatatgagccaatgcttcatctgttccaattcaaaagactccttcttccaacctcaaacttccaaacaataacaattacaacaatatgcatgtagctaaaacaatgcaaatatcacttatacaagtacaattttgcttttctttgtctccaaatgttgttaacaaaaatttcaacagttaatgccatcttcttcaaggtcaaattctcatattgtttttattcctcctctagttattgcttttggatattctctaaactatgaactaaaaactgttaaaactagccactacctacataccctgcatctaagaagaaaggaacagagaaagggaacaaatataaacaagttaaaatcacttaaatcagatcgtgacactgaaagggtacagatatgagtagataccacagctcatgagttcacaatcaagtctatgtgctagtacattctgaggacctacctgtactctaggccttcaggactgatacagtttggctgtgtccccacccaaatctcatcttggattgtagctcccataattccctcaggttgtgggagaaagcagtgggagataattgaatcatgggggcagtttcccccattctgttctcatggtagtaaataagtctcatgagatttggtggttatataagggaaaccccgtccagttggatctcattctttcttgcctgttgccacctaagatgtgcctttcacctccctccatgattgtgaggcctcttcagccacgtggaactgtgagtccattaaacctctttttctttgtaaagttcccagtcttggttatgtctttatcagcagcgtgagaaccatttaatacaaggacttaccttacattaggatagaatagctcccaacagtcactaagccctgtctat

SEQ ID NO: 40321 - DNA, 1024 bp, Homo sapiens
acgtttattgatttgcgtatgttgaaccaaccttgcatcccagggatgaagcccacttgatcatggtggataagctttttgatgtgctgctggattcggtttgccagtattttactgaggatttttgcatctctgttcattgggatattggtctaaaattctctttttttgttttgtctctgccaggctttggtatcaggatgatgctggcctcatacaatgagttagggaggattccctctttttctagtgattggaatagtttcagaaggaatggtaccagctcctcctagtacctctggtagaatttggctgtgaatccatctggtcctggacttttgttggttggtaagctattaattattgcctcaatttcagagcctgttgttggtctattcagagattcaacttcttcctggtttagtcttgggagggtgtatgtgtcgaggagtttatccatttcttctagattttctagtttctttgcatagaggtgtttatagtgttctctgattgttgtttgtatttctgtgggattggtggtgatatcctctttatcattttttattgcgtctatttgattcttctctcttttcttctttagtagtcttgctagcggtctatcagttttgttgatcttttcaaaaaaccagctcctggattcattaattttttgaagggctttttgtgtctctatttccttcagttctgctctgattttagttatttcttgccttctgctagcttttgaatgtgtttgctcttgcttctctagttcttgtaattgtgatgttagggtgtcaattttatatcttttctgctttctcttatgggcatttagtgctataaatttccctctacacactgctttgaatgtgtcccagagattctggtatgttgtgtctttgctctcgttggtttcaaagaacatctttatttctgccttcatttcgtgatgtacccagtattcattcaggagtaggttattcagtttccatgtagttgagtggttttgagtgagttt

SEQ ID NO: 40322 - DNA, 1028 bp, Homo sapiens
gtgatccataatgtcatggtacaggtcaaaaacttgaagatgaagacatgcctattgcatgtaatatttagcagatttttagtgaccattcaaagaaatgttttactgttaaccagatagcaaagggttaaggaaaagtgattgggaaaagtagaaagagataaatatttgttaatgttctctatagtgagtttttttttttaagtaattggatttagactttccagaaatgaagtgaggtattatcctattttatctcacaaataacccagacactgggtatagctttccgtctaggcttttattttatttccaggtttgtttcttgctttcttaataggttgcggttgtttatcttctggcaccttaaatgatacaggtagaataggatgctgtgtggaccatggggatttttgccagtcagctttgtttacttgtctctgctgcccccttacacagggttctagtctcatgattacatcttcaccttgaaagttacaatttagtccaggaaaagtgctctcaagtgtatcttgatatctgagtgaaaataaacctgaatcagccaatccactatatcattttgttgttagactgggctaccctatattttgctgttagatttcataccacctgattctgtgtacatgcttgactgtcctcttggacacctcaaattttcagaaaagtttatggtttaaatgtgttttcactttgctcattttcgctgtaactcatttcacatcactgtttttcttttgtattatctggcttattattcttggttttcacatatctagctgcataatgtaactacttaacattttaattggttatgggaagcactgaatgcttcatttaattagtggagaagtaatattttataaatgaagctatggtagtaatagtaacaagtattagttgtaattatatcttaactaatttacatcgtatccaagagactaagaaatgtttgacagttcttttcagatttaagctgtgaaactctcactttgataaagactgct

SEQ ID NO: 40323 - DNA, 1029 bp, Homo sapiens
atatttttcctttatctaagttatagcatttttttctacaacagaaaggtaattcatcatctccagatccttcaggtttagaatttgattgccagattttctctcctgttttatgaagcataatggccttttatcatggagtttgttacagtgggatcttaatcatgataatggtggcacacatagtgattttgattgatatatatatataatcagtatttcctaggattatagtcatttgccatttattacacaaggagataggacttttcaaagcctgtgaaaactgccatttagttgtttttaaatcctctttaaacagttctaagaacaaagtttttgaccaagagtaacttatttctaagttaggaataagaaacctttagtcatcccagctttatactcaatcacaatgttaacttagataagtcacttattttctatgagctttacctccctcatgagatcgttaagaatctgtctcttttaattagaaaataaataagatcattgaactattagtgttttctaggttcttttttctcattttaataaaataatttggattatgtcattacatataagtataccaatggggccttactgacaagtttgagagtcaaacaaaaaaagaaactccatatattaagtgtactgttgttcccttttaggagattgtaagaacaacgctcttgtaccaggaaccattcaagtaaatggccatggaggacagccatcaaaacttgtgaagaggggacctggaaggaaacctaaagtagaagttaataccaatagtggtgaaattatacacaagaaaaggggtagaaagcccaaaaagctacagtatgcaaagccagaagatttagagcaaaataatgtgcatcccatcagagatgaagtacttccttcttcaacatgcaattttctttctgaaactaataatgtaaaggaagatttgttacagaaaaagaatcgtggaggtaggaagcccaaaaggaagatgaagacacaaaaattagatgcagatct

SEQ ID NO: 40324 - DNA, 1156 bp, Homo sapiens
gataaggagcagcgtgaggtaggaagttttaattaagggtaatataaattggagaagtcacagtagagatacagtgctataaatctgagttggggccacatcgtgggtggctttgaatatgaatctaaaatataagctctgagagcaaggggctgttgaaagtatattaacatgagaataacatgttttacactatgccttaaaaatgttaatttgactgcagtgtctaatttaattgacagagaagagacaaaaagcataaatagcagattgactgctacagttgaccaactaagagttgatgagggcttaatttatgaaagtgagaaagggacagatgcccagacatacttgaggatagagttcacagcccttgaccactaattgggtttataaggaggaggaaagggaaagaataatgaaaaaccaagattcccattactgtaagaatgatatgttgttaaagaaaaatagaaaaaggaacaaggatatctggggagtcactattaagtttagacgtggaattttaggtgttggtagaatgctcaggagaagggttaggacaaattgcaggaattttggaattcatttacacagataaaccacaagtatgtgaagcaaaaggtacagtgtcaagatgcgttaagaacaaaattttaggaaatacatttaaaaataaaagaaagagttggaagacaagaaatgtattagctgtttgaagactgaggaatggaagaagcacagcagatacctaagcaaagactgggagatgagacttgggtttggtgtaatgatatagtgaggccacactgaaagctctacatagagtggaggggtcagggttaaatgtgtgtgcataaattattggagtaagccaatggagaagaaagcaagccttcagcttcaacttttaccttaaaatatggttttacgaacaaatttttaaggaaaaaaattatcatggttctaatcttacatgttaacatttccttgttatgtagggatcagacttgttataacataattccactttataattcaatgaagaagaaagttttgtctgattctgaggtatgtaatatttcattattattaccatattgatattctctatataaaaaaatttacatattgtagttttcaggtaaaagctgtt

SEQ ID NO: 40325 - DNA, 1059 bp, Homo sapiens
agctctttgaaactttatgtttagtgtgaggtagtggtggtgtcaagaatgcttcttattaaactatatagtagctttttgttaagtgtcactagtatgcatctgaggaacaactgtcaacagcatgcagttgtgttctattaacttttctcctggctccaattttcttttttatcatattcttttaccttgtttttctaatttttaattcatttcatgctatatgtttttataaacttttaaatcctttttggtaagaaaatgagaacataactacttttctctttgagtttaaaaataaaactgattcagattaattgctaacttaattcattttaacttaactgtgtgtcaaaatgtggagtgctttaatagaactcattagtcaaaaactaccaggaggtagacatcaccatttctattttatagacaaggaaaatgaagttcaaaaataattaatatattcaaagttatacagatacgttatttgaacccaagtctttcaggctctagcctatgctagccacgagaaaactcaagtactgtgatagctgaggaacaggaaaacattgcataaaggaagtaagtgacttacagttttcttatgacacagaaggaacatgagaatatttagataagaaaaagccatagcatttatagcttgttcaggtctttgggaaaaagcaggttaagtaatacgacgacagcaattggataaggaaatagacacaaggagtgtcctctgttttaaaaagaatagttgttttatttttgtttcttttttgtttccttttacaggaaagggagagtgagtgagtattaagggtgattgagatgaaggaagacaggttggattttatgttgtttgttgtttttagcgtggagtcttgattgattgttggttggggaaacttgcttacagaaagtaagaaattaaaagactaagtaattgttgagtggaacttgccgcaattataattttatttcagtgaaaagtttgggtatagtgttaatgatgaatttcaaatgctagattggtaaaaatgcctaaaacaagtg

SEQ ID NO: 40326 - DNA, 1051 bp, Homo sapiens
atatattatttcagtgaaggcaatcaatttgcaatcataaaccaatcttattaagcagttaaaccatctccattcctcttttcttctcaacctttcccatcaccttccttctttacaggttagagatgtaatcattttagatattgactactatacacttttgaagccatgttgtgctttgaaatgctaggcatatatgagaattctctaaatatattctctttatccagggcaacattaactctcaaactgagagtattctaaccacaatttaagttagtctccaatagctttgggtcctcatatagccaggtcaaaatgatatattcattctggcaaaaaaagagaaatatactgattatatgaatttgacacatggtaatttggatagacatacaaaacataaaatacatgtgggctaattatttatcttataaaatgtctctttatttttgaaagagtttcctctaaatattaagtttctatataatatttaaaatattctgtttattagaaacttaagaactgtatttccagaaacacatctgttacaacaagtccttcaagtgtcttcaaactaatttatttatgctttaacatccttttagaaatttagaatatatttctagaagagtccattgagaacaaagtatcactttgggcacagtatactaattaattggaaagaattctgatttttttggttcagatgttttgtactttagtattttgtatttggaatgtaggaataattctgtttctttttcccccctttaaggaagtaacacacaaaatgtgggaaaaatcatatcacttgcttagatttgttatatcgagcagtgattaaatttgttaataaaatatgctttttgttaataaaatatgcaaatgtgattttttcatttttgcttagttttcataactgtggaatagacatataattcacattcttcattaaaacatcaaaatgggaaaacttttgtcccaagtatattattttatttaaatattaaaagaatccaccccattgtcctctttaaaagttatctga

SEQ ID NO: 40327 - DNA, 1081 bp, Homo sapiens
tcatattgtgttatctcttattaatcaggagaagagtctctctctttctctttcttttcttttctccctcacccaaccctccctttctccctccctcccttcctcccttctttccttccttctttcttcctatcatcatctaacaagataatgtcctatatttatactctctgtgttaaaaggactctctgatgcttccagtctatgtttcagcttctttgggtaaggaagtactttcggtcttcttaccatacactttagtaattatcactttcaggttttaagattctttagattatatctctcttatatatatatatcttggtacaaaaggcatgttaatctgttgccatgaatgtgagtttgtctctccagcttctcacactgcattatatgtggtaaattacttttatgtagtaattctttgacatagtccatgacttgctatcacaagggtatttgagatttgatagttatatgagaaggtatatgaaattatacagaatttaaacatgcagatgaaaacattttaacaaatatttgagtgttttcttttgtgttaagcacaaaatatgaggaccacaagggagaataagacgtggtctttttagtcagcctacagttaagttggggagacaaaatatacaaaatataccttaagggataaatattgataaataatttcaaacagtagcatgacaaatgagaaaagacagttgctgtatcttaagatgtagagatcattgtcagggtggacgattggagacgttttgttgaggagaaggaattgaaactatgccttgaaagataaataggaatcgagtcagtaagaaagagaatgaattttataaacaagaggaacattataaaaagctaagtgtcaagacatgttcatagaaatttagatatttaggaagcttgattgcagtagattttggaaataatgacgaaaaacaaattgagatgaactgtcagtgacttcaaatgatctcataggcataaatacctatgaaccttgtgggggctttagtaaattattttataggatggtcgagaagctaagagaaaaatagtttggttg

SEQ ID NO: 40328 - DNA, 1050 bp, Homo sapiens
gaaaagaaaggttaattgagataatatgcactcagagggaagcatatgcatttttgtttgttttcagcacttgtctaaaaagagcaaatttaatcaagcaatactaaagtggtaagataactaaatgataaacccagtaggaatatagtaggacttcctgttacattttaattggtgaaagtcactggaggttaattttaggtcacagattaccattgctcctttcattaaaactgacattttggtcaaaagactggtgtttttatttgttaacatgaaaaatatgtgaagcatctttatagtggaatgtaaaacacactcttattcaaagattcataagaatgatatgaattgtatcagtattgtgaagcataacatgatgtcatgattttacttttgttatatggtctacctactgtagtgtacttaaaattctttgtgtactgaatgcaggtgagaaccaaaattgcttcagttttgggaagataaccaaatgtagtgaatatgttgattcaatttgtgaaatgtagagaacttaatttgaatgaatgccctaaagcattttttttactcagcaaatccctaatgtgtttccgatgtgcgtatagaccagctttctgggagtcatagtctgctacagctcttccttcacttccaacagataatcagtgatgtgctccttatcccttttattccccaaacagctgttataaccatgtctttgattattcttttttgctataataatttgtgttaccacttattctctcctgaccatactattttaacaactttcagctggtctcctttctgtcttagcctaattcacactgatgccaggatgatctttagaaaacacaagtatgatcctgatactcacctgtttgatatcttcagtgaccctcattacacaccacttttcttagtaaaccgtaaaaggcctttcacaaattttttttactttttcatccttatgccttcacctcacactctaaattaccttgcaggctgcttgcagttctatgaactactcacattgtttcacatttt

SEQ ID NO: 40329 - DNA, 1069 bp, Homo sapiens
ggatcacttgaggtcaggagtttgaaaccagcctgaccaacatggtgaaaccctgcctctactaaaaatataaaaattagctgggtgtggtggcggacgcctgtaattccagctattctggaggctgaggcaggagaatctcttgaacctgggctgcggaggttgcagtgagccgagatcgcactacaatactccagcctgggcgacagaggaagacttcgtctcaaaacaaacaaacaaacaaacaaaaaaaaacaagaaagaaaaatgaaacaagtgatttactactctcttatctttgtgattaaacaatagcacaataatttgattttaaaatgaattataaaaaagattttaaattttgtacccaccccatggatttcttaaaacctgttcatagttttccagataaaaatctacactaagtggtctctcttcgtaatctcatctgctatcattgttttgactactatggtataaactgataacacccagatctctatctctaacctaaacctcttcttgtagcttcagatctattactcacataaacattagcaggatctggctaaaatactatagtgaccatgtcttgtctgcttacaaattgtctagtgactacctcagcaggttaaatacaaactcttaacaggcatttaaaactcaattatcattcttaggtaaaacatttccagcataatcacttattttcacttacactttgtactttcaagttttcttactttgccaattcctagcccgagcagcaatccccagcaacattgagatgttactgaaaagaaatgactacttagttttcccttgagtattggagctttgctgaaaaaactatgtcagttgaggtatttctaacatcatgctatttaaatttagcaggtctttaattgttgcttgcagaatttttccacctttcttactgcttttattccactgcatttccaaactttcttcacttttttagttcattcgcttgttgttctctccctctcacttttaatcctcagattttgttttgttttgtttttgctgaggttacatgatctctccc

SEQ ID NO: 40330 - DNA, 1025 bp, Homo sapiens
actgtgggtaaaatgctgtcagatagcattccatgctgcagagaaatctcttgtgaaaggaagagtccaatggatgcagcagacttcattgttgtcttattttaagaagttgtcacagctaccccaaccttcagcaactccaccctgatcagccaacagctgtcagcatcaaggcaaagccctccaccagcaaaaatattactacttgctgaagtttcagataattagcattttttagcaataaagtatttttaagttaatgtatgcccattttttaaagacataatactattgcacacttaatacactgcagcataatgtaaacgtaactcttacatgcacttggaaaccaaaaaatttgtgtggtttgcttcgttggaatacttgcttaattgcagtggtctggaactgagcctgcggtatctaggaagtatgactatatttgtttttatttgagtcttgcctctgaaactttttattttgaagaatgttgaagtttttaaagggatttacaaaatcagaactttttttggatatacagaaaaaaatactaattgcttatagtaagaaatccagctgcatgctgaaaggaaaagtaattggtaccattacctccatactgtaaaagtactagaagaaataacagtggttacaaagtaaatatctgatgctgttttcttccttcatcctaaagtgcagaagtgtgttgactgtttttaaggcacatttctttatcataatatgtgtgtttttttcaggtgtggcagtagactaagctaattttagagtacttgaagccaaattgttaggattggaaaaatgtaaattttgtttaattcccaccctttctcaacacactttctcataaataatatctatgctgttgtgttttcaagtatagagatgtactcttttagcttccttggcttcatcctttgatgacaagattgtcttgacttaaaaagaaaccctgtaaatttggtgtctcattttgttttgggatttaaataagctaagggctatac

SEQ ID NO: 40331 - DNA, 1050 bp, Homo sapiens
atagttcaattaggccttttgaagcttaacctctggaaactcattaaattattaaaatttgggggcatagactttaggtgctgtttggtttctgcatcgaattgaagtgattcatggccctgtgtctgaagttgtttgaagttttcatggcagtacgtaggccatttttttctggattttgaggataattttaataccaaagtgcctaacagtagaaagccacgtcataaagacctgtggaacttttcttcatgagaacattaaagtcaaatgtgttactagacactgcctaggctttatgaaaaatgctaatacagacgtaccctgtttcattgtgcctttattgcattttgcaaatactgtattttttacaaattgtatatttgtgaaaaccctgagtaaagcaagtctgtcagcatcatttttctaacaacatatgctcaagtcttgtctctttcacatttcgatacttctcacaatatttcaagctttttcattattattataactgttatggtgatctataatctctgatgttcctattgtaagtctttttagggtgccatgacctgcacccttatggcgaacttaatgaatgttgcatgtgttctgattgctccaccaactggcccttccccatttttctctccttgggcctgcctattgaaattaatccaattaataaccctacaatggcctcttagtgttcaagtgagaggaagagtctcaggtctctcactttaattcaaaagttagaaaagattaaggcgagtgaggaatgcatgttaaaagagttagccaagttgtgaatgtaaagcaaaagttcttgaaggaaattaaacgtgctactccagtgagcacacaaatgatgagaaagttaaagagctcattgctgatatagagaaagtttaagtggtctctataggagatcaaaactagccacaatactcttttaagccaaaggctaatccaaagcaagaccctgactcttaattctgtgaaggctgagagatgaggaagctacataagaaaagttggagctagcagagg

SEQ ID NO: 40332 - DNA, 1050 bp, Homo sapiens
tgggaaatacagacttgagcgacttgttccaactgcagtgtatcagcacatgaaaatgcataaacgaattcttggacacttgtcatctgtgtactgtgtaacttttgatcgaactggcagacggatatttactgtaagtaattgctaaagtattatttatattcatatatgtaattgaggaaatattgcttataggtgaacttgaagtaaaaccttgcttttttttcttttaataggaaaccggaaattcaggtggtttcacttactctaacagaagagtttagttaaatttggactttatccaaattcagaaagtttctaaatgacatgttgcagcacagtcacagttattatatggttgtacatcatgaataagtatggttctcaacatatatcaaatacacagtttgacattttgcaaaatggcataaaataattttaattttgaactaaggacatctaagtatgttgagagattattaaatgtgcctttttataattgtatgagattattgaatatacctttttatattatctgtagaaaatcacttgcttgtctatgagaaatttcccttaaaatagtgattttaaaaaagctaaaaaattctgagcatatctaatactcttattacctgttattcttaacagttcattcttcaaaatatctgatgttttgtttatagagcctctttgggtttgtttatttgttattgtttcttgtaacctgttgaatagagaaaagcaaagcttttgagctttattttaagtgagaaaattacttttggaaatatttgattttcaggtgccttaacatctacattcattaagcataatactacactattatgatgatatttattattaaacactaccctgtgggctgaaggtatgcattcattcacaaggtttttaatttcttttgaaataagaaaatttgaagtggaagttaaatggaaattttcctgtctttgaagagagcagctgtgaattttacgtagttatgacaattatagattcctctttttagtaaatttgcttgtaaactgagac

SEQ ID NO: 40333 - DNA, 1019 bp, Homo sapiens
gcacagaaaaaaaaaaaatacatatgtatatataaccatatatacaataatgtaatcaaaatttaatagaaaagaattatttagtaaatggaaaggctggaacaaatagttacttgaggaagaaaaaataatctttagagacctcataatgagtattataattgtagatggattaaagagttaagtgagaaatctaaactacaaaaaagtaaaagaaaatgtaagtagatgtttattgtactgttgggctgagtaggagaacttcatattaaagcagtagaagatattaatataattgactgtgtaaaatttgtgaaattgtggggtgtcaaagaacagcataatatgaaagccaggtatattgtggtaaatggaaatgtttctctaataatgtaactggagaaattaaagtttagaacgagtaacttgcttaaagtctccatagtgacaaatttgaacacaggtctgtcagacttaaaacctcttatttcattaaggaatacaacatagctgttaaaatgctgtttttgaggtaaacctttgcgaaattttaaaagtgattgctatagacaatagaattatgggtttttctttcatttatgttcttttctaaattgaatatgcattagtattatgattggataagtaaatcagttctcgaaaaataactaggtgtgaagtaagaagtgacttatgggggaatttgacttattatcctagcacctaaagaagtaatggatgagaacccaagggctgaatatgcgcatagtcacatctaatgtttaagaagttgtgggccttttgttgatctctactaattggctttgtagacttgagcacatatactttatttcaaaggctgttctgaatgatttgctgcaaatgacatgcttcagtattttgctccttttttacttcagactttattcaaatggataacagtgatttctggaatttttatttcatttatcctctatattcagaaaattaagtgaatacgttctccccttatttcccaa

SEQ ID NO: 40334 - DNA, 1322 bp, Homo sapiens
ttatgagtatttggttgtcattacttccttgatacccgtgttaataacaggtctttccattgtggctctatagtgaattaaacattcctccttatatgattccctccgaaacaaaattgaacctgaactatctttgacatgtttctctttttgtttaaaaattcagtgggaaagattacacaaacaaatcttacaacaaagttgatggcctgctttgtagtattatcttacagctttcaaatcaaaactgatgtgaattatttctttatagcatatcattttttcagtccattttcaaatacgcaattgtcattctctatagcataatatacattcatacactgtaatatgcttaggcattagtgtttcttttttatgattaaataaatttaaattccttgcatctttatctctaggtttatttttgtcagtctttgaatttaagctagtctctttagatattttagagttttcctactgcttttttgaattccttgaggtagattgagttataaaaaattagaatgaacgtatgctctatagagaaagtttggaaaacagaacagctcaaaaattaatcagtctcactccttaactgctgtacatactttggcatgttttctttcagtctttcttttctaatattgatctgcataggcagcatataatagttaagggtacagtctttggcaccagactgcctgagtttaaacctgggcttcacctctagtaaattacattttatcctttggtttccttactggtaaggaatatctgcttattgggaataatggaagtatccacctcaaaggattagggaggattaaatgagaatatatgtaaaatatttagaatagtgcctggcatgtagtaaaacactcagtaaatactagctgttattctctaaatttgctacacgtcgtaagagtgttctgtagcctttttcctctccttgttatgtattgtatggtgacatttatacccacattattaattgcagcagataagactttttttttttaatcgtcagattcttgaagtcctagtaaaaacctctcataactctaaaccatggttgctttcctcttcctttatagccattttctcaagggtttgatgcctggctttaacgtaacttctgttagaaaattatgattagcaatttttttttaccctcatatttccttttcattaaaacacttttgtggatctctaaaatgagcaacatttcaagtaattttatgccttattaaatactttatgccacacaatacatttatctgatagaaattctgaaatcaccaacaccatatatagacaac

SEQ ID NO: 40335 - DNA, 1810 bp, Homo sapiens
gatacttattatacagatcgtaagtttatatgacttttgtttggcatttttatatatatatatatatatatatatatatatataattttgctttcaactttttgtttccttttatttcttgtcttttaaaaatataaaagtggcttttaaaaatacaatatgataatctgtgttttatctggaacatttagtcatttacatataatcattgatgtacttgggtttaaatctactatctaacttgctactttgaaggcaatccctttttctctaattgtttttaagattttttctctttctggttttctgcagtttgagtatgatatgtcttgatgttaattttttaaaaatttgtcttgcttagattctggaaatgtcttttattgacattgaaaaattctcagtcattatcttaaaataacctctgtgttcctttctctctcctttcctatgggacttaaacactttatctgcttcgttatcctttcttctatgttttacatgtttttgactctctgatgtattctgaattgtttgctctgacttacttttcagagataacgtatgtgatatctgcgtggtgggtaatcatctatgattttttttaaaacataagattgtcctgtttaaataatttcaatatataatcttgctataataaacaaccattaaaacaacaaaaaaatttgagagacgagggtatatttgtacttagaaaagtattctaaggtggtataataggattcctgcaagaagggaaagataaaatattataggagttttcccatttaggaaaagtttatcctgtctttgaaaaactatagatccacataataaggagaacacgttatgcttgttctttcagtacattgtcagtcaggcctgtggtaggtaatgaaagtgtaagaatgattgatggtaaataacatttgctttgtgagtaattcctgtatgccagacactgttctaagcattttctatttatttactcttttaaaaccttaaatgttctataggtaggaactattatgcttattttacagaggagactgaagcatggaaagattttggtaacttgaccaagttcacacatgcagtgagaagtgaagccaggattcaacccagactgtttgactccattatgctatgctttattcccagtaaactgaatttattaataataacacttggctactcaagaaaattggtgttagtcattttttgtaaaagggaaccaaatatttataaaatcaaatataatattttaggccacgtcgttgatggtcagattagtaaatactgctgacaaggagagaggaacatttatcttcccttattcacaggagatacattctgagatccgtagtggatgtcggagacaacagatggtacagaaccctatatatacgtatggcaaaaataccttgggttttgcatccaagcatagaaatgtaattgattcatttaggtaacagaattaattgccaagcaggtgattgatgtacctttctgaaagactattttatttttagagtttaagataatttttttctctctctcttccattgtgattttcaggaaaatctttgctttattttaagaaacacctgtagtggattgcccattttgcctacttttaaaaattgtatttacatatattttttgaaagcactgcagagaagctagactgaccaaaatgactcaacttgcatagtcataggttagtgtctgtgttttgctagagttcaccatggtatatattttgttttattatcgctataaagtaatgaacaggatggtgttggggaga

SEQ ID NO: 40336 - DNA, 1138 bp, Homo sapiens
ctacagtagtgtacaaataagaactatattccaataaactggccttttagaactcaaaaacataatagagagcagaagtgtaactagccttttatatctgacaaaactgtgagagaatagatttgagaagatctgaaaaactgacttttttagaaccaattaggtgttcagaacataaggatgaagtgaaagcctagttagacaaatgatactggtgccaaacagcagggtcttattttcataataattatatactagaggaaagaagggcacttctaggtcttcacagctaaatcaaataattggaatgaatatattgatctaacatcactttgaaaaggttgttaaaaacatgctcaaatttttttcctatttagatttacaaagattttgttcaacacgaagggtcaatatgtaatatagaatgtaattaaagtaacagccaactgttaggtacagtactaactgcttcatatggtttaatttaataatttatgactactttccaaggtggtgactgttgtgataccagtcatacagatgaggacactgaggcttagaaagagtaaatgtttttcccaccctcagccttagcaactttaaacccaggctgtgtgacttgagatttcgtggggttttttgtttatttcgctttgtttttgagacaaagtcttgccctgtcactcaggctggtgtgcagtggcatgatcttggctcactgcaacctctgtctccagggttcaggcaattctcctgcttcagcctcctgagtatctgggactacaggcacgtgccaccacgtccggctaatttttgtatttttggtagagacggggtttcaccatgctggcagggctggtcttgaactcctgacctcaagtgatccatcagcctcagcctcccaaagtgctgggattacaggcatgagctaccatgcccagtgagatttcgcattttaaactactgaccatttctttaaaaactgagtagagttcttagtgactgtaagtctggtagaatgcagcagcttccagatccattgtattttcttcctactgataacacttgccttttaacaataccttccactgagataatggcaaaattttttggctgggaaggatggctgtttatgtga

SEQ ID NO: 40337 - DNA, 1032 bp, Homo sapiens
tttggacatgctaaaaactgctttactgcaaagaaaaatatctagtatccaatgaactcttcacaaaaatattttcagtatacagttagtactcagttgaagtatattgctggctagtttccattccagaagtgaatcataaattccctaggtttactttttaaaaaattatataagtgatcccagtgatttttttttagaagaccaaatactacaataatacataaagcaaaaagtcaaaatcttttttcctcccattcctacatcccagagataatcactgcacactattttctctattttctctttctcatgtgtgtgtatgtgtgtgtgtgttagggttatgtacacacacacatatatatgtatatatataatttttaaaagagaatgaatcagtatcctattttgaatttattcaatctgtagttggagaaatagatcatttctaatattacagtgctgtcaatgatactgcagtaaacatgcttatatacaaagtttttctacctatgtatttcttctgctcaactaaataacttcccagaagcagaatgtctgaatcaaagggaatatacatttgacattttgactgcctccaaaaaggatgtaccaatttccccttccatcaccaacatttgaataccatctctttccacctttgccagcactcattttggtcagtctaataaatgaaaatatgcctcacttttaattttaaatgtattctattattagtaaaattaaactttttctgtttaatggtcatttggatttcttctgtgaattctgattttgtctttttctgttggggagtcagtgtgttttaaatcattgttgctcataataaccattgatgctattactattaatagcatcaattattactattattgctatcagtaatagcatcaaacacacaaagatcaggggttctgtaggctattggtgtctacttaagtacaatatatggatattatcgtggccacattgaaaaaccgagcaggtatcatagagaccacagctacccaa

SEQ ID NO: 40338 - DNA, 1057 bp, Homo sapiens
aaactcccatatcatataaaatttcagggaaaacagaagcaaaggagagcttgggggtggggagaaaagacaaatgtgctctatgtcctagtaactcttagactgagtaaagtgttaataccatacccagatgttttatttatgaagtttttattttaaacattttttttaaaaattagccttgatattctccagaccaaagcaatcattaagtgactttggggattctccccctgttcacatccagttgtctaaaggatgagatttttcatgtatcttatagtcactcattcttcggtctgaattttagacgatcacagaaacggtctttatgaattattttgataaattactaattatcttatctactgactgaaatcagtggtgttacattttcttgtccaaagctgaaaatgtgtatacacttaaacttgcacatttgaattcatttgctgaccggaatggtcaaatctctccacctctagtcagagtataattttggttgtaattaaatttttaaaatctgctgatctctgtagaatcttagaggcttgatgatgatggtgttggtgaaaataagaaagaattgcagtaaagtcttgtctggtgacccagagatcaccatgacttgaggcacaaatcactgtggggaaacaattttttgtgatgaaaaggcagcatttgaatactcctgttagtagcagaaatatattatgaaaattaagattattgtctgattgaaacatgaaacaactcatgtctttattagtaacatcataagatagttacatttatgtgctgttagaatatgttgatttttatcaggctttccttgttttgatttatggctgttcctgatttttcatatgtggaaatatacctacctcttccgttggaaagaacatttaaaattaaataaattttaattaaaaaatcaaggagtcttctaatgtaaattttaatgttaactttcaaatccactagtattttttttgcttttatgacaaatagcatacaccaaacatttctgtgaaactatccttctctttcaatgtgt

SEQ ID NO: 40339 - DNA, 1071 bp, Homo sapiens
ataattgagtctttattgtcttaggcagttcaggttgctataaaaattaccatagtttgggtggctcataaaaaacaaaaaattatttctccttgtattcatgtcaggatacacggagaagtcggcagtctgcggcctggaagatggcccttagcagaacctgaccatagtaaatatattagccaggagtggtggtacacgcctgcaacctcagctacttgggagactgaagcacaagaatcacttgaacccaaggggcagaggttgcactccagccggggtcacacctgggtcatactactgcactccagtctgggtgacagagtaagactctgtctcaaaaaaataaaaaaatgccttcaaatatttccctaaaacacatttctcataacaatagagagtgagtccaccacctctaccttcttaactcttacttagaaatcctgcctttcttagaactcctacctgtctgctggtaatttgaaataagggtgcctgtatggtcaggttctgatggaattttgaaataagggtgcctgtatggtcaggttctgctgagggccctcttctgggctgcagactgctgacttctccttgtatcctgacttggcaaagaacagagagaagcaagctctccctggactgttataagggtactaatctcattccagaggcttctaccttcgtgacctcatctaatcctaattacctcccacaggccccacctcctaatactattacactggtagatagagtttcaacatacgaattttagtgggacaaacattcagcctcactgaaggtcaaggtttaaatattacttaatccttgagcttcattccattcattcccagttgcagacaggtaggctttctaagaaaggtaggatttctaagaaagagttaagagggtagaggtgatggactcgctctctgtgattgatgttatgagaaataggtgttttagggaaataattgaaggcactccaacctgtatctgagtgtaagggaaggttccttggagaaagtgaaatagaaattgggtcctaaaataggaaaggaataataatgg

SEQ ID NO: 40340 - DNA, 1054 bp, Homo sapiens
aggagaagatggatgtcccagctcaagcagagagcaaatttgccctttctctgcctttttgttctattcaggccctcaatggattggatgatgcccacccacattggtgaaggcacagcttctttactcagtttacctatttcaatgctaatctcttccagaaacacactcacagaaacactcagagataatgtttaccagctatctgggcatcctttagctcagtcaagttgacacctgaaattaacttccacacgaggaccctgaagtgggactgaacatgataggcccaaggaatggcattactgcccaaggggctggagtagaggggacaggaacagaatggtcagtgtgagaaggctagagagataagtggtgccagatgttttatggccttatgtgttacaaacaggagtttggcttcatgcccaagtgtgatggacaagaagccattagagggtttcaagcatgagattaacataatgtaatttgtgttttcaaaaaaaaaatgcctttggcatcttggtggagaagtgactgcagggaacaagaggaaagacagaggaaccaactagctaagttcagataagagatttccttttgtctccctccacactgagggcctgttagtagcaccttcactgagaagaggaagaatgtcagagttttaaatggccatccacatagagatatcaagtacctactgtatcaatcagcaacttagaaagtattggaactagagatataaatttggatgtaattggcatatgatgttgtctaaagccctaggacttcgtaaggcttccagggagtgtatgtagatagagcctgagacatagtaaagaaaaggaagagaaaaggcgaagggagagaagactcatcaagaccagccagagaagggctaagaaagctaggagggagtgatatattattaggaggtgagtgaagataatgttgcaaggaggagagagtaatctattgtgtaaatgcagctgggaggtccagtaagatgaagaccattaattgaacattggatgtgttataatgcatatca

SEQ ID NO: 40341 - DNA, 1026 bp, Homo sapiens
taaatttaattatttatcttttgataataacaataataacaacaattaacagctaacatgtattgagcactcattccaattcaggaacagtgctaagagctttagatacttgattaaatcctcattaccttaagagttagatgccattgtcatcaccacttgcagaagtagagattgatgcttaaagagttaagtagttgcccaaggatacccagcctgtttggcacagtgggagagcagtgggcttacttcagaagatttaaccaccaagccacactcctggcaaggtggtgatcttggccactatgccagattgtctacttccaggaaacaccattgaacatgagtgactgcagtatatcttataacagagttttcctggaaaccaatcgaactaaatcaaaagagtaacacttcatgaactgctgtctcttaacttctgtaacaaactactggcatagctgatattggagttgagttgttagctaaaacttccaagtgctccttccattctaaatgtctctgttgtttgctaaagtgatttttttttaaagactacgtaaaatccacatgtttccttcaaatttggcacttgtaatctgttcctaactagtagtttgtcaaatcacctggaatttcagaactattatataaacaatttgcatgctgccttcagaagtttttgaagttgggtgagcataataaaccttttgggaccgggggaaatatcagaatttctgtttttagctcctccttttgaaagtttatgtctgtgcgtagtacattagtgtagtcatacatgtattaaatcaataaataagtaaacaaacatttattgtgattgtgtgatcaaaaaattatagagactattgatttagtcacttttctatgtgaagcttgattttctctcttgatagggataaggtctgtattaggcttgtctattgctatgtaacaaaccatcccccaaactggtagcttaaaacaatatcaatatttcattttctcacatagttgcaatttggg

SEQ ID NO: 40342 - DNA, 1023 bp, Homo sapiens
caaacaagcaaagaaaatatgttacttgctgaagccactgactcaatcctgtctgtttaaggttttaaaacagagaatttattcaagaatctcagcttctgctttgcaaatgagttgaaagcttaaggatttgaccccaactttcaaagtaagtataccttgtcaagtttttttccatctcttgctgcctacattcagtctttttcaatgatacttcatgcttctaagtatgtttctgccttcttcctaattaatattgaccgagttcccaagtgtgttgggaacaattctagggactgtgtggatggaacacagaaatgaaaatgttcccgccctatcccttctgcttgacttctggctctaaatgatgccattcattctatccgcctgttggccccacacgcaactttctgtcattcacactatgccaagagatcatcaatgcccttttgtcctgcgtccctcggagccttgcaaagcacagagcacagcagaactgtcagcagcacaaatgccacttctgccaaacctgctcttactgtgtcctctgatgaaccagcagcctttgcagctgtcttcccagagtgggtttatgaatataaggcctgccgtctttcctctccagttctgtctgcctcagtactagttagaatgactaaaccagacagagtgcaaagcccatgtctcccagtgggtaactcagtccactggtctcttcacattcagattctctcatcttacacctccaaggacaacatggtatagttttgctttccttttgatgtcttgtcttgtctttcttttttcttttctttttttccttttttttctgcccttctgtgtcagggctctcaaatgtgtgttcctgtacctcaaaaatacatagagatgattgcaaagaaaaataaatatacttcttctttctccaaacatgcgtaagtcatcattcccgtgttcataaacacatgctgtatctgcctcagcattcttgccagacatggatgatgttttactttcccttct

SEQ ID NO: 40343 - DNA, 1024 bp, Homo sapiens
gttgttgcttgacttcttaaatatggcattgatgaatttaaagtaggagcatcagttattacttctgattcattaatggccagaattttgtgtttggtgtaatagttgtgtcaccattcttgttgctttttaaaaatcaggctaatcatgtggtccatgtctcttcaaagcttgacctgcacaaatgccatatttctatttggaccacatattctccattttgcattgagcagtagagtacagtggaaagggaataagaatactgattattctgaacagtttagtcccaagagaatagcgttttaaaaaagaaaaacaagatttggagtcattgtgggttatttttggtgggatggaggatcttaaaaatgcctaattgtgagagaatcaattgctgaaagtgttaaaatttctgaaaataaatgcttaattacatatacaggaattaaatagtttggaagagggttggattatcattacctttacaatactgtataatcagaagttctctgaacctcaattgtatatctagacataaaaattgttttctgtataggatgttgtttggtttgtttctgagtgtttaaattttgcaaaaacaaatgttaaatttgtgcttcagtacctagataaattggaaaggttaatgttctagtttctggaaggtaagcctgggagacacataagcaattcactgctataatttagttgatgtaaaatgacggaaactgactcaatatgtcaggtttaactctgcccaaaagcagcagacatgtaagcagatgtgcaataaaaaatgatcttgatccatttcactaatgtgtgcttgacattttttactatattgacatttattatggaaagagttaataattattttttctgatgtgctacactagtggccagtatatggttaagttgatgctgtatttattctaagacggatttaaaaaggcagttttctaaatatgaacttgtgaatttttgtatgtgtgtttgagtaaattgagaaatgaattttata

SEQ ID NO: 40344 - DNA, 1050 bp, Homo sapiens
tgagagtagtaatacctatcatgcaggcttactacaaggcttatatcagtttgtaattcagtacttatatctctaagaaaagttatcagtaatttaaagcaataaagaacctaaaaacctctgcttttcattatcgtatactaaaaaaataccctttgagtttctgtttcagtcgttaattttctaattaatttttcataaacgactatttccaagtattctggtggacactgagatacaaagatgaatgaaacacagtcctgttccccaagagactagtctagcagttaagattgacatgtaaacaataataacagtgtgtgatgctttatcataatgattgaagttttgtaggaggagagagaaggtgacatttgagccaactgtaaaagagtgagaagacatttgaagtggaatatattccagaataaggggaatagtaaaaataaaggtagctgtgtgatcatggaaaaaacactgtactctaaatcaaaaagaccagatttttgttatctctctgctacttatctaacttgttaatcagacaaattatataatattctttgagtttgttttttaatctctataatagttaatatatgctttcttcacagggtattgcaaagattaaatgggataatacacatgaagtacttaggcttttagtaaatttgtttgcccacacattagggctaaacattttagctttcagtgcattttgtactctggctctattgtttcttttaaactttatttctctttaagtttcttccttaccctgaattcaggcattctttgcttattgaagagaacagcctgcctttacttaaataactgaaatcttttttaggtccatgtatttgtacaaccaaaattctttctaattgtacgtctcctcagctttaatgtcatttcctcagtgaagccatcagtatatacaatcttccatattgtattttttcttctgtgcatccatagtactttatacattgttttatcattgcttaagtatatttttaaatcttccccatcagaattttttgaggggag

SEQ ID NO: 40345 - DNA, 1069 bp, Homo sapiens
attttgaccaaaaacataggttatttttctttgaaaagaatttgataattatctggctgggcatgatggctcatgcctgtaattcaagcactttgggaggccaaggcaggcagatcacctgaggtcaggagtttgagaccagcctggccaacatggaaaaaccccgtctctactaaaaatacaaaaattagctgagcatggtgttgcatgcctgtaatcccagctacttgggaggctgaggcaggagaatcacttgaacctgggaggcagaggttgcagtgagttgagatcatgccaccacactccagcctgggcaacagagcaaaaatccttctcaaaaaaaaaaaaaaaaaaaagaatttgataattatcaaatacaagtgatatttgttatacatttattttatgaaaacatgattggaaaacttaagtacaaacatgagtaatgagttttatgtatcttagtacactaagaaaatttatctaactgaccaattatagataatttagataattatagatgttatgggtaatctgaatttttgagaattatagatattctgaattattatcatcaaggtgagaggtatctgaattgtctacaattagtaatttatgctctttttaagactatacaggcatactttggagatactgcaggttcggttccagactaccttagtaaagcaaacatcgcaataaagcaagtcacaagaaatttttggtttcctggtgcctgtaaaagtaatgtttatactatacgtagtttgctaagtgtgcaatagcataatatctacaaaaaaaaaccttaatgtaaaactattttattgctaaaaaatgctaatggtcatctgaaccttcagtgaatcatctttttatggtggagtatcttgccttgatgttgatgactgctgactgatcagggtggtgctttcgtcactaagcttaattatttctagcttttgatttaaagtgagagacatgtgactttttctttcacttgaacacttagaggccactgtagggttattagttggtctaatttcaatattgttgtttcttaggaaat

SEQ ID NO: 40346 - DNA, 1089 bp, Homo sapiens
ggctcctgcctgtaatcccagcactttgggaggccaaggcgggcggaccacaaaatcaggagctccagaccagcctggccaatatggtgaaacgctgtctctagtaaaaatacaaaaaaaattagccgggcatggtggtgcatgcctgtaatcctagctacttggaaggctgaggcaggagaaacacttgaacctggaggtggaggttgcagtgagctgagatcatgccaccgcactccagcctgggcaatagagtaagactctgtctcaaaaaaaaaaaaaaattcaaaaagattgtgtggcaaaaaaaatgtttaaatgttctttccaaattgtagtgataacaataaaagaaacatttagcttgttaaggtgatttactttaaagagaacaatgtataagagatggtaggttttatttttaaatcaattatacagcttttagttacaagttagataacatctttattttatagcttattttggtacttcatttagattctaataaatttgaaatgtgtggaaatggacatgtgaatctaagcaaaagtttgaacctggataccaggtgtggcatgaggccaggcatttagcttgcctaagagaagaaatgatatatacatttcacaacaaccctcttgcttcaagcgagctctcaatagccagagatttcagggaaaaacacacttcaaacaggccacagttgtcttctgcgggagcctctgctatggggtcagtcagctggctaagtgagaggcaaaaaggccacagggttcctcccacatagaatgaagctacccccttgcttgggtgcggagaccactgtaccaagagacagatgagaaagggaaaagaggtctggattttaattattttccctttctcctttgtctcttatgcggacaaaaatattttaaatcactttttagagcagatcccaaagaactatcttcctcaggttcattacacaattggtgtgtgattgtaatgaataaaattattgttttagaatctcttccatttcagtttttcacttaaactgatttctttctccagttaacttgaattattaagatttttataccataa

SEQ ID NO: 40347 - DNA, 1022 bp, Homo sapiens
tattgaaatgtcataaaaccttgaagaataaagatggtgtcagatttatttgctaatttcaagggtgagagtttaaaagtgaaatttttgtactcttgccctgatcttggctttaggtgtttttagctacccattttctactatttgcagtgattttaaaaatttaactttcccattatatatctgaacaaagcacatctctttttttcttgaactcttctttcttgctctcttcattatcttagttaatttcatggctatcctcctgaacactgtactttgaaatccaaaatgagtttttctttattattttggccctgacactcaaattcattcagttgtcaaaacttattccttttaactatgttggtcacatttcccctacctttgggttctcactgttactatgcagttgaggtcactgttatctgttccttctgggtagtgtcacagtagtgttttaaatgctctttctcctgtctacttctgtttctttaagctttctgtaggaagtagttacatcttccccctgtttacatatttataattgcttactctagaataaaggttaactttccttagcttccacctgacagcctttttgactttctaatcttatatctgttctgctttactgctacttcaagaagtgtgaagggaattcctgtccattttttctagttcatacttgctaggagtttgtcttggctttggcattttagttctcacttttcttgagcactgtagactgtctactccttggttattaaatagagaacaacagccctgatctccttttaagcaagaaaagaaaaatattctaaaataaaggacacagcatacaacaggtataagacatacatataagtgatattttacacttgtacagttgcctttgctggtcttcttcctcagtgttctttcatggctctggctgcacagttgcctttattaattccttgatgttcctagaacctaggaaaaggaggctaccacctcctttggtctctgattattaggaa

SEQ ID NO: 40348 - DNA, 1060 bp, Homo sapiens
caataagtagtttttagtatgtttatgaatttgtgcaactatcatcactgtataattctagaacattttcatcaccccagaaagataccttgtacccattagcagacacttcccactctctcttatccccagtccgtggaaaacccctattatgttttctgtctctatggatttgcctcttctggacattttgtataaatacaatcaaacaacatgtgaccttttatatttaacttattttacttaagtacgatgttttaaaaatttatctgtgttgtagcaggtaccaacacttcattgttttttattgccaaataatatttattgtgtggatataacacatttattcatcagttgatggatgttggggttgtttttacctcttgtctattaggaatcatgctgctgtgaacactcatgcctaagtttttgcgtgggcctatgttttcatttttcttgggcatatacctagaagcggaaatgctgggtcatctgtttaattttttaggaactgccgaactgcacagtggctagctgtaccatttaacttaaccactaacagtgtgagggttccagtttctccacatccttgcaagcacttactaatatcaaccttttttattatagccatcctaacgggtgtgaagttatgcaacattgtggttttgatttgtatttcactaatgactaatgatgttgaacatcttttcatatgctttttggtcatttgtatatcttctttgaatacatactcaaatcctttggacactttttttctcaattatttgtttttttataatgttgcaagagttctttatatattctggatattagtcccttatgggatatatgatttgcaagtattttctctccttctctgagttgttttcacttccttgatgaagtgtcgtttaaaacaaaaacttaatttttttttatttttgagacagggtcttattccattgggcaagctggagtgcagtggcatggtcatggctcactgcagcctcggcgtcctgagctcaagtgatccttcccacctcagcctcccaagtaactg

SEQ ID NO: 40349 - DNA, 1130 bp, Homo sapiens
gactaatgttaatatccacataataagtttcttgagagcatagaaattggaatgactgagtgtcagagaagattagtaaagcctcataagactaaaatagagttaatttgtgggagtaactagaacgtaggttcaacttatggaagtctttagaagtgtgtcttagtcatatttagtgatctgaaactgaattcatgatttcatgctctaacttctgcttctcagtgttttctatttctgtaaattattatctttgacactcagattcccttacactagaattaatcagtcatcaagttttgttctctttctcaaatgtttcttatatctttccacttttttccagattcattgctacaacctagtctatatcatcttttaattcttttcctggatttacagtaattccttaaatggcctctttttatctattctttgtttaccttaaacattcttcacactacaaccagaatcatttcattcatgtaaatttcatatctttgtggaagcactatatcctttaccttcatagccttgattttacttgtaatgatataatcatttgtgtaatgtctgtcttccctgctagattgtgtactcgaggagagcaggcacatgtctgtcttcttcactactatatcaccagactgatgatatcatagtagcccagtttggttacgcacatattttctgaatacatgcaagaaagggggaagagaaagggaggaagcaaataaacaagcagattatgaagacagtagatttatatatttttaatccaagttgaagaatttttttccctttgggcaacaggaagtataagttgaaaagttttaaaagctagtatgacactagatttgctttttagaaagggaactttggttgcagtatggaggatgtgtttgttgaaagagatggaatcatggataattgagaatccatccaccaaaaatttcctgtataatacagccaatatattcagtggaaaatgtgttgaagagaggatgtagttcttcaaaaacactgaatatatgtgaaaaagatttccatatttttctaactccttttctattccatttacttctcaatcattttagtagtttcagtaaagccttgattaatggtagttt

SEQ ID NO: 40350 - DNA, 1034 bp, Homo sapiens
tatattctttctgcattttgaagttcataaaacttctttgatccagaatatgagcttggagtgtttttatcactatagtactggctctttccaactttcacctattatttatatatgacatacataacaacacttagtttatatcctgagattgaattcttagacagtttttagagctactttgacaacatatccctagtttgcccaggacagttctggtttatgattattttcctagtgtaattgttagtatcccctttcattctcaaaaatgtttgcatgataaataatatgaccactatatttagggctccatagaacactattttttaaactaaaagtcacaacctaatgcatcacaaccagcaattgaacaaaaaaagcaatagaatccttaaactctagagaatattaaattttgagagaacaggaataaaaacccatataggaatgaaaagtggctagagaagtagggagtagaatggtgtcatgaaagctaatattcttgtgggtcttctctgtagatgtggagggaacttaggataatgaaaggacttgtgatgggcgagaatcaagcttggtgtccaagtctttagtgaatgtgagaggggtgagcaagatggtgagaaatcagagcaggggcagcaagtgtacaagctgctcacctagtctagagctttttgcagacatgctagtcagttttttttttctcatgctgagcttgagtgggtcctcagactcctccttaaaatgataatccaaccattagcagccactaatgattgattggaattgtggcacaagaaagacacctgtttttccttttttgaggtagtacatgatatacctttatttcatgagctgttacggagcagggattttaaagacaagagtgagggaatcatgatggcattaggaaatcagagggtgattgaaatgtctgatccaaagaaatatatagtttggaatatttgagcatattccatttgccagggttgtgagtgaactagtgtactcaaagagaaagccacatt

SEQ ID NO: 40351 - DNA, 1028 bp, Homo sapiens
caaatttttctccttttgtctttaaactttttaatgtaatttttaaactattgaattaatcttttatgactttcggatttcagatcctgcttagaaaggtgttttgtactttgtgattataaaaaaagagtcttttgtattttcatccagtgcttttgtagtttcgtttttttgtttgcctttgaaccatctagaatttatattggtataagatataaagtaagtaccgtatctaaagttgttttttaaagatagctatccagttgttttaatacctttgtttaattatcatctcttcatgtgatgaaggacttttcaggcagaggtaacaatattaacacagtgcctgggtacttagtaaaaacggagtaactgatgagagtgttggttattgttgtgttggtggtgatgatacagttttagggggtataggtttgggatgggattcttagaaagatggtagatttaagcgtattcatagcttgtggggacataactagtagagtgtaaaaatacagcatagaaggaatgaaggactggaaagaaagagaaactccagagtacaaccaatgtgggttaactttaaacatgagagtggaaaaatggagtaaggatgactgataaaaatataggtaccataaatatgaaaggtcgatagatttaagaaaaaaaaggaattaacccgtttatgccagaggttgcaaatgttttttgtgaaaaatcagatcttggcgatgaccttgagcattaggatataaataactcccgtaagcttagtgttccagtaatggaacactaagcataaatgggttaagggcatctaaatatggaggtagttgtgttctaaagtactcaaggagagcgagagacagattttgaatttttattttctcttctctttctcttataggtcacccttgcaattatggatatttaaaagggtcagacagtgtggagggggagttcccctcctcactcccccttggtgcttgactccaggaataatttataaactgtggaattttttt

SEQ ID NO: 40352 - DNA, 1048 bp, Homo sapiens
attacaatgtactaaacaaatatcaattttactatttttcatttctctattctttagaactgagattaagagggcttttaaagtctcaaccaaaaagtttagaagtcacagaagaatcttctaccttttgatgatgaagatctttttgcatggtttctgcttacatgacaattttttcagttccacagtgctgtgcaaaccaaggactgcctgtatttaaaagtgggaatgtatgacgccttagaagttagacataaaaactgctcttgaaaggagcttgaaaaatacttgaattgttacaagcttatgacggaaacacattttagggtgttgattgtacaattggaaattctctgatgaatttctatgtaaaaaatgtttatgaaagtaaaatgtctactaaatacacaattaaaaatgtgctaatttgaagctcatgtatacaatattaaaactcattagtaatcacaattgtttagaacttaggccaagaaagtatttttggggtaggagtaacgtatcaatgatgttgtttagacttacatacgcatggatatgatgaaaggcagactgacttttagttttattattgttttaaattccctttgtatttgcccaccttagggcttgcactggggtgaactgctcccactgtcctgccattggtacaccactggaaacatcactgaagaagcactgtggtggaggtggaggatgacacgaaggcagtgagacagaagccaggtatgtacataggaatggcagagagactgattagaagatgagctgaggcagtcacaatggaaatgaacctattttaggctattggtctttgtcatgatgaccaagtttaattcctgcctgagatgaccactgtctcttacaatttctccagcaatctatctctttcagacccatccttctgtagctggcactgctgattattctaaatctcccctgaatgtagccgtgaacctgctgaatgccctttaccctatcactgacctccagctctcccctacccacatttgaccctcaaggagatttg

SEQ ID NO: 40353 - DNA, 1050 bp, Homo sapiens
tagatccttgaggaattgccacactgtcttccacaatggttgaactaatttacgttcccatcaacagtgtaaaagcatttctatttaaggagatgatatatattttcactcatatattttttttattttttatttattttattattattatactttaagttttagggtacatgtgcacaatgtgcaggtttgttacatatgtatacatgtgctatgttggtgtgctgcacccattaactcgtcatttggcattaggtatatctcctaatgctatccctcccccctccccccaccacacaacagtccccggtgtgtgatgttccccttcctctgtctatgtgttctcattgttcaattcccacctatgagtgagaacatgtggtgtttggttttttgtccttgcaatagtttgctgttcactcatatatttaatctttcagtttaaacccatttccactcaacctgtcattggcagtgacctggaaaagcatttgtgtgaatgtgtcaaaaacagtatggagtttatcctttctgctcttctcttaactctgcaaacactccttttgggacttttaagttgtaatatatatttttattttgaaacaataaaaaacttacagaaaatttgtaagtccatttcaaagaatattttttcctgaaacacttaagtataagctagtaacctaaaacctcatcactcctgtttctttaatttccttcaaacaagaagtctcttacataaccacaatataatcattatattaaattgaaagtgctgtcataacaaactatcacagactgggtggcttaaacaacagagatttattttgctcacagttctggaggttggaagtccaagatcaatgggtcagcagctttggtttctcctgaagtctctctctttgactggcagatggctgccttctcattgtgtcctcacatggcactccttatatctctctctctgtgtccaaatttcctacttttataaagaaaccagtcagattggattagggcccacccaatggcctcatgttaacttagtcgctt

SEQ ID NO: 40354 - DNA, 1035 bp, Homo sapiens
tcaatcatgttttgcattaactaaactagagaattacactgagcattttataattaccactctgcattttccagccttccatggtagcaataatctctgcacttctcctaggggtgtagtattgttcttgacttactattctgtatggaaagagagatagcctctgcatgtccatatttttctatagctcttactctgtgagttgggaatctaatgtgagtatttttctagctgctgaaatgtattcaaacattatggtcaggacctggggaaataaccatgtaatgggatgagagtcacacgcagccaattgtgagggagactcaggtgaaaattattatcatgacatgtggctctgggaatataatggattgagtgtgtgtgtgtgtgcgtgcatgtgcacacaggtcttcttattggggactaaagttagatacttcataagacatagttcttatgttttggggtttgaagaaagtaagagaaatttccaaaggaccggaaaaaaaggaaaagctgcgaggacttaaaaagcaattaaagcaaaagtaatgagggattccaacaaaggtaggagccaaattgtcactgctactaagaaactgtactttggtctggtgaaaagacgtatgtgggaagttgctaaacttgaatgtcccaggttaagtgtaagaaacttcaaggtgatttaagtcatgatagaagttggtagcctatcctggcttgtgtttgatggaaaccaaatccactttggtgaaaatatctttattttatgctctcatgttttccattgatcaagatcagccaaatatgaacccataaagaaagattaccaaacatgcaaagaaactaaaccatatcaatgatagttagcataggtaacctacaatacatatgaaccctcaaagagttgagacatgataatcataaaatatagttgcataagatgtaggatataaaacaacatattatgaactatttaaaggaatggaagatggaacaacaaaaaatgtacatgcaataaagcacttaaaa

SEQ ID NO: 40355 - DNA, 1026 bp, Homo sapiens
ggaagcaaaaggtatcgtcttgattgctaaatggggaagtaatagaacagcagtagataaggggctctttgcagaatgctataaattattttttcaaaaatgagtgtggaagtcacagctttgttaatattgtataggatacagtctaacaaggatatcagttctcctactcctggcagcagaagcctttccttcagctaatggagcagaacactaatttggaaagcagagagaaagtaaagctgccctgcttgacgccgaggtgccacagtagagtccacttttccagccaacttctccctaccccatgtcgtctgtgtctgcactggacacatttccacttgtggcaccttggaaaccactggtctaattgctctggtctctacccaatccactgcatttcacttggttttgctcactgacacctttaagaatctgataaaagctttgggtcctattcctttaaaagagtgcatctgcttgaaattttctgtgctgtttcaaagcattcatggactgctccaccatcaccaaggcacataaattcctcagacctaagccctttctaaaagtcagactgcatctttttcacactaaacaaaataaaaataaacaaaaacaaaatataagtctaaccacctaaacacactataccttcatcattttaaattagttttggaggaaactgaaagaaatctaggttctggttttagctctgcagctagtagctggattgccttcagcaagtcatgtaagacatttttgggcctcagtgtctctgtctcttaaactctagtgttctgtgttcagctgtagtcttctgtaattctgtgagccaaagtgagaagtcagtagtcctctctatgaccaaccatatgctgtttgcatccatttattcatttttagcttatgagggaatggcctttcctttcactcaggctagatgtgaatgttgtagttgataagcaggtcaatattgacatacttatatgtaaaaagacactttctgctgttaagtttgaatca

SEQ ID NO: 40356 - DNA, 1051 bp, Homo sapiens
gatgtatgcctttatttttcaatttgtgcaaagattcagtgattttaaagatagagctaataccctgcttggcaaatatttttaaatgatattctataaatggtaattaatttacaaattacctaatcactttccagtgtgtgtaattgaattgagaggtaaaatagtgttttgaatttgtgatactagaaactaaacaaagttactatgcagttgtcataataaattctagtttttatacaaaaaataaattgttctgtagtaaagattcttgtccttaagctttggctaaatatctgatcatttcctaaatcaaaactctgaatatttttgaggtttttgacattttacctaattattctctaaaacgttcatatcaacctatatttcatccaagtaacttttcttatcagttagtaattgtaagctctgcaagaaaatggctatatctgggttttgttttctttttctttttattattatgtaccttttcaagtaaatattttttaataagttagaaaaatgtgtttaatggctgccatttgtggacttccaagtacttttcttttttctcctacctttttttatttatacgctgcttgtgcatatgcatgcttctgcttaagaaaaaaaaaagcctcttttcactgcttcaccattttgaaggaccaggtacacagtgagggtatgatttttctactaagaatattacaagctgaaatttgtttttttacttttgactctaggcttttccaacacacagtttttttgctgcatttaatctgtttatatggtgaattacctgtaataattttcaaatgttaaattaacattcttgagttaaacttaacttggtcatgatatgaaggtcatgatataaattcatattttgttttttatctgtgtttgtgttcagagtctagataagtaacagatgttcctcttttatttagttatttatttttattatacttttagttctgggttacatgtgcagaacgtgcattttgttacataggtatacacgtgccatggtggtttgctacaccaa

SEQ ID NO: 40357 - DNA, 1090 bp, Homo sapiens
tgaaaatcatttgtaaaggcaataaatatttgagacattgatcatttgaaccatcagctgcttttcattgagtccccaaaatatgctaatgtttttagcagaaatcagagcacttaaaatagaaggctttgttcttggtatttttattttaaatagcagagttaaatctgtttatattacatttttgtttcactaatgtagttagactgacgtctacaatctttggcaggggcaggatggaatatatctaggattttctagcagagactaaattgttcagtatatttaccttttttaaacaagcaaagaccttaccattgttttttttttaccacctctaggcacattccaccctctcatcccacatttccccattactattatgtattatttttcctggttccacttaaaaacacaaaaatccattattttaaatattttcatgttcattacctaatacatataattgtcaggcttttttttttcttgcatctcacttcctgtagtattcctgtcactgatagtttgtgaatgggaaactctcttagtctttgtacatctggaaatgtcttcattttgttcacagtctttagtgatggctaagctaagtatagaattctataccccttttcgctttgaagatctatcactcattgcctgctgacatctatttttgttgataagacagctgttgtaagactatttgctatttctttgaagataaactgtctcctttctttttcctgctggcctgtaagattttatcttcatgcttgatatactatagatttacagtgatgtcttcagtgtggagttttaaaaacttattctacgtagtactcagaatacatgtaagaactcctgtctttaagtagttctataaaatgatcagctattatatattaaatttccattatccccacccccatttcctcattccgaccttctattagacatatattggtgatgtagtttgaatatttgtccccatccaaatcttatgttgaattttaatccaagattttggaggtgggtggggcctggtgggaggctgtttgggtcacaggggtgtatctctcatgaatggcat

SEQ ID NO: 40358 - DNA, 1037 bp, Homo sapiens
tagccagagagattccgattcaatagccctgaagtagagcccaaaaatctgcattaacaagcatccaaaagtgtgtatgatagggaatttcaagaacgaaaactgtaagaaacacgtgataagagaatatacaccaactaaagtgagaaatgaaagaattttaattataacaacatctagtcacaggtccaaatagcttaattattttcctcttttcttcactgctccttattaacctgcacttaacacagtctgtattgcactaaactgaatagttgtcatcaagtttgtgtttttttattttccttctctctttaccctcagatgtcttgtagaatcctggtgttacctctgtcactcctctttctgccattggtgtgaacacccggcatccccacatctcctgatatccgggcttcttgcttttctcagggatgtgcagcctctgtagtcctctctctcacggcacgtctgatgtggtaggacagtcgctcacgctgatgtcagacactcaagatctagtctggactgctgaccctcttctaggcagataaccctctatggatcccagtttcgttatctatgggatgaagggttgggttaaattacatatgtaagtgtttttaaagttcgtttaaagtagaggcacagagtcatttttgtctgttcccagctgttcctgatttattcacccagtctgcataatataactgtattccttaaatgttatagaaccttatttcttgtgaacatcctagaagtgtttaactgaggaaaaatatagataaagtcagattacatagggttgttgtgtgtgtgtgtgcgcgcgcacacgcccgtgtgctctccaagaggatggagttgatgccgtaagacctccctaacagctgccaggaagggacaggaatgatggggttagggtgccatctggcccttggctcttcctgcctctgagacataggtaactctttcatgtggaggctagtaaaggaagaaccctgtccgaagggctgtttgtcacagaaacttgaaatgtt

SEQ ID NO: 40359 - DNA, 1006 bp, Homo sapiens
ggggatggtttggggatgattcgtacacattacatttattgtgcacattatttctattgtaggttggtgcaaaagtaattgcaatttttgccattccttttaatgacaaaaaccccaattacttttgcatcaacctaatattgttacattgtaatgcataatgaaataattatacaactcaccataatgtagaatcagtgggagctctaagcctgttttcctacaactagacagtcccatctgggggtgatgggagacaatgacagataatcaggtattagattctcataaggagtgcgcaacctagatccctggcatgcacagttcacaatagggttcaggctcttatgagaatctaatgctgctgcttatctcacaggaggcagagcttgggcagtaatgtaagtgatggggagtggctgtaaattcagatgaaacttcgcctgcttggctcacaggccagtattggtctgtggtccaggggttggggacctctgctgtacagggatgattactcacattttaagtgtcttttttataccttggaaccaaatactgaggctagcctcttcaaaatgaacagaatgtggattaatgaaatccagctatcagagatagctcattttaagggtgtggtgacaaggaaagaagctaagaattctatcatttttaataaaaaatagtggccttcggaagtttcaatgaaattcttcttaggttttaaagctgccatttaaaaatattttgttctacctcggaaaaatttagcaaacatttttctcttcaactcaaggtgctcttcggggaggagatgccttttagtgcataaagtctgtgaataaaactggagtatattttccagtttcaataatcagacctctctgcaagtcagttaatgagttaatagcagatataaaatttaggagattgtcaggactgacctgatagattttgttggttatatttattttatctaggtgcatacaaatcaaattcttataggaga

SEQ ID NO: 40360 - DNA, 1035 bp, Homo sapiens
ttcattcttcagagtagaatcaaaatgggtcgaaatgacctcctaaaaaaagaaagggaaaatagatcacctagtacaaaatatgtttttgcatcctaggctctgaggataaaatgtggttacatgagtaatgtatcagaaccttaatgctgtttaaacatacggatgggtgcgttgtgtgtattttgtatatttaaaattgagatttttgtttgaacagtgtctttcatttggtgtacttcatggtgatttatcataatagactgatttaaatcatttgaaatactgagacatatgaattttaacaataacttccccaaggctagagaagtcagcaggagctcaaactgctaggtagacattttttttgtttcaaactcatatgcaagtgtaaaacttttatgaggctgctttaacaaggccctttgggatttaaggttatttatcaagctcttattaaaaatgaaaacttttctatgtttagccctgtaaagcaaaactgatcctaacaatactgtaagctggaagaacaaacattgttctctagactgacttgaaaataaagtcaggaaactttggggtctctctcccctgacattatgataatagaatagtgacagcaaagccagtatttcaaagtctcccctttaattaggaaaatttagctctaccatgcttataatttaggctttgacatgacttattaagatgacttccagccctagaatcaaactgtttcactgagcactccagtgtctccattagcgtcaacttgccccaggactgtgttgcctggtacaagatctgggagcaccttttcatttgtggtatctgcacttgttgatgtatctttggcttatgccctttcccaccgagatgtggggcatgagagagaggttgtttctgagattagtgtgccagaatctctccatacataacccagcggaagagctggagctgctacaggaaaagttttgtaatcttgaaatatgttcagcttttttgtaggtatgttcaggtttgatgagtctgggt

SEQ ID NO: 40361 - DNA, 1034 bp, Homo sapiens
ctaggcaaagaattcatgactaagccctcaaaagcagaagaaacaaaaacaaaaataggcaaataggacttaattaaactaaaaagcttgtgtacaggaaaagaaataacttagtgaacagataacatgaagaaggggagaaaatatctgtaaaatatacaactgacagaggactaatatccagaatttacaagaaactcaatgcaacaaaaaaccccaaataactccattaaaaagtgggcaaaggacatgagtagacatttttcaaaagacataccaatgttcaacaagcatgagaaaatacttaacatcactaatcatcaggaaaatgcaaattaaagccacaatgggatatcatcttacaccagtcagaatgactattaaaacgtcaaaaaaaagaacagatgtttgtgaggatccagagcaaagggaacacttgcacaatgttggcaggaatgtaaattggtacaacttctatggaaaacaatatggagaattctcaaatatagaactaccattcaatctagcaatcccactactgggtatttacctaaaggaaaataaatcattattatcaaaaagatgcattcatttatttgtttattccagcactactcacaatagcaaagatatataatcaacctaaatgtccatcagtggatggctggataaagaaaatgtggtatatataaagaaaggaatgctctttggccatgaaaaagaatgaaatcatgtcttttgcagcaatatggatacaactgggggccgttatcttgagtgagacaactgagaaacaggaagtcatatactgcatgttcttacttacaagtgggagctaaataatgtgtgtacatggacatagagtgtggaatgatagatgttggagagttggaaaggtgtgaggggggtaatgagaaattacttgatttgtacagtgtacattattttggtgatgaatacactaaaaacctagacttcaccactatgtaatatgcccatgtaacaaaattacatcttaccccataaatttatac

SEQ ID NO: 40362 - DNA, 1030 bp, Homo sapiens
atcacagagtttgtttctagattaatgaagtcaaaatagggaaattggcaaacatacaatgtgtagcactatgaatctcatatgatcatggaactctttttcatgagaaccctaggtccagagaatacacttttgataaattctacaagaatatcctgtatgtcagtggagtgaatgtagaaagagatttccctgttattaattggaccaaagttggaaaataagaatttaaggaagaagattggagaatgtacagttaaccctctgtcaccatgggttccacacccatggttttagccaacctcagaaagaaaatattttgggggagaaaatccccacaaaattcaaaaagcaatacttggatttgtagcacactgattcctatgttgaatccacatgaatgaagtgatgtgtaggcattgtattaggtatcataaataatctagagatgatttaaagtatacaggaggatttgcataggttaatccaaatactatgtcatttttacataagggacttgaacatgggtggatttttgctgagggcagtcctggaaccaatcccctatggatactgagggatgactgtatattcacagagggaaaccattttctgtcggctgataggtgtcagtgtctgccaaatacagcttgggtacagtcgtgcaagaggaaaagattggaagaggacagtcatacgttggtaatttccaagagtacctgtacatcaaaggaagagaatttatatttatgcatttaaaattaatatactttaagacacttgaataatgaattatacttttgctgactctctctctctctctgtctctctctctctctctctcccccccgaccccgtttctttctctgtcacaataacctaacaccagagataaggtgaaagctttatttatttgtgtattcatagattcaactaactgatactgtgttaggtggtaggtccgcattagtaaataaaaactacaaaattgctgcagttgtggaacacatactctaataatgggacttac

SEQ ID NO: 40363 - DNA, 1047 bp, Homo sapiens
gtgcatttccgttgtatgaaggatagttgtattatgttaggcgtaattatgaccttattattgtttttatttgaagattatgtatgatctcaggagatgtgtatgggttcaagttgacaaggggtcgacttgtgatggttaatactaagtataaacttgactggatgcaaagtattgactctgggtgtgtcgatgagggtgttgccaaaggagattaacatttgagtcagtgggctgggaaaggcagatctacccttaatctgggtgggcaccatctaatcagctgccagcatggctggaatataaagcagacagaaaaaaacatgaaaagactaggctggctttgcctcccagcctacatccttctcctatgctggatgcttcttgcccttgaacattggactccaattcttcagctttgggactagcttccttgctcctcagcttacagatggcctgttgtgggaccttttgatcatgtgagttaatactcctcaataaactcccctttatatgtatatatctgtcctattagttccatccctctagagaacccttactaatacatttgcctgatggttaatattgctatatttactttttaaaaaattgttcatttgttctttttatgtttattttcgcctgtcttgtgtcatttaatcaagtgtatattgcattaagatataccttatgaactgcgtacagctggatagtttaaaactccagtaggtgagtccttctattttaatagtgaatttaattattcacatttattgtgattttgatgaatttggacatagtttgctgtcttttagattggttgccctctctgtgtcatttctttcttccaatgatttggaagcaaaaaataacttttttatttatttcaaaatgattattcgtgattaaccttaaaattttaatacacatttaaatttactatttttttaactgtcaatatttagatttaattagtattcatactgttcactggaacaaggaaagacttggagattcatgtttgtcttcttgctccctccccaacct

SEQ ID NO: 40364 - DNA, 1034 bp, Homo sapiens
agatttacatatatatatgtctatatatcctattagttccgtccctctagagagccctgactaatacagattttggtaccaggagtggttctagaggaacagaatattaaggatggagttcttttgttggttttgaggtttctggagttggctgtttaatatgattacatccaaaaatgctaaggactctacttctgatagcatggagaatgctgatagtccttggcatgaactgtatagagagttatgcaaaatacatacatttgacactcctgattcaccgctcatgagaggcaaggagtttagtaactctatacataatgcctttggctgtattaaggaacataatgaagttggttggttgctcctaagttcactggacaaagtgatgaaagaaaatgatgaactcagggattctaactcccagcttcagaaacagatactaagcctcaaatctgctaagatggccttgagtgagaatcttatctcctgtagagaaagagttgaaattgtggaaaatcagacaaaagcttttatcatgtgagtggctgacctgcaatgaaaagtgtatgcacagcctcaccaggcatctactgttaaagtgaagggattaattgggaaaaaatgggaccctgcaacttggaatggggacgtgtgggaggaccctgatgaagctggggacactgagcttgtaaactccaatgaaactttcttgccagaagaaacagcttccctacccccagtagtggcaatgtcccctccccaatccatgctgtcatcaacctttccacctttgtctgagaagatacaccctttactgcctgaggcaacaggcctccccttatggcctcccctgaggcagttgccaggcaagataatgttgattcttctcaggagccacccccaatacctctgtttgcttctagacctataactagactaaagtcctggcaggcccctaaaggtgaggttgagagtgtgacctatgaggaggtgcgttacactcgaaaataactgcttgagttttctaatgt

SEQ ID NO: 40365 - DNA, 1572 bp, Homo sapiens
aaaaaattccccttgttggaaaacacattcaaagccgattctagttctgcctggagtgctgtcaaggtcctctaccagccatgcatcaaaagcaggaatgaaaagtaagttgtgcatttgttttctctttccacattatgttttagcttttgttgtcatgttggtgttaagaaattaatgaattaaatgccactataccatttccctacttgaagcttctaggagccaatactgctaaatattatatgtttaaaataggttgaattattacagatgattcatgttaatatgcagaaagcttgcttttaccaaaaattattgtttttttcttgtaatctaagctgtctgtacatatggctgcagtgctaaatcagacttcaacagtgatgaatatttaccaataagcactttccaggcatcaggatacaataatgaacaaaccccagcccctacctcttagcattgttgttctaatagggggaaggcagaccataaacaaaacagattcttacgtctcttactatgtgtcaggcactcatctaagaactcgtagctcatttaagcctaacaacaacctgtgtggtatgtaccattatcatccccactttaaagataagcacactaagacactggtagtaaatcactctagtgaaaaatgaagcaaggtaaggtagttggcgaggggtaggatgggagtaggatgtcattttatattgcaaagtcagggaagattctttagataaggtgatatttaagcaggtaacttgaaggaagtgaagtggtgagccatatctgatggaagatcattcccagaaaaggaaacagcaggttattttaattgtaacagaatcaaagtttgtacttgtcctgtactcttagatgggtttgatcaaatttatcctaagaacggaagggtcttagtctttttctggaaagtaaataagacattgaaaaaattaattaggtttcttatgcaagtagtaccagtcataaaatattcaaacactaagagatatatacaaggtaaaattatatcccgctccagaagtaaaacgtttgttgtctactcttccacttccttttctgttcattttgcacctaaacatgtgtattttttacacttaaaaaaagcccatgtcttagagattctttccattgtgagtgcttgacattttatgaaatggaggtactataaattatttagccagttttcttttaatggatatttggtttattacttttttgctgttataattagtgttgtgatcttgtatgtttgttttctgattataagttttttatattagaggaatttctagaggtacaattgttgagtcaaagggtatggacatttaaaattttgagaggtaatatcaaagtattttgtaaaaaggcatcatgaatttatattcccacctgaagtttttataaatgtccattaccctgcactctcacccaaatttccatttagatttttgcctatctgatgtgattctaaaggaaacaggtttacttgacactatccttatattttattgagacatgttcaatggatgcatctcagttttatgc

SEQ ID NO: 40366 - DNA, 1028 bp, Homo sapiens
gggaagggcctgaagttgctgttaggtgtgactctgtagctggccatccattatggggacactatgcttttctaattgcagataatttccatgaaaacctaaaatattttctgactgattttgatagtaaatatacctcacagttttctgaaatcagttttactttttcttttattgtaagatttcagattgaagatcgggagtaggaacttctgaaactttctaacatatatttagatttttcttttttataaaagtaaaacattcttgaaacacaatcagggaacatgaagaacataaagtgttccctttcctgccttgctatatcatactattcagggagcaatcagtattaacagtctgatatgtgtacttcattatttttattctttccatatacaactatatatatgtacactcacaggtgtttgtctatttgtaaaaaaaaaaaaaaaaacagtatcacatgattagcgtttttctgcaacctgcttgcttcacagtatgtatcatgaggattgtttttattagtttaaatataggtctggctctttaatgactggaattttgctgtatggctgataagactgaactgcaatgaaaataatctttgcctgtgtcttttagtacttctttagaaatggatctttctaatgtaatataagaatttgtatatttgaaactcagataattatcaccttgcaaaaaagttgtactaatttatcttttatagtgggcattcttggtgtgccacccagaccccatactgggttgatgcacccattcccagctgctgacagcgttggctgataatggctcacagctgcccgcttctccacagacttcctctttagatgacaggtgttgccttgcccagaagttacctgtccgccacagtccctccctgactcaccccttcttggtcagcccgctgccagtgatttgatcctggggcacagaaagctagggactcttgtctcaaggtagaacaaactctgtaggtgggattcatgctgtagaactccccc

SEQ ID NO: 40367 - DNA, 1025 bp, Homo sapiens
catacctttctttatttggaaaaggaaagagaaagcctttttgatagttgaaccaaaccacacatataaaagttttgaggattttaaaaaatgttttgatcatatagtgctgtagacaaatgtgctcttataaatcttctaattctgaaagttttctatgcttatttctatgtgccagatatctagaatcttatcacccagtcaccaataagttttttgaataatttctggttttaatttgaattatttaaaatttgaaacatgggtcagtttcaaatgactcctatgttttaaaaacatggtacttagtcactaaatctattagtgtttttatttctttgactctttagtttgcaaacaagttaaccatgatatgtctttattccagtttatttgttgatatccaaaaattatagcaatctttgagtatagccttgaacttatccttatgtaaatactttgattctgtacctcagagctgacactttagggagatccaaatggaagaaaatgtagacaatactgtctgatgtttggaaggaaatttcttgccttcttttgtaagttagttattctctgtttaatatgctacagcacaaatggagtattgacttgttctaacatggtatttttttattcagtaggggtgaatagttaggtttggtgtggaaagtgtatcaaggattggagaataggttttaagaagaatggagcaaacctgaatacattaaaatatattaaaatccacatcagtgcagattctgagggaatgagcagtccgtagaaaagtctggcatgtggatatgtctgccttttaggtaccgtgtgtgtattttttgcttatcttgccagttagagttattatgagatacacattgtaaaaattgatttctgttcaaacaggtcttggtttgtccagagcgtgatcgcccagtgtctggtgcagctctcctctgctagaagcacttttagattcacgattcaaggtcaggatgacaaagtgtatatcttggtaagaaattatt

SEQ ID NO: 40368 - DNA, 2128 bp, Homo sapiens
acagttccacatggctgaggaggcctcacaatcatggcacaaggtgaaggaggaggaaaggcaggtcttacagggtagcaggcaagagagcttgtgcaggggaactgtcttttataaaaccatcagatctcatgagacttattcattatcatgagaacatgatatgggaaaaacatgcccccatggtttaattacctcccactgggtccctcccatgatacatggcaattatgggagctacagtttaagatgagatttgggtggagacatagccaaaccatatcagaaacgtcttttttttttaattttaattactcagcctcaggtatttatagcaatgcaaaaaccacctgctgcacaaagggtgatagaagggctgagataacttctctgccctaacacaactctggctgactgctaaactctgcatacacacaaaaaatggcagggagtatctattatatgtattttcagtaaggattgaaagcttagggggacctgtgaatttgctgtgactttgattgcattcctcaatccacatacaacttgggtagcagaaggtaattttcgtaagaagccttactggcttgaggtgtttgagtagagccttgccccaaattatttgctgacagctaacctatgcaggtacagtggatacttgctagggagccagactaaaaaaaaattaaaactgagtagagacattagtggctacatactgtggggagatacatttcacagttcgagtccaggccagtcaattgactgctatcccaaccaataaccaacaaccttcagaagagcaacacaaaatccacagttgctacaacatattgcacacaatgtcctgcttctgtctaaaaattattagatgtgcaaagaaacagaaaataatgtttcatactcaagaaaaaaaggtcttaataagcaggtacttagtaagcacagatattcaattgagcagacaaacatgtggaagcagctattataaatatggcaaataactttttaagaaaagctttgaacagatagcaaatctcaataaattagaaaaatcaaagaaaaataatttggtaattctagaattaaaatgtactgtaaccgtaaagaaaaattcactagatgatctaaagcacagatctgagatgacaaaagataaaaaaaattattgaacttacagattaatccaaattaaccaaacaaaaaaagtctaaaacaaaatgaacagaacttccagtttgtgggacaatatcaggtgttccaacaaatgtgtaaatagggtctcaaataatgaagagaaattgaaagggtcagaaaaaaaatttatacaaaaaactggctgaaaacttggcaaattattttaaaaatattggctttcagatctaagaatttcaatgaacctgtagtaggataaacacaaaaacacttcactcaggcatgttgtcgtcaatctgttgaaagattaagagagaatctttaaagtaaaaagagaaaaacaaaacctcatatgtaagagatttcctaatacaattaaggtgaacttctaatagaaataatgacaaccaaaagacactgaaataagatatgtgaagtgctggggggaaaaagatgtgacaaccaacagtactgtatctagcataactatcactcaaaaatgaaggcaaaataaggatgtttccaaataaatacatggaaataatggattcctatcgtacctgctgtacaagaaatgataaaggaagttcttcaggctgacacgaaagataccagatggtaactggaaactacaggaaggaataaaaatcagggaaaatggaaaataatgtgggtaaattaccagaaaagcagactcaaaagaggtaagcacaaaattcaagccacattttctttgcagtttgcccattctctaaaattagaactttagtttcgagaaggacaaaaatgagagactactcaagaggagaacctcacaaaaataggagacgctaaatgttgtgccctcacagtgagggtgaattggaaatagaacagccctgtggaattgtagacagagatcaatcctttgggacttgagggaatttcaagtcttgaactttgtttatttcaccttgttctagacatttgccag

SEQ ID NO: 40369 - DNA, 1043 bp, Homo sapiens
ctctaggcctccaggcctgtgatgggaggggctgctgcaaaggtctctgacctgccctgaagtcactttcctcattgtcttagtgatttacatttggttccttgttacttacgcaaatttctgcagcagtgtaaattcaagcaggcttgactgtaacgccccatggaagtccgaaatccagcaaagcagtcaaatcttaaagctccaaaatgatctcctttgacttcatgtctcacagccagatcacactgatgcaagtggcttgaatttctcctttgacttcatgtttcacatccaggtcacgctgatgcaagatgcaagcaggcttgaatttccccccagaaaatgggtttttcttttctacctaatcgtccagctacaaattttccaaacttttatgctctgtcacttcttgaatgctttactggttagaaatttcttccgccaggctgggtatggtagctcatgcctgtaatcccaacactttgggaggccgaggcaggtggatcacttgacgtcaggagttcaagaccagcctggtcaaaatggtgaaaccttgtctctaccaaaaaatacaaatattagccaggcatattggtgcacgcctgtaggcccagctacttgggcggctgaggcatgataatcacttgaatttgggaggcagaggttgcagtgagctgatatcgcaccactgcactccagcctgggcaacagaatgagacccggtttcaaaaaaaaaggaagaaatttcttccaccagataccctaaatcatctctctcaagttcaaagttccacagatatctagggcagggacaaaatactgccagtctctttcctaaagcataacaagagtcatccttgctccagttcccaacaagttcctcatctctatctgagaccacctcaccctggactttattttccatatcactatcagcattttggccaaaaccattcaacaagtctctaggaaggttcaaactttcccccatttcctatcttctgagccctccaagtctctaggaagtttcaaactttccc

SEQ ID NO: 40370 - DNA, 1024 bp, Homo sapiens
tatactaccaggccatatacagattttatcaattgtcttaaaagaatcttttagcataggtttgtttgaatcaggagccacacatgtgattgaggtaatttggttgttgttgagctgatttttaaatcctgattacccatgtctgataaggatagaatcttattttaaaaacaagcaaacaaaaaacacttctcctgcccccttgaaagacaaagtgagatgttctgtgatggcagttacaaaggaagtacatatcaaagcacttgaaaaaaaattttctgcttcaaatagaaaaattctttcttttcaagcattgctattacaataccaatattagtttttaataaagcccttagtttttggtaacatttaatgagtgtgatcagatttaacttgtataaaatagtactctttaaaaaatatttttaatatcaacttggagccatgcaggtatgttttactgtaagaaagcattaaactgccagaatggcaccctttgtagaccatactggctttctgagttctcttcctcctggacctgaataaattggcaccttcctaggtttctgtgtctgtctcttacctctcatgggtatgacaccatccagtttcccacctgggtcaggctctgagacctgccatttgtgatgtgcctgataaggatgtcagtgcaatggccagagatggcacactgtggggcccactttgggagtgtgcctggataaaagtttgagccaggactgaactgacttatgaagttcatgtgtgcttttgtttcctcagcagagacttttgaggaaggctgcagaatctgtccaaatactgcagctagaccaggaaaaaatggaataagtgtttatgttactgaaggttaattcagtgtatgaagggattcatctcagaagtttttaaatagaagagctgtaggcatttacggatttttttactagttgcatgtgtttgaggctgggggaaagaataggccatagagaaagaccccagtatgaattgtgctgttgctctt

SEQ ID NO: 40371 - DNA, 1066 bp, Homo sapiens
gatatattctctgatttgatgtgatgagaaaggtacatttcacttctgtgagattctttccccaaatccataccaccagcctaatcttgagacaatattagactaactcagattgaagaatattctgtaaaatacctgatctttgcaaaaatctcaagtgtctgaaaaataaggaaatattgagaaactgttatagaccagacgagactagggagacatgatgactaaatgcaaagtattatcataaattagatcttggaacagaaaaaaaggatattagtggaaaaacaggtggaattcaaagtgtgtagttttgacaaatctaccatggtaccataaaatagtaagtttaggtccatctgggtgaagtgtatatgggaactaatacactacctttgtaagttttctgtaaatctaaagttattccaaaatgaaaagtttactaaaatatagtaatagaagaaattatagaagaaagttgttaggtgatctgaccattaagacacgtaaaccaaaataaaaggcagtaacaccaaaaaaatttgtaacagattaataagcatgaggctaatactcttaatatagaacacatttttacaaattaataagaacataataataccaccctggaaaatagtcactaatcacaattcacagaagaaacacagtagactataagtagcaaaactagatgaatctcaccagtaatttaagagttgccagttaaagcagcattgaaaatacttttacctattactaatgcagaaatggaaaaatgatagtattcatttatgaaaagggtgagtggaagaattatagattggcacagcctttctgaaaagaaattcaccaaataggtgttgggttttaaaatatgcatatagtttgtgcttatcatctcacacttatataggattctttccaaggaaaatagatatgttcataaatattctaacaggaacattcatcacagagttattgataatgaaaaactcaaaacctaaatatctaacagttgagggaatcatctcaaaagttttgatgtacttatggaatagaatattgt

SEQ ID NO: 40372 - DNA, 1010 bp, Homo sapiens
ctacagaaaaaaggaacaaagtgctttatacatttcataatatatccccttttattataattagttaattcccttttatctaaatggcctaaatttgccatgatggtagcagtgtccaaagtgaataattactgtcagtactgcatcacagagaaaggaagggatccctcaggagacactgctgtctccttctgggttgtgctaaacaacatagggaggaaagctggacctggagtcaaaggaattgagttagtgtgctggctctgccatacttacggcacccttgggcaggatatacaaaggttcctcacttataaaatgggacagtctaaaactaccttttagtagagaagtcaaatgagaaggtatgtgaaaactctgtcaactaaatataaagactaataatttgggtattaagaggctagtttgagaagccacctgaattacacaaacacagctacagacatcattctgtctagagaaagataagagagaacaggttggttgaacttgggcagaatcacagatacaattccacactaaagaatgaaaataagcaatgaactagacagaaggaagaaatcatgaagacttaggaagcagaattacaatctgtcatattaacaaatggagtttgccttctaagatcagatgttgctcagaaactttcattgtttacctaataatttaatatcactagtttcctagtgggtcaagcagatgcaaaatccagcttattttcttctatgtgctctcaagcttattgcttattttaaagtaaaatcctgaaaaaggaaaatattaggttggtgcaaacgtaattgcggtttttgcattgttgaaatttgccgttttatattggagtacattcttaaataaatgtggttatgttatacatcattttaagcatatttctcactttttttttgctaatgacttattgctgtttatatttattttagactatggaaatgatgttagacaaaaatcaaatttagcgattttctgag

SEQ ID NO: 40373 - DNA, 1025 bp, Homo sapiens
ttgtaggtaattctaacccacaggacttactctcctgcccattgctctgtcaaacatagggttctttgaggaggttcaggatgagacagacctattcgtttggggtggcagtttttgaagcaaatggttcttaagaaattacttgttatgcccgaaacaatatttcttaattttgtagacatggatttaggtgctattacaaaatactcagcattacacgccaagcccaatggactgatccttcaatacgggactgctggatttcgaacgaaggcagaacatcttgatcatgtcatgtttcgcatgggattattagctgtcctgaggtcaaaacagacaaaatccactataggagtcatggtaacagcgtcccacaatcctgaggtaatgggtttagtgccctgataaagcagaccattatttacaagaccaagccttagtgtctgagcaaattgacctaaagtacaaattctaattctaggaatgtgccttctcatttatatgtgctttggatgtgaaacaactttttttttttaagagcatgatcattaagctcatgattcctaagggtgtggaaagaatgaaaagatactgtcattttttggagtgtccatattagagaaataacaatgtccttccaaatttattgatttaagacattttcagtaattgaaaattgtttcctttgttaacttagcagtgattaaagatattggggttgggtggggaagggtaaagatttgaaaagaaacattttgaacattttcagacaggtttttatagctcggcaataatttcttgttctgaatgaacaaacaggtgagctttggcagaatattgatgacgcctgatagttctagtctttgtgacagttagattttaatcaaagtattctttttgacacaattattttttcagctttattgaggtataagtgataaataaaaattgtataattcaagtcatacaacaccatgttttgatatatgtatacattgtgaaatgattaccactatcaggctaat

SEQ ID NO: 40374 - DNA, 1023 bp, Homo sapiens
ccaatctaggaacctaacaatttaaaatgtattgcaagaattcaaggaatatagtaataaattaaggaagaatattataacctctaaaacactaaaaataatacaaaaaacatacagtttaaaagctaataggccagacgctgtggctcacacttgtgatcccaacacattgggaggccgaggtgggtggatcacctgaggtcaggagtttgaggccagcccaacatggtgaaaccccatctctactaaaaatacaaaattatccaggtgtggtggcaggtgcctgtaatcccaactacttgggaggctgagacaggcgaattgtttgaacccaggaggtggtggttgcagcgagccgaaattgtactattgcactgcagcctgggcaacaagagtgaaactctgtctcaaaaaaaaaaaaaaaaaaaaaaaaaaagctaatggaagaaatagaataactctgaaatacttgattaatgcaaaagaaagataaaggaggaacaaagaacgtaagagcttaactcctgggataaatataaaactaatagcaagatggtagacataaacccaactttgctggtaattatgttaaatgtaagtgaactaaacactctaatagcaaaaattgtcagattggatttttttaaagctccaattatatgctgtttatatatatttttattgttattatagagatgaaatttcactatattgcccaagctggtctcaagttcctgagggcaagtgatcctcctgcctcagcctcccaaactgctgggattataggcatgaggcaccattcccagcctacaattatatgctgtttataagagacatactttaaatataatgacacaaaaagtttgacagtaaaaggatggcaaaagatatctcatacaaagagtaagcccaagaaagctgctgtagctctattaatataagagaagcacacttcaaggcaaggcatattagtagagatagtgataaatgggtcagtcattaaaagacacaattctttctatg

SEQ ID NO: 40375 - DNA, 1087 bp, Homo sapiens
tttcccagtttttattttggaaatgtgtcgattcctaaaccccaacctaaaatatcattattttcaatacttaaatattagcccatcattttttatcttcagatgtctataattggaagcctatatagaaatggttgatgagcctatcggttgaaccactgcagagaatagagtgatggtcttagggcatcctgtactttgcatgctcctcctggaagtaaagagtaagacagagaatagtaataatcacccattccagaactggttgcacaacatcacaaaagcttgtccagacttattagcaagttaataaaaaactagacttctttctaagtacttataatttaggctgtggggtagttctgttatgatacatttgttttaaaatattctgcttctttttaaagtgagttgtatgtgtctttgttgtagggacgtgcaatttttgccagtggcagtccttttgatccagtcactcttccaaatggacagaccctatatcctggccaaggcaacaattcctatgtgttccctggagttgctcttggtgttgtggcgtgtggattgaggcagatcacagataatattttcctcactactgctgaggtattgtaaaatcctctaagtttaccaagggtttaaaataccaagtgtgctcagcctaggttgtctaatgttttatttatctagcatctcagcttactctctgaaagaagtaaagtctgaagaacttcccagtggagtataaggggtgggtagcatgttcatactgactcacaaacgaaaggttcttcttcagtagtcattagaaaaattgtgtttttgatttcttaagaggaacatttttgtgtcttcacacatcagatcaagttctgtgacagtgatgggacaattaaaaatattgtttccagggctgggtgtggtggctcatgcccctaatcccagcactttgggaggctgaggcaggcagatcacttgagcccaggagttcgaggccagcttggccaacatggtgaaacttcatctctactaaaaatacaaacattagccgggcatggtggtgtgtgcctgtgatcccccctgactc

SEQ ID NO: 40376 - DNA, 1068 bp, Homo sapiens
tccatgagggttggaattagcttcttccaaactcccattaatgttgatgttttgacctccttccatgaatcacaaatgttcttagggacatctagaatggtaaaccctttccagaggttttcaatttactttgcccaaattcataagaggaattattgtctagggtagcaataactttaggaagtgcattttctatataataagacttgaaagtttaaattgcctctctatgtatgggctgcagaatagatgttgtgttcgcaggcatgaaaacatttttctagtacagctccatcagagctcttcagctgactaggtgcattgccaataagcagcaatattttgaaaggaatctaattttttgagcagtaggtctcattagcagacttaagatattcagtaaaccatgctgtaaacagatatgttgttacccaggctttgttgtttcatttatagagcacagacagagtctatttagcataattcttaagggacctatgtttttcaaaatggtgaatgagcattggcttcagattaatgtcaccagctgcattagaccttaacaagggtgtcagcctattctttgaagctttgaagccagacgttgacttctcctttctagctatgaaagccctagatgccatcatctttctacagaaggctattttgtctccattttaaatctggtctttaatgtaaccaccttcatttatgagcttaggtagatcttctggataacttgctgcagcttctacatcagtactttctgcttcaccttgcaggttatgttatgttatgttatgttatgttatgttatgttatgttatgttatgttatgttatgttatgttatgttatgttatgttatgttatgttatgttgacagctgttttccttaaacttcacggatcagactctgctagcatcaaacttttcttctgcattttctttacctttctcagcctttatagaattgaagagagttagggccttgctatggattaggctttggcttaaggaaatgttgtgactggcttaatctatccagatcactcaaacgttctcccta

SEQ ID NO: 40377 - DNA, 1036 bp, Homo sapiens
gatatcacatatacagaatatctatgtttatatataaaaggaaaacaatatatgagagatttattcagtatttcttttgaccatattagtctattagtatcagaagtgagtggaattctaaggcatttgcaaacatgaaccataattatctgtttcagaagttacttatgtttcttgcacatctctggaaaacagttggaccaaaatactcctatctagaaaatgcaaagtttatacatcttgtcatgtatgcctccttaagagacatagttttatttagacatttttcatcagagaggctaaaactgttctcctctgactgggctgcactgagagcaaaattatcagatttttatttcctctttgactaatcaggttactgacagggtcagactttttcaaaacctgagtattttgcttagtagtaagtggcctggggttgttcatttgatctctgttgagtatactttttccagttctttttattgatttagaattgcacaaggaattcttagaagggcagtggatagacttgagattttaacccaaaaggctcaatttgtttgtaataatctgctggattattgggttctttttagtaagtattgttttaggtgcagaaatttcttgtgttgttttatatttctcagtgataccagaataaaattattagtttaaaaataataaattattgagcttccacacatccctatgttagtaaactcagtaaactaccaaaattacccttcctaaaagataaactacctacaatatagctttgttaatcagattatggaaatttgtcaattttgcagagacgaagttgcattcttgaaaatttaggctgaaatataagcatacttgttaattcaaaaaaagttccagagtcattcataaatggtttaatgtgaaaggaagtcaaaacaattattagaactacatagacggcatcatgttttgtccctaaaaattgttaggaatgaagcagagactctgccagtagaattctaattttagtagtatgtcagattaaatc

SEQ ID NO: 40378 - DNA, 1099 bp, Homo sapiens
agtacctaataagtaatgttgttagatgagttatcagagatgatgtctcacttacctcttctggcttttatagaacgaatggtttagtagtaattgttgttttttaagtgccaagccacatgaaattaagattagaggcagatttttgctcactttattcattttcattcactatagacccatgatgttttgaaaggttatattaaacatccatgaaattttaccatggcataagtcttcctaaatctgcatatatatttgaaaagctttgaagtattttttcacaagggaatggtttattttcaaagacttgtatagctattctaaacaccttttaatgtgccagatatatgatcttttcttagcatgctcttcaatatttttgtaaagttagattcagaactgcaaaacaatatagtagacttcattttatttgtgagatggttgttaaagcaagttgacaataataaaaatgattttattagtcctcaacagggattaaatattctcccttttaatgtcaattaatttatttcttcaacaaatattgactatttgccatatggcaggttttgttctaggcactgcagatacaaatatattattatgagtataatcagactcacccacacagttatatcaactaatacctaattatatgttcatggtgagacacaggctataaaattctgacacatttccacctgtttagctactgtagttgttggatcaattcttttaattttatgggcagcattttttgtttatttaccatcttgccaaaacatgggcagcaaaaggagcagttagtggagacaaaatgtgaaatataagtagctccaaaagagaagtttagcagatattgcaagtaagaagttaattcatttaaggagaaacaaatactaaccctaagttcgttttctctccagttttagcctatcaattatatacttgtttttaaaaaatgtttattggttgcctcagagtttatagtatacatttataacaaatccaaatccacttttaaataatagtatgctgcttcatgaatactgcaggtaccatataacagagtatttccagttcttccctgctggcc

SEQ ID NO: 40379 - DNA, 1075 bp, Homo sapiens
tcaacatcactgattgttagagaaacgcaaatcaaaaccacaatgagataccatctcatgcctgtcagaatggtgattattaaaaagtcaagaaacaacagatgctggtgaggctgtggagaaataggaactcttttacactattggtgggaatgtaaactagttcaatcattgtggaagacagtgtgatgattcctcaaagatatagaaccagaaaaaccatttgacccaacaatcccattactgggtttatacccaaaacaatataaatcattctattataaagatacatgcaagcgtatgttcattgcagcactattcacaatagcaaaggtagtgaatcaacccaaatgtccatcaatgatagactggataaagaaaatgtggtacatacacaccatggaatactatgcagccataaaaaggaatgagatcatgtcctttgcagggacatggatgaagctggaagccattatcctcagcaaacttacacaggaactcataagtgggaggtgaacaatgagaacacatggacacagggaggggaagaacacacactggggcctgtcgggtgtcggggcagggagagcatcagggtaaatagctaatgcatgcggggcttaatacttaggtgatgggttgataggtgtagcaaaccaccatggcaaacgtttacctatgtaacaaacctgcacatccctcacatgtatcctggaacttaaataatatttaaaaaaaaagaagattagatggtcgtaagtgctcagccttatttctggactctctacactgttccattagtctctttgcttaggattgccttggctattcaggttttttcgtggttccatatgaactttacaatagccttttctagttctgtggagaatgtaattgatagtttgattggaataacatttaatttctaaattgctttgggcagtacggccattttaatgatattgattcttcctcttcatgggcatggaatgtttttctatttgtttgtgttgtctctgatttccttccgcagtgttttgtagttgtcagtatagaggtctttcaactctctggt

SEQ ID NO: 40380 - DNA, 1011 bp, Homo sapiens
aatagaagcagaacaggccttcgataagatttgatatcccttcatgttaaaaactctcaataaactaggtattgatgtcacatatctcaaaataataagagccatttatgacagacccacagtgcatatcatactgaatgggcaaaaactggaagcattacccttgaaaactggcacaagtcaaggatgccctctctcaccactcttattcaacttagtattgaaagttctggccagggcaatcaggcaagagaaaaaaataaagagtattcaaatagaaggagagaaagtcaaattatctctgcttgcaaacaacgtaatcctatacctagaaaaccccatggtctcagcccaaaagctccttaagctgataaacaacttcagcaaagtcttaggatacaaaatcagtgtgcaaaattcacaagcattcctatacaccaaaaatagacgaatgccaaatcatgaatgaactcccatttgcaactgctataaagagaataaaatatctaggaatacagctagcaaggaaagcgaaggacctcttcaggaagaactacaaaccactgctcaaggcagtaagagatgacacaaacaaatggaaaaccttccatgctcatggataggaagaatcaatattgtgaaaatggtcatactgcccaaagtaatttgtagatttataaattcaatgctatttccattaaactaccattgacattcttcacagaactagaaaaagctactttaaaattcgtgtgaaaccaaaaaagagcccgaatagccaagaaaatactaagcaaaaagaacaaagctggaggcatcacactaccctacttcaaactatacacaaggctacagtaaccaaaacagcatagtactggtaaaaaaaaaaaaaaaaaaaaaaaaaaaaaaaaaaaaaaaacagacacatagactaatggaacagcatagagatctcagaaataagaccacacatctccaaccgtctgatcttcaaaaagcctgacaaaacca

SEQ ID NO: 40381 - DNA, 1106 bp, Homo sapiens
taagcaatcattttttgcacttatcatgcataaatccttaacagtataaaacataatataccattaatgcaatgaaaaaaataatgtgttcagggtaactggtggcatcatatcagcgctcaaaatgtttcagattttggagcattttggattttggatttttggattagagatgctcaacctgtatctttttaagttagcatttgattgtgggccagatgctattgtaaatttttccattttttttcagaaaagagactcccaccataatttagtaatatattctaagagaattttatcacactgacagtcatcccttggttactgtgtagccacagaaaccacatactatttaaaaacacatatgttgccttggtttttcttagaaataaagtcatcactagaattaactctaactagagatgcacttctggtttctttttattataatgtttatttttaagaagttttatccaacagcagaaagtgctttcatcagcttgcacaacatttagaatgcattgaacctctcattactcaaggttttaatgctgggtacatttgccaattagtatggactacattttagaaccacatgcttgatttatttattgtaattatttgaactatacttatttatagaaatagttgagaaactctgcagtttgagatcacataatacagttaatttctaatagttttttatacttaaagtgccttatcttgtgaaacgctcatgtaaggttttgaaattatccaacttcctcagtagcaacattaatcaagagattgtatagataataccgtaaggctatataagaggaaaggaaatgcagtctggaataaagtctatctaaataagacaactttaacaaacagacgctgctaacaagttaggtgcacttaaacgctgatgaaataaggggagaaggagtttttattattgggaatcaatgaaaagttttgggaaaaaatgagatacgaacaaattttgaatattttatatcaatccagaatgaagaaaactgttttttttttaaatgtggaattgaggagttaccttagttctttgtaaggaaacagggattgacaagtgtaaacaataa

SEQ ID NO: 40382 - DNA, 1063 bp, Homo sapiens
acaggtaacacattgctgaaggtggtttttatatttctcttatgcagttgtctagtttattttttattgggtgagaaaatgaaaacatttaatgatttggaaagggtagccaactttgagaagaattttcctgtaaacacaatgatgtttttaaaaaatttactctctttaggaacatttgaatgaaataaaattttgctttctaaactgcgtgctcagacagaccatgtttatcatatgatactgcaaaagcaaatgatcaggaaatgccatcctgaacagaataaaacaggttagagtggcttttagtcacactttaagtatattgtagttgaaagcacacttttctagcctccagtctctgttccaacacagttgcaagtttaggtcacttactttggatagtgtattcagtttctgtatttgcacaaagataaatataatatttttccctacctttgggtttagataaccttagattgaaattcaggctctatctcactagcagtagatccttgagcaaccactacaggccctgccatggcgactgtaactgctttgctgtctgtttttgactccactctttcttactaaggtactaagcctttgtagaccttagtttttttcatccatggattagagagaacaacagctatttgaaaagattgttgtgagggttaaaagaggtagccaactcaatatcaaataagtgttggtgttaatcagggtgttactcagggttctccgaagaagcagagctgataggatgtgtgtgtgtgtgtgtgtgtgtgtgtgtgtgtatgaatgaaaatataaatataaatggatagagggagaaagaaggagagggagaaggcttgttaaatccaaaatcttcaggtaggttgtcaggctgaagactgaaggaagagttgcagttgagtccaaaggcagtgtgctggcaaaatttatttttgctagacaggaggtctgtctgtgctattaaggccttcagccatttggaggaggcccacccatattttggagggtaatctgatttatttaagtccaccaatttagatgt

SEQ ID NO: 40383 - DNA, 1061 bp, Homo sapiens
accacacccagctaatttttttctactttttttttgtagagatggggatctcactatgttgcccaggctggtctcgcactcctgagctcaagcgatcctcctgccttggcctcccaaactgctgggattagaggcgtgagtcactgtgcctggccaggaactactattatgtctcttgtttatttcatttaaaatggaaggaaatactaaatctcatagagtttgtgaaaaagatgtccaagttcaggcctccttaattactcatccataccttgaggatctgtgattaggtctgtgaattttaagttaaaagcctctgatagggggctaaattggttcttcaccagaagcactgaccttggtctctgaaaactgattcttaaactcagaggctttcagacaatactgaaatgtgaagaataaaagtcaatattcatgtagcatgtgcatattagtgactttattttaaaactttgtaccataagcatttatataacactttataatttacgtaggatgcaaaaacacctggtctcatttttttcttcccaacaacccagtgaaacacacataacatgtactatgtgttcagtaaatagttgattagtcttatttagcagatgcaataattgaggcaaatctccatttaacccttaacaccttaaatatttgctcaaaatcaagtgttaaataatatctacttgtgactcaaacttgacaaatggtataccctttagtcttatgttgctattcagtcatatttgttggtgaagtgtgcatctaaatttctagtgtatggcttattacaatctattaaataccaaaaatgtactgaatagctgcctacaacaaataattgtctgtcctaaaatgtcactagtaccaagattgagaaacctggtcaagatgaaagtactttaaaaaatccccataaactctggcacttatgctgatatgtagatatatattttggtcaaaccaaagttgatcttgaatgcctggtttaaagtcaatgaaaaaacttgttaatagtggattagtttaattaaatgatttcctaa

SEQ ID NO: 40384 - DNA, 1050 bp, Homo sapiens
aagattttcttgaactatatccttttcttgaactatattttgaggacagtgtatctgtatataagattctagaatgacagttattttcactttgataacatttcagtcatctgccttctattattgcttttaggagaatttatctgtctacctgtctttaggtaattcctttgtttgacgggggctgcattcaaatcttctgtttgtcttgtccttctttagtggatgtgtgtctagatgtggcattgttttttgtttattctatttggaatttgttgggttttttaaatctgagaatgtatgtctcgcatcaagtctggaaaattctcagcttttcagttatcattgattattgcttattctcattctctttctttttatgtccttcaaacatgattagaaatatgttagactttattacatccgtataaatctaaatataccttttgtattttctaatgctttcttttctgttcagcatgatttgtttttcagataccttctagttcattaattctctgtttagctgtgtcttgtctgcttttatgcattcttggttttttactttatttatttatattttttgtttttgaattttttcaaatttgcccattttctggataatgtatgtttcttgctaacatttttgagttcctcttttatttctttaccattttaaacaaaactaattttatattctatatttcatagatctatcacatgaagttctgtttctattgtttttgcctgatgttcaatcatgattcctcatgtgttttgtaattttagactctgaggtcatgttggctagtacttcatttgtgggaatcctagggagcctggggtcacctagaaagattttgcttcagagaggttccacaggtgctgccattctgagagcacctgaagttgaattatgcccttggagcttcccatccagtgcaggtccagatccataatccttatctgtaatttgaaaattaaaaatgctcagaaaaccaaaattatttttgtaaatcatttcataggaaaagttgaccatatatagtc

SEQ ID NO: 40385 - DNA, 1058 bp, Homo sapiens
ttatatatgcagtacaggatgaaagaggccaccagggccagggcacctaagagaagtagaaattgtaaatttgtgaccagatcactttgctgcagcatgctgaatcatttagccattttcccatcagtttccccaactctggaagaatgattcatgtcttaaaggtatatatcagtctagaaaatcctcataataagaaaggtataggttatgaatttgctacatgctgatctataattaaaatgataaatcagtatactgatatatttcagagaacattcacaggtttgaacatttcattaaaacatcattcagataaaggctgacttctccagatctaaatatttagtcacattagtattttagtggaaaagtcttttgaaaatttgaaggtaggaggttttccaatatgatttctaagatgtggaaaatagggggaagattccatgttataaaagaaagcagctgaaataggaactggtgttgaattattaatatgaatggtcataagagctgaacatttattgagcagttactatatagcacgaactgaactttatattattaatctttcatcacttaatgggttcagggagggtaattaactttcatggctttttttttttctctttgtgagatggagtctcactctgtcacccaggctggagtgcagtggtgcattgtcggcccactgcagcctcccaggttcgagtgattctcctgcctcagcctcctgagtagctgggacttacaggaatgcaccaccacgcctggctcatttttgtgtattttttttagtagagatggggtttcttcatgttggccaggctggtcttgaactccttccctcaggttatctgcccaccttggcctcccaaagtgctgggattacaggagtgagctgctacttcccctgtccaaactttcatagcttttaaccagtacacttaactgccatctgtagattagtaatatactttattgagagaggagagaaaatgaaccatattaacctaaatggtctaatctctaaaacacccaccttgcttgcatagctt

SEQ ID NO: 40386 - DNA, 1040 bp, Homo sapiens
atattaaatgaaaagtatccagtcctttatgaagacttcattaaatgttatctaatcctccttgctttccaattaaaagaaatcattttaaagtagattaaactttatttggaccagaggattggagtggagtagagcttccggcagagtcaggtgcttaggaagctgaatgtttattgcaaaaagtttacacactcatgtgcatataagtaatttttcagtcagtagagtgtagaagcactatcatatgagggagtctggaaaaaagaggagagagctttgtactcaagaggactggttattactaattgaaagtctgaagacatatttcttttttttttgagacgttgtctcaccctgtcactcaggctggagcgcgatcctggctcactgcaacctcagcctcctgggtccaagcagttctcccacctcagcctcctgagtagctgggaccacaggtgtgtaccaccacaccaggctaatttttgtatttttttagtagagacagggtgtcaccatgttggccatggctggtctggaactcctgacctcaagtgatccacccgccttggcttcccaaagtgctgggattacaggcatgagccatcgcacccagccctgaagatatatttctaatgaatttaagagaatttctgtaaataaacccataggtaattagacaatatactttaagattttttcatcagataatctagggatgtaaaatgtgaaattaatttgtgcttctgtgcattcgattcaatctggagacatgctataaatatctccgaaatattgacaagtgtagcataatctaagtttatgcattaaattgctttattttacatatatttgtgaccatatatatgtttcaaaaattttactgttttatttttatagatttagggggtacaattgcagatttcttgcaggcatatattgcatagtggtgaagtctggccttttagtgtagccactacccaaataatgaacactgtacctggtaggtaattttttagccctcaccccctcccaccctg

SEQ ID NO: 40387 - DNA, 1110 bp, Homo sapiens
gctgctcgggaggctgaggcaggagaattgctcgaaccccaggggcagaggttgcagtgagccaagattgagccactgcactccagcctgggcaacagagcgcaaccctgtctcaaaaaaaaaaaaaaaaaaaaaaaaaaagaaagaaagaaaagaaaagaaaaatgaataggtcagtacaaggcataatagtgtggtatatttagaaagtgtaccatatgcataaaaaggtatcagcctaactgtggaagcttcagagcactgtctgggtaagaatcaaaataggaagggattaaagctctgttattggaaggtcccacaaactgcctacccaagtaggaggtataggtgatattaataggaaaagttattctaagggaacctctaatattgaagaacttcagctgtctagctgtttggtggcctgtctttctgaaagttgtatcttttgaaacatagatgaaataatgagtacaagatttagtcattaattttgaacagtaagggaaaatagactggtaatgctataattgcagaactcttgtgtgaaatagctctgttatcttgacattcaaaaaaaccagagaattcttgagcaaggtagatgagcaaatggaacttaaatactttaagcaagaatttttaaggtctaaattaattttggtaattgccaagttttagaagagaattttagacattctgtcagagctagtcttgaagaattattgataaatgagagtcagtggtgaaagaagcctagaaaacacagttcctgatcgtttcaatgtggaataaaaagccctggatttcagattttgctattatttgcattgtggtaattttacataattttggtttcaaaacatatcatcattttccttttttaatttaggaagaagaaaaaactggcatgcttgctaatggtaaatattatttatattcatgttttagttggcaaaaaattagtctgttcagaatttcatctcagtaattctgaatgagtcactatctgtgtttgtttttaaatatttctaaggcattgaagttcctagcttttctcaataatgtgtttctatcttgaatccattctgttatatttaagattttttt

SEQ ID NO: 40388 - DNA, 1038 bp, Homo sapiens
tatgtctctcatatatatgtatatgatatgcccaggctgaagggcagtaacacaatcatagctcattgtaacttcaaactcctggactcaagcaatcttcccacctcggctttctgagtagctgggactacaggtacatgccaacatgcctggctaattttttttatttcttgtagagatagggtctctcactgtgttgccaggctgatctcgaacttgcctcaagcagtcctcccaccttggcctcccaaaacgcagagattacaagcctaagccaccactcctggcctgataggtttactatacatgatactgccacatctgtaaacaaccccgactgcttctatttcagtacctacattcacaccatttgtggatcagtgttaagcacaattttgtaaaatgatagaatttctgtatctctagggaaaaaatatacatatgggcttttggtttccccccctccccatgaaaattgagcctgaattcatgtcataattaagactctgcatgatctgactggaaccctgccttctcgtgtactgtagccataggtaatcattcctcatctcctggaaacaccataggcctccctgcctctgtgcattatctcatgcttccttgccattagaatgcctttcctctcatccttcttgcccaataaagcctagcatcaccactttttgcagtccttcactctatcttctagctctcttgtcacaattagtttctccttcattttgatgtcagaacaccatagtaacacttacacattgtgttgatagttgtaacctataggacaactcctgcggttgggagctttgcgagggtaggaaacacttctttgtccttgtatcccctgaccctcaacattaaatgataaatttgtttaataaatgcatgttaaagtagatttgacagttacttctctgttctttttaatactgtaatttaaagaaattccttattgaaaaattcagtgcattttttataaattcttatgcaacatgctgaactttgtagtgaagaattatgttt

SEQ ID NO: 40389 - DNA, 1028 bp, Homo sapiens
ttcaacccaaatggtccaaaaagagatagacaaaggggtaaacaatgaacccaagagtgccaatattccctgattatgtcccatccaagtggtgggaggagaattcggcccagtcagagtgcatgcaactttttccctctcagacttgaaacaaattaaaatagacctaggtaaattctcagataaccctgatggctatactgatgttttacaagggttaggacaatcctttgatctgacatggagagatatgttactgctaaattagacactagccccaaataagagaagtgccgccataactgcagcctgagagtttggcgatctctggtatctcagtcaggtcaatgataggattgcaacagaggaaggagaacaattccccacaggccagcaggtagttcccagtgtagaccctcactgggacacagaatcagaacatggagattggtgctgcagacatttgctaacttgcatgctagaaggactaaggaaaactaggaagaagcctataaattattcaatgatgtccactgttatagagggaaaggaagaaaatcctactgcctttctggagagactaagggagcattgaggaagcatacctctctgttacctgactctatggaaggccaactaatcttaaaggataagtttatcactcagtcagctgcagatattagaaaaaaaacaaaagtccaccttaggcccggagcaaaacttagaaaccctattgaacttggcaacctcagttttttatcagagagatcaggaggagcaggcagaatgggacaaacggtataagaaaaaggccactgctttagtcatggctctcaggcaagtagactttggaggctctggaacatggaaaggctgggcaaatcaaatgcctaatagggcttatttccggtgcagtctacaaggacactttaaaaaagattatccaaataggaataagctgccccctcgtccatgccccttatgtcaagggaatcactggaaggcccactgccccaggggatgaaggt

SEQ ID NO: 40390 - DNA, 1776 bp, Homo sapiens
ctcttcctcttcttataaagccacccatttccttctcatgataacccattaatctatttatccatgcatggattaatccattcatgagggctttgccctcacttcttttttttttttttgagataataacacattttaattttgtcgtgaacttagcagaaattttatattcataaatttgacagtcttgggttttttgccataatttttttaaattttactttaagttctgggatacatgtgctgaacatgcaggtttgttacatatgtatatatgtgccatggtggcttgctacacctatcaacccatcatctaggttttaagccgcacatacattaggtatttgtcctaatgctctgcctccccttttcccccaccccgcaacaggccccagtgtgtgatgttcccctccctgcgtccatgtgttctcactgttcaactcccacttatgagtgagaacatgtcgtgtttggttttttgttcctgtgttagtttgctgaggatgatggtttccagctttgtccatgtccctgcaaaggaccatgaacttattcctttttatgtctgcatagtgttccatggtgtatatgtgccacatttttttatccagtctatcattgacgtcttccctcgcttcttaaaggccccacctctcaataatgccacactgatgattaaatttcaacatgagttttggaggggacattcaaaccatagtaagaggtatttacaaagaacagtaggaaaattggagactgtgacttaggttatatgggggagatgtgagggatcaagaatcaaggagagctgtgaagatgggggaccatttgctaatagctagggaagagtgatggaaatggtaagtgagtattctagaacagtactattcaatagaacttactgcaaagatgtaaatattctacactggccaggacagtagccactagaccatgtaactactgggcacttgaaatgagactagtctgcctgagggtctaaatttcaaattttattaaatactaattaattcaaatttaaatgtaagtttagccccatgtggctagtggctaccatgttgggcagtgaagctttagaaactctgcaaagcagaaagtaatatgcaccctaaaagaaatgtgaacaatgacaatgggagaacagttccctgaatgcacagctcaccctctgtgtggatgatgcttctggagggttactatgagtagtcatgactctgtgactatatgaaaactgactgataatgctaggtgactctgccaggcaactgcttcatgacaaatcagtgtattgaatgcctaaccagttctgtcctccatagttagtcttatcacacaattgtccagaaatgacccaggacacatgtcatttcctttctataaggtagtggccaaaaagtttccttgggggagttatacattgtaatctcctttgacaaggttggttttgggaagagcagctgttaattctgaagaggggagactgacacagaacatgtacagtgtctgactgacctcctagatgaggagatgctgatgccctgcttttttctcctggtcctatgctcattatctccatataatgcccactgttgagccactggagaaaagcttctctgctgttgcttcagcctcttcccttctcaaaccagaccaaaacccagctaatcgtttgctggtgaatgtgattctttctcttgccttacctctattaaattaaatgcattaagaagacaatgcctcccaggggaagacagaaaa

SEQ ID NO: 40391 - DNA, 1018 bp, Homo sapiens
ttcatcctttctaaaaagaaatgctcagataagttgagagtaaggttaaatatatgagcagttaagtactcatacatgattacagcattctaagagttcaaaccttaaaaattatcagtgctagaaatcgacaaatatattcaagtatacaaacattcaacagatatataaacttagtatccctctacatgctgatatattttcaaataatgtgctttcttttcattgaactgtggtatgatgagaataacatgtcctcgggaattagagaacttagtttgagactatggatttctcaatcatgattttgggtaaaaaaattagctgctttatgtctcagttttgctatgtgtgaaaggaatggctgggatgataattgttagtattccttttagtttccaattcatatggtcctattatataaatatttagcttaatattgggaaactagttttataaaactattatatcttttggaatatattctgtttatttttggatatatatatatatatactgtatctgtggctttacaaagaatataacactatcagtattattttcaacttgttgaattatgtgaaatttatcctttaaatggaactgtgctttagttttacaggataaattttagtattttaatatcagaaggaagctatacttagtaacgtatttgctactttatagtgaatagtaaaagacattaataaaatttctttttcatgatgctcttaattgcatggcattaaattattttgttttgaaataagtatagcagtctattataatatatggagatcattccaagtccattcaaaatacatttaaatcctcgagaaaacaattgtgtctttttgaataattttattcctactgagactcagatacaataatatgaggcagtttattactctgcagttcactgagtttatacaaggctgaatcaacacacacatcctatatccatatttttaaatcatattaattacatcactagaattacttaataaaaagacga

SEQ ID NO: 40392 - DNA, 1072 bp, Homo sapiens
tgccccgcccaggactccctcctatgtgggcgtgagcagcagcacctccgtgaacatgtccatgggtggcactgatggggacaccttcagctgcccacagaccagcttatccatgcagatttcgggaatgtccccccagctccagtatatcatgccatcaccctccagcaatgccttcgccactaaccagacccatcagggttcctataatacttttagattacacagcccctgtgcactatatggatataacttctccacatcccccaaactggctgccagtcctgagaaaattgtttcttcccaaggaagtttcttggggtcctcaccgagtgggaccatgacggatcggcagatgttgccccctgtggaaggagtgcacctgcttagcagtgggggtcagcagagtttctttgactctaggaccctaggaagcttaactctgtcatcatctcaagtatctgcacatatggtctgatgaagcctttaagttaaatgacatttggatctgtctaacatattttctttttcttttttaaaagctatgtggaaagaaactctctgtggtttataaaatgtacatataatagaaaatgaaggctcactgggttttttgactttatcatggtgagattgtaattatctatggtatatatgtatgctgtatatacatagcacatggagtatcacggcccctattgttcccctgtttcatccagttgcacggagtattggcatgcgtgtagtatgtttaagcaaagttctcagactcttttaaaaacaagatggtaaacttaaaacttggcaattatactatccagaagaacacttataacttaatttatcagaaaaatgctctaaacggtttcatacttgatgtattgataaccagcagtaaccagcatgtagagtcttgtgatttctgttattcttggacacagtgtgagaatctaaaatacaaaagccagttgaagtcttagtgttagtcctgaggtatttgtaatcatgaaggatcagctttttcattcctgcttattatttaccacacatactatatgaccttgggtctata

SEQ ID NO: 40393 - DNA, 1056 bp, Homo sapiens
gtttgaccctataaaattttttactcaggaaggtacaaaaatttcttctctttaaatacttcaggaaaaacataaccattttactaaataaacttggccatttgatagcataaattagggcagtgataaaatgtggaaattgttcaaaggcatcttgtataaattatcgccttggctgcactcctgcaggaggtgccttttatcttttctttaactagccaggaaaggtctccattactggagaaaatgaaggctttttaaaaaatgtccagattcagctaataaacattttataactgtttcctgcaaaatatctaaaatcctttctggaacttgtagtgtgaaacagcagcctcaggaaaaatatcgattgctccaaatcagatcacttgtagatatgtcagcttcagagcatctctttaaagcttagggttatatatttgtgatgatcaataacttctccctaagaatttagtttatggatttgtgtttgaatcataataaagtttacactgctaaagcaaataatgcagtaagatacatctctgtagtcagtttctaagtccagtggttgcttgttaattatcttagtaaacttccctcaagactgctctataatcactttagtatttttaatatttaaaactacaattaaactcatctatgtggtaataagaagctgttttatattaagctgtgtcttaacattcttttgcatttaaaatcgttgtatttctggaaagtcacaaaatttagtattggtataaattgaatagagggtgatcagctaaacaggacccagagttcattagtccagtgttaaacatacccacaggcaacatgtggtttggaactgaccaggtctgccaaactgcccagaaatcaatacactagtacagaaaatactatcaagtggcatgaacttggatttggcttgtagtttggccacagatatgatgactggtttggaaaaaaaatctcttagaatgaaacaatgttaggattaataagggtttcagaccttttgtaatctcatcctttctttgtgagaaactg

SEQ ID NO: 40394 - DNA, 1050 bp, Homo sapiens
aaatatttagtcaggttgttgaggttgggcagaggcttctgataaattcagcttttccttctttgatatagattattcttcattctatgcacaaataccaaccgcgagtgcacgtcatccgtaaagactgtggagacgatctttctcccatcaagcctgttccatccggggagggagtaaaggcattctcctttccagaaactgtcttcacaaccgtcactgcctatcagaatcagcaggtattgttctcagaattggaatctttgtagatttttcatttcaggtgaagagagaaagttagctatccttctcactctaaatattatgaattataaagcatttgccatatatgacattcaaagtgtatatatatgaataacagttctttatccatgattttccaagtaagtctgctctaatgttgatttctttagacaaaccatgtcttgtgactgacagtgtaggtttactttccattttgagcttttgaattatatcttaattaaaattagaatgtatttttattgcctaaaaaatagacatgtagaatattaaaaatgaattgtatcatagagcatgggacttgatagcttactttatttttaaactacattctaaaaatagttcagaaacatttatcctgtatagtcattttggtacatatacaaaagggctatttctttcaagatatgctttaattgtgatagaggatgataaacttgcttatagtctgagagatcagcaatggtagaatacttatttcataaagttagaaatagtgtgagaagtgaaatatttcctttctatatgggtaaatgtatatatttctctaaggctatgtttatatgtgtcagttaggtagagaattgaatcagaggcaatatgtaatccatgctggaattccagctggttttcataagaaatatccatgtaatataagccgatgtggcctgtggtagatttttttttttttcaatttcagtggtcagcagaattgttctgggtctccatttctctttacatttatatacatttcaattacaaatttaa

SEQ ID NO: 40395 - DNA, 1031 bp, Homo sapiens
tccctaaaacattccagggatacataaagttcttatagataatactgaatacatattatttttcttgagcaatcttcagattactattgatagttgcttcttaacatgcaaacaaagacatacatcagccatttctgtatcctactccaatataccccacttgaagtcttttttgaaatatggtaaggatattttgaaaagtaaccttaaaatatatacaactatatggagaaatctccttgagagaacagtcttcataaaacaagaacctgcttttcattgactagtaaaaagaaacccaaatgaatctttgtttctttaattacaactcagtccaatcttctgaaattagctatgcatttatttttgtttgtttaatgtaaagtaacttttctccaatttttcttctgcttagaaatttgtttctaaaagatatgctaattctccctgggagtttataagtgtcattgttttgtcccttgttgtttgcttaccagtggcattttgtttcttaccttggagaagaggaagggttctcccttaaactcccctgctccccaaaatatcaagtgaatatcactttctaatgagataaattaattaagaaataaagagggagggggaaaaacagagttaacattaatggttgctatgatatgattggtcatttgctgctttatatttatattaaaagagtgtgttaaagagtatgttaactaatgagacaccaggtggggctcaattaactgcttctgtaggctgagacccttttttgtgtttcctttgttggacctggccctgtgatgatgcctgcccaaaaaatacgaatttataatgaatgcacatgaacgtggtggtgggaggacgagcatgggccaagggacccagcttccaggttcagccttaaggattcagaagtctcttgcttgtgtagaccttagttttctatctataaattggagtattaatgtcagttttttcagacttaaatatatgtaatgtaatgtcacacagaaccctgcatatcaaac

SEQ ID NO: 40396 - DNA, 1075 bp, Homo sapiens
tgtgtttgataatagccattctaatatgtatgagatgatgcatctttgtggttttaatttgtatttctctgatattgaacattttttcatattcttgttggctgttcatatatcttcttttgagaaatgtctatttaaattctttgcccattttaaatagggttatttctattttttgctattgagcttgttatttttttaaatatgggcattttgagtaataaatttccctctaaacactgccttcaatgtatcccatgagtcatggtggttttttatttttttaattttcattaatcttaaagtactttctaatttcccttgggatttcttctttaatccattgggtttttttgtttgtttttgtttttttttttagcagtgtgttgcttaatttccacatatttgtgaattacctaaattttgttcattggttaatttctaattttattccattgtagttggaggacattctttatatgatgtaaatcctttttaatttatggaggctggttttgtggcccaacatgtcgtctatcctgaagaatgttccatgtgcccttggaaagactgtatattctgttgttgagtggagtgttatttagatgtctgctgggtttacttaaagtgttgtttaagccttttattttcttcttgatcttctgtctccttgttcaatcgattattaaaagtgaggtattgaagtttccgattgttgttattgaattgactatttctctttgcaattctgtcagtttttacttcgtgtatttttagattttgttgttatatgtatacatgtttataattgtttttcttatttctgatgaatttattcttttatcattataaaatgttcttcttcttaaagtctactttgtccgatattaatatagcaactccagctctcttttggtaactttatgcattttattcccttcaccatccttgtattttcttgctttggttcttgaaatttgtttttcttttccgctgcaccccgctcccttggagtgctgctcaggctgcaccccgctcgctctgagctctgggctcctgctatgctaatgccgcc

SEQ ID NO: 40397 - DNA, 1047 bp, Homo sapiens
aatatctacaaaaacacctatagctaacatcacacttgatgaaaaacttaaaagctatcccactaagatgaggaacaaggcatgctctcactactgctttcaacattgtactcgaagtcctagttagtgcagtaagacaagaaaaggaaataaagagcatagtgattgggaagaaagaaataaaactgtctttgttcacagatgacatgattgtctatgtagaatatccaaaaattgacaaaaatgctcctggaaataataagcaattttaccagggtggtaggatataaggttaatacacaaaattcagttacttttcgtgtatatcatcagtgagcaagtggtatttgaaattaaaaaaaatactatttgcattagcacccccaaaagtggaatacttgggtagtaatctaacaaaacatgcacaagatttatatgagaaaaattgtaaaactttaattaaagaaatcaaagaactaaataaatggagagagattttatgtggatagaaatattctgttttcaagatgtccgttcttctgaacttcgtctatagattcaatgcagtcccaatccaaatcccagtaagttgttttgtgggtattgacaaacattttaaagtttatatggagaggcaaaaagacccagaatagccaactcaatattgattgagaacaacaaagtcacaggattgacactacctttcttcaaggcatactataaagctacagtaatcaagaaagtgtgatattagcaaaagaacagacttacagcaactgttcttattagcaaaggaacagtttacagcaaaactgtaaaacttagaggataacatgggagaaaatgtagatgaccttctgtttggcgatgacttcttagttgcaacaccaaaggcatgaaccatagacgaaataattgataatctttacttcattaaaattaaaaattttgctttgtgaaagacactataaagaatgaaaagagaagccacagactgggagaaaatatttgcaaaagacgtatcagataaaggactgttaccaaaaa

SEQ ID NO: 40398 - DNA, 1042 bp, Homo sapiens
tcaaaactaacagaatttcatggtatgttattctttttggataaaacattacatttcagcattagcattctttaaaactatgacaccagattaatttttttattttaagtaattgaaatacaagaaatacaacattgatgcttgtgtatactttcattgataacggaaatgtactgtttatcttatttttatttatctgtatatttaaagttcttgcaatgtacatttatgctttttttaaataaaatcaaaatttaaaaatagctattttaaaactatattttagaaagggttctctatttactctttttcgttcttcctgtctcatcaatgtatttattttggttaatatcaaggatatagttataaagaatttccagctatttttttttgtatttagcttggtgaattttatttgtgtgttctaaatctttttattttagaaaagctctgtagagtgtcccctgatccaaattcaggttggtttttattgagaagggtaaggaacgttcctgtccctgctgtaagagcaaagcctgtgataaggatgattattataggaagataaagaatataaggtcccactccatatttttgcatagattttgagtttgtacttgtgttcaaatggttttatctttctctctaccaatctggtgcagtaccatcctcgttctttctctgaaaactactttttttgtttaaggctgagagaagacaatttatctccatacttttcttttttgatgctaaaatttctaaagccagccctatctgagaaagcacattcatgcttgcttccttccttccttccttcccttgtttccttccttcatttccttgtttccttcctttctttcttccttcgtttccttgtttccttcctttcttcttcgtttccttgtttccttccttcatttccttatttccttccttccttcatttccttgtttccctcttgttgctcaggctgcagtgcagtggcacgatgttggctcaccacagagatcttggcaacctctgcctcctgggttcaagtgat

SEQ ID NO: 40399 - DNA, 1067 bp, Homo sapiens
acagaacaaaaaaaccaagattaagaaagtaaatattctttttcgctatgtaattaagtgaagattaaaaaataattgcaaaggccgggtgtggtggctcaggcctataatcccagcactttgggaggccgaggcgggcggatcacaaggtcaggagatcaagactgtcccggctaacacattgaaaccccttctctactaaaaatacaaaaaactagctgggcgtggtggcgggcacctgtagtcccagctacttgggaggctgaggcaggagaatggcatcaacccgggaggcggagcttgcagtgagccgagatcgcaccactgcactccagcctgggcaacaaagcgagactctgtctcaaaataaataaataaatgaataaataaaataataattgcaaaaacaattatcaataccaaaacctgtttatatttgtgtaagtagatagattgggaccaaataggtctgcctggtttgccatatgcctgagtggctttgtagtactgcagtgacgcagaaatctcattgtatacacgttatttacaaacctgtggaaatcatctgcatttgcaatattttcatccttaccctagttgaccatgtctgtattcacttgattgagatagctttttttttttcccaaaactggaaagtagtaaactaaggtaacatgttttaatgttaattgtaagtgtaataaatgataattattatttgttattttaaagtatttcagacaacttttaagaggtgcagaatcaccaacacgcaattcaaaattgaacaggtaggttgtatgttttgtttttgaacttgctgatgccagtcattctatgatagcatcattgtctttattagctatttttctgaatgaatatgtggttccattgttatatgagttcacaaggcattttactagtgaattgtagaactgtattctatatggtgatctgaaaatgcctgaaattcttttagaaaaattttaacaagatacataatgtggccttgttaatctcataatgaatatatattagttttgattaccagctttattggagactag

SEQ ID NO: 40400 - DNA, 1042 bp, Homo sapiens
gcctcaacttcctgagctcattcatcctcttgcctcagcctccgaagtagctgggactacaggtgaacaccaccatgcctggctaatttctttgtagagactgagtctcactatgttccctaggctggtcttgaactcctgggctcaagcgatcctcctgcctcagcctcccaaagtgctgggattacaggcatgagccaccacacctgacctttaatcaattttgaaaattcctggctgtcttttcaaatatcctgccccattttctcttctttaacaactccagttatatgcatgttaactcatacaggaatggcaattatattctgttgcctcacaaatcttatatcctgtattccagctttttttttttaactcccttttttcccctttatgtttcagtttgaatgattaagaagtaaaaggtaaactccttattaacacatcctgaaataaaaagaaaaagcaattggtattttggctatcataatactaccatcttttattttggaataaacattcatttgttcaaactcagttctgccactagtttgcagcgttcatgatagaaatattgtttaaaaacattgattgggactaaaaaaagtcttcatttttatttttatttagtaaatcagatctcaaaataataaaagacttttggtataataaattcaatattctttaaggaaactattagaagtgtgtttagtgttttgaattttagcaaaatttgtattggtatttatgtatttacatattttctattaatgtataaaaactggttgattgcatttctcttttattgagtagttattttattctcaaatattttttaaaaacttagatgaattagattgcttctaattgctgctgttagtattggctacaattagaatgggactgaagcttttatgaataattatatattaaaattattttttcttattcattccctcatttgttagaggaatttaatgatagaattttacgaccagaattatcaaatgatgaaatgctgtctcttcatgaagaattgcag

SEQ ID NO: 40401 - DNA, 1033 bp, Homo sapiens
attgtttctaccttttgtctgttatgtacctgttagcatttgtatacaagtttttttttgtcggatatatattttcacttatcttgggtatatacataggagtacaattgctggatcaaaaactctatgtctaacactttgagtaactgccagactattttccaaagtggctccaccatttacattcccatcagcagtgtatgaggatctcaatttctccacatccttgccagaactatttataatctcactcttttattctaaccatcctagtatatgtgacatgatattccatggtggctttgaattgcatatccctgatgccaataatgttgagaacttttatgcttatttgccatttgtctgccttctttgaagaaatgtccattcaaattccttacctgcattttaactgggttatttttttattactgagttgtaaaagttacttatatggatacatgtcctttatcagataaatgatttgcaaaatattttcttcaattttctgaattatactgtggctcttatctgcgtcactatcctggaagataaatgggtcattattatattcattttatagaaaggtattaactttgtcaaagtgttagcaaatgttaatgggcaaaagattaggccttggtcatcttattccttctacaatgttctgttcatgattctgttgcctgcataatgtaaattggaagtttgggaataatgaaaacaaagaatcatttagggtctacaattttttaaaaatcaaagtttagtgacaaacccattattttaccattttaattctgacctgaattccctaaagtggaacttacaaataaaaatcttactgagtattctcagaaaacaagattttacaaaatgtttgaaaactataacatcttgtttatttgataaatatgagagtaatttataagcgagtaccaagtggccaagggcaaatgaagagtgatgttattttcaatgaggtataatactagcaaaaatatcgcctcttactgaacatgtttgatctggg

SEQ ID NO: 40402 - DNA, 1030 bp, Homo sapiens
gtacaattaaatttttgactatactcaccctgctctatcaaatattaggtcttactctttctaagtgtatcttttagaagattatttgaaacaattttttttttttttttagacagagttttgctctgtcgcccaggctggagtacagtggcatgatctcagctcactgcaacctccgcctcccaggttcaagtgattctcctgcctcagcctctcgagtagctgggactacaggaatatgccaccacgcccggctaattttttgtatttttagtagagacagggtttcaccgtgttagccaggatggtctcgatctcctgacattgtgatccgcccacctcttcctcccaaagtgctaggattacaggtgtgagccactgcgcccggccttaaaccttatttttactttatcctataccatgtgtatttgctttgtcttcatttttttaggttaaaaaattagtgaataatttttgatccatcgatcagttttgctttctttcattttaatgcttagttatcttggtttgtagaaattagaaatgaaaagacagctatagaaaaaagtcatgttctggccatcagagaaatgcaaatcaaaacaacaatgaggtaccatctcacaccagttagaatggcaattattaaaaagtcaggcaacaacaggtgctggagaggatgtggagaaatagaaacacttttacactgctggtgggactgtaaactagttcaaccattgtggaagacagtgtggcgattcctcaaggatctagaactagaaataccatttgacccagccatcccattactgggtatatacccaaaggattataaatcatgctgctctaaagacacatgcacacatatgtttattgcggcactattcacaatagcaaagacttggaaccaacccaaatgtccatcagtgatagactggattaagaaaatgtggcacaaatacaccatggaatactatgcagccataaaaaaggatgagttcatgtcctttgtagggacatggatgaagct

SEQ ID NO: 40403 - DNA, 1033 bp, Homo sapiens
aatctagttgtatttctaagtgtgaaagtatactttcttctcagttgtagctattgatgctgtaatatccccttctgtagggttaacagtgggaagcatggttgatacaattatctttcctattctgccaagaaagttaacaacaccgtctttgagttcaagatatcatcattctttcttttcttgcctttgattagggaagtgttctaattctagggccctccaaacatcaggaaaatgaaagtaactcctcagttgaaggttgtcagaatttctgttttacaaaatgtctgagtttcagttcatttaatttctttttcaaatagagcacacatttttttgttttaacttttagaatttattttataagtattttaaactatttaaaaattttgtattaattctattgcttctccaaaattattcattgttttatttctttgaactttctttggtgttgcttagaacataatctcagtattgtaaaaataagactgtagtcgtgtatgtctgcaaggaaatatatgttacaatttagttaatagtgattatgtcttgatgctagaattatggtagatgtttgttttattttttgtacatgtctttttttctgcaatgaaatgtattatttgtaaatgaaaaaagaaagtagcttaagtaaacagaaaaaaggaaaattttcccttggattgtagaaggtgaaactgtatttctctgaacttctgaatatttgtttttctccttattgaagggatgtgacagatgatgaatcctttgttgatgaactgagaataacattacgtttttttgcatctgtcttaataagaaggattcacaaggtatatatttttaatgagaaatttgggaatttggggctttatcatttaatgaaagagatttaaaacaattttttgtgagtacatggcaaatgtacatatttgtggggtacatgagatactttgatacaggcatgtagtaagtaataatcacatcatggaaaatggggtatctatccctcaagcatttatcattt

SEQ ID NO: 40404 - DNA, 1028 bp, Homo sapiens
ccctccagttactgtgttagctctccttttatttagaaagagaattatctacatttaccaatcccacttcctcacctccatctcactcctcaatccgttgtagccttttgccattctaaaattgtttttgcctggttaatcagtgcctcttttattgtgaaaactaatggacacctctcaatttttattttacaaacatttggtcatgttgtccacttcatttctgtagtatttttttttctgtttgtttgttcgtttgtgtttgaccttgccagtttttatgactcgacccttggttttctttccaattcttctaattacttgattcctttatagatttcttttcctctgcctggttcttaaatatcttatgctcatttcttttttaactctgtagattctccctgggtcatgtcatttattcctatggcttcagtgatatttatgttgataatttctaaacctttatccttagcccatattctctccagagattgagactacccaatatttaggtgcttgtggaacatttctgtgtagcgtgttttaaaatatctgaaacttaacatgcccaaagagaactgattttttatttttctcttctgcttgcttttatgtatttatttatttagacggagtctcgctctgtcacccagccggagtgcagtggcgtgatctcagcttactgcagcctccacctcccaggttcaagcaattctcctgcctcaccttccctagtagctgggattacaggcatgcgccaccatgcccagccaatttttatttttatttttagtagagatgcggtttcaccatgttggccaggctggtctcaaactcctgacctcaagtgatctgcctgccttggcctcccagagtgttaggattacagttatgagctactgtacctggctccttctgctcacatctaatcaactacttaatcctcttgatttttcctcccagtgtctcacaaaataattcactttttaagatctctaagtctcttccctagtttaggccatcac

SEQ ID NO: 40405 - DNA, 1074 bp, Homo sapiens
cagagcagccctgaacaagcttttaatgctgatgaaagtgacctgttttggaaaaaatgtcacaaaggacatttattagtaaggaagagaaatgagcaccaggatttaaggcaggaaggtgtacgcaaattcttctattttatggatatgcagttgggttccttgtctatgaagtgtctaacccccgagctttgaaggaaaaagataagtaccagctgctagtcttgtggttgtataaggaggcctggacaacaagaatcattctttctggattaatttcattgatgctttgtccctgaagtcagaaagtaccttgccagcagggattgcctttaaaaattcttttgatactggactatgcccctggccacccagaaccccatgagttcaacatcgaagctgtggaagtggtctacttgtccccagacataatgtctctaattcagcctctaaatccaggggttcataaagaactttaaggcattacacatggtactctatggaaaggattgtcagtgctgtggaagagaactccaatagagagaacatcatgaaagtttggaaggattacaccattgaagatgcagtcattgttatagaaaaagccgtaaaagccatcagacttgaaacaataaattactagtggagaaactatgcccaggtgttgtgcgtgacctcacaggatttacaccagagccaatcaaggaaatcatgaaagagattgtggatatgacaaaaaaggtctttcagcataaggatcttacagaaattcaagagccagtagacatcacaccagaggaattaacataatataacttgataaagatgagtgctttggaaccagtgctagacagtgaggaagaagactttgaagaaacagtgccaggggccaaatgcagtggctcatgcctgtaatgccagcattttgggaggccaaggtggatggctcacttgagcccaggagttcaagcctgggtaacacggtgaaaccctgtctctacaaaaaatacaaaaaatttagctggatgtggaggtacacgtctgtagtcccagctacatggggggctgaggtgg

SEQ ID NO: 40406 - DNA, 1025 bp, Homo sapiens
ctgcttcttaacaggtaacgccgcagcgcggagcctgggcggcggcttttctccgaaggtgcagacgcccggcccgtgctgcttaaccgtgcggaggccgcgtagctgcgggactggggaccagtggggagagcgagctccgcagaggagcggcctcggggagcacggcggagcgtcgaggccggaagcacaggccggtggggtggggttgattgcctcctttcccgaggcttcgtctcctgagctacctttttctcatccatttctcaaaacgagttcttcatcttcgttgcttttcaaaagtgaaatccgtgtgtcggctcaaattgagactgtacacaggcagtcaagtcagctgacggaggagtgttcaaggtccagttcgtagccgcaattttaggcagaatccgcacacctgcagcgcgttcttccatctccccacctcccaccccctcagcttgcagctgaagcttttcccgcagtattgttgaataaaacagacgatcataaagatttgttggacagaaatcagaaagcaaagtggtacccgtcccaacatccttagaattttttatttttgagacggagtctcgctctgtcacccaggctggagtgcagtggtgcggtctcggctcaccgcaagctcctcctcccgggttcacgccattctcctgcctcagcctcccgagtagctggggctacaggcgcccgccaccacgccaccacgctaccacgctaatttttttgtattttttttttttttttttagtagagacggggtttcaccgttttagccaggatggtctcgatctcctgacctcgtgagccgcctgcctcggcctcccgaagtgctgggattacaggcgtgagccaccgcacccggccacatccctataatattcttaagaggacttgatgccaccctccccaaaaaaacctgaaatattccgaaaggttaaaattgataaattcaattgacattttgaaatcagaagattctgcccccgaaataaacttgttttact

SEQ ID NO: 40407 - DNA, 1051 bp, Homo sapiens
tgtataggagcatattctattgcagaagaccttcctatgaagatcatggaatcaaatacgggacattgaactaatacttggactttgatatgaatttctttaacaattttctctgcagtgcaagttattaaactaaagctactctattttcaaaatgtgttccaacagaaatccttcataactcctagcatggtatcttaataaagaataaagttcttttaaaaatctgctctaagtagatttttccccttttttaaattaaggatcccaacagtggtattttgaaatattctcttgaatttgtgcatttaaattttattgcagtggtatagatgaatgccactgatggtatccttaaattttatttctgctcaccaaggttaatcatgattgtctatatcttttttatagtgatcacttttgaattgtgttcagatatgcagtttcaggtgtaatcatcagagctggttagtcaggcattccagatagtggttcttttcagaacctttttaaaagggttggttaactacctcagtagcagaggattgaactataccctgtctgtactgtacatagaaaatctttgtagataaaagcaaggcttgttaaatatgatatgagggtaagattttaatataccaaatgtaacattcttagttgcctttagtttcagaggcttgtaagacttcctcatgaccatcataacaggccttgcttttgtcgtattttgtggctgaaaaagcagccttgcttcttcagatattgtagttatttggatgtataatagtttagcaagatgttacttttgtaagacatcagatgttcaaaaaagtgcatccgaacttgtactaaatactgcagtgtccctttataaaaagtcagactaaaactgacaattgtacagcgaagcctgacatttggatattttgaagttttttcataaatcatagaaattagtatatggctgtagtttagctttttaggtaaaaggtatgtttcattagtgcatttcttcctgctgatcactgtaaacatgtgaatcagctttcca

SEQ ID NO: 40408 - DNA, 1240 bp, Homo sapiens
cgatggatggattttgaaaatgaaatgagtattaaaattataacacagtagtgcaataagaaaacaagtaggtgtgtaatgagttatactaattagggagacctttttagagaatctgtaaataggtatctgcttaagactgaaggaaacttagttgggtaagaattgaagttagctcctaaaaagttagttactgatttcctagaagaggggtaattgttcttgaatgtgagagcaataatcactgtcaatactattcaaggttaattttctgttgattgccctgtttggaatttaaaggaagaggatgcttctacatatttctgttacttcataatcagggaattgatcaagttctagtttctgcagttaattgtccagttggacaagttggcaagctctgaacctcaatttcttcagttctaaaatgggatcagacaaaattatgtaatagctctggattatgtgattatccaagtgacccatgcttgttctgggaccaaagaaaatatactttgtaggtttgatgatagtgtaaatgaaggaagactacaaaaagagttagttttaatgctctatatttcaaacacctggatatactaaacagtgtaaaataacttctttttatttctttcagaagacgatatatggttaatttattaaagtagaatgtaagtataggagattatattagataatgtgattagagcagttacatttggtacttgatagagggagatactaaatagaaggtggaggatgtcagtatatctgttaatatttgaaaaggagtacaaactaaaagggatgattgcatgttactttcgtactttaacttgctacagtctttttttttttttttttaagttttaactaagcacgtattcctacataattctcactgtattcctgtgagttaggtactctatcccttagtttgaaatgaggaaactgaggctcagaagtcaacttccttggggtcattcacatagtaagtagtggagttggatttgaactaaggtagtctagtctcccataattttccctcttaaccactataccaggatttctcatctctgtcctcctgacattttgggctggataattcttggtcttgggggctgccctgtgcgttgtaggacttttagcagcatccttggcctcttcctgctagatgccagtagcaccccctttctcagttatgaccgtctaaaatgtccccctggaaagaggtggtggc

SEQ ID NO: 40409 - DNA, 1028 bp, Homo sapiens
gcgtttcactgtgttgcccaggctggtctcgaactcctgagcttaggcaattcgcccgcctcagcctcccaaaatgctaggagtacaggcatgagccaccgcgcctggcccaagttttttaattgaaaaaatgtgggtagggaggaatcagcagtttattttatagatcctgctaaatctttgtgttatttatgttgttcagagaccacatccatcctttgtactttctacctaccatgccttggctaacttgattagcatcagggctagtgatgatgggtaagaaggaaaaaaatggtgtttctgtagataataatggaaacagttattaataatttgaagcagcattgttaatgttgatggttaatggaagtgttgcctatgttacagattagctgtcttctctatatttctttgattattgttgccttgatggaatgtttccattctctgttgtcttgcctttgcctcctacatttcttataaggattttggttcctctcaatggtgtattttcttggtagaactaagaattcaagtttctgttagaagtttttttagaattaggtattttcttatagttaatagctcctgattttagaacatttggaaaataccagttccccccctcattataccaaaatctgtcacccccaaaatcactcctgtttttgcctttacacacttggtatttctttccacctttttctggtattttaattgtttttgttaattactagaattactgattgcatgaccaatttgaaaaccactgatttgttgctaaggctggctacttgatgctagattataagaatccagggaatgtacatattttaaagtaatttattgtgttcttagtttaattttacttgcaaaataaggcattataatctacttgtccataattctgtgcaatgatggattcagccatagctctgctacattcaggtaacatgtttctgctgttaaaagattattagtctggtagaagagaaagacatgaatgctatatgagaaaacaaagt

SEQ ID NO: 40410 - DNA, 1173 bp, Homo sapiens
ttttttttgtatttttagtttgttgaccaggctggtctcaaactccaaaccttcagtgatccatttgcttcggcctcatgaacagccattttgatgaatgtagttgacaaggtaggttcagagatattttaataataatttagcaaatagtgtgtttagcatgaaaacttttacttcagatatacaggttcttagagagtttatagaacatgaaagactactgttacagtggaatccagtggtgcaaagcgtaaaggaaggatgaagggagactggattagggttgtcagagaaggctttgcaataaagaggtttgagcagcacagtgaagaaaaaaggtgaatctagttgaagcagtgttttgtggaaataaaacttgtaataaagtcagtgccaggagttagttcatactgggctaagctgcatagcaccccccaccccctttttgagccctgatgtgggtggcatgttgtaagtggctgaataatgaagattatttgaataaagacaataaaggccaggaggagggtggcagcaatagaaaggagaaagatcggagattttggaaagagaaatgaaaggccatagtggtatgctgtaggttgtattctagtttttatcaagaattgaaagtgtagttggactgttcatgatacgtttggtaacttgaatctccattcagtgataaatgccttggatgaccgtcaggatctgaaaaacttttgatagcctgagatagaaagtttatatctaccaagatggaattgactaaagttaagtatttacactagtttaacaagctgtggtgtcagtaatgtgtggttgccaaataacctagggtaacacagacaatatgtaagagtggtatggtgtctagaagtggaaaattagtaataagctccagtttattctagactcctgtttcagtctgcgtttacagtattgtgttagaatgtcactcttcagtgacacttgtcagtatttcttggaggtactttagtttgccattatcagggaagcaatgattagccaagcatagaaaacaactgagtcatgtgcttgtgtgccaggtatatgaaatgctgtcatttgggggaaagaaataggtttatttaaggaagtagattttggcttattgtaaagaagactttataattaagaaatctttaggcc

SEQ ID NO: 40411 - DNA, 1053 bp, Homo sapiens
gattacaggcatttatcaccacacctggctaaattttgtatttttagtagagacagggtttcaccatgttggccaggctggtcatgaactcttgacctcagaagatatgcctgcctcagccccgcaaagtgctgggattgcagacgtgtgccactgcacccggccaagtcttccttttctatgttgtgtgaatattccccactggtttgcataattgagtatgatggaagttaaacagtacaaaattatgttacttgaaagaatataagcctttacaaagagaatttgagaatttagatattttcaaatcatgtctgatttttctcttcataaaagagtgctttgtgttttagagggaattcagatttactggtaacctttgagttgtcaaaattttagtttcagcagttcaatttgaggggaggggcattttagagctctagaaagaggtaccttagaaatcctttagtttgtttttatgatttgttttttgagacaaagtctctgtcacccacgctggagtgtgtgggcatgatcttggctcactgtaatctctgcctcctgggctcaggcaattctcctgcctcagccacccgagtagctgggataataggcgcgtaccaccacacctgactaatttttgtatatttggtagagatggggttatgttggccaggccggtcttgaactccagacctcaagtaatctgcccgccttggcctcccaaagtgctgggatgacaggcatgagccactgtgcctggcaggttggtcttgaactcatggtctcaagcagtcctcctacctcggcttcccaaagtgcaaggattactggcatgagccaccttgcctgtcccaaaatcctttaatctcctataaaagagtagaatatttttgccaagtagcaataaagtagcagtaagtgaaaatgcagaatgatccagtaagcaatgaggtatcataactacagaaagctaatacagtgggctctctctactgtgggtcctgcattcacagtttcagctagctgaggattgaagatactcccaaaaaa

SEQ ID NO: 40412 - DNA, 1038 bp, Homo sapiens
agcctatacttctttctatactttgcctagaataaggaataaacacctaatgctctgagtaaatatgagttgtgtaaattttaacagttactttttgggagttaaaatgtagaggttatgtaacgttgcagtttcataaagtttttaaaagtcgttttggctgttacttttttctgaaggacccatgctatcccatgaaatatggcacgtaaatgtcaaataataataggagattttttttccctgtagctcccaagtttctagacttggtatgggaagtgtaatttcttctgaggttggcacaatgcccagaatggcagtatgtacctaggagtggggtttatagggaatttattgggtgagagatccagatttgaaagatgctcaaccaaattaggtacaatcattttttaagatggtattaacatagtaatacatcctgtcttgaaagttgctgatggattggtcttaactttttgttgtccattaagcacactattcagtaattaagtggagactagaaagtaatttgaacaggaccctggacttctgataataatttaggagtataacaagtacacatttaaggggaaattttaaaacagacatcacaaacctgtttttataagggaacatgccaagataattggaaagatttgagcaagatggatgttaactgctaaatatatgggtgtggtctagtgaattaaatgtattaatgacgtttgaacttttcaaggcactcttggaaagaacaggctacacacttgatgtgaccactggacagaggaagtatggaggaccacctccagattccgtttattcaggtcagcagccttctgttggcactgaggtaaagcaactaaaaacttgtaccttttgtagtaaaagcacaggtatctggtttcctaaagcaattctccatggtttttacttaatatttaatttacagatatttgtgggaaagatcccaagagatctatttgaggatgaacttgttccattatttgagaaagctggacctatatgggatcttcg

SEQ ID NO: 40413 - DNA, 1115 bp, Homo sapiens
aaggcacttcagaatatgcaaaaaatgtatcatttgaaggcaataatttacaaatatgcattacttcactgagatcaggaaacttttgtccttgcctcctgtagtgaatataactgatgtacaaaaatgtgtacatttaaaaagtatacaatttgatgggtttttcataggaatatactcatgaaaccatcaacataatcaagataatgactatatccatcactcccaaaaatattctattgttggcttgattttgaacatgttaagtttaaatagcacatgttattcaaattgggatttttgagtaggcagttagatatagaggtccacagttcagaggagaggtctgactaaaataaaattgggagttaacatatggaaggcatatttaaagccataagattagatgagatcaccaatagagaaaaaagtccaagagttgaaccctgtggcctttcaggattaggacattccaggtttattcaaatcctagagaataatttgtgccaagggacaaaaatcaggacgcaggaatctgctgccaagttcaagggccatatttgttaggaacagaaactaagtagaaaaccaaggatgcctggaatgaaatgagccaagaaaaaaggataagaaccaagcaaaacttgctggaaattgccttggatttaatatagaccattggtcaacatgaaaactgaagatagtgtctgatcatgactttgcaaagtaacagacgaagtgatcttcaggagagaataagatgaggaatttaggaagtatgataaggctttttcatcagacactgcagattgggagaaaatggagctgaccatggacaagttataaatttgcctagcattgataaagtatcagctgaggctgaaaaccaccaattttaacaaaaatcagcatatttcttcagtattgtgtggtgcttatctccttgggagcagaaagcagagactggattaatccaaaatcagggataaactgaccaggaggagcagaggaataatgggccaagagtactgaggatgcaagtaaaagtgctcaaattactgtattgaccttgtaatcccaagctgatcggggaaggaaaaaaaaaaaacaggaga

SEQ ID NO: 40414 - DNA, 1361 bp, Homo sapiens
ctctgaagatgcaaaggtaagagcttagttaagcttagtttccaaactaaaggagtaaacctgttgatttacaggaataggaactgttgcatcgtttgaaatttacttttttttgttagatacacgaaaaaacttccagaacatctgggagaatatttaatggaaaatcgcttggttaaaacctgacacttttaacaggtatgtgttgttttagtactttatgattgagcatagcatttaatccacacctagactaaatcaaattttttttgtcagtgaacagcgttctgagtgtggacgagtagccagtgaagataatgaatgtcgaatgtgactgactagcagcttcattttgaagtaggttgtatggcttaaaagttctgtagtatttgtactataatacttgccttttagcattaccttggtttgtagtcagtgtcacagaagtgcagtttaatgtattatgtgtacatatacaaggtctgattggtctaatcaatgatgaaacctatcccgaagctgataacctgaagaaaaataagtacggattcggcttctgagattaagaccagtaattcagaggtggagtaaattttgttgccgtgattttataacagttgtgttataaaatcctgggttttttttttttctgccaacagtgagggtcgctgtctgcccattgatagaggccagattgtcttggaagttccaaagttgcaacgatttctgtaagtggagtttttctgtttgcttagagatcagtgaatattgtgtccttggtcttatctgtgatgatcttatcccgaacctgaacttctgttgaaaaaaaaaaacttttacggatctggcttctgagatggaccgttataaggacaatatttttttttaatacttttaatgcttttacatatgttgtaatgtttgtagtcttgtaagaatctcgtgtttttccttttctagggctagtgccacgaggtttacttgactgttgtgtgaaaagctgataagaaaaccatccagaaaaaagctcttcgttttacaaacatgaaaataaaacatgtaattttggattatgttcctttttgttattacttttaaataggtcctgaaataacatggggagcattaaatggaaaatccactaaccagccttgtaatcaaattactgtgagtgaatgtttcgggtttgtgcagggtacaatgtaagggtttttggatcagtgtaagagtggagagacaggaattagaagtaattgttactaagcaaatcatggaatatttagttttgatgtaactataattttgaaagcctggatgcttaagttgagaaatgggggaatgagatacagaaaataaggagc

SEQ ID NO: 40415 - DNA, 1030 bp, Homo sapiens
agtgcttgtccctacacatacaacgccagacttccgtggattgttgatgttagtgattttgtgttgtctttcctccctgtttggttattagctttatgtattatgttttctaaggtactctcgacccacctcatgatcctactccatagctcctaacctgttaaagcagagaaagaacttgaggttataggggaaaaaaagatacttagctggtaacattaacaacctaaagcagcaggatctgacttgatagtggcagttccagaaaaaaggaaagggctttctgaagactaatttcctccattttcagaagtcttttttcatttacttttgggtttttggccggactgagatggtcaaggataacagaagtagttaactgcaagtatgaatagggactgagtctgaacttagttgaacaatgctatacatttactggaaaaacagctgacataaaactaaatataagcaagaagatcaagtttaatgggaataaaactgagaaagcaagataaactagactggtgtctaaagtttgatgttttcgaaaaatatgacaaaagaataaaacaatgctttcatgatttacctgcaaatcctgagcacaatacagcaatagctatagcgccaaaccctaataatggattttgttccacctgcaatattaattgttaaagttatttttagtgactaataaacagagttcatccaagagtccaaacaaataaatacaaaaacctgttacagtcttactaaaagtatattccacatcagacacagctattctacagaataagacaactaaacaaaaagaccattccagaaattaaccagggcacttggcttaagtgaaaaatgtgtccctcaaatcacagccatagtatatgcttaatataatatgtgcccactgtttcctaataccaataagcactctagcatgaacttttgaacaggccaagtcagcatactacttaattttaatttctattatcactctaatttaagagcttatagcatcaatcctgaaaat

SEQ ID NO: 40416 - DNA, 1086 bp, Homo sapiens
gtgtattatcttagtcctcagaataaccctgtcgaaaaatatactgttacctccactgtgtatggatattaaggagaccaaaattgtgtattataaggtcatgttcatcacttgcagctctgtgcccttgtatgactttttaatcttttgatgtttttaactttaaacttttgataagtttggaagagacttttggatgtgggtacctgaatgacttcaacactgcttgtttacaagagccacagtctgtttcaattcttcagcatcttctcaggtatgatgttttccagggatcatcaagtgtgcttctgcttatcaaaatggctattagcatttttgctgcccagtagagtcaacagtccagtagctgccttctgcctctagacttttcccaaaggtatgccttaaaaagtgattatttgcattttgaggacagagggcatagattaagccaatgcccaaggaggacagtctttgggtcttcagaatattatcactgatgaatagcgcacatgtctagctgcctctagctcacataaagccttataaaagcataaccttttttagttttagtttgagaaagagcatcttcttgctctctgtggtaagtgaaggaaaatacctgcctttgtgcagcttcccagagaccgtaagtccttcatttgcctcttggtttcggttcacaatctcaaatacatatatgtatgtgatgctcccatgctaggcaagacacccacacattttagctctgacgggcattgttggtgaagccaaacatgccagagattagtctctagaagggatgtggatggttatgaacaaggtggttttctttgattgccatatagtagtcagtggttctttcctggaatcagaaaaatttactcacatgtacaatagggaatgtacggaaaaataagccaactgggttttcttagcattgagggtagactttgctaatttatattttatattcttaaacatggctggaggctttttacattcaccagccatgatttaagtttttgctgtggactaggtctaggaaatagcaagatgatttagaaagtccctgccatcaaagaa

SEQ ID NO: 40417 - DNA, 1076 bp, Homo sapiens
tggtcatacaggaaagacaaaaatctgtagttttaatacttgggtactttgtggcatgttaaaaattatcccaatattgaatgttataataccatgaattagaaggagaatgtgtgacatttcatagttacaatgcagctgcatctcatttttcaactgggtatattaaagaatttatctctgagtaccttatccagagctacagatttaaaagctaagataaccaaatattaattacatcatacccattcataagagattcttggtcatattcttgtttttttccattgttgattaaagcttgaattggcactgctcattgcaacgtgggtaataaaaatagcttctggtttgctaatgttttagatattaaaattttaaaggtctgaatttattatgttgcttcagagttaccttttcgaatttctagaaaaggaacggctgtagtagatctctctgggaatggcgacccctcctcaatttgtactgtaatgcgaagtgatgggacttctctctatgcaaccaggtttgtagcctctgtgagggtcaacatttggttctaaatctgttgctttcagatgaaacactatgtacaattaattatgcattatcggattccacagctgatgacattattctataaactgtaaaactgaagtacttcataatcaactaaaagtattttacaatggcacgttggcaggaaatgtatactaaaagatgaccatattagctcaggggtttccttatgctgtaaagaacatcttacatgcacataaataccagaactcattgggatttggtaaagcaggctgagggagaaagcagccatgtcacatttttttttcccatccatctctgtgactgacctttgtggaagggccaatctctgttcatcagtaagaagtgggtttatcagcacctttatttctgggacaaagctaataggaaagagaagcactgctggcaaaagtgtctcccaggccagaattttatattaggtcacaaatcacttttgtaacacaaagtcatgatactttgttgttttatattaactaccataatttgttccaaac

SEQ ID NO: 40418 - DNA, 1026 bp, Homo sapiens
cccaactaattttttgattttttatagagacagggtctccctatgttgcccaggctggtctcaaactcttgggctcaaacagtcctcctgcctcaaactcccaaagtgctgggattataggtgtgagccaccacacccaacctattttttaattttttaaataacaatagggtcttgctatgctgtccaggcaggtctcaaactcctagcttcaagtgatcctcccacctcagcctcccaaagtattggaattacagacatgagccactgtgcctagccatatataggtgtaggttttgtgggtttttttgtggaggtgaagtctcactgttgctgaggctgtacaatattttaaatatttcaggggaatctgtcttcaaactccacagaaacctaagaatatatttctttctatgcagtttaatataatttcctgcctttagagactcaaaaatagtggaagatcaacatctatgttagaggttatttactgatgggtacacatatggaaggaataagggcaataaggtacttctgtgaataactaaaaagtcgaataataatggtgttgctttcattagtgttcttttgccgaatagattcactgggaaactgcatttaaagacaaaagaaggcaagatacacccactttgctatttgtaatagacgacaagaccattagagtattcagttgctcttttccttctccttttgcaggacagaaaatatgcaaagcctaaaatggcagcctacaggttattatatatgcaaattttatagactctgttttcattttaaaattacatttgtcactttggattactttcaaaaacaactgttagcataaatgaggaatttttttgagctttaagcaaatgttgatgttattctgtttctaaaagaaaatctgaatgtcaacaactcaatttatttaataattgaaagatgcctttgcttgccctgcaatgtcacaaatagcgtaggtggtaatacagagactctgccccatcgttatttctggtcacc

SEQ ID NO: 40419 - DNA, 1046 bp, Homo sapiens
gttttaatgcttaaataacaaaatagcaaaaaacaaaaagtttaaatttatatgagcctcctgccaattcaggaaatggatgacattggttacactgttttgtggaaacacaaaattgatttcaaaaccaaaagattcactgagaaactaattttaactgctatatatgttatgatttttaactttctaaaaataagtataaatatggggaagacctgaaagatgcaaaagtaaaaatagttatgtggggatgtataacctttcagatttttttgttcatttattttgtggtttttttgtcacttaggctggagtgcagtggcgcaatcttggctcactgcaacctctgcctcccaggttcaaaggattctcctgcctcagcctcccaagttgctgggattacaggcgtgcgccaccatgcctggctaatttttgtatttttagtagagacaaggtttctacttaataacaatttttgtcaaaattaaaaaacacgaataacaatttttgttaaaaattcacctcggtcatgtgagcacttagtggaatgttcaagactggaagttaaaacaagactatttctggccgggcatagtggctcacacctgtaatcctagcactttgggaggctgaagcaggcagatcatttaaggtcaggagttcgcgaccagcctggccaacatggtgaaaccccatctttactaaaaatacaaaaaatcagctggtgtgatggtgtgcacctgtaatcccagctactcaggaggctgaggtgggagaatcgcttgaacccgggaggcagaggttgcagtgagctgcgcaccactgcactacagcctgggtgacagagctaggttctgtctcaaaaaaaaaaagaaaagaaaaaagactatttcaataaatagagattactatatagtacttcatagttgtaatgcttcagtgtataatatacttacgattttcatttaacacatgtcatacagcaggtcaatttaaaaactgaaattaaaattatataatattagaattggaagggactttggagt

SEQ ID NO: 40420 - DNA, 1033 bp, Homo sapiens
gaaaagtgtgtcctctagttctcttagtcccttgtttgcttctatgatgacaataataagagtaattgttttgttttacttgttttagtgtctgtttcctctataagcttcatgaagacagaacatgtcttattcactcttatttcctcagcaccagcaaagtgcccgaaacataagtgtttaatgtgtatttgaagaatgaatacctgagtatctctgttgtgatctcatataaaatatgcagcttcactgaatgagttcataattttaaatctatggagatgacgtggtgtggtggctaaaggaactccatcttggatgctaatctgccatgttgacttttgattatccccagttccaggaatacctgtaagatttctattttatctactgtttatagtacttaagggcaggatttctattttatttactgtttatagtacttaaggacaggatttataattcttgcccttaagcaaatgataggctatgacatagcattcttgattttttctaaggggttgacttcggttgtcttagacatcccttctgaagcatggttaccccttctctatggtatataccatagagaagccctgggtcttggggtagataactgcacaaggattcatcatcttgtctcttagcttcctgagatatgacttctgttcataaatccatattaaatgtttctttctgagaagctgggtttgtcagctgctttcttcagtctctcagcatcctcagtcttttgagggtagatttgtatagacctgcttaccatggagcacttaataatggtgggaaggattagaattctagcttcactatttgtgtaactaactcttggcaagtcagctgtaagatgatggttttgattccaagtttacaggattgctgcaaggattaataatgatgttgaagattataataactactatttatgggatacctcacttgtacggtgccgtattttgctttgctttatagggctattaataaaatgtaatgagataaagataacagtgcttaa

SEQ ID NO: 40421 - DNA, 1050 bp, Homo sapiens
tcaaaaagagaattcaacaaaattactgagaatgtatggaggaaataggcagcataactttgcaagtcttttggttacttaaatacctaggggcaaaattgggaatcaagatctagtattcgtttggattttgacctgtattttgcactaattttctttttctcaccctttagatgtttcatgaatcacgtatcctgcatttgtgggctgccttgttccttgttgagttgttgcaagaggtcccaattatgacatgcagcaatgccaataccccttctgtgaatacaggttatttcaagctttcgtcagtggcaaccactcttaggcagcagcaactggttttggaaatttccctgatgtcagtaccacctggatgtggacctttgctacctgtattaataccagtggcctcattttgctgtatcattacaatttggcttcttatattaatgtttgaaaaggattaaagctggtattctagaacatgcccttcactggttgtgtaaataaaactgtagaatgacacttcagatgaagttagtgtgattttaattgtgcactacaaccgagctgtaaccagttactaattttagaatgtaatcccaggacaatattaagcaaatagcctgcagtgcttcctgtgaaatagtgaaggaggagggcatttctgtattccaggacttcttggggtttcagaatgggtttgtatgattttttttttttttgtagttttatttattctatcagtctttttaacaaatgtttattgctgcatttttttttttccagtgtatcattgttttactgcccttgtagtactggaatttagttggaagaataaaacatttacttctattttgcttgtttcttaatgtacagatggggttagtatttgaataaagttggtgttttaaaacgtaagcattttccaggaatcagtgaagttaattttctaagatttgagtgctgtttcaaaacactgagttctgattctaaatgccttcttctgctgggcgcggtggctcatgcctgtaatcccagcactttggg

SEQ ID NO: 40422 - DNA, 1749 bp, Homo sapiens
atttatgtaaatggtatctttaactggatatgtcttgccacttttttttcagtttaaataatgaaacaggcagtatctaaaatgtttaaggaacttatttgtcctcccagagtctctcaaaaattctaaaagttcttctcctagggaaataaagtgagaaaataagtgacaggattttgtagatatggtggttatctacgaaaaccaccagtattaaattttaaaaagaattattgtatgtaaatctttagctttcttttttgtgtgtcataaagacacggtccctctatgttgcccaggctggtctcgaactcttggcctctagtgatcctcccaccttgacctcccaaagtgccagggttacaggtgttgagccaccacacttgaccaatatctaacagttcttaaattaatgcatcattgtagaattgaatgttaaggctacactccactctatcagtctttttattgccacctaaaaatttcatttttgtttaatcttgctttggattttggttagtaaacttctagggatgtagtttcacattgataacctgttaacttgggagctatggagtatggaggtgtagtgaggaagtctggaaggggagtggaaacccctaggcagggattttctggaggggccagatggtaattattttgagttagaaatctttctgaaatgaatcatagtggcctaaaggatgtgccagatataattttactcatttgtgtgattgtggttcaagataattgcactgtggtatagtggttcttatttattgaggacctgtcatgtaccaatcactttacatggtctccccctcaccctaccctccagccccaagattcagaatgctgtagtattcttaggttttattgagcttaaaataattggccatggccatttaatgtatgatgactttttaagttcccatctactttgtcattttgttgacctattatcacttcagactgttgtgtgcttgaatatacataatctcccaagccccttcttatttatgggcttggaaaaggcataaaggcagtaaaggcagttggaaaagcctgttagtgtaatagttctatgtgatgaataaatgagctttaagtttggaactcttaagaatctgagtaaaataggtgttttggttcacagactccttgaccattattttgactgaaaaactttatttttgctagtcagtgctcagcaagaatattgttgaacagctgaattccagttggtgtgtatgtgctaagtgaatgtccccatttatgctgaaatgagttcctaccaaaatgtcagttttctggatattatttgaaaggagtattttgggtagattggtctactaaataatgttggaaagccaacctcttttttaatgtgaaagtttttatcttgccaaattttaacttttttattttagaacaaattctgtacaacataaaacaagagtataaacgaatgcagaagagaagacatttagaaacgagtttccaacagacagatccgtgttgtacttctgatgcacagccacatgcatttctcctcagtggaccagcttcaccaggtaataacatttcttgtcatttacaaagtttattatttagagtgggaaaagtctaatccaagttgtctttagtcatttaagctactgtatctcctctgagttttaaaaaaacatttatacaagtaatgcatgacatcttaaaaaataatatggtacaaaataaggagttacc

SEQ ID NO: 40423 - DNA, 1044 bp, Homo sapiens
tataattttttttttttttttcttctgagacggagtctcactctgtcacccaggctggagtgcagtggcacaatctcggctcactgcaacctctgcctcccgagttcaagtgattctcctgcctcagcctcccgagtagctgagattacaggctcgcaccaccacgcctggctaattttttgtatttttagtagagctgtggtttcgccatgttggccagactggtcttgaactcctgacctcaggcagtccgcccacttcagcctcccacagtactgggattacaggcatgagccactgcacctggccagaagccaatacatttgttttgtgatttttttgttgttgttacatagttttctgattttttttttcacatttgtttcttggctccatgtgttatttttcttctatccgtttgagagttgtgagttaaaactcctttccacctgcttatatgacatatttttatgttttgaaaaataaggatttttcagagtagactaaggctaaatagaatatgcaagatacttaatactgaagatgttcagtcatcatatcaacatcttttttttgagacagagtctcactctgttacccaggctggagtgcagtggcacaatcacaactcactgcagcttactgcagcgttggcctctcaggctcaggtgatcctctcacctgagtctcccaggtagctggaactacaggtgcatgctacatgcctggctaattttttgtggagatggggtttcaccatgttgtccaggctggtctcaaactcctggactcaaatgatccacccatctcagcctccgaaagtgccgggattacaggtgtgagccaccatgcctggccaccacaatatcaacatttttaaatgaaaaatcttatcttagttaccatagcattagcacctctttaaataactccattaatttaacctaaatctaaacgttctctaaagttcatcattaggatcttgaattatggaacctcttgacttttctagttccttaaataatgacaagtattcaagtacat

SEQ ID NO: 40424 - DNA, 1042 bp, Homo sapiens
ttggactcctggagtcaagcaatcctcctgcttcagtctgtcgaggtactaggactataggcacacacaaccacacttggctcccattattttctgaaatataaaattatttattttctggttactatctcatagtgtgaaagataagaataattacacagttattacttttctcacagcatccatctaatatattttatagtatatctatattatatctattattcaaattttgataattatacaaccttatttataagaaggagtattttataaataatgcttttttttctttgtaggttacttcctcagaatgttggcctcctgtatgttggaggttatgaaagaccctttgcacaaatcaaggtatgtttgttcattttcagtgtacttttcctggatgttctcttatctagaatccatcaaaaccttgctaataataatcaacatataaaaatatcgtgttccagcactttgggaggctaagacaggtggatcacttgagcccaggaggttgagaccatgctgggaaccctgtctctacaaaaagaaaaattttttgtcattagccaagttcagtggcatgtgcctatagtcccagctactctggaggctgaggtgggaagatcacttaagccccatgagtttgaggctgcagtgagccgtgatcacaccactgtactccagcctgggtgacagagtgagaccctgtctcaaaaaaaaaaaaaaaaaaaaaaaagtgaatgtgaggtgataatttcataagcttttgcatatttctgctgaagaaatctttcagcttttcaaaggaattgattattttaatattcttgccatagtaaaattgactttgaccgaaacagttcagtgattcatttagaagagtacatttagagattaatctttgagatcatcccttttgccattaaaaaaatgtttacaagtcgggtacggtggctcatgcctgcactaccagtgctttttgaggccgaggtgggagggtcagggctggaagattgcttgggcccagaagttcgagact

SEQ ID NO: 40425 - DNA, 1128 bp, Homo sapiens
tgcaaaggacatgatttccttcttttttatggctgcgtagtattccatggtgtatgtgtaccacattttctttatcgaatccactgttgatgggcacctatgtcgattccatgtcattgttattgtgaatagtgccacgatgaacaagtgagtgcatgtgtctttttggtaaaacaatgtcttttctttagatatatacccagtaaggggattgctgggtcaaatgatgattctgttttaagttctttcagaaatctccaaactattttccatgatggtcaaactaatttacgttctcatcaacagtgtacaagtgttccattttctctgcagcctaaccagcatctcataccagtcagaatggctattactaaaaagtcatttcatttcttttttttaaaaattttactttaagttccggaatgcgtgtgcagaacgtgcaggtttgttacataggtatatgtgtgccatggtagtttgcagcacctattgacccatccttgcctacgttccctcccctcgtcctccacccctcaacaggccttggtgtgtgttgttcccctccttgtgtccatgtgttctcattgttcaccttccacttatgagtgagaacatgcagtgtttggttttctgttcctgtgttagtttgctgagggtgatggcttccagcttcatccatgtccctgcaaaggacatgatctcattcatttttatggctgcatcttattcttattcttttcttttttctctttctttcctttcttgtttttttgtttttttgagacagggtgtctgttacccaggctggagtgcagtgatttgatcacagctcactgcagccttgacctcccagactcaagtgatcctctttacctcagcctctcgagtagctgggaccacaggtgtgtgctactatgcttggctaattttttaattttttgtagagacgaggtcttactatgttgtccatgctggtctcaaattctgggctcaagcgattctcctgcctcggcccccccaaagtgctaggattaaaggcatgagccaccatgcctgatcccgttttcattttttgatcgcttttaattctgctgttccctttctgagcaggtgtaaactctagagtag

SEQ ID NO: 40426 - DNA, 1043 bp, Homo sapiens
aaacagattcttctgcaggtcatctacagcatcaggtttagataagattgaaaacagacttgggttccagtttgtctccatcagttccagtttgttctcaggcattgcagtttgtcctattttatgtccaggctttcttcccaactgtctgccctgctgtcatagactttaggctcaccatcaaacacggggatacaggcttttatagacttcttcacaagctcccattaatggtctctggttagaagtatttttctgatcctccaactatctccttcaggatctttactccctcgcttctaccacagtagtataaggcctaactcttataataaactcctgattctatatcactggatggttctgcttcctagattaaagcgtaagtggtatattgagctgacagatttgagaaagaggagccatgattaattccatagggaagaatgtgggatgagtggtttgggaaaaaggttgaggtttataattgttcacagccatttgagatttatatgatgtatgtatgtgcaggacggactgataattaaatgggaatgtgatagatatcaccattcctgcttctttcaaattttgatgcccaccccctgccccaacacaatattgcttttggattactattttgccaggcaaaggaagttcctagagcttttctttatctctttctactataatgacccttaacccatgtgtaagagagtgcctatggggattctgccggttattaagtatgtctattccaattatacattcaggaataggagaaagtaccacagggtgagtctgtggactgactgggtctgctatgggtcaaacttgtgttaagacttcacccatcacctgatttctttaagtcttcactttgatgtgttgtgtcatagtagcgtgttgtgccccaagagttggcatcacttccctggaatcagtatagagtatttctgaaaggtctggatattaatttttctccatgacataatcattctagtacaggggtgcccaacccccaggccagaccagtataggtc

SEQ ID NO: 40427 - DNA, 1037 bp, Homo sapiens
tattgctacttctagtacactgccacattattgatttattttattgattcaacaatcctgttgaattctgttagttctcatcattgtctaattttacacattgaccaggacctctagtattgaattaagtattagttctagttagataagggagaagacatttataccttcttctcaacctcaaagggaatgtaactaaattttctccattaagtatgtttgtggtagatttctgttagatatcctttattgtgttaagaaatttctgattctgttcttccaataattctttttaaaatcataaacaggttttgggctttaacaccttttaaagcattaattttaaggcagtaatgcctcttcggtatctactaaggttatcatgtcattttcatttttacaccatttatgtagtaaattacactgatttttctcatgttgacccatccttgcattcctgggataaatgctacttgatcatgatatatataattttttaagcatacttttggatctaggtataattgcttcttgaggatttctgccaccttatttcttacagttcatttttctctctttttttttttttgagacagggtctcactttgttgcccaggctggtgtgcagtggcacaaacatggcttactgcagcctcgacctcctgggttcaagcaatcctcgcacttcaggtccccaagtagctgggactataggcgcgcaccaccacgccttgctaatttttgtatttttcgtagatacggggttttgccttgttgccgaggctggtctaaagctcctgagctcaagcaatccgcctgcctcagcctcgcaaagtgctgggattacaggtatgagccactgtacccggccaatttttctcattttttatattcagaataatgaaggtaatattttttattgttgaaaaaattatgtaagttgcacataatccatggtaatgcctatccatgatttaaaaaaaccaattaaatgagtgatttgtgctgaaaaatagaacagtctcttaccaaacagt

SEQ ID NO: 40428 - DNA, 1030 bp, Homo sapiens
ggggatgtataacacacactgaaacatacacaaatcataagtttgcaacttcagaatttatttatttttttgcatgtgaaggtccggttgttctatcaccacttgttgaaaagactattttcgtttcattgcttttgctgttttgtcaaagatcacttgactgtatttatgtggatctatttctgggttctattctgttccactgatccatttgtctgttcttttgccgatattatactgtcttgattactgtagctgtatagtaaattttgagtctggtagtgtcagttgttgctcttattcttctccttcaatattgtgctggctattttagatcgtttgcctctccatacaacctttaaaatcagtttgacaatatttagaacataactttctgggattttggttgggattgtgttgaatctgtagatcaaattgggaagactgacatcttgacaatattgagtcttcctatctatgaacatgtgctgtctctccatttatttagttcttctttggtttctttcgttggaattctgtagtttttctaatacagatttttatatgtagttgttatgttatccctaagtatttcatttttggagggtgctaatgtaaatgttattgtattttaaattttgaaattcacctggtatataggaaagtgattgatattttttctgtataccattgctggtatgtgggaaagtgattgagttttatatatttgtgtcctgaaacctggctataattgcttattagttccaggagtttttgtttattcttttcatactttctgcataggcaatcatatcatttgtgaaaaaagacaattttatttctaccttcccaatatttataccttttacttgtcttactttattagctagaacttcagtatgattttgaaaggagtgctgacagagaatatctttgtcctgttctgacattaatgagaaaatatttgattgttttttgattcttcctctcatattagccaaacatggagggctgggtaactggccaatgt

SEQ ID NO: 40429 - DNA, 1045 bp, Homo sapiens
agtttttcactagaaagacagtgttcttactatgtttttctttatacttagcttatgtaattccttaaaatcataggatatttcttttttaaaagcaattcttgctaggcgtggtggctcacacctgtaatcctggcactttggaaggccaaggcacttggatcgcttgtgcccaagagttcgagaccagcctgggcaacatggcaaaaccctgtctctacaaaaaatactagaaaattagtcgggcatggtggcacatgcctgtagttccagctattcaggaggcggaggtggaatgattgcttgagcctgggagtttgaggctacagtgagccaagattgtgccactgtacttcagcctgggtggcggagtgggacactgtctcgaaataaataaataataaaagcaattctaatttttagaattttgaatagtctcctctcctcactttcagttcttattattgttttttgtccttaatgtctcttactgaagtattttcggttgtagaatacaaaaggaaaacacactttatagcagaattggcataacatgtaagaccttagtaacaccagttataggataataactacaattgacaggttattgctgtggagatttttatctttgctaatgggatggtaaaatagtgatattacgaaccttacagcattttcagggaagtatagatcatttattttaagaatggtagcttttatgaagttttaaacaaaatttacagctataaaacatgcatactaattttgtagaaaaataatagaatttcatatgtgtatctttaaaatctcaaagatgattctgattttaggaatttattaatattgctctataactctttgttttgtttaatttgatctgttaaacacaataaagggataattgttcagtttttaactttaatatacagtcagaatacaacatccaaaatagtaataacaagctgtttttcaaattgcgattctatttacatttccagtttgaaggccaattcaaaaagaattatttgaacagactatatatgac

SEQ ID NO: 40430 - DNA, 1041 bp, Homo sapiens
tgactggagttcaaactaaaaatcatagctcaggaacttgtgttccaaagcctgaaaatttatgtgtgcagaagaatccctaaataccaagtgctaaataatttctctggtgtttctgcagatgcagaagctatccttttgtaaatcccgtcctctaaagctttttcttccttagtcttttaaatctgtttatacacatgtgtgcatagaaaatattttcttttgattgatactctacttgatttaaaagaaaaggtctgatactaagatgtgtgtgtgtgtgtgtgtgtaaaataaatacatcttcaccctgggataatacctattgtgtttaaacattaaatttaaaattctcaacttctgggcagtcagtgaaaggggaaatataatttcagttatcattattacatgatcataagagtaaaccatttcttttttctgaattctaacatttattagcttaagtcagcttttctcaaattgtaagtatagaataccaattctgtcaaattttaacagatatcaggattaagtttaggaaacaatggactaaataagatgaacagatttatttatatattttatcataactttaaatatcctaatatatatcttgacgttctaagagaaagatacagtggtttcctaacttatttgccttgaaatacccttttggtgaatatcagctttgcaaaatgccagcctaagtccttaacaacatgatgggttgtgtgtcttccatgccatttttgcagatgatgtcatcattgctttttatttgatcttcccttttgttgatttaaattccttttgaaacataatccaaggcaaagcttacttcttccaagtagcttagattctctctatccaccaggaattgctgcttttgaaaagcatgtgccagagggtcttgcgaactaagtattcctgttgtctgtgtgccagctggcctggcatttggtctaggagtctttcagatacacagtcagtccagactgaggctgaatttatttttcctagtgaaacctgagtccccacact

SEQ ID NO: 40431 - DNA, 1029 bp, Homo sapiens
aagtttgtattcctaacttaatgtctcaagtttgtatgtctaatttaatggtggaaagggaaggtggagaataggcttcagtgtaagaaaaaaaatggaattctttaggaaggataagtggatttttagaggaacaaataggaggtaagaaatgtttgtttttatgggggggaatggtcttttccatcttcttcgtggccataaactcctggagaggggatttatgatagttttactctcagtcttctttctgggagtgaagccacctagaagaaaggatttatggtagcttaattcccggaagtttctgcttttagtcagataaggaaagctctgaacagccacctttctgcatttgttgactctcaaatgtcttctggttaaaataatcttcataccagctctggggttccgagtgggttctcacagctgcctgagtgtcctcaccatatggcagccagctttacttatagcaaatgatctaagagaacacccaagataaaagtagtagtctgtttataatctaatctaatctagcccaagaggtgacatacaatccacttctgccatattctatttgttgtaacatataagtctagcccaaacttaaaggaggggaattaagctccatctcttgaggttaagagtgtcaaataattttgtggactttcaggacatatttttcaggaccatatagctttatacttaaaaaaaaaaaaactctgctattatttcagtagtgtcttgggaagaatcattctattgtatggaacattccattgtataagtgcatcatactttgaaaatttctgtgtggttgtaaatttagcttgttttgaaagttttgcttttataagaataccatgataatattattctaaataacttttttgaatgagtaattattcatctgatagcttattataggagtttattgctatggtctgtatactctagaatacatttatggaaatatgcatacattttctttggagcaaaatcctccagtatatttattattgtagcagt

SEQ ID NO: 40432 - DNA, 1041 bp, Homo sapiens
gtaatacttgttgaacacttaatgtgtattaggcattgttctgagtactttacatagaacatttatctcatttaatactcacaacgctgtaagatagcattgtgaataagtagctttttcaaggtcacagacacagttattgtaagtagcaggactgagatttgaatgcaagtgatctggccccagagcccagaatcctttttgccaggtcatgtcctcattattttttcaatattttgatagttatttttactgttttatgctaatagatgaatttttctgtcttaaaatatattttttctgataatgtcttctgtcttcctcataaaacattaaaaagaaattaaaaagttctccctgtgagaacttttatcccaccccttgggataatcaatattaagagttggatgtttggtttctcgagacattataccttcatcttcttacctgctgttttctttccttactttctgatcctccatataatgggatatgatataggctgttctcttataaataaataatagaaaaactctattatttttttttcaaattgctttgtgatggtaattcaaattgcattgctcctttcacttaatgggataataaatatatttgcagacaatatttactgctttaatagataactgttaagctactgtaagctttagaaggtctcaaagacaatacaagacactagaggaaagtaaaagtacaattcctactctcagcaggaaaatgaagtacaatttaagatgtagtaagagatataacaaaactatgtatagtaccagacaactaagtaagagatactaaagagctaataaagagcattacttgatactgtatatgaaatatgactgcttgttttgattttaagagtgtgatattgggtgttcatagatggatttttaaattttatataggaaataagtaagatatatttagtattgaatattgatatttagtattgagtagtgctgctgaccagatggaagaacatttgctttgacccatctcagcagtagagcttatctgtta

SEQ ID NO: 40433 - DNA, 1026 bp, Homo sapiens
acttgcagataactatttaactaataataaattatttgtggataattgattaacagcttggcacaaattcaatttagagcttcagcacatatctcatagccagataaattcccagttgattaaataagtgtaaataaaatttattttctgagaaaacaagatagcagaataaattaggttaggtatacctctggcacatgtttcctcagcattctttggatatttaggtagttggaccttgggtttaggagaagaatatggattgaaagtacagatttgggagacaatagtatgtgatagtaaagacagggatgtggacaggctgttgagtagaggaagcaatggtgactgagagtaggggaggtgggagaaaaccaggagaaatatctgtcattcaagctaagggaaagtaaaaatgtctccaaagaaaggttaaatcttatagagaattagtaagctaaggagtgaaaagtgtctgttgaatttagcaacaagatatttgggattgggttgggatgttctcagtttttgtatagtatagagtagggcagtgggagtaggttgaaagtgatgacacttttcctttaaacatttcctctctttcttcctttggctgttgttaacaaatgtctctcctgagggagattccaagacagcaaagagaacattattaagagttagtgaaagtaccttatttcatccaagagacaggtatggcagggctttttatctgtcagtgtctgcctgcctgcctgtctgtctcacattgaaattcaaatgtgagataattggcaaaaattgttcattaacttgtgtatttggaataaaaatgaagttggacttttcctatcagatagtgggactttcgatttggctgaggttttgctagtgagagttggtcaaatgagttttacatagcaagcatttttgtgtagattaaatcagccaaaactgcagttttgggattttgatgaaaatagacttcaagcatttgataaaataaaatcattttatttagccataata

SEQ ID NO: 40434 - DNA, 1005 bp, Homo sapiens
acatctcttgacataatgaaggtatttttggtttgagactttatttttgttaagtacagtcttttctgattcttatattgatataactatgtattcaagtaatggactccttgtaattaattctgatagttctctttgggtttataactgtggcacatgtccgatgctgtgcttggccccttacattcctaagacaccttctttattcatcttttgagtacatgtgttactaagttggaagagtatgacttacaggtatgttgcttactccttgaactgatgtctgagatcatttctttgaatacaacgatgaatgtattttcctcattatgaaaatatgcctgttgtacgtatattcttgtatacattttctctttacacacacacacacacacacacacacacacacacacacacagagctctctctcacataaattgcctccatcttctgtaatatttactaaatttctgtctaaaggatcactcatttctgttgtgatagccatgcagattttaattttaaggctagctgactctgtttatgaaatatatttctataaacatacttttttaactttcgatttttctttattttcacaaacagaaataatttgttgaaaagtgaaaataaatgtcagtgactttaatactcaattatagtatgttcacaataattccagaccgaagacattgctatttaaaatttatttttaaaattaattatttattttttatttttataaatagagatgggtctcactgtgttgcccaagctggtcttgaactctggggctcaagcagtcctcctgactcagcctcccaaagtgccgggattactggcatgagtcaccacatctggccactgtttagaattagtgatctttccattataaagatttaactattttatgctgaagtggccatattttcaaggagtgaaaccatctcatacataacaatgaaggtagtcagctgtagacttggaatgagatcacatatgggg

SEQ ID NO: 40435 - DNA, 1048 bp, Homo sapiens
taaataggggtccagtttaattcttctgcatatggttagccagttttcctagcacactttatcgaatagggagcccttttcccattgcttatttttgtgactttgttgaagatcgattagttgtaggtatgtggctttatttctgggttctctattctgttgcatttgtctgtgtgtcttttttttgtaggagtaccatgctcttttggttactgtagccttattagcatagtttgcggttggttgtaatatgatgccttcagctttgtcctttttgcttaggattgctgtgtctatttgggttctttttttggttccatattttataatagttttttttcttctgtgaaagaaaaatgctgttggtaatttgacaggaatggggttgaatctgcagattgctttggacaatatggacattttaacgatattgattctttcaatccatgagcatggaattttttttatttgtttgtgttgtctgtgatttctgtcatcagtgttttgtagttctcctagtacagatctttcacctccttggttgggtgtattcctaggtattttatttttttgtgtggctgttgtaaatggaatcgtgtttttcatttggctctcaggttgaacatcattggtttatagaaatgctattgatttttgtatgtagattttgtgttctgaaaatttactgaaatagagaacatatgatgtcctctcttcctatttggatgccttttatttctttcttttgcctgattgctcttgctagcacttctagtactatgctggataggagtggcgagagtgggcatccttgtctggttccttttcttaaggggaatggttccagcttttgtctgttcagtattatgttggctgtgggtttagcatagatggttcttattattttgaggtatgttcttcaatgcgtagtttgtttaggattattatcatgcaggaatgttggattttgtcaaatgcttgttttgcagccattgagatgatcatgtggtttttgttttgaattctgtttatgtgttaaatcacactt

SEQ ID NO: 40436 - DNA, 1028 bp, Homo sapiens
gctggggtggggattacaggccagagctataatcagccgtgggagtggtttttctaaactctgataattttattgccatgcttaaaattctttactatatctccattgcctttataatctttagtatgtttcacaggtttttttaggattttgaccctttcattttctccaactgcatttggcatttcttaccacagctcatattctagccattctgatttatttatagtttgccatatgtgcttttttgattaatatatttacatttgcacagattgttcctactgtctgcagttccattgtataaatatccttttttattgagagttgttcaatgactaaggtttttattctaaatattaatggtcattttattataccaggaatgtagaaattggtgatttggctcaattgatagttgttttcaaaaaaattttaaaagtagcatgttttgtggtgggcaggcctatgcaaacctattctcaaagtccaaggaagcaaagaaaccaaagaaagagactgacaaatccggtttcttagaaagatatatttaatagggacttaaaaagaaaccagtcctgcttgtcaggtggcagtgagataagatggtggatccccaccattactcccaaggccagggcttataaaccacaggaaacaggtgattcagaagggttaagtagaacaagtaagtacaatcacatcaaggttgtttttacctttgggcaggatttatagttaggacatgctcttacacaaagaacagtagataaactagaaatcttagaggccttcccagaactggggttaatcagaagtcaacataggcagattagcatccaagatggagttgctttggcctccacatagtaaaaaatttttttggaaagaactcctaccataatatacaaatgagattaaagtgatttttttggcatatatttttaaatgtatcaaatgtataacctgggtttttgataaagttcattgctgagaacaaggccatattgatgaacacaaatatttgg

SEQ ID NO: 40437 - DNA, 1031 bp, Homo sapiens
ttgctttgttctcatctgtaaaacgaggaataataacaatacttattgttaggagtaaatgaatgaattatgtacagtattttaaacagtgtctagcatgtggtaaacatacacaattagctttaattattatggcttcttttgtttttttcttttcagtgaagtctaacttaaagttgtcagttgaaaaggggatgttttaggaatgaggaaaagatgtaaaatatttatcataaaggagagctaatggtgtgtggtaggattgcctttgatattggtgattatgaagtatagtgtcacccatcttttgtgctgtgagatttgctctaggaagcctcagctacatatgtgtaggcacaaagaagtcaggtggttaagttcattgaggtctggatttttctcaggtgagtgtgactgggtaatgggggcagagcaaggaggttaagggtatttacaggggactaattatgttgatccactgtgggctctgatgttggataagaaggaaagggaaccctgaaagagctgatggaaataggattggacttctgaggcagtagtaagagggagagaaagtctgatgggatgaatcttcttatttatttatttattatgtttattgctcatgatttatattttcctaatagaatataaacactatgagggcagggcttttctgttttttgtttgtgtgtgtgttttttttttccttttcactaatgtaatccgtgcgcctagaacaatgcctggtacatagtacatacccactatatatctgttaaactaaatgaagtaaaagaaacctaaatcagatgttggtggaggtggtgagaagtggtcagattctggatgtattttgaaggtggagctacgggatttgctgatggattggatgttgggtgtgagaaaaggagaataggcaaggataacctaaaaggttttggtcttgagctgctaaaagaatgatgttactatttgctgagatagggaagaccatgaagggagcaggttttagagtttgagtattaaga

SEQ ID NO: 40438 - DNA, 1054 bp, Homo sapiens
aggagggagggagggaagaagggagagagggaaggaaagaaggaaagaggaaggaaggaaggaaggaaaatttaaaatatttattgtgacagaaataaaaatttgaaattgaaaaatataagcacatttaagacaatctcccagaaagtaaaatttaaggatggagaatttgaaaagaaggaaaagagaaagaagatctgtccaggaggcccaatatttcaaataggaatttcagacagagaaaacagagtaaatgaagagaggaaattaacaaaaaaataatttatgcaaatacatcagaactgaaaaacgtgagtctgcaggttgaagtagctcactgagtgctcagcacatgtgtgaaatgagtcctacatcaagaaatgtaataataaaaagagatgatcattaacacctttttaaaattgcttcttggctttttgcctaagatcaagtacagtgtctcttcttatcagtttaatatctgatacgtcctttgtctgaggacaatatattaaatggatttttggagcagggagatggaataggagcatgctccatccactccacacatagacctggtattgcagtacctccaggatctgtgctctctcaccccacatgctataaactaaaaaaaagaggctgggcgtggtggcttatgcttgtaatcccagcactctgggaggctgaggtgggttgatcacttgaggtcaggagtttgagaccagcctaaccaacatggagaaacccagtctctagttaaaatataaaaattagctgggtgtgatggcatgcccctgtaatcccagctactcagggaggttgaggcaggagaatagtttgaacttgggaggcggaggttgcagtgagctgagatcatgccactgcactccagcgtgggtgacagaatgagacttcgtctcaaaagaaagaaaagaaaggaaggaaggaaggaaggaaggaaggaagaaaaaaaattaaaatattattatttatttatttttgcagtttaaaacttatgcattgtttatttctggaattttcttttaatatt

SEQ ID NO: 40439 - DNA, 1044 bp, Homo sapiens
aatgtgttattaaattcctgggcccccttggcgataataaatctttctctggtattctgctgaagaaaattaccctgtatccacgagatccaatattatcctgctcagttagttggctaaaaaaaggggagaaggggggattggagagcaaaagcaataggtgacatttgtagagcaattactctgtgctaggcactgttccaagggcttagcatttgttaactcatttaatcctcacagcaaactatgaggtggttaatgtggttatttatcttcattttacagatgtatgtccaagattatagagctagtaagtagtggacccactgtagaacagaagccagagtcagcctccagtggctgactttcagccaccatggtctattgcttgtgtaaacagacatgcaaattcataaatgcatctccagtttatctattcaaatcagaacccacaacactcattttgaataaattttactgcagcaactctgcctgctgacatcagtagaacccatgtttgccctcctcaggcatcaataaacagcaacagaaaagggatgcatataatttcatatagaagctgctatttatattgctttgcaggaattaacaaagctgccacttgaggtagaggaaagacagattcatttcaagctctgttccttgtgtatatatgtgggtgggtgggtgggtatacatgcccacaggcacgtatgtattcagtttctactgttgacaccttgtatttcttgctcatggtattttgcacccttgaattcatttatttgataaactgtgataacttgctgaccgtttatcttcccctccaggctttaaactcttttgttttcccactgcattccccagcacctaacatcttatggtcagcatttcctctgtgttaataaatatttgttggctgattattcttcttgaatctaataaactaactgaataatggcagcaattaaccattaaacgacactgactaccaatagacattgttatgcttcttcctagacttctcagtcctttatgtggagc

SEQ ID NO: 40440 - DNA, 1048 bp, Homo sapiens
aaagtcttctccaactttcattcaataagtatttatttatcctttcattcatcactcctctgaaaatcacacctctctcagagcctttctccccatgtctttcctcactaacatctagttaggtgatactgagtccttaggtttcgtcctggcctcttgaatgtcttctcttttagattctttttttttttttaacttgagatagggtctcactctgtcacccaggctggagtccaatagcatgatcacagctcactgcagccttgatgtcccacactcaaatgatcctcccacgtcagcctcctgagtagctgagactatagtcacacataccacgcttggctaaattttttttatttttattttttgtagagacagggtttcactttgttgcccaggctggtctcaaactcctggcctcaagtgaccttcctaccttagcctcccaagtgctgggattacagacatgagtcaccatgcctggcctcttttagattcttaactgagcctagctccatactaggcacagggtaggacattagtaaatcctctcccctcccctcccctcccccactccttccctcctccccttccccctcccctctccttcccccctctccttcccccttcccctccccacccctcttccctccccatcccttcccccctcccctccccacttccctcccttcccccctcccctcccctctctcctcccccatcccctctcctcccccctccccccctctcctcccctcctctcctctttttttttcttttcttggggacagggtctcacactgtcacccaggctggcatgcagcaatgcagtcatagttcactgtggccttgaactcctgggctcaagtaatcttcctgtcttagcctcccaagtaggtaggactagaggcacatgccaccactcctggctaattttctttcttttctttttttggtgacagtgtctcactaagttgctcaagctggccttgaactcctggcctcaagtgatcctcctgcctcagtctcccagagtgctaggattaca

SEQ ID NO: 40441 - DNA, 1072 bp, Homo sapiens
tgggaggcattgtgaaaatacttccttcctttgctttattctcagtcctgtggtatttttagagtaatgcctgtgtgaaggggagcaactgaaaactccaatttcctgtgtatggcagggtgcacacacacacacacgtaaaataccaacataccagacaaacaaaaaacaaccacacaatgtgagggatataatcttttactctttatctgatgtgggattgtctttgatgtatgagtggaaagattaagtgaagacaatacagatagctggttaagggccagtgtactagcatgtggatatagtaaattttttcatttcataggtggggaaactttttgctttatggtttttttttggaatggacttgtgattatggatagagctgttgtgtaggatcacctcacagtagttgtctgtggtagttgtcagtagttgtctatggatctgctactgtagtagcagtagttgtctatggatcatgctacttgtctataatctgtcaatagttgtctatggatcaagctacttgacccgtgtttgggtctgctctggccaaggaagtagggtcttatagtacaaagtgaagaaatgtgtataaagcacctcctttggcagcttcttcatcagggggccattgacatgtgcagcaggtggtgggagtataagagactggtgcaaaagtacccactgcctccaccagaagtctaagagttacctatccatgccattggtgtcaactgcaccttcccactaatccactcaaggtttcatgtccaactcaggcccttctcgtaagctatagatacacagaacttatggtgactcaacatcttcatttcccatagagtgaaaaaaatctctgtaagtataaagacaaaactcatcagttttcttctcctcccctaaacttgcagtttaccctagtatttcatatctcagggatagacagcactcaggcacctatgggagtcattttttatttcttggtcgcttccttgctccatccctgccctgaaacacacaactcaatacacacacagaaacacatatatctaatcagtcactgttg

SEQ ID NO: 40442 - DNA, 1031 bp, Homo sapiens
gttgctggcctcaagtgatcctccctgctcagcctcccgaagtgctgtgctgtgcctggcctcctggtgtgcctggtgcctgggtgtttttattgtgcagctagggttgagaactcctgaaccagagaaggatgtggggccttatgaactgtaggtggggtgaagagagtgtttattttgtttatgtctctgttcatgtattttcaaaaacttttcatgagggttgaaatagcaaacactgtttatggatatttactgtctttaaaaagcctcagttgtgaacttttacttaaaattccaaacacagcaagattactgttacattttgaaatgtgcaaagatatgtaagttaaggtttgtcaagaacaataggggcgggtgccagtggttcatgcctatgatcccagcactttgggaggccaaagtggaaggattgcttgagcctagaggttcaagaccatcctgggcaacatagtgagacctcatctctaggaaaaattcaaaaatgaggtgggaggattgcttgagcccaggaggttgagactgcaatgagctgtgattgagccttgcactcccacctgggtgacagagtgagaccctgcctcagaaataagaacaggatatgtctgaaatttcccaagttgagtatttcattgtacccttctcattgagccaagttcttttagctaagctttttaagacagtttgttgcacataaaagcagagaatcttgaggctctcacatctcatattcaaattgccatttaaaaatcgttcctttgctcctttgtttttattacttttccccttgcttgtgacattggtctttccttgaggaaattgactcctggttttactgcactagtggttcactctctctgcagaagcagcagagggcactactcagaggttttcctgctcctggaaaccgagacggtgccctccccgccctccccttgcagttagttgtataactagtttgaagaatttaatccttggccggaatcctaattcttcctttggacgcggct

SEQ ID NO: 40443 - DNA, 1025 bp, Homo sapiens
tcttttaagtcccaacaaattcttcatttttgtatttgttgtgcttttctttctaaattttattattgttattttagttttcatgggtattgaagttttattttaataaaatccagtttaccaatttttgggggagggtgtcatatctaagaaatttttgcctaacgcaaagtcataaatattttaccctagaagtttcatagttttagatcttacagttagaccaagaccaattttgagttgatgtgagttgaattttttttttttttggcatatggatgtccagttggtccatcagtcatttggtgaaaatgactgtcctttcttcttggaggtggctttacctcttggtgaaaaatcatttgtctatgtaagtgtgggtttatttccctgtctgttccagtgatctgtttgtctatttgtctgtctttacaccaacactcacagtttggactggatttctaagtttctctgagatgggaaccatgttttacatattttttgtctaaccaacatttaccaagcaactactttgggcccattaacccacatatttattgtatgcataaaacagaaaccctaagagcacaactgaaagagaaaatgtggagttgaaatcacaatttaaggagtatttaatattttgaaacatttgtgtttggcaaataaagtgaaagggaatatcaaaggttttcagtgaacttgtgcatctttggaattaaacataaaacagcatgtcagttgtctctttttactttgtaaattttgttttatcttatttacttattttcattgacagattatagttctatcgatttaagttgttatttcttttcccttctttctttgttttagagttggggtcttgctattacccaggctgttctcaaacccctgggctcaagcagtccttctgcctcagcctcccaagtagctgggaccacaggcatgtccaacaaattgttgtttctttctttttgagacaggttcttaactctgttgcccaggctggagtgcagtggcac

SEQ ID NO: 40444 - DNA, 1047 bp, Homo sapiens
ctcttacagtgcagagtgacagaatggacacagaaaaacataggtgggtcagaacagatctcagtttgaacccagtagctactggctatagggtctctgggcaagtgatttgacctctctgcgctctgtcttctcaaatgtaaaaacgggtcaggcgcagtggctcatgcctataatcccaacactccgggaagccaaagtgggaggactgcttgagggcaggagtttaagagcagcctggcagacaaagcaagaccttgtctttatttttttattattatttttttttgagacagagtctcactctgtgccccaggctgaagtgcagtggcgtgatctcggctcactgcaagctccgcctcccgggttcacgccattctcctgcctcagcttcccgagtaactgggactacaggcgcccgccaccatgcctggctaattttgtttttgtatttttagtagagacggggtttcaccgtgctagccaggatggttttgatctcctgacctcatgatctgcccatcttgggctcccaaagtgctgggattacaggcatgagccaccgcacccggcctcgtctttatttttaaaaaagaaaaagaaagaaaaacggggagtcgttgggattcaccaagaaaaaataggtggctggcatgcagtggactgtcagtcactgtcaggtgcttccctacctgccttcaggtggcttaattggcagggggtgtttaacagaatacagatctttgagttgatggaaaccttcaatctctggtccgtaatagttaaaaatgtaaaagagtccttagaccaagaagtctgagaaccacttccccgagtcatttctaaagctaaattcagattcaccaggaaatcaagtatggtgaaagacagtgactatacccattgctcacctgatgtatggactcttaatacagcaccaggatcagcctaaaatgtactttcagagcgttcgtgaaccacaccaatcaaaatgacaagtgacactcagaggtcacccaaacccaaaataagaatcagcaaaattcc

SEQ ID NO: 40445 - DNA, 1095 bp, Homo sapiens
tttctgatatagttctacagtctgatctgactacatatatatgaatggattttaaattggtttttaaaattttttacctacaagaggttactcttcatgtaggtccaaaaaagaagaaagaaaaattcatggaccatatttctcaaggtcactttctttctttttttttttttttttaaagacagggtcttgctctgttgcttaggctggagtgcagtggcatgatcatagctcactgtggcctcaaccttctgggcttaagcagtacagtcctcccacttcagcctcctgagtagctgggaccataggtgtgtgtcaccatgcccggctaaattgtttttttttttttttttgaagacagggttacagggtttcactctgttgcccaggtggctcactgtagcctcaactttcctgggctcaggtgatcctcctacctcagcctcccaagtagctgggaccacagatgtggggtcttgctgtgttgcctgggctactcttgaattcctggactcaagtgatcctccctccttggcctcccaaagtgctgggattacaggtgtgagctaccacgcctggccctcaaggtcactttttattcgatgtctacagcagaccattcctatcagtgtaatggattctaggtttcaacatttgtggtaccaggccaccaaagcctttgggtttgttgtgactatagtagccttactgatgttattcctctacttgccaaacaaaaaaatgttttctttgggaatcttgatgcaaaaaatagttgagaggctctggtttagaggatattctgattcctaaaatcattaactttctaattcacagcttgcatttgaatctttggctgtgattggaaatgctctaaccctcctggaagtgggtcagattgcagtgtgtaggtaaggttgctttgtaattcctttatgaaaacttttcacaacctgtttggttattttgatcacacagccaaaaaataactcctgttgtatttggttttcctcccccaagttttggagaatctgtaaagctgttacacccatttcatgagcagttcagtgattactctgggtcccagattctacg

SEQ ID NO: 40446 - DNA, 1028 bp, Homo sapiens
caccgacaatgaagaaggagaaggtgcgtctttcagaaacaaagagaccggttagaactcacattagtgaacagtaattgatttctcttttgaaagctagctcagtgtcatggccaggtgataaatcacgtttggtaggctcaatcccagtctgagaaaatggtttgcctttcctttgtagtatttctcatgtgattatccctacagctcatcaaccagcaggtatttctcaaactactgtcatgtcctattctcgcttttggcactgctatgccctggtggtgcttcacacacagcactgtctcttcacagccattactgtgtatcccatctcatgggatggtgtaaacgctgtgcagtctgggtataccaagctgtcgtggagtccagttatagcttttttagggaaatgatggtttcagttattgattgtcatgtgtagtgaggaatgagactaaataatcccaagagaaatcgcatggcatatgacagtatttcgtgcctttgttgtccatttttcaaccctagtgaatcctttagggagtgttatctggtattagttgaaagcattgtgttggaggtgcccctgtaacagagggccccattcctgctgctgcttaatcagacagaaagatgtgagctggcctcgctgataaatgagtcagttacatagttataaaatctattttaaaaaatgtatatgtatatttttataatgctgtattagaacaaaaatagcaagttacaaaggaataaataagaggtgccatttatgtaaaaattaattttggaatctagttgcaaacaaagtcaattaccaagaaagcataaaattaagaaaattaaaatccactgagaatgtaatatgctgtctgcttttaaatagccagactcgttttgtaactaaggaacaattatttaaaattgtttgctaattaaataatagataatgggaaaaaaaaacccagtaggctggttgcagaggcttgtgtctgtaatcccaacactttggaaagccaaggtgggag

SEQ ID NO: 40447 - DNA, 1050 bp, Homo sapiens
gatcccaggaggttgaggctgcagtaagccatgattgtgccactgtactccaggctgggcaacatagtgagacactgtctaacaacataaaaaataattttttatagaagaaatatagaaaccaaggaagaatgaccaagattctcttgggccactgtctttcagcgataatagtgacaaaaatagtattaaagaattggataataaaagattgatgaattttttatcctacaaagaatatatattcttgcaaatgtctctgggactatttttacaattcccaataagaaaacctgaacaaaattctatactctgattaaaacaagtggaaactaactccagaaattttacaaattccatgtggctgtctctgttgtttctctttttttttcctctcccagatatatttttacaccattaaccttggcatttatatctcacagctgaagcaaacattggtaaagtttcatttatttatgtttaatacttctttatgtaggtggaagatacatttcagaagggtcaagaaaaagacaaagaggatcctgattcaaaatctgatattaagggcgaggataatgccattgagatgtcggaagattttgatgggaaaatgcatgatggggagcttgaagaacaaggtttcagattatctgtcacttcattcttgtttttgaaagcataaatattttatccaggaaattacatgttcctaataaggaacccaatataatcttttgaaacaagttggttactgtgcttaagtgcaaatgaaaacctcagcagctgcatgtgctatcaccacctccactgaggcagaagtccctggtgtctcatagattcttctcacattgatgttttagctgcctcgtgtgctagatgcagtggctcagtagtgaagcctgaaaggagatgatccctaatggaaaagggctttcaacaaaaggcaaattgttctgtagtgtttaaaataccttttattcctaattagaaaaatagtaggtgtttgttgtagatgatttggaacaaacatgtagaaaagaaatagat

SEQ ID NO: 40448 - DNA, 1003 bp, Homo sapiens
tctttatctctctctctgtatgtatgtattttagagactgggtcttgctctatcacccaggctggagtgcagtggcgcaatcatagctcactgcagcctcaaactcctgggctcaaacaatcctcccaagtagctgtgactgcatgtgcatgctaccacaccctgccgtttttatattttttacagagacagggtctcactatgtcacccaggctgtctcaaactcctgacctcaagtgatcctccctcctcggcctcccaaagcacagggattacaggtgtgagccactgtgcccagcctgtagtcttttaaaatatattttaatacatatattagtcctatttcattttttcagtcattcttatgcttttttctttcttccttttagtctgattagaagtagattctgatttttaaaagttcaattgctctaatgctatttataggactttgcagatattttggtgcagccaacgttggaggagaacaaaggaacttcagatgggcaagaagaggaagcaggcacaaacccagctctcctctcccagaattcaatgcaggcagtaatgctgatacaccagcaattgtgtctcaactttgctcgatccctctggtatcaacagactctgccgccacatgaagcaaagcattacctcagcctgtttctgtcttgctatcagactggggcatcgcttgtgacacacttctaccccctgatgggtatggtagtttacttttgttatgcccctgggaaatgaaagcaaatgcaaatagatgctgttgctactctgtaacaatcacactcatgaatttcctgttttcgcataattccttattggagtttccttggcttaaagaactgaagctgattcaagaaaattgatttaggattctgtaataagatggattttcatcagtgtacaaatgggccaagaaaaagatggatttttattgtttggatcctttggggtgagggattaagaaaataaggacaaggactta

SEQ ID NO: 40449 - DNA, 1088 bp, Homo sapiens
ttcatttattcaaaaatatcttgtgtatttactgtgtataaggccctgggctatgtgcctagggaagcgagaaggaaaatcaatggggaatctacttttgaaagagatcactgttgtatctgggtgaatgattgtgccgaaaggaaatgtgagtcaaaagcatttggagccccgtgcatggaaggaaagaagagtcaatgcagcatgtcagcctatccaccatctgaattctgtctctgcagcccatcagtgttggatcgtttgaatgctttgcttgaacccggaggtgtcctcactattagtgagagaggaatgatagatggatccactcccacgataacaccaaatcccaatttcaggtatttgtatctcttacatttctgcctcagaatctgacagcctcagtagcagaggtagacgttcagtaggacttccttatatattttatttataaactgaatcatggagaagttcacccatttattaattcacttaacaaatacttactgaggctttactatttgccaggcattgctgggctctggaaacacagcataaacaagaggggcaaggtccttgccttgcattggtgacgaaggtgggaagcagagataccagtcatgatccttttgcagtaatttaggcaacacatcacagtggcttagatgagggtggtcagatgggttggtttgctgatggacatgtgggttgagaaaaagaagaatcaaggatgacacctatgtttttggcttgagtaactgggtaaatggggttgccattcattgagaaagggaagactggtaaaggagcaggtttaatgtggggagggtctaccgggaatcagctgtttactttcagacatacatcagaggtgtaagataactagatggagatgttgatgggcattcaatatatgaatccagttgtttcaggagactacacttgcttcctgttctgctgtctgtaggtgagttagaataatgaattagtacagcctactctggggaatatctgaaggttaaatttttaaagttctcagcactaaaggtacactggatatatcatacacagttccttaggaaagtagg

SEQ ID NO: 40450 - DNA, 1039 bp, Homo sapiens
atacactaattgcaagcctttttttttttttttttttttgagactgggtttcactcttgttgcccaggctggagtgcaatggcataatcttggcttgctgcagcttcacctcccaggttcaagtgattctcctgccttagcctcccaagtagctgggattacaggcataagccaccagttccggctaattttttgtatttagtagaaacggggtttcaccatattggtcaggcagatctctactcctgaattcagatgatccacctgtctcagcctcccaaagtgctgggattacaggcgtgagccaccacgcccggctagcaagcctgttaaagctgcttcaaaatttaaaagttaaaagaacagactaaacgttctcctaccttggggtctcacaatatagagtagcttgctttagaggacataatttgcttatctatccaaatccccatgatcacataccttaaagcagtattgccctccagtagtaaagaactaagtcttcaccatctttacaggcaccaaggtgagaagcaggaggaggcagacaggtgatactccgtagaagaggaagtttttctgttttgttttgtttttaaataaatgtcaaattacaaagcattttgtctagaaagtataatcgtataaagagagaatattctgtgtttaagtgaaaataaaaatacctgtttgtaaaactagaattcccactgtaaggaattgtaataacgtgtgcattttagtttgtggtatttaaaatcctgtctcgctgaatgctcacagtagctataggcaggaggtgctgtcatggcatcttacaggtgaagatccaaggcttaaagttatggagtgtcacaggtagcagagccagctttccagtttaggccctctccagtttgtctgctgtttccttctagtaaacttcactgtttgaaaataaatgaatagatacatagatgcatgcactagaagcagtaacctccttgttgaaatgtgaacatgtggctggcccatagcacatgtgactttcacagccctt

SEQ ID NO: 40451 - DNA, 1056 bp, Homo sapiens
ctagtacaagagattttttctctacttgtaaagaatatttacatagaggaatacttttttaaaaactttttttctttctttctttctttctttctttctttctttctttttttttttttttttttttgagatagagtctccctctgtagcccaggctggagtgcagtggcacgatctcagctcactgtaacctctgcctcccgggtctgggttctggttcaagcagttctcctgcctcagcctcccaagtagctgggattacaggcaagcgccaccatgcctggctaatttttgtattttttgtagagatggtgtttcccatgttggccaggctggtcttaaactcctgaccttgtgatctgcccacctcagcctcccaaagtgctgggattacaagcatgagccaccatgcccggcaaacttttttagtgaggtgtaacaaacagtaaagcattttcccatgtaaagtatcacctagaccaagatttagaatatttccaataactcagtaggtctcttgacagtggaggtaatcactaccctgactactgtcactactaattgacttctgtctgattatcactactaatctgattgaacagcattttgcctgtccttgagtttcacctagctgacaccatgcagtatgtactttttgggttctgggtttttcactaaacctgatgtgagattcagtcatgccattatgtgtatcaggacttcattcttttttttctttttctttttatgtggtaatccactgtatgacgacaccatagtttgtttatccattctcttggttatggacatctggatcattttaattttttagttatgaacaaagcttctctgaacattcctgcttatgtctttcgacacacacatgttcattggtgtttggggatactagaagtcatattgctgaggcatagggcaggtatatggttaattgtaataggctgtcctagttcttcagatttctacctcaccagccgcgtatgagagtttctattgtttcatattctccatatcccttggtgttcccggtagacactt

SEQ ID NO: 40452 - DNA, 1050 bp, Homo sapiens
taggcaatccagagtataatagtgcaaaacctccttccttactacaacactggccctttttcggggaacatggtttatatgaaattcatgtttttgataaaaataattggagtgggcattttgatatgtgagagaagagaactggtacataaaccttctgggaatttgttttgattcagcttttttccaaacccacctactccacttcagttttaaaaccaatatataacaccattttgttctcattcctcataattttatgttcatatttcatccagttttaatgttgaaagtatgcagaacaagacagcttgttcaacaagtggctgttttcctactttatgcccttctctgaaagaatgtacaactgtgggttattccttgaacttctgtgtctttcagcctattccagagccaaaaggaggtcggcttatccaggttgaaggctactggattgcggtgggagacaaggagcctacaatagatgagacgtacattctgacatcttctgtgaagctgaacctgagagatatagtccgagttgtctctgcagggtgtgtgggcttttttctcgctgccccgaacttgatacaggcataggcattgatgacattttggtctaacttccttaactttcaaagagctttattcttattcattggccaactgaacaattacttacaaaagtcagtactataactttttcctggtagaaaactttgtttctagttgtgcaactttggagggagcactatggatgcagatgattttatctatctttaaagttatcttttgttattttgctgataaataccacagattattcagtaaatggctaaaagttctacttacagtttcttacaaatgttgccagcatagttggaattgctttccttagtattttttgaggaataatgtttacaaagatacttctcagtgtataggaataaaaatgttcttctgcttcttgcattttccagaaatgtaaaaaggggaaaaaaaaggaaaaaaaaatgctcttttaatgatgctgttaaatgatgtcgtcat

SEQ ID NO: 40453 - DNA, 1099 bp, Homo sapiens
aattagaaatgggcatctcctcaggctaggcgcggtggctcacgcctgtaatcccagcactttgggaggccgaggtgggcggatcatgagatcaggagttcgagaccatcctggccaacatggtgaaaccccatctctactaaaaaaaaaaaaaaatacaaaaattagccaggcacggtggcaggtgcctgtaatcccagctactcgggaggctgaggcagagaattgcctgaacccgggtggaggttgcagtgagccgagatcacgcactgcactccagcctgggcaacagagtgagactctgtctccaaaaaaaaaaaaaaaaaaaaaggaaatggcatctcctcattctgatctgattggttgctcccctcctttcctgctaccttgtctggcatggatggcagagagtaatgagttggtaggtcacttcctggaatgggtgaagattgggaactctttttgttttgtttttaaattttacacacaaatacaaagaggggaaggattgagaacccttactggtttcccaaataccttttatctaagcattgtcagaagaaagaagaaagttatcaggtatgcccagacttaagtgggtcaataaattctgatgcctttgatgtctttggcctgtggtcttttctttgttttttcttttctttcttttttttaaagggatctgctgaattggtgtaataggattgcccatagctttgacagttcatctttatcagcatcattaaatatttttcaagaggtaagatatagttttccagtcttttttgtcttggttctgtaaggctgttgacttccgttgttattttctgtcttttgattgccatcagacttttttcttttttccaagtatggtttgttattctttttttgttttttttttttgagacgaagtctctcgctcttgtccccaaggctggagtgcagtggcgtgatctcaggtcactgcagcctccaccttctgggttcaagcgattctcttgcctcagcctcccgagtagctggggttacaggcacctgccaccacccctggctaatttttgtatttttagtagaaacgaggtttcaccatgttggccag

SEQ ID NO: 40454 - DNA, 1050 bp, Homo sapiens
atgaggtctttgcagatgtaataaagtcaggatgagataattagatagggccttaatcaatatgactgtttctctttcgcccaggcttgagtgcagtggtgcaatctcagctcattgcaacctccgcctctttggttcaagcaattctcctgcctcagcagctgggattacaggtgtgtgccaccatgcccagctaatttttgtatttttagtagagatgtggtttcactatattggccaggctggtctctaactcccgacctcaagtgatctgtccacctcagcctccgagagtgctggaattacagccgtgagccaccacacccagcacaatatgactgttcttatgaggagagaaagacataaagggaagatggccatgtggcgatgacagaaatacatattggagtgataaatctgtgagacaaggaacagcagggattgatgatgacaaccagaagctaggaagaggcaaggaaggattctcccctataggtttcaaaggaatatggccttgctgacaccctgatcttggacttccaaactttagaattgtgagacaacacatttctgtttttttaatttgttttttgttttgttttgtgtttttgagacagagtctcactctgttgcccaggctagagtacagtggcacgatctcggttcactgcaccctctgcttcccgggttcaagcgattctcctgcctcagccttcctggtagctgggactacaggcacccgccaccatacccggctaatttttgtatttttagtagagacggggtttcaccgtattgctcaggctggtctcgaactcctgacctcaggtgatccacccacctcagcctcccaaaatgctgggattacaggcgtgagccactatacccggccttgtttttttttaagtcagtttgtggtattttgttatgacagctccaggaaattaatacatgtaagaaaaacattcagtcagggactgcccatattaatattttgatatataatcttccaaacttaattttttttttttttttttttttttttttttt

SEQ ID NO: 40455 - DNA, 1014 bp, Homo sapiens
cgaaattagccgggcgtggtggcgcatgcctataatcccagctactggggaggctgaggcaggagaatctcttgaacctgggaggcagaggttgtggtgagccgagatcgcgccattgcactccagcctgggcaacaacaatgaaactccgtctcaaaaaaaaaaaaaaatttttgtagagatggggagtctcactttgttgcccaggctggtcttgaactcttgggctcaagctatcctcccaccttggcctaccaaagtgttgggattgcaggtaggagccaccgcacccagcctaattgcttaggttttatagagtagtttaggaattgtttctctttagctgaaaatacacatttcagccgatacatgtaattataaataataacactgaggttatccttttaattaactctgctttgagaagggctaactgatcagttagcagttgccttatccttttaattaactctgctttgagaagggctaactgatcagttagcagttgaatatgacagtgtagtaatttcattactcaaaacagtaaaaactcaatatgttaagcatacagacatacaaatatgaagactttttttccttttctatttttgttggctaattattgggaaattgatgaattttgttatagcaaaggaacggaattggttagtatttttggtgggaagagaagagctgagccaccttaaaaatattttttcctggccgggtgcagtggctgagctcagacaatctacctgcctcggcctcccaaagtgctgggattataggtgtgagtaaccacacccggccaataaaaatgttttttcttggctgggcgcggtggctcacgcctgtaatcccagcactttagggggccaaggtgggcgaatcacgaggtcaggagtttgagaccagcctggccaacatagtgaaaccccgtctctactaaaaatacaaaaattagccgggtgtggtggcgcatgcctgtaatcccagctactcgggaggctgagg

SEQ ID NO: 40456 - DNA, 1044 bp, Homo sapiens
cgattcttctgtctcaacctcccgagtaactgggattacaggcgtgcgccaccatgcctggctaatattttgtatttttagtagagacagggtttcactgtgtgggtcaggctggtctcaaacccctgatctcaggtgatccacccgccttggcctcctaaagtgctgggattacaggcatgagccacagcgccctgccctgaagtattttttttgatgtatctcaagcccaattgttctggggagtggggccaattttgctcccagggacaaatctggagacctttatggttatcacaactattcattatgggggtgctactagcatctagtgcatcaaggccagggacgctgctaagcattctgttatgtatgggacaaccccttacaacagttatccgtcgtaaatggcagtggtgcaaaattaagaaagaaaccctgccccagactggttgtttactttctgctcagggcttgctatttcagcaacactaaactgcctgcaatgaccacaggttgttaccctctactattgttgactggagtcacctcccgttgttaatgtctgttgttattgtctgggccattccttgctgttacttgcctcattgactttgcatttcctttccttagaaggctacatctctcttctatgccctgctcagttaacttgtttgttctggaagactgcttttgaaatggtcttccccaggaagacttttctgactttaccctttcctcttcctcttaatctttgtttcaactaactgattctcagtagttgattgagagtatgtccagagaaggggattgtgtagctgtagtgtccaatacagtgtctgatatgcagtaggcagtaaatgtttattgactgtattaacagattaaggtactcccaaattgtgatacttttgtcaatgaaaagtgtcaaactctaaaatattctaagagatttattctgagctaaatgtgagtgaccatggctcatgacacagccccaggagatcctgagaaaatgtgcccaaggtggtcgggctacagctt

SEQ ID NO: 40457 - DNA, 1034 bp, Homo sapiens
ctctcacatctgatctttccgtgtgttaaggcagaagcaaggcacggtgggctgagactcacacgccccctctttcctccccggcctaacgcactcttctttctgtcccaccacgtgctgtgttcgcgagtccccatcactcctgcatccaaaccgactagatttttgtttccatttccctcccggaaaaggcgggacagcgaagactggcgtttccgccgctgaggggctgaggccgggagggcgcagcgtagccgtcccgagctgatgacgtcaaacgccgtgtgctcacccacgtgtggtgcccctctcccggtgtaggcgctggagctgaggacgcctttcctgcgggcgtagttgctggctgctcgggcactgggacctcggcggcttggggacgctggccgcgaagtagggagcgcaggtggccgctcggggtgagggccctgggtcatggagcacttcttgctggaggtggcagccgcgccgctgcggttaatcgcagccaagaacgagaagagccgcagtgagttgggcaggttcttggccaagcaggtaagacgtgaagggagagggaaagcgccggaacgactgggtcgccccactagtaagcttcctgcgctcccccgccgatactcgccgctttaagtggggagtggtgcagcctcaggtcaagctggccccctcctgtgggctggcgcaggtcgtggaggtttccgagcgtgtttgaggcgattggaaggagtcttttgtttttatctgggggagccttccagtacccttcccatcgcctctcacccctatgcaagcgctttggctgcttgtggcagaggtggccttcccaaaggaatgtggtttgtttttctgaaattgaggttgcgtttctgccgttttgacaagtgtacgtatcacctaagtgtgcgtagtgcagccactcctgttagtttggggaaccatcgacaaatactgattgcattcctgctgtgcgtaaggaacggtgtggcgctgtgagaaagtggatagataaattcgtt

SEQ ID NO: 40458 - DNA, 1089 bp, Homo sapiens
tgactgtaagctaagatgaaggccaaaaactgaccatccggcaatttggaggccatttgtgatttcgttgagcacttttgggggagcagtagaaacaaaaaccaatttgattgtgttctagagagaataaggctttttgagtgaaagggaacagagaagtagatcagtagctggagggaaacggtgtcaaaagaggtttcatttggttttttattttaagtaggaagaaatcccaacatgtttgtactctgtggtgaagattaccattgctcacccacacccagttttcctctttcctagacacacaggaagactaaatttgtaatcaggtaggccatatgactagatctagctgatgaaatgtgaggtgaggactctgctccaaggcagtcaaaagtaggtataagctctttatgctttgtcccatccacttagctggtgtcaaaggactctagagtgatgaagctgtagcctaggtccctgagtcactgttggaagagagccagcaaaatccatctgactcaaatcagactctgacatgatgagaaataaacttttaagttaattaagcactcaagatttggtgtttctggatgtgaaggcaatctggctgcaacatctgtcaccccaacatcgccaggttgattgggctgatctggctggctcagtgggtgtcgtttccctccctcactgctccacgtgtgtccctcctgaagctgcaggcttggttgaagaggacgaccttccctgatagaggaggaccgttcttcattcacaagtatatacatagctgtgctgcctgctagaagctccaaacaatctctcaagatgtggtgttttatctgttagcacagcaaagcctaacctgtcctaatacctgggctgaagggaaagttccaaaagagagagaaaacttgatgatacaggagacagaagttcaattgccttcagtatgcaacagaggatgggatctactaaccaaatggccagactcaataagtcacatcctaatctgaaaatgatggattggggctggatgatctctgagatcctagcctatgtcacacaggtttacagtccttgaacttg

SEQ ID NO: 40459 - DNA, 1055 bp, Homo sapiens
ctagttcacttacccttcaggttttgagtggttcagcctaagtttggcacagtcctagatgtgggatctgaatcattgctatgatttctgtctttcagatggtgtaaggatcactagatttcccttgagagtaaaagatcgaaagcattcacagcaccttctttgcttgggggaaaaataaaagcaactagtaattttcaccattaattcagtaagattctaagaagtgtaaacttgcttttctcaccgttgttgaaaacagcccactcaggtttcttaatcacatcagtgaatacggttattttggcactttgggaacactagtagctggacctggtctgtccagagatgacatttaattggatggtttaagttgtaggaccccaaaagatgggcttcacaatggcaaaccattaaatggtcatcctttgaaccatatatacactacctcttggttcatcatcctgacttccgtcattcctatgggactaaggataatactttgtgttcgggcagaatcattccctgtgtaccaccagcgcggtgtgcatctcttgggccaccaccaacagttacacaagctttgtactttgtaactcccaggagtacaactcacatccatagtttttgcaaatagattccctagagttgtgtggtgtttgactaagcagctcttcacagtgatcttaggagaaaccaaagaccccatcacccagatatgatgctgatggttacaaccagtattaaatcacagaagtcacaaaccagacgccttcaggggcctggcaaataatataaatgagtgaagtaggttgtatataggacagtaggaagtgatggggcaagcacctgctccaccaaaaggcatctaaattcaacaaaaaacaagaagccaggtgcagtagagtgcacctgtagccccagctactcaggaggctgacacaggaggatcccttgagcccagcagttcgagacaagcctgggcaacatagcaagaccccatctttaaaaaaataataacttgggaggccgaggcgagcagattatgaggtcag

SEQ ID NO: 40460 - DNA, 1050 bp, Homo sapiens
ggtgagggaggttatgagacatggccaaaatggcttttataaagacccactcctgttataacagactcactccctcattaatccattaatgaagacagaaccctcatgacccaatcacctcctaaaggtcccacctctcaacactgctgtcgcaaggattaagttgccaacacatgaacttttgggggacacattcaaaccataacagtgagcttggatagatgaactaccaggaagcaacaatttatttcaaccccagcccccaaacatgatcctcccctggagttttcccttacagtaaatgacaccctcattcatgtaattgcagaagctgaaattctcaaagttacccttaactcttttcattctctctcaccccacatccagtccattagcaaatcctatcaactgtacctctctgtacctttgaaattcatgccaaatcaggccgtggttgccactcttatgcttcctcactagtccaagccatcatcatcactcacctagactgttacaagagctacccaacaagcctttctacatctcttctgacccatattctatgcaaaaacaaatattgttattgtgaactgcttttaagttggaagagcaacttaggtcagtataaattaaatgaatgcctattaaagattataggtatgtatgttttgagcagaagaagggaaattattttatgtgaaagtttgtatctctttatggtttgtatgacttgtccttatgtttctgtgatattgtatatgtgagtatgtgtttttatgtgctcatgtgtggtttccttactgatggaaagacagagaccccttcatgtttattctcacagtagcccacactgtgcctggtgcacctggtcaatacaccatgaatggcagcaaaaggattattcttggctgggcacagtggtcgtgcctgtaattccagcactttgggaggccgaggtgagtggatgagcccaggagttcagtcaataccagcctgggcaacatggccaaaccctgtctctaccaaaaaaaaaaaatacaaaaaactagc

SEQ ID NO: 40461 - DNA, 1126 bp, Homo sapiens
atcaaaaataattaaatattcaggaataaatttaagaaaagaagtgcaagacttgaacactgaaaattacagaatactatagaaagaaattaaggaaacataaataaatggaaagacatccaatgttcatagatcagaagacttgttaagatggcaaaactatccaaacctatatagtcaacacaatccctatcaaaattgcagcatttttgcagaaattgacaggctgattttaaaattcatatggaaatgcaagggacccagaatagctaaaacaatcttgcaaaagaggaacaaaattggaggactcacacttccttttttcaaaacatcctataagatagtgtagtcttgaatacagtacacgtatgctcaaagttttcaacaagggttccagaacaatttgatgaggaaagaacagtcttttcaacatatagtgccaggacaacaggatattcacacacagaagaatgaacttggacttataccttacaccatatacaaaaattaactcaaaatggatcacaaaaataaatgcaagcaaaaattctaaaactcttagaagaaaatatagggatacatttttgtgaccttgcgttaggcagtggattcttagatataacaccacaagtacaaaagacaaaagaaaaattagataaatgggacttcataaaattaaaaacttcatgcttaaaggaaaccattaagaaagtgaaaagatggtccacagatgggagaaaatacttacaaatcatgtatctgacaaaggatgtgtatccagaatatataaagaattcttacagctcaatgctcaaaagacaacccagacaagtaatggacaactaaaatatgcatttctcagaaaaagatatacaaatggccagtaagtgaatgaaaagatgttcagcatcattggtcattagggaaatgcaaatcaaaattatagtgagttaccactttacccccactaggatggttaaagtctaaaagacagtaataagtgttggtgaggatgtggagaaattggaacccttatacattgctggtgggattgtcctgctacagccattttggaaaacagttcctcaaaatgttaaatacagagttaccatttgtcccagtatat

SEQ ID NO: 40462 - DNA, 1809 bp, Homo sapiens
ttgcaaaaggatgggaagttgctctagcccttgcatggcattctcaggttatctattcttagtttagtttccttttccaaaaatgatgtttattatatagtcttcgaatggaacatatcgctgacacctactgccatgtgtttatagttaaacataactagcctcccttcttacaagaccaagaggttcatccagaatgtttccctttagaagtcctaagaaggctctcctggttggctttccagcccataacagtgatagattttgcagccttcttagtctagccatgtggagaaacctgatgttttgggtaattcacccctttaaacatgtgctttgtgttttggtggtggttgtttggggctgcggtgtcttaggcatggagcttattatatccatataaattacagatcgcagacactccgcctcaaatagcattggatttatgatccctagctctccctttgcagtgccccttctcctcatgtctgctgtgcaacctgacttatggttgagcctgcttcaagttcttcctgccagtttgtccccttttccgcagtctgccttggtagctgactgggaggggccagcatgtgggttatcccattgtctgtggctgtacacaagaggctctcagtgggtctctttctacggacaggaccctgccaaagtaacacttgtgcttcctgtccagtactgactaacgcagtgctattcaaaaggcaggctagaactagggccatcagaatgaacacgttttgagcattggcagatatacttcctcccttcctggcctgttgttccccatcactcaccagattcagaaggtgcagtgctccttgggagcaaggctggggcgcttagagagagggtcccttaaagaggaagggggctaccctggctcattatgaactttttgggttctgaacctaccactcattattctgaattgtgcagcacatgtctgtcacctcctagtatagagtggccttgagaaagtcacctactccttctaggtctcagtttctcatctataaaaggagtagattactcttcaaatgaccttcaaaattgcttccacttctaattttgttttaagacactattgactacacttctcctaaaaattgatctttttgacgtgattgggctcttgagacttttttaccctttgtcctgatctgattctctccatgaatcaattttgttcatctcatctgtcactcttcctctgtatgctttgtaacctgcatttcctctacttctggcacttttttgccaatggaacctgcaattctactctgcaaatagctagggttgtttcctccctcactcccagccaaaatacagcttttatagtagtatctctgagtagggagttgggctattgagaaaaacatgctatagcccaaagtccctattttaaaagagatagagattggaatgatatgttctttttagggtgtggatgttttaggctccaatgaccataatcaaaatagatctataaccaagccgtaaaagggtaatatatgtgaattttctcataatatgaatcctaacacaaaagcagttacaatactttaagcgtaaattacatagtctgcaccatgattttttcaaaatttgtcttacgaacctcaaggaggaaaatgtaccccactggttaggaaagaattattttctctaggttccataacatagaaggagtgttttatttcctcactgccttgtgcctgggaatactgaaatgatagattcagccatgttttaataaaattcctctgtaagaatattagcatggagaga

SEQ ID NO: 40463 - DNA, 1032 bp, Homo sapiens
ctgtatcttccagtgcttctgagcacacctgtccagagagctctcaaaaaggtaatcagtgttcaagtttgagaatcctattctagcatggctaggaatgcttttcagttaacaccctaaggatttatatgtaagtgagtgcctaaggttgcttactgttttgttttcttaagaatctaatatattctcaagggaattttacttacactagggttaatcactttttcttcttgtgaaactagtgaaatccaaatgaatgaagtttaactcttagccaaaaacttagcttgtggttagagtgattttctacagtacagtaactttttttgttacatgttctactattgctgaaaaatgatatatttccaagagggagaaaaggatattgtgagtgcagaagacggttgtataacctgctttgcttatctcaaatggctagactttagtatttaattaaagaagtcttgcctctcctatcaagttagtcattattttgaaggttgaacgtgggttttgtaagtgactaattgctttgtatgttccttttcaattacaataagaagttatgaattctctacatttagaactgctaaaaattatttagatttacctgttgaataggtttattctttaaaaaaaaaaaaaggaatcgagaaaaaatttccactgtaaatttttggattctccaaggaatttgtaagaaatctcccatgaaaaagagagtgatagcaatttgaaaaggataagtagttgcagtctgaaaactcagtaggtagtgtgaaagcacattaatactgaaccataatatgtaatgtaagattttagtcattaagaaaccactatattgctgtcttattgttctgttactttaaaacacagtttttacctaaagacttaaaacccaccaatggtattataaatttccttttggtcaaaaaactgacagttgtactgtagcaaagctagtcatttgaacagtggccttttcatttataatggttatagtttttaatatgtcaaaatcttagcaag

SEQ ID NO: 40464 - DNA, 1070 bp, Homo sapiens
ttcctgactttttaatgatcaccattctaactggtgtgaggtggtatctcattgtggttttgatttgcatttctctaatgaccagtgatgatgagcattttttcataagtttgttggctgcattaatgtcttcttttgagaagtgtctgtctatatcctttgcccactttttgatggggttgttttttttcttgtaaatttgtttaagttctttgtagattctgggtattagccctttgtcagatgggtagattgcaaaaactttctcccatctgtaggttgcctgttcactctgctgatagtttcttttgctgtgcagaagctctttagtttaattagatcccatttgtcaattttggcttttgttgccattgcttttggtattttagtcctgaagtccttgcccatgcctatgtcctgaatggtattgcctaggttttcttctagggtttttatggttttagatcttacatttaagtctttaatccgcatgtggtattttttttggaatctgtatttcaaatagccaaggagtgatttgcaatttcctctctctatcatctgatttataaaaggaacgtagtaatattatgttcatagaatagtaatgtgcatggagtaggagtttatctttgaaaatgtaaattgcaaaatcattttcttagcagtgaaagatgttaatatggggaatacagctttggaattctccatgtcctggacttagttagcagacatgttattctccagtgtagacaaaggctgattactaagaactaaagatggttatggtgggcttgtggggttataagtacctttttcttttcctgttgaacattttctatagtcttaatatattataattaaaaatagtatatttttcatttttaaaagcactgcagttccagttaaacctccgattccatgtattatgggaaggtgcagatatataaatccctcctagatgcaacttaaaaaaataacacacaaattgagtatcaggaaccttacaatattttgctctcctctcagttccacctgtaaacacctttcagaggaaaaggctacaagtc

SEQ ID NO: 40465 - DNA, 1027 bp, Homo sapiens
ggctttggtgtacatctgccaaagtgatattctcatgtagaagaaaggattgggtgatagtccaataaatactttaccacagggaacttatgtgtcttctggggtctggccaaagtcatgagtgcaagctcccaaataaaaaaaaggtggcttctcacctcctcatgatcccagcttcctagcatagcactcttctctattttagcttatcaattccaaatgtgattgaaacaagtatgagaaattgatgttgcttcagcttctctgtgaactgaaacaaattcttgttgaaacatgatatctcctgcctcatggatcaaagagggatggtctggaagagaagcccccataaatatttgaggcttaatgaaggctatctgttgaataatacacctgtattattgtaaaaagttttaatttggcctcagagatactccccactaaagcagacaacaaaaaagtgagaaaatgaggctaggaattaataaaagatgtcaagaaagaccatttaaggacttcttagagacaggccataaatgtggttttgaactttttggcagctattatgaagacggaaagagaagtgtcatgggaatcaattttcaaaacttaaaagttctcttaaaattctagcagaaaaatagtttgcagctctacacaggtattggctagcattagtttaaagtggttgacatgcagccctactgcacacctctttatattccctttgtgtttaggattagaaaaactcacatagtatgatctatcatatgtctacttctggattatttcaagattgataatctggtttgtgtattatcttggtcttcatttctctttccttctgggcctgttgttcatctactggacatttcttttcttattaacatttctgctaaattttaaacagagaaaagaaaaataaatacacaattccagctatttgcagaggtgatttcaatgctttgtcagctaaagggaatttcaagagagatctttctacatcagtctactcataatagaactc

SEQ ID NO: 40466 - DNA, 1075 bp, Homo sapiens
ttaaggtaatgctagctgctgtaaaaataacttctcagttcaacaacatgtacatcattcagacagaaaattagtaagaaatgcaggacttgaattgcatttttggccaaatggacccaatagacatgtacagaattttccatccaacagcagcagaatgtaaagtttttctagagtatacatagaacattctccaggatagaccatatgttaggccacaaaatttaagattgaaattatgtctagtatcatttcagatataacttcaaaccacagtggtataaactagacatcagtgacaggaggaatcttgaaaaattcacaaatatctggaacataaacaacatgccccagaacaaccaatgggtcaaagaagaaattaaaagataaatttaaaaaatgccttgagacaaatgacaacggaaacacaatataccagaactgatgggatataggagaagcagttctgagaggaaagtttatagcaatatatgcctacattagaaaagaagaaagatctcaaatgaatagtgtgacattacacctcaaggaactagaaaaagaacaaactaaaaccagattagtagaaggaaagaaataaaaatcagaacaaacataaactaaatggataatagaaaagccacaggaagaatcaataaacttaagagttgggtttttttttaagtaaaattggcaaacccatagatagtctaacaaagaaaaaagaaaactcaagtaaaaccaaaaatgaaattgaagaaattacaacagacacctcgggaataaaaaggatgataagtccctattacgaacaattatatgccaacaaattgggtggcctagaggaaacagataaattcctaggaaaatacaacctaccaggattgactcaggaagaaatagaaagcctgtaacagaccaatcacaaatagattggagaagtaatgaaaaacctctcaacaaagacaagcccaggaacagatagcttcacagctgagttctaccagacattcaaagaattgataccagtacttcttaaactcttccaaaaaaatagaactagaaggaatacttt

SEQ ID NO: 40467 - DNA, 1033 bp, Homo sapiens
ccgccagcttgtcttgtgcgccctgtaacccactgcatgaacccgagtggcacttcaaccggattttcttgttggcacttttatctttcactgcttctgacttgcctgttgaggtttatgactaaggttgtgattaaaaattccctttttaggtatgaaaagtcttttcaattactttgtgttcctttttttgttttgttttgtttttgttgtgtgtggactttctgggttttgtaaaaatgaatcttaaaaaaatcttaatattatgtaagagttagataaaggttaagtagctaatatattctctcatcagggcatagaatcaacgtatgttcttggaagattaagtgtgtcaaaatgcattttatgatggaagcactgtcagttgtttagaataggcatggaaaagcccttttcagaatattgtcataaaatcagacttggaaaggttttcgtttattcagtctgtattcccctatctgtctgtttaatctctgcatattactgtccttggagcacggagaaacgtgagctacccttggaggtttatagtcccactggaagggaactaatgtttacgcctgattatatgataggagctttacatgttcttattcagtctttgaggaaaccttataaataagataataactttttcagagaaagaagctggggttctgagacattacccacttaggggcacccagaggaaagagcaagacctccagctccatcaccagtaatttccagcctgtgagcttccctccacactcagtaatttaaaaaacaacttgatttagggacatctagtaaatattctagaagttcagaggcagaaaagctagtttgcagctgaagtactcagatttcccactggctgagtgggaaatcagacccgagccttgacagtgggcagaatttgtatagaggagccaagagaagaagagtttccacactgtataagccaaatgatggaaggtgtaataacaaaggaagggtgagcacacaggtttaggagatgctgtgtgggcca

SEQ ID NO: 40468 - DNA, 1034 bp, Homo sapiens
gtgtatttgaactatgaaagtaggtttaaaagttacacttttctttaatgcccattgatgatttctttctttttttttttttaagacgaaatctagccctgtcacccaggctggagtgcagtggtgtgatctcggctcactgcagcctctgcctcctgggttcaaactgttctcctgcctcagcctcccaagtagctgggactaaaggtgcacaccaccatgcctggctaatttttttgtagagactgggtttcaccatattggccaggctggtctcgaacttctgacctcagatgttcaggccgccttggcctcccaaagtgctgggattacaggcgtgagccgctacgcccatccagaacaacaggcactggggcctactggagagtggagagtgggaggagggggaagagcagaaaaaaaaaaacctatcaggtactaggcttagtacctggatgacaaaataatctgtacgacaaacccccatgacgcaagttacccatatcacaaatctgcacatgtaaccctgaaggtaaaagttaagtaaataataaaatattttacatttatttaaaaattctaaaatggttgtattttaaaagtaaaaacaaattttggttaggatttgagcttattccatttttcttctaattttccaaattaaatgtaaaatgagagcatcccaggtagggggaggtaggggagaaaccaaataattttcaagtcatatttgaagagcaggtatgttctctcacgatttacagtgcaggtgcattttaatttaactgctttaaatgatgataaaaattgttcaagtagaacaaagcaaagttttagaagtgacttgtaaacagccattcttaattttttcctgttttctctccacttatgtgacttgcatgaatttctgaagcagtcctttcaaatgacactgctccaaacatgtgaattgcattcatcaacaaaatccagccttttcctttgtaggacaatgtggggtcacggggcaaggggtcttttctttgtctagcctg

SEQ ID NO: 40469 - DNA, 1074 bp, Homo sapiens
ctctaatattaatctcttaaatgaaattaaaaggcaaaagaacatgattgagcttaaatgatcatttcttcctgcagtgattcttggattgttttctcatgtatttgaaaaaaaaaaaatgaagaaaaataatggaaaatggaagtaattactccagctaaaaaaagcttggacttagatttctttttatgataccaaatgagaaataaaccaggcaaatcagaaggaagttaaagaagcaaatataaattcaacaagtgtcctaattatcctggatattggaatatttgattttccttacaatcccgttctagaatgcctgccgcctttcaacactttcaagagaatttcaacacttacagagtatttatattgttaacagtaattttgctaccaaaaccttcagaataactttaataataaaatgacactgaaataatagactatacaaactctatattttttcagttggtgttaaaataagtcacattttgataccagtacaagatgtcttttaaataaggatgtcatcagtctgatttttatagcattaatgttttatgaagaaaaagttcaaaatgaaagcattaattgctgtgattattagaattctatcatgactgtattgtagtttttgctctatttcagataagcaagatctaagaagttatcaaaactattctttaaaatgctaaagcaggtaactttttcttccattattttttcctcctaccactgagttttgtaatgaattccttgtgtatacaagcaatacaggtgaatactaaactgttatttttagcttcttcaaaagctattttagaaagcttcctggaaataaatgtcttctgtcatttaatttaaataaaaggagtgttaattgttcccaaatttgattacctagctgaaacagatattggattcagcatagtaatagtaaaataaaattggcagagaaaataactgtagactaggataaagcatgactcctccatagcattgttgcttgtatgtacatctgtcactccactgaaagggacctagtcactttaaagaggccttttatctcagcac

SEQ ID NO: 40470 - DNA, 1093 bp, Homo sapiens
tagaatgtgaaggataaaaacttcatgatattttcccatagccacatagaacccttcccagccttttttcatccttcctacacaaaaagaggatagaaaatgaaattttctgaaacttttattttaccattttatctgcttcgctaattatccaagtacagttacttaataaaaggattatgttatttgtatgattacactagaagtagatgagagttccatcccagcccataattatatttgattagtgtacctaagatgcaaaatgataaaccaagaataaaaattctcattaattgagcttccatcatcagctactaaggtatgaatttttccatcatgtgtaatattatgtggtatttgtttgtaggcaagaactagttgcagaactggaccaggatgaaaaggaccagcaaaatacatctcgcctggtacaggaacataaaaagcttttagatgaaaacaaaagcctttctacttactaccagcaatgcaaaaaacaactagaggtcatcagaagtcagcagcagaaacgacaaggcacttcatgattctctgggaccgttacattttgaaatatgcaaagaaagactttttttttaaggaaaggaaaaccttataatgacgattcatgagtgttagctttttggcgtgttctgaatgccaactgcctatatttgctgcatttttttcattgtttattttccttttctcatggtggacatacaattttactgtttcattgcataacatggtagcatctgtgacttgaatgagcagcactttgcaacttcaaaacagatgcagtgaactgtggctgtatatgcatgctcattgtgtgaaggctagcctaacagaacaggaggtatcaaactagctgctatgtgcaaacagcgtccattttttcatattagaggtggaacctcaagaatgactttattcttgtatctcatctcaaaatattaataatttttttcccaaaagatggtatataccaagttaaagacagggtattataaatttagagtgattggtggtatattacggaaatacggaacctttagggatagttccgtgtaagggctttgatgcc

SEQ ID NO: 40471 - DNA, 1033 bp, Homo sapiens
gtcccagctactcaggaggctactcaaggaggatcacttgagcccaggagtttgacgatacctccttgagcttttttactttatgtgtttatatgtacagcatataaattttgaattgttggccaggcacagtggcttatacctgcaatcccagtgctttgggaaactgtggagggaggatcacttgaggccaagaggtagagaccagcctgggaacgtagcaagaccctggctctacaaaatattttaaaattaactgggcatagttgtgtgtgcctgtagtcccagttactcgggaggctgagatggaaggatcgcttgagcccaggagtttgagggtacagtgagccatgatggtaccactgcactccagcctgggcaacagagcaagaccctgtctttaaaaacaaatctcactgtgatggtggatatgtcctttttccttgcagttttttgatttatctatttgtatgtacagcatataaattttgaatcgttggccaggcacagtggctcatgcctgtaatcccagcacttagggagactgaggcaagagggtcacttggggccaggagattgagagaagcctggtcaacatagtaagacccatttctacaaaaaaaaattagtttttaaaaaataaattttgaattgttgtattctgaattgaaccacttatcatattatctctttctctagtaattttttggaccctaaaatacattctctctgatattaatataggtaccttatttggggtagtttttgcctggttttctttttttatcctttaactttctgttttctctgtctctgtaaattagatatgtctcttataaatagcatttaattcatcctgacaatctgatttttttttaaatatcttaactggagagtaattcatttacatttattgtggttactgataagtttgctctcttatgttttatttctctttcttttctttcaagttttgagttgaataaatttattcttcattttattattttctttctggtttgggagttatata

SEQ ID NO: 40472 - DNA, 1032 bp, Homo sapiens
atagggatcctagggctaaggggtgctatactaagatgtactgtactagtttctgtgtatagccacctcactttcaataaaattctctatttgtggcatattaaatagggaagttaatctaactttataatgaatatttaggtggcctttctgccatattgtatagtctaccaagatcactttttgtaatctaaaaaattcaactctaagctaataaagctggtttattggaaagcaaataaaccacctgacggacctttccagtgaaagagccagaatttgttaaaattagtaaagaaatacgaaactttggcagcctaaattagaacatatattttaaaattacatgttcagtttaccatgaagcagtaatgtaatgctagtgtatcatgctatgcatttttttaaatcttgggtattttacacatgaagagaatggtgtcccataatgtgtaatattcaaaactcgtgaatctcaaaatttctaacatttaggttaagagaagtctccaggaaaatgtagtgttgattcttacatgaagacagtcttcaggaagttttaaagtagaaaataagagtagtgtaagtcaaggaaaactatgagcttaactgataagaaaaattacaggagtggctgtctgggacctaagccagcagtctctggaagaaacccgggataacttttaaataccagctcaggaaatcagttgtacttaaaagagcagcttttttgaagaggggctctgttttaatgacattactgtaaaaagaatggaactgacccctaagttgctttctatttgcggtgggcaggagtgcagatttagtatgcactggcaatgtgatgtattcttagaagtcattctaaaaagtggaatttgttctctattataagacatgaacgttccagaattcattacagaatgaaatactcaggatagcatatgcaggtttcagattccttgatcaggcatctgtttacatcatgctgtcctcatttctactactttttccatttacactaccatgtat

SEQ ID NO: 40473 - DNA, 2096 bp, Homo sapiens
tgacagactttgtgtttactgtgaatgtaccctaaactttggaaaatataataaatatttggtactagaaatatgtataagtatgactacaaaagcatatacatttcacactttgattcaataattattatttaatcattggattttactttatagcacacttcaagaaacacctaacttgaacatgtattcctgtgtttgtgtaattaaaacaaatacgacaacttactttttaacgcctttcttcctctcctccttcgttcccccacccccatcacagatcagtgatttcacttaggtagactgtttctatgaatatatttgaaattttgcttcctcattaccctgcagctttgtctctgttctttttatttttttctgctaattaaaaccagtgtgtaaaacatcttgtatttggtagttgtttgctctttaatctcgccttttctgagcatggatgaaaagttaggtagttctgcatgccattctgcatgaaatgttattaacatgaactatttgaaaatgagtctatttttgtagttaatcattttccgtgttactgtttgtggttgtttgcatgtatactgtatatatgtgtttttgcagcctattccaagcctaaacggggccaccgtaaaactgcttcatttggcaacattctggatgtccctgagatcgtcatatcaggtatcatagaccacctgagttggtctaatagctgtggaaccggaataatgatccctggtacttgtaaaatgcttcttgctccaatttttacaagacatgaaaatggataccttgcatgcagtaattagggagacagattgaaaaactacatttattctgaagcagtcttgaaaagatacctctgatctacaataagtgaggataaaatagaagagaaagtaaacctttttggagaagggagaacaccaacccagaattctaccaacttcctctctacttttaagtgagcacatgagctaaacccagaccttttttgcacccaacagaaagaggaaacaactaattaaaatttgttattttccttggctcctttccttcctcagttactgctttttgggtcccctctagactttctgtcctaacctctttctgttggtagcaagtgaatgtgaagttgagagaagagagttgctaaatagcattttgccttaacctggaaaacaaaaagtaaagctaaatgagatgtgctgttttgcagggtatcttgccaaagaatcatgtaaaatagttggtcaattctgatttttgtgtattatcaggagaatctcataaattacatgtttttatacctaacttacacatggtactttagtgtctaaaattggtaaactgctttatttcttatggtgatcatttcatagaggaatatgttaccatttttaatagaaacttaaatggcatattgaccttcagtattgattaatgtattatcaaaattatcatttatttatccctttaggcttttctctacctctttacccaaaatcttgataaggaaatacatattttccacacacgttcatgagtgcgagttggatgaattcttcagcatgctgtcctttgcctgtgattgtgtttttagcagtgttgataattctagttgaatacctaatggttattttctcctctactaaactgaaaactatgtaaggatagaatccatatctttgtgcattattttgttgttgttgcttattattgattgtatcagcagttgctggctcagtgcttcacatattaagcatattaacatagtgtttaataaatacatttattaaataaatgaacagacctattgagcatctcccctggtgagaaactagcatacaaaaatatgaattatactattcttaggtgccattttgtctgtataaaactatcttatattaattttcccctggttatcaaagtggtttcttattttacaacatcattactattgctattcaaagagtagagttaacccatttttcacatggtaatttttatttattgaatctggactgcttcagaaattaacaaagagatcattttacatggagatcagtttacctccatgcggaaaggta

SEQ ID NO: 40474 - DNA, 1061 bp, Homo sapiens
gtagtgtgccataagactgctcataatttatattactttataaaagtctttatctgtttgaaaaaatgtggtaatgtatattgattttacttcaatgtaggaataacatttaatagatgtactattaaatgttaatatcatggcaattatccactcaaaattagtagatattttcatcctttttatttagaagaaaaattaaaaggccaggcatggtggctcactcctgtaatcccagcactttgggaggccaaggcaggcagatcatgaggtcaagagatcaagaccatcctggccaacatggtgataccctatctctactaaaaatacaaaaattagctgggcgtggtggcacacgcctgtagtcccagctactcgggaggctgagccaggagaatcgcttgaacccaggaggtggagtttacagtgagccaagatcgcaccactgcactccagcctggcgacaaagtgagagtccgtctcaaaaaacaaaaagaaaaaagaaagtaaaaaattaaaagcaggactgatggagcatatgtatatgtagaaaaatacccagtcatgtgttctgatagtgcttgcattcacattgtgtcttttgttatatgcaataaagttctttttagtttgtgcctttctttcgcagtgctgcatggtgctgaaccattgccatattatactgctgcccacgcaatgagttggtgtttacagtgttcccaaggagtggcttatcttcacagcatgcaacccaaagcgctaattcacagggacctgaaaccaccaaagtaagttataataatgtgacacccctcagcctcttcctccttctctctcactctcaccaccccgaacccactctctaattcaagctcattattgtacaggagtttctcttttctctatttggcttactcagtgtttacttttaactcaccttcatcatttagtcatttatctaagcttgtattttagatgttgtctttagtgggatttttatttttggtaacctctaccttagattagcatacttctagaatctgttagcctataaaaatctc

SEQ ID NO: 40475 - DNA, 1033 bp, Homo sapiens
gggtgctgtggaaagcttccacaaataatataaacagcaagggagagctctctggtctgtgtgatggcttccactgaaatatcttgccttattatctgttgttaatggattagccttgaatgcagtgattttcaaacattgaaactacctggagggcttggtaaaacatggattgcttggccttaccgtcagactctataattctgggttgcaccctgagaatttatatttctaataaatatccaggtgatgttgatactgctgaaccggagaccacacttttagagccactggcatatgctttcactgtccttatatctgctttccttctggaacgtctttttcttttggcttctctgactctctcctagtttgcctgctaccatattgactgttccttcctgttccttgcccattccttctcctctcttgtgatctaaatgttgaactgcttcaaagctcagttcctctactccactatctccatattatttttggttacctcttccaactgattgactagaaaaactgactacatgctaatgactcccaagtttgtatctctttgtctgacttctccatagatcctctcactcacgtttctaccttcttacttgatatctcctcttggatatccagtaggcatcttaaacttcatatgactaaaaccaaactctgagttattaaaaaaaaatctgcatcattcttatccctcagtaaactgttgtccagtctaggtgttttccttgattcagctcttttcctctacacctgtcctgcctggatgcagagcatcagcaaaccctattgactctacttctaaaacatttcccagatctgcccagtttctgcactaccattgaccttgccctcgtagctattgttgcttgtttggactgctgtaatggcttcctaatgggtctctatttacatatcctagcttccctacaatcctttctttaagagctataatgattttgtttaatgtcacataccatccttacttccttgaattttttcagttccttcacat

SEQ ID NO: 40476 - DNA, 1024 bp, Homo sapiens
atcccagctacttgagtggctgaggcatgagaatcgtttgaacccaggaggcagaggttgcagtgagctgagatcatgccaccgcaccctagcctggacaacagagggagactctgtctcaaaaaaaaaaaaaaaaaaaagatgatagaagaatcctaggattacctccttaaaatgtctgacttagtatgatatcagactggagtaaacacagaacagttaactatagaccacaaatttaaaactgaatatagtgtaaattaaacacttaagccataatttgaaaatagagttaatcacagaaggttccattgagtagggacaagtttaaaactaggttttgaataaagtgaccatcgtgggttgggaaagtcactaagatgaattttctttgtagttgttcctctgcctaaagcgctgttcccccataacttaagatgactgactcctcaccagtcaagtcccacctcaaatgttattaacacttccttagagaagcattccctgaacaacctagatcttttgtcatttctattatctttcatggtacttaccagtaactgaaattgtgtctctccttcagcaaaatgtaaggcgctttattcacttttgtaaccccaatgcctagaacctagaaggttctctatacatatttgttcaatgagtacatgaaagtatcacagcataatcataagaattaaatgcccatcttgttctcttatattacatgtgataaaataggagctgagttatgcgatttggctaaggcaacacgttagaaatgagatccgagtcttgttttaatgtcgactctattatagttagcagatacttttgtttagcagggataaaaaatgctgtaaagggccagatgctatgagtaagccacgtatggtaggtctttactacagagtgctaaaaagacactatttacaatggttgcttttgaaaagggagacccataatgctgacctcaactatagtgtaggaacaaagctatagtattggacacataaaattactg

SEQ ID NO: 40477 - DNA, 1026 bp, Homo sapiens
taatcactccatcacttcagggatatgtatatatagagaaagatatataaatgtagatacagatatggaaaaatactttttctagtatttgagcatatattgtatttgggaagtagaaaatcatcagaaagtggtgactaattgtgtatataagaggatgtgaggcaggaggatcaggatgtgaggccctggagttcaaggctgcagtgagctgtgatcgtgccactgcactcctggatgacagagcctagttacagagcaagactccgttttttgttgttgttgtttgtttgtttgtttgtttgtttttaaaaagagagagagggagaatgaaagaacctgggacagttttcagctttctgactgggactggatgtgccgttagttgaaatagtaaaggattgggaagagaggtgataaattcaattttaaatatatacaggggaggtacctatggacaattcagatgaaaagtttaataaactgatagaaatacaacctagtgattaggagagagtttggtcttaaattttatacttatataaattttcaaaaattactataactaagtccatctatttactttttaaactttagagttagagatttttcttaaagaaaaaagtatacttttttcccttatacaaaagaattttttttcaaatattgttgatgccaagtactgtactcattacatcctatcctacaaccttttatattttaaggtgctatttttgaatgtcagcatgcatcttaaggatgtgtttccctaaaaatattaagaccatcaacatttcttaaagccagctttttgtttgcctacttttggccttattttctttgaaaattcaaagattttttttttcctcagagggtcattttttgttacatttctaccattatatcagtcagtgtcaaaggatttgttcttccccctcgaatgctgttttagtgttctccgatcccttcttatttctgctgtttgtcttcttgttctcttccctttgctgctcagatttggaacat

SEQ ID NO: 40478 - DNA, 1031 bp, Homo sapiens
cctaaaagctgcccttgtatctttgcatgtttctctgaggtcccctccaacaatggcaagttggttcctcccacagttgaaatttctctgacttctacagcatctctgtttgctcttaagggctcgtatgactagatagtgcccactgggaagaatccaggataatctctttattttaacgtctgtaaccttaattatatttacagtactcttttggccatggaatttacatatttacatgtttcagagattagggtatagacatcttcgtggggtcactctgcctactttgctgtgctttaaaattgtctttttccctacttcatgctaagaaattttcctttacaaatagttaagcttaacctgttggcagggggtagagggaggcagtacatagaccttatgaataaattccattctgtaatttaaatacgtgttttgtaattgaattttagttggaaattgattaagatcaaagatcacatatgagtgcttgaagctcaaaatctgtaaaaatgctgattggttcaggtctgtacataaacccaccattcttgttactgattatttttcaatttaaagccttatactaacaaacccattccacaaatttacttttgtgcctgtcattagacttttgctttactctttcatcaaatttatcaattttgtttttatgctgttgagatttaccactttgaactctggaaacaaattttgaatttcctaaggtcttcttgtcattgtcatttgtgaagattccaaatatgattaataatttgcttcatggcttagtctgttttatattttatttatttgttatatcttatatccctgataagacttgaagatctttaagggcaaaggaagttccatctgttttttcagttgaatttaatttttatttttgaatacttctagaaactctagtgaaaatgaatctgttaattatttgttagaaaacctactaaaaatttatgttcaaaaagctctgttatatacagtatttgttttctcctacatctttcaat

SEQ ID NO: 40479 - DNA, 1052 bp, Homo sapiens
aaacatcatttctcttccaccgattttttcaaatacttattatagaatgaaaatttatgttggttttaactacagatcatgcttctctccagccaaagataatttgacagacgtctatcacaaaagaatagctcataattgctacaggttcaattacccttagttcctgtacttatttttttagctaaaattgcatatgtatcattcttaatattattagccaccctgtttttccaaagccaagaaattgaaatgttgtgaaattatgtgtttagcattttttatgtatgtctacatactctagaaatagaattgctgtgttacatgatacactgcactgcatgtataattatggccaagtatttcattatttaagcaaatttgtatgtatttttatgtgtttttcctatagtacaaagatgaacacctgtggggaagagtgagaaagctaaaagttgtatattttaaaatactaagctcatagtaacacacgcatttgttatttcaaggattgctaaaaatgaatttcttgctgataacgtacaataggaaaagcgttccatgaaagagcatcattctactattagcaggttttcccttgactgtattccagagatatctttatttttcctttttgtatttacctaatggatatctaacaaatttcagtggatttaaaaacttgatatatttgctgaaagatcattttatgcttgttgacccatcttacctcattgtactgttgaaaaatacaggtatatttttccatccattctttgtttaaattcagttagaaacatgtaaatgtagaaaaaatgaatggtataaataaatgactttttaaatccaaagtgaaattcattatcttggttaagttcttttctgtgaaacattgtgttttgggtcttaatcaaggtcaatattccttgattccatgctatttcaacatacaatttaatatcacgttatttaaatatgcaatcactagcctgttttcataatttcataaaaatttcagtaggtctgctttttttactacatgtattcatttt

SEQ ID NO: 40480 - DNA, 1028 bp, Homo sapiens
cataatttattgcattacctgtctttttctcatttctcatgaaaactgcatcaagaaattgttcttatctgccaacctgcacttagatacaatgaattagggaacttgttggcttcagaatgcgtggttccaagtagcttctttctgtgcatatctttcactttctcaccaagcagatggcagcatagtggcaagttatggagacatgcaggccaatttattctgccatgcactaaaaactgtgctagaatttgtgggcaaaataaaagcaagagaaggaaactaacactttttgagagccatattatataccaagctctgtgttagtgttttcatatacactattttattcaagaaatccttgaattagcaagagagatatgttaacacataggagtacagtatgtcttataagtacattttttctttttagaagggtaatgccataattggattagtcatttgaactttatgcagtataatatttctatcaaaaagaaatggtgggactttccagatacagtaaatgattatgaagaaggtattgaggtgagaatgaaagttatgattactggatggctgacctgaaggaggatgaagagttccaattcatatgtaacctcattagataagctgctttatctctctctagttaatgactctccaaggggttcataagccagctgtgatggcagcaggagccagcttcacatattgtaggtgctagacacaaccaaggatttctgcctttataacagctgaaggggttggaggtgggttggtttgatatggagggaggatacaacttaactatgttttaattcaggcaaaatgggctctgctcaagcagttaatatctgaacttgttgtgattatgtgtaattctgtgaccaagtttaaatgcagcttaagactaaatctttatatgccaaggcctcattaaaaagaaaattaataattaattcctttgctaatgttaaaattgaatgacctgaaaaatgtatctgagaattaaccatggctataat

SEQ ID NO: 40481 - DNA, 1047 bp, Homo sapiens
taagtatcgatcaacaggtcaatagattttttaaatgtggtatatatctacataatggtatactattcagccataaaaaagaaagaaatctggttatttgtagcaatgttgttgagcctggaggacattatgttaagtgaaataagtgaggtacagaaatacaaatactactacatgttctcacttatatgtaagggctaaaatctttaatagaagcagatagtaaaatagtggttactgagaaggttaggggagagaggaagatagaggttggttcacatacacaaacttatagctatataagagaaataagctatggtgttctataacactgtagtgtgatatagttaacaataatttattttatattttcaaatagctagaagagaggattctgaatgttcccagcacaaggaaatgatattaacaaatgtttgaggtaatggatatgctaatcaatctaatttcatcattacacattctatacttatatcaaaatatcactgtgtacctcataaacatgtaaaattattatgtgtcaattaaaaagagtcactttcatcctatgattaccattttgtgtactgtttgaaaacaatttaattgctatgtttgacattgtataacaagaattatttcaaattctttagttatctccttctctcattccactgactgtggcatttttctcaattcctccaaaatatagtttttcttctaactagtgtaaaaagataaacctgcttatactttaggtgagagtttacattgctaataattaattagtattcttgttcagtatcttctgctccaagaatgagtctttgttgtttttgttttttttaatttcacttcagctgatgagtgtaatggaaagaagatgggctgtgaagcaagagtcttgttttcactttccagttctgccgcagtctccttgtataaagtagaacatatgtataacaaaagtatttatacaaaatataatttaaaatatttgagacaataagattatttgagaaaatcaatgaagttactaagtttatttag

SEQ ID NO: 40482 - DNA, 1022 bp, Homo sapiens
aagacacctgcatatgtacccctgaatctaaaataaaagtttaaaacgatataaatttaacataaaaataaatatgaaattagtttctattattttgatgaatttgagccagcatttcttatgtttaaattaatactctgcacaagttaattgctttaaatctgccatatcacgatgttgatcatatcagtttatttgaaattcaaaaatactctaaatcatattttttacttaattgtattgaaattttaaggcattttctgaaatagctcttgcttttgtcttcagaatttgagatgtattaatccaatgtgcacaataaacaatgtttttataaacttgtttacttttgtcatgcacatatatattaccatatagcacaaaaattaaatttaacattataattgagttcctataaattgcatataaaaatatataagccacttagcaaagagagagatggaatttgtaatataagtatgtatcagataaaagattacaagtatacaaagctcatgttctgtagataactgttcattatttatagtacttactagaaatataatttgcctgagttggggtgaaaagagttatagttaccattattgtacttattttattttattaacatttttatcaaattattgcttttctcaagtttttttgtttattttttgcttgctttattcagttctccttgtcaccttccaccgggtccactgagctccactgtactacacttaatcttagccatgatgctgacaagcaattgagcttcactgtaaatacactttgaaaccaattctgtgagaatatttttaaacaagtgctattactaaaagtcttatcaaaagtcaagtacctgtttcccgtgatatcagtgaacaacaaaaaagtcaagcacctaacaatgtcaggtgtgtagcagttgtatagtatgtatttttctgagaaaatagattaatatattatttctattgaactgaactgtgtgaggcaatgtggcatgttgtctacatttg

SEQ ID NO: 40483 - DNA, 1096 bp, Homo sapiens
gcgggcagatcacaaggtcaggagatcaagaccatcctggctaacacagtgaaaccccgtctctactaaaaataaaaaaaatagctaggcgtggtggcacgtgcctgtagtcccagctactcgggaggctgaggcaggagaatcacttgaacccaggaggcagtggttacagtgagccaagatcgtgccactgcactccagcctgggcaacataatgagacttcatctcaaaacaacaacaacaacaaagtgtaaaaggctttgaacagttgtacatttgactgcccactacactttcaaagtgagatacacatgaaatccaagcaatttgtaacatatgagatatgaagagaatctgaaactttcatgtataccttgcatttgcctcgttttctgatgctaaactcattgaagaggttgtgagaaatattttattgggcaaccttaaaatataagttatgtgatgattatatattatttttctttcttgtattaaaatacttttattctagtagtagggtagcagtaggcttgaaagttttagtgctcaatgtactacatgaactattttttaaacactactttaaaaaggcttttaaaggtacatcaattataatgaaacattatccaatatgttttgggtaccaaggatagtacttgtgcctctcttgtaggttatagcaagaaagattcattatatgtctctcatatactggatacatgttcagatctctatccagccatttctggattatatcaagaaatgaattagataatttcactatgtgtgatttgaattttaatgatctctttctaaatagaaaattttccatttgtctatttaaattttcacaaaatacaaagaaaaataatgtaatttattgttactcataccacaataagaagctaataaggattcaaagagtgtagtttccatgtctgtattttaattgttatagatagataggaatgggattaaaaatttaaaaaaaaaatgaaaactgtggatgattattactggttaagttatgggtctaacaggttattcctttttgctcctattttcccactactattctacatctttgctggtggt

SEQ ID NO: 40484 - DNA, 1034 bp, Homo sapiens
gtttctatgtaataatgcatctagagaaaaatagacataaaagacatatcagagaaattggacactgaatttagaatcaaaatgtttgaatcccaggttgatcaagttgttttttgaccttgggcaagtaatgcaatctctttatcttattagttaatctcagtattacatgaagcaatatatgaaaaaatgttttataaaataaaaacctcattcagttatgagttagtggtgttgatgtagtagaattgaattctttgctataaatttaactgtggcaaagtgcagttttggaaaaagtaacaaaataatgctgattattatacaagattaatgttgtcttcagtctcacaatatgtaaccctctcaataaccgggactacaaaagaataataaatcgttgactattctttaaacaagtaatgttgacacttttaaataccaatctctaggcaaaattttaccaattaatgagttgtattagatataatcagtttctaaaaatgaactttgaattctgaagacactatctcccaataaattaaaaacttattttattgccagtttttgtattatatgtttttaaaaatgatgctaagtgttcatgtaaaattttattcctgtacactttgagaaattgttatttaataaaatgttggtatcctacggtattatatgtgtgcatatatttatataaaatttaatatttatttaatttaacataaaatttgattatctctctgtacatatagatatagctataaggagagatatataatatagagatatatagagatatgtaatatgtattacaatatataatacatatgattttcttctctatcagactacaggacctcttccatcattgcactcaatttatatcatgttttgaggttagatagtataactttggaagacaattattttaaaggggaaaattgaaaagattctaaagatcaactctctgtagctgttttaagtttttaagatatattctgtatctcacctccattaaacaaataaaagaatga

SEQ ID NO: 40485 - DNA, 1049 bp, Homo sapiens
acatgttctttactgtgtctaatgtttattctgcacaaacattatatacaggagaactgtgtttttaagagctgaacataacaattggatcatttccctcctttgtaaatttttccaatgagacaattactactccaaattcaaacagctctcttgttgattttcaagattatttactaggacatcactgtgtatgtattcatcctctaatatgcctcatccttcattataataaagtgtctcttcttttcaatccctgttccatctgatttcttttttttttccttctccatcttctcttatagtgttttagacactggcattaaatgttcatttatctttgagaaaattctacactattcctttaatggaaagataaatagtaatttcaaaataaaaattacaaatcatacggtatggcacattttcataatttgaattctggccttttttatagagctaagaaaataaatcacactttgatcaatgctgaaggttatagtctcttttgtaacatttggacggtgacttgtataattccagaattaccactctcaatcaatactgtaaaggaactcagccaagatgtttataagagtacttaatcagttaaagttcttaatctttattttttctgaaagctgaagtagttctgttatggtgtgtttcaatttgagaaagagaaatggagaccaataacaaataagaatatacaaataatatatagaaatagtttttgctgccaggaagatagattaagggtgaagaggtaagagtgaacaaggttaaaatactgacacaacttgttctgatctttagtttttaaggattttctgtcattatatactctgttgcagagacaaaaactatatgttagatctgtaaaagaacatacatattcaggaacctgtgaatacaactcatttaagcttatatgttacaagctgggataaagttgactagaaaaacaaaacactgatacataccagagttcacattaagcacacttttttattgcagccactttctttttcttccttttttaaaaa

SEQ ID NO: 40486 - DNA, 1078 bp, Homo sapiens
ttcatttagtatacttttattgtcattttttaaaatttacaagttatgtaacaactttgatgcaaactagccaatacattttcttagataaaaagtatagttattttaaaaattgagagatcctgttatattttacatatgtaaatatttcgggaagactaataaaataaatatactgaagtatatttcaatttttgtaacttttatgcaattttattcgatttagaaagtagaatagtgcttgtcaaagtgtggatctggatattataacttggatttgcatagacagtttgcagtttatactgaacagtcacattcattttctcatttaaacctcaccacatcactaagatgtggaaaatattattatttttctctttcaacatatgaagaaactgaagctcagagatattaataagtaacaaaattggataagaattcaaaaatcctgtttaccaattcaagtcttttttcctcactccactacttctctaaaatttgttctggactttacccagtagattttagttactaaaaaactaatgaaactttattctatgtagggtgaccatatgcccgatatgcctgggataattgttttttttaattaacactgcttctttttgctttgaaaaatgtttttttttatttggatgataatcctacttgtaaaaaattcttctcatttggaagtaaaaaattcaaagacataagatttacatgcacatatatcagaatatagaaatgtgatttacttgcattactatattgcttaatttaaattttctgaaagcaaatatgtaaaatttttctttcagatgatttcatgtaaaggggaattcaagtaatcatacacttataatttttatgagaacttttcctaatagcagctttttaatagtttctgttaatgttaagaggtctatcattattttaataatatataatttatgaacatatgtataatttaacaaatgaaacaatacattcaattttatagcatcagcaatatttaaattctgtttcttgatcaaagtttttgaaaactgcctttattttcgcagacaagtagcatgta

SEQ ID NO: 40487 - DNA, 1103 bp, Homo sapiens
agcagtgcagaggaagaagcggaaaacgcccccaggatgcactgcagtgcagaaggagaatggttagtgcccattggaaaatgtatctgcaaagcaggctaccagcaaaaaggagacacttgtgaacgtaagtaatgtgtcctattaaaactccactttgcctttttaaatttcagtatcagacattttaaactttaatagttatttgaatacgtgaatctgctctgtaccagaagcgcaattcagtagatcttaaacaaagtcaccgttgaacttagtgattgccctacagtagcatctgcactaagtgtatgtaatcaatataggtgataatgaaatttgttactaaaatttaatgtgtcctatgcttaacatggaagtcaatagttgcacgttgggctatggagtttagagaggagtctgggtagttggacatatagcctggcaagactgaggtgacatttaacaggatttaatgagatgccattcctcctgtttttaaacccatattgtctgggcccttgagtagcagtaaataggaggttaagagggctgtgaataagagctctagtgacaggcagggcataaacgaatatatttacaaacttttagaattatcttatataaatactataactttaatacaaaattttcaaatttcacttacaaaatctctgtggttacttctgagaaaggtgtgtgttttttttttttttttttggactaagtaccaaaatgaccacatttttgtgaaagtgggccaaagtaaagttttaattattatagtacaccaattgcatgttttgaaacaatcatgtatgaattagtaaacttttttctttgttttataaaaccgttttttttctttcctagcattatgtggctaaatatttaaaactatgtcatatggaccttcaagattgatagatattctgtttctaggtttcatgaaaataaattataaagttatgttactagtgtctctttttaacttatataaaacataatacattaaaaataacacatatatctatatttatttttacaccagagccagaagcacaggttttatacttggaattcttagttgagctaaaggagac

SEQ ID NO: 40488 - DNA, 1061 bp, Homo sapiens
ccagtctatcattgttggacatttgggttggttccaagtctttgctattgtgaataatgccgcaataaacatacgtgtgcatgtgtctttatagcagcatgatttatagtcctttgggtatatacccagtaatgggatggctgggtcaaatggtatttctagttctagatccctgaggaatcgccacactgacttccacaatggttgaactagtttacagtcccaccaacagtgtaaaagtgttcctatttctccacaacctctgcagcacctgttgtttcctaactttttaatgattgccattcttacaggtgtgagatggtatctcattgtggttttgatttgcatttctctgatggccagtgatggtgagcattttttcatgtgttttttggctgcataaatgtcttcttttgagaagtgtctgttcatgtccttcgcccactttttgatggggttgtttatttttttcttgtaaatttgtttgagttcattgtagattctggatattagacttttgtcagatgagtacgttgcaaaaattttctcccattttgtaggttgcctgttcactctgatggtagtttcttttgctgtgcagaagctctttagtttaattagatcccatttgtcaattttggctttggttgccattgattttggtgttttagacatgaagtccttgcccatgcctatgtcctgaatggtaatgcctaggttttcttctagggttttcatggttttaggtctaacgtttaagtctttaatccatcttgaattgatttttgtataaggtgtaaggaagggatccagttttagctttctacatatggctagccagttttcccagcaccatttattaaatagggaatcctttccccattgcttgtttttctcaggtttgtcaaagatcagatagttgtagatatgtggcattatttctgagggctctgttctgttccattgatctatatctctgttttagtaccagtaccatgctgttttggttactgtatccttgtagtatagtttgaagtcaggtagtgtgatgcctccaactt

SEQ ID NO: 40489 - DNA, 1083 bp, Homo sapiens
ttttttttccaggaataatttccatttgatcatgctgtataatccttttaatatacatgctaatattttttgaggatttttacattaatgtttaaaagggatattgctgtacagttttcttgtagtgcctttggctttagtatcaaagtaattctgacctcagaatgaattaggaagtgtttctactcttcaattttgagaaaatttgaaaagcaatggtattagttctttttaaaatgcttggtaacattcaccagataagccatcaggccctgggcttttcttctttttttaattgcatactgacaaattatagttgtatatatttatggagtacagagtgatgttacaatttttgaatacaagcagaatgattaaatcaagctaagtaacatatccattgtctcaaatatttaatatttttgtgatgataactttagaaatttactcagtgatattgaaatttgcagtactcaattattagctatattcaccatgttttacaatagatctcataaaaattagacttatttctcctaattgaggctttgtaccttgtgactataatctccacatttttcctatcccaaggcccatgaaaaccaccattctattctctgcttctatcagttcttttgttttagattccacctaacagtgagaacatgtggtatttatctttccatgtttggcttatttcatttaacatgtttttccagttccatctatgttgtctcaaatgatagaatttcttccttttttaaggctgaatagtcattcattgtgtatgtatgccatattttctttatccatttacccttgatgaacacttagtttgatttcataacttggctattgtgaataatgctgcaataaacataggtgttcagatatctttttgatacactgatttcaaatcttttgtgtaaatactcaaaagtgaaattgctgggcttttctttaatgggagaaattttataattaattccatcttattattgatctattcagatactttatttccttgtaacttagtgttcataggttttgtttttctaggaaaccatccattggtatacaggt

SEQ ID NO: 40490 - DNA, 1025 bp, Homo sapiens
taaaccttctcatagaatactttctgctactctgtgttccaaacatttttttcctttattatcttttaacaataagctatttgaaagagttctgcttccagaaatggtaagttagcttattcggacaactgaagaacatcgaagcagttgtaaaatgactaaaggagttggaaaattatgaacaaagtatctgacaaaagggactggcagagctatcttgctagtgagcgcttgcaaggctatgatatgaaaagaaagaaagaccagggaggtgtgtgttagacattagtcttacctttctccttcaatgcacttgccagtttggaaggagtgactgagaggcttagaagctatacagaacttctaggcatctcatactattggcaaattccaaacattggaattagggcaacaagtaagtattctggtaaataaactaggctttcagttggaacaccgaagaactttatactttgaaaataagcataaagattaacagagactagatctcacaaagcctgacctcacctgaaaatcatttccatctgtgattagtttgaggcaatatacttctggacttattcctggtaaaggcaaagttcattgtggacgaagaaaaaaaataattgcatcttcaaatgatttctagatatttccacatataatgttgacacaataataaacagtaaaacacaaaagtaaaaatgactgattaaaaaccaaggaaaaaacctaaatatatcacaatgagatgcagatattaaagataacagacacaaatttataaactactctgataatatatttaagacattcaattataagctgacatatttaaccagaggactaaaaattttagcaagaattgaatgaaaatttaaaactaaaataaataaaattaaatatttaacttatggctttaatggcagattagatgcagttataaagaaaattagtgaactgaaaaatagtcaaaagaactatccagaccgaaacaaagagagaaaaaaggatggaaagagcat

SEQ ID NO: 40491 - DNA, 1033 bp, Homo sapiens
ggctcattgtagcctcaacctcccaggctcaggtaatcctcctgtctcagcctcctgaatagctggaaccacacacacacacgcacacacaggtgtgtgccaccacacccagctatttttttgtattttcttttgtaaagacaaggtttcaccatgttgcccaggctggtctcagagtcctgagctcaaacgatctgcctgccttggcctcccaaaatgttgggattacaggcatgagccaccacatctgacctacaaccactttttaatgtgagacttaaaaatcttagataaataaggctgtgaagcaaaaccagtgatttttttttttgtttttgatttgcaaaacaagtgactgacaattattgagaaattaaagatagctatgtgtaggtcttgcccctgcgggtttggaggtttccagttgtccatctgtgttagttgtaagtgttctgggcagaatagtattgttgccccaatgcttgccctagcagagctggagtttgtgaacgtgctcagatgtgtgtctcctacaaagaagggaaaatgaaccctcgtctgagcctagaacaagttttaatagggcatgtctgacatttcaaattgtttttctcttgctgacagtctgcccccaggtgcatctagggccttggtcagcttctctgttaccagtggctcactttataaaacagcccacagggataagggctgaaaatatagccacttggctacatcattgactaattaagtaagttaactgtggatttatagcatcttttcaggatgttagtgttttgtgagccagtggaaaaaataagcttctatttcttcatttgtaaaaccagagagttggattagatgaatctctaacgtcctgtccagctcaaatgtgctttcctctatactagggtatagatttttgaagagcctagctgacttcagcatcacctcaccctttggtctccagtattacttctttacattttacttcattagctatttcttaatattaaatgtctgaagagtgtggcac

SEQ ID NO: 40492 - DNA, 1050 bp, Homo sapiens
ctcatgttccatagctttgttccaaaattctaaagatctggtctgacctttaaggggcctgccaaatgctatacagaatccctatgtgccacagacacctaaaacaccagtaaatctttcggctcagtggcagagcagctttcatagcagcccggacctgttgtggagccttctcttattattactgattactcaaatatggcagcttttcaagctacttgataaataggtcagaataacatacccaaatgaggtgcatgttgcctccagagtccagaaaagccagctagatgctgtgtctctgtattagtggtaggcaagagagctatcactttggaagggatatcttgaaatactactaagacccctagaaaatttaaaagatggcaggcctctgaatttttttaggactctttcttcactctgtcgcacatgtgtcttaccatgcatagggtatttgccacttactgtatagtcagcatgtaatagacagcataacattctatggactagaagtacaaccaaggtccctgtgaacgagattatgatagcgtgctggagacttgacagagccctgaggtaggatagtagggtaggcaaatgcttcaagtagtctttgctaacacatatagagaaaaccagaatttgacagatcaatagccatgtaccagatgccaggaaatatgttgattcgctccatcagtaaaaccacatctggtacagcatctgcactcttcaaaatccatctgttttgtacaaagccaaagagacaacttgaatagagatatggcagaaatgatcaccttcttcttgcaagtccttgatggtgactctaatctttgcaatctctgcaggaatgaaatgttgcttttggtttactttcataggtagaaatagatagttctaagggtttgcagttaacctttcctaccattatacccttgctccacagattagagaaccagtgagagaatctgctgagtttgtctgttctaactcagcatttcaaaactggtagaataaccatggcatgagttctgggatgagtgg

SEQ ID NO: 40493 - DNA, 1050 bp, Homo sapiens
taagtggaatgaaagtaccgttctcttctgtaggttatgtgagaagcagcaaaacattttgtaaagagcagaaactttggagccggacgccctgggttctaatcacggtcctcccaccagctgtgtgattggcagcacattgccctctgagccttggtttaattctcttgaaaatggggaacataacttctgtctttggggtggtttgtcaggattagcaataatatatgttaaggtctggtacatggtagacatttaagaattggtagctataataattgcacatctgaaattttttttctttttctgggataaggctttttttctgcccctaatataatgatggctcaaagacgagaggcaattttacctgagttccaatcctcgctctactgtttaccagctatgtgaccttgggcaagttacatagtttccttgtggctcagcttcctcatctataatttacatttcctcctttgcttgaaaacttaaggttttatacatatataatattgtatgtattagatataaagttggagattgaacaagtctgtgggttattttctgagtaccattgaatgtcatttacaaaaagtatttttttcttttgctttgaagtaacaatactacaattgttttcttttttgttgcatttttatagtaatttttttatatcctacatttcaaatataccactttttacataaggttttgttttactccagtttagtatcatcaggtagtcttatgcagatgttcatatgatgccatctttatggctcacccttatgttaataaaccatagttattcctcagagacagagaatatataatcatagccactgctcagagataaagatcaaataatcgaagacatctcaaaagtaaaacaaacttgtaggggagactaaagactatgtaggggacttcaacaacccattctcagcgttagataatctagacagaaaattaacaaagaaaccttggattggacctaacagacattttcagggtatttcacccaacagctacagaatacacattcttctc

SEQ ID NO: 40494 - DNA, 1026 bp, Homo sapiens
tgccccctccctttttacttgcctcctccctctttctcttctctcactcacctcccggtctaaaaccggggccggcgcctttaagagggagcgttggttaccctgggggcgggaacccctcggcggctcgcgaggcggcggcgctcgtccgcgatgctcctcactttcagctccagctcccgccaccgccgcctgtatcgccgccgccgccaccacctcctcttcgttgtcctccttcctcctccgcctggcagcgttgttctctgcagcggaggagagaagtgctatgtcaggaaagttccgggagggactacatggagccatgctccctgggctcttccgcgggcgcccgcgcgctgcccttcgcttgaggtgaggtgaggctcgggatccccggcccgcgatccccggcccgcgggacaggtagccgctcggggcggggagcgcttgcatccgctgcgctgggcagggcgagcagtttggcggagtgcggggaggaatgaggctggagagaccgaagttgtgccggagaagcttgggttttcgggagggtttttgcagctggactggagttatttcggtcggcgccacacggtggggacccggcggggactcggtttctcccgggccgcccgcccccctcccctgcccgtctgagcggttaggccttctaggaaaacggtcggctgcagaggggcaccccatgccggctcctttcctgctgggctgttctggttgagaattcagtgctgggagtgagaggaaggagatgagctccacttgaacttttacacggtggtctcgctgcttgagggctgaaatttaccttgtttgcgagagcgaaaggtcctttcgcgctccaacagttaagagaggttccctcttccatgtggttcagcttgcggcgctgtgtgttgcatccttggccggttttcaacgtcgccctgatttcagtcttttctcctctgccccttttcggaaacattcttctttttaataataaaatatgttgtggaggctcagagt

SEQ ID NO: 40495 - DNA, 1035 bp, Homo sapiens
tcatctgttccttccttccacaggatgtctcaagtgtttcagcattaattataatagaatgatacttgttttcgattaaaaaatacttatatcacgtttgggacattttcttctatttttaatttcctaagggttttttttttttcagtcgagaggattttgaatcttcttagatttttttgtgtcaaataattatttattttagtattgactattaattagaaaggaaatctgaatacagatgtgcttggagtggaaggaagatctaccttacctgggaataggaaaatagctttgagatttggaaagtgaaaaagttgagaagagtgtttcaggcctagtttgcaatataaagatacaagagtgtgtgatgcctttgaagaatggttagagttcactgcagttatgagaaaatgtgaaatgtgaatttgggagaagtgagttgggatggagagtgataggggtcagatcgtaaaggcccttatttttcttgctaaggagttttgttttattctgaagacaatgggaagtcattaaagagttaatggtcaaaagtgatgttagatttgaaagtagcctggcgggggaacaaagtgcattttatctaattagaagagaccaaataggaggtatttgcagtcatttctgcaagagacattggcttggactagggtgatttagtagtatgggggagatgtgagtgagtttgagagagacatatgatgcagtgtcaacaggatttggtcattgattggtgtaatgagtaagggagagggaggtgcaagtataatctcatttttggcatgagaggtaggtagtgttggtcattgaaattgaggatatgggagtagaactggtgataggtttagtttcagataatattgaatttgaggagcatgtaggtcatttaagtggagatacctgttaagcatttgggttgggaaatcaagaaaaggtcttggtttacgatcacagctttggaagtaattaacttgtaggcagtaatggaagttagaggagtgtgtgggattactt

SEQ ID NO: 40496 - DNA, 1050 bp, Homo sapiens
gtaccgctaaaactcagagagtttctaagtccttgtccagtgggcctcaaaaatcattttgcaaaaacaggagctcaatacaagcatctaaacctctgattagattcccagcgttgcctcccccagcagcagctgcaagggattgagtgcccactcagcatattaaaatgtcttaacccaacctaccattttcagtttgtgatttttcctattatttgagcagacatggaagggatctgatcacttgtagatgttaacaatgcaagctgacaagggggaaaagttattcactccataaagaaacatgaggggtaagttgttcaccgtgttactttcatccttttttgggatgaggaaggtccatacctaatgttgctctgtggtaaatgcttggatgggtatttgtggccaaaaatgcagctaaactcctgtgtacagaaccacttaagggtttcatttctaggagaatactcacagaaacaatacttgacagtgacaaataatgaagaccatgctcctaaactcctgaactcacaagaaataagactaaaagcagtgagaagtaaacaataaattccttctgtaaagagttattaaatccttcagtgtctggttcctcctacttgtatcagagttccatcttaacactgatggatgataatggacttgacatgcctctcagccatatgaggatgtgcataatggtagtaatataggccctgagaaactagatgctcagctacctaaatgagtccagttctgttagaacataaatgatacacacctttctggttaataaatgcaggttcttctacaactatgcacttaatatttagtgatgccctaaagatgtctatgaaacaagtttggtgacttcttgaatctacttttcctgatttacttaatcaaaggtacttgccagtcagcaggttgaaattacaacgtgtccactggtcagtgtctatgttgtaagaatctatatggcgcacaaggatccggtcattattgtagtctaggtcattgcctccaagaacataaagcttcctttgt

SEQ ID NO: 40497 - DNA, 1048 bp, Homo sapiens
tgtataagaaaatatttgtgagtcagatgtttgtgggttttccttacctattattattttcttccatgctttacaacacattttttaaactaccttgttcttaaataattacacggacctgcttctgtgtactttcacagaatctttgacagttaaaaattgtatgttatataaaaatttgacaagcttctacagttaggaaaagcctttagaaatctgccttccccaaaccgtatgttatcatagcactcatgtctccccatgtctaaaaggtaaatagatacagaaacctcaccaaaagttgaatcatctgtactaaaccactgcttttttatccagactttttatataaatcttttattttccaaaaaactgatcttttacctacccctcttagagttaaaaatattgcctgtcaggcaagagtatagtatgccaatataaataatatgctttatttggttagaaacagttggtttgggaagctagcaacatagcatattctttacaaatttaataaggtgtattttgatactgtgataacctgcattgtaaattaccaaatggttggaattgaccagtttatacttattaaaatttttgatgtgccaatggctatccaattcattgcatttgtgaattgtgcttttagaaaaattgtggacattttagttttatatacatatttatgagttatttgtgcatatgataaaattatatataataataaaagtatatatgtaacttacattgtgcccttgattattgaaaacttcctttttataacagattcactgtttggaagctaaagtaaaaatgagccatgttaccagaagtaataatttctatcttattactgatgtttttatactttgtggtaaaactatggaaagttaggttttcagatgctgtggtagctgaaagagtttgatgtacatgtggttaaagtgtgaagaaaatatgaaggaaaaagtatgaaaagtaccctagtcattacctaattgctattttgtttttaaggatctaagaagtgttattgcattgtaca

SEQ ID NO: 40498 - DNA, 1051 bp, Homo sapiens
tcaaatttgagtgaaaaaactagagaggctgtgtgtgaaccaccctaatgcagtatgttgttaaaacaaatattctggcctactaccttgtgtggttatgcaggcccataagaagtttggttctaaagattctgaacagaacaggtatttagactagtgagataactactaggcacaataaatcatctaaaacaccttccaaatacagggaagtactagagaatgtaggaggagaaacaatattttattttcaaactttgttacttataagaagttaaaagaagaaaatgggatatatactgaaattgctacacaggtctattttatggttacagaatttttgttttaatacttacgcttgtgatacaagtcttcccattgtaatcataccatcattgtccttaaataatattccatgaatgcattttattacccgtgagcattataatatttcggaaggttaatgaacttttacatgtcatttttagcacacattttatatataaaaatcatactttaatacatcttaacatctaggtttactcacaatagatataaagcattactttttaagaagtgttgtgctaagcctgctggatggatggctgaatagatggatggatggatgatgggcagacttaatttgtaaatactgaaatgaaaaataatgaaaatgttaatatatttgctttcttttcttttttcttaaacagggaagcctatagcaaacttttgtctcaccttggacagatgggacaagatgagatgcagagactggaaaatgataatacttaatatattttgtgattcatcctgtctattaattatcagtatctaaagccacattgttccactctaattcctacttttaattaattgtataatgttctgtttaaaataatttctaggattttttttccttttatatctgtaagtaaaaaatgtataaataaggaactgaaggttaattagcaactgtgtaataggatccttggaactttttacaaaactgcattctaccttgatgaaattttagttaaactaaattaaa

SEQ ID NO: 40499 - DNA, 1059 bp, Homo sapiens
catggtactggtaccaacacagatgtccagaccaatggaacagagcagaggcctcagaaataacatcacacatctacaaccatctgatctttgacaaacctgacacaagcaatggggaaaggattccctattgaataaatggtgctgggaaaactggctagccatattcagaaaactgaaactggatccattccttacaccttacacaaaaattaactcaagatggattaaagacttaaacgtaagacctaaaaccataaaaaccctagaataaaatctaggcagtatcattcaggacatggggatgggcaaagacttcatgactaaaacaccaaaagcaacggcaacaaaagccaaatatataaatgggatctaattaaagagcttctgcatagcaaaagaaactatcagcagagtgaacaggcaacctacagaatgagagaaaatttttgcaatccatctggcaaagggctaatatccagaatctacaaagaacttaaacaaatttacaagaaacaaacaaccccgtcaaaaaatgggcgaaggatatgaacagacacttctcaaaagaagacatttatgcagccaaaaaacttacgaaaaaatgctcatcatcactggtcattagagaaatgcaaatcaaaaccacaatgagataccatctcacaccagttagaatggtgatcattaaaaagtcaggaaacaacagatgctggagaggatgtggagaaataggaacactttcacactgttgggagtgtgaattagttcaaccattgtggaagacagtgtggcaattcctcaaggatctagaactagaaataccatttgatgcaacaatctcattactgggtatatacccaaaggattataaatcattctactaaaaagacacatgtacacatatgtttattgcagtactgtttacaatagcgaagtctattgtgaagtcatcaatacttggaaccaacccaaatgcccatcaatgatagactgaataaagaaaatgtgacatatatacaccatggaatactatgcagccataaaaaaggatgagtt

SEQ ID NO: 40500 - DNA, 1039 bp, Homo sapiens
caagaaataactaagagcagaactaaaggagatagagacacaaaaaaaccttcaaaaaaatcagtgaatccaggagctggttttttgaaaagatcaacgaaatagaccactagctagactaattaagaagaaaagagagaagaatcaaatagatgcaataaaaaatgataaaggggttatcaccaccgatcccacagaaatacaaactaccatcggagagtactataaagaactctacacaaataaactaaaaaatctagaagaaatggataaattcctagacacatacatcctcccaagactaaaccaggaagaagtcgaacatctgaatagaccaataacaggtattgaaattgaggcagtaattaatagcctaccaaccaaaaaaagcctaggaccagacagattcacaactgatttctaccagagttacaaggaggagctggaaacattccttgtgaaactattccaatcaatagaaaaagagggaatcctccctaattcattttatgaagccagcatcatcctgatactaaaacctggcagagacacaacaacaaaaaaaaattttagatcaatatccctgatgaacatcaatgcaaaaatcctcaataaaatactggcaaaccgaagccagcagcacatcaaaaagcttatccaccacgatcaagtcggcttcatccctgggatgcaaggctggttcaacatatgcaaatcaataaacataatccatcacataaacagaaccaatgacaaaaaccacatgattatctcaatagatgcagaaaaggcctttaacaaaattcaacagtacttcatgctaacaactctcaataaactaggtattgatggaacgtgtctcaaaataataagagctgtttatgacagacccacagccaatatcgtactgaatggacaaaaactggaaacattccctttgaaaactggcataagacaaggataccctctctcatcactcctcttcaacatagtgttggaagttctggccaggacagtcaggcaagagaaagccataaag

SEQ ID NO: 40501 - DNA, 1034 bp, Homo sapiens
tatctgttccctttaatcttatgaatgtatgagtaagcctgattcgggttgtctgaaaccttttatctttgttgtaaaagataaaggcgaatgtgaaaatgtgtaaatatagaagatgtaaattacaggaaaagctatagcaattcaggcatcttaattttagagaaaaatgtaagtgagaatttataagtttaatagtaaaatacacattaataaatatattggcattcatgcttataatttattagtgtctacaaaagttttctgtttccagatttagatttttgccaagataaatgtctgatatagacatgggacaaaattctacttaggaaaaattgaagactttctttgctttgctgccttgttgatttttgtctccatgcgcagatctgtattctttccttttgtctaggtttcaaagactaggaagagtatattgctacagtgttgcccatttatttgttaggaattaggataggtaacttaatgatttcttcatgttaaaggattagaataaaacagagaaagagcaaagtataaactttggagagctccaaggtgttttaaaatgtgttggggttgggatagcataaccatttgagggaaggagttaaccactgaaacactgtactctatttaccttgacagttcctaactggggacacctctgctgttcacttacaaggttgcaagactgctagtgaaaggcacagaactgttgatgaaatcacctttcatattaaggagaaggcatctgtgatcttaattgtagctcagttatttctgaaaaggcatggtggatccatcaacttctctcctctgtagattttgttttgttttgtttttctcattcttcatatctgatagttttctgtttccatgtataaagctttcaatcatccctgtctctttggccattcttccccattttgctttgtaattgaaattcaagtcatgaccctttggtgccaagtgcaaatttccccacttttcccacattgccaagtagacttgatcatctctctcattac

SEQ ID NO: 40502 - DNA, 1009 bp, Homo sapiens
taaaataaatatacaagcctaagaggtcttagtcctctttttagtaacaactgcttgtagagtgagagagcatattcatgaccacttctctgtttattttttctagggtttttatttttattctacttgccactttcttcattactatctcacatagctagttataataagcccttgcttttctcttggtagccatagtctttcctgtcttcgtccttagcataaacctacacatacgtcgtgtgtacacatggcatatgtgtaggtttatgagatcttagtcctcttaggcctgtgtatttattttattttccctcatcttaacgtagtttttgtccaagctgcccatcagtggaaatgaagagagatgtagttggtgagctaagtcttttcctaaggaagcttcaataagcagtatcattaagtatacattttttcattgggctttcagttgtaaggtaagagagttcaaattcagttggattacttttacaatcccttccagtttgggaattctttaatagtaatgaacatttatattatgcattaaagacttttgctgaaataatttgaaataatttctacttaaaaaatgatattgttagcgtattagtaacatttgaagaaactgaaatgcaaaggtgctatatagctttgggaaagttataaggtaataaataaccagtctgtgttcttcttcattgtgtccttttttatgacaacttatattcgaggtatttcaaaacatttttagatttgtggtttgtatgaattttaaaaattttggacattacataacattttatatttaggttaagaccatccccatcctctctaccctgactaatgaatgggttagaaatcaggtttagtggccaagcacggtggctcatgcctgtaatcccagcaccttggaaggacaaggcaggcggatcataaggtcaggagatcgagaccatcctggctaacacggtgaaacgctgtctctactaaaaatacaaaaaattag

SEQ ID NO: 40503 - DNA, 1046 bp, Homo sapiens
ggcagaaggtgctggctgttgatgaagagtgaagagaagatatgcaattgtaccctaagagaataaaagactgaatggactagggaaatgtcataggaatgctggccaattctaagagcctacttgaagtctgtagtcataaatgtaaagtggtatcagtcagcatggttcttcttcagccatttaatactggtacatgtggggaaaaggccaagagtttgaattaaacaggtgatgatttttccaggcgagtacacaaatcaagaaaggagcaagagttggtagtataaatgaatgagtataataatggaccatgcaatcaagtgtcctaaaaagggacagggaaggcatggagacaaggagggatgaggaaatggttgtaggatcagtggattttaggtcctgatggaatcaaagaattgttggagttgggggagaagaggaaagttggaaagctagtttggagtcaaaaattggggtactttacaattgaaattactgagattgtagttactggtaatgccaaggtcgctgggtatcagcatgggagtgaatggctgacgtagaatggaagatagattcattaaatcagaggagttcaagaaatcaagagtccatgacactggagaaaaataatcacaaaagattatggcaggagtgctgttggagagcatgatagtgagctacagtctacaaagaatgagaggaggaggtgaactaggaagtagtaggtaaatgcaacaaagatagtgactgatataacctgatgatatgaaattcaaagctagcaattttagggaggaagaggggagaatagtctagaagcagcaatgtggaccaaggagtaatctcaccctgttggtagatcaagtggtatacggggagtgggaaaatagacagccaccccgtttcagaaagctgcataggagttcttaataaataatgtattggcaaacaaattaatatcatacaaaatgagtttatgggttcccaagaaaaatcacaaaataaaacatatttgtttagcatggttaactaaggaattc

SEQ ID NO: 40504 - DNA, 1069 bp, Homo sapiens
gtattttaatttaaaataccacgcataagccagttgtacttaccttcctcttggtacatccatgtcctaaagccctcaggagaaaattgttttaaaaattgttttcatgtctagattttaagtaaaaatcacttgtcatgtgtgagttgcaaaatgcagaccttcattctgaagctgcctctttctcatttggatctgacatattaaaaagcatataattaatggttgacattagtagttaacattaactttatgatgcttaatatgccatcattcatccatcaaacaaccagaaatgcataatgtcttggcataaaggttttaattatataaaatgtttctcatatgatataaatggaaaaagctcaaaatgtactttaagaagatttttgtaagcatttattaagggtgttagctgtatttttatttctttttaggagtatgcatcaacaattgtgtcaggaacttcaaagggacaatgtggacctatttgtacagtcttcattatcggctaaagagcgccaccttgctgcagttgccagtgcactgtggagacatttcttttcatttttgaagagtcagagaatgtcacaggtagtgcctttctcacaacttgcggatgcagctgcaggtcagcattaattattaatttgctaatttctctttttgcagactctttgtcagtattttcctttattttcttagtaacaaactcttgtatagcaaacattttgtcagccagaaagatgaaacaaattacatattaataaattgggatcctttggcttatttattgctaaaaattaaatgattatttactaaaaataagataattttctatcctgaaaatattgaatatacataagcttttcttatgcatgtaatattttggaaggtaaactagcatttgattacgtgtgattcaagtagtttattttcaaattgtatgagcagatacataggtataagatgaagttaatttgtgtaaagagcaaaagaatataaaataaataccacttcaatcccaagaagatgagatcagaatgacactgaatatataggatgttat

SEQ ID NO: 40505 - DNA, 1033 bp, Homo sapiens
aaccccgtctttactaaatatgcaaaaattagcggagcatggtggcacgcacctgtagttccagctactcgggaggctgaggcaggagaattgcttgaacccaggaggtggaggttgcagtgagctgagatggcgccactgcgctccagcctggcaccagagcgagactctgtctcaaaaataaacaaatgaggccaggcacggtggctcacgcctgtaatcccagcactttgggaggccaaggtgggcagatcacgaggtcaggagatcgagaccatcctggctaacacggtgaaaccccgtctctactaaaaatacaaaaacattagctgggcgtggtggcgggcgcctgtagtcccagctactcgagaagctgaggcaggagaatggtgtgaacccaggaggcggagcttgcagtgagccgagatcttgccactgcactccagcctgggtgacagagcgagactccgtctcaaaaaataaataaataaataaaataaacaaatgaaatgtagactgtcagaccaactgcgtcaggaattaaaaacaaatagtaaatattatgattgggcccaatgctgaagttgcagaaagatctttagtgaggccaagacattagtaaatttgtagaaagatatacagataattttggtggtagtcaacattgggaactacttacaataataacaaggaagtggatccttgttactactgtgttataaaatacagtgaaacgtaactgaaaaacttaagtaattttatactcataatcatctacaaagtcaagactaatgaaaatatgagggtaaattctaaaaatgatgacttcttactggtatgttttcataccagtgctagttactgtttttgggacacaggcaagcaacttcattttaggcacttcaccccttttattgtatgtaagacagcattattataggcatgcttggtttgctaggttcatcactggattcctgatttgttgttctttcccagtcttgcaaactaagtcaattttggagcataggaaaat

SEQ ID NO: 40506 - DNA, 1863 bp, Homo sapiens
taacgcttaagcattggcaaaatgtatagatatagatatacaaatgtatagatataattatgtatctatatatgtgtagtatgttgtaatgagtaatatagattcgtatatgtgcaaagtcacactgcacatactcatcaggttgggtttttttaatgaaaatatttcagagacaactagcattgtaacattagcacagtgcagttaaagaggatgtttaaatgtataaatatattaggcaatccttaataagcattagattatctgggaacaaaccatgaggaatatatatgttgggtatataagttggttttctctcatttccagctaccttaaagactttacttttggctctaactttttgagatgacatgatcctctatgacctgttccttatcaatactatagttacattatacaaatgtatagttacattgttcttatcagtactacagttccttatcaatactatagttactggcacttgactaaaggtaataccgtctactagtaataccacactgtttgtgaatcccttcatgtaccatgcaatttcatgtcactatgctttactcatgttattttaactttctgcaactctattatttttttaattaactaatatgacttctgtaacaggtaatggcatgtcttctccaggaagtcttctttgaatcctgttttttactctttacatacctctgtctcggcacttaactgtacattctttgaaaggaaggactatatttgataacatctagtacaatggctcatgtaattaacagacattgacgtgttcattaagatgatctgaactattaggtagaatgattcctgagtctgattgtactcttcgactctaggtccagatttccaaaaatattttcgatagtgttacttcaattttctcttttcatatcaaattatatcctcctgttataattaactgtccctcgtaactttcagtttttctcccccaaaatttggcaatgacaggctgctccttcctttccctcacaaaatgcgaaataattagtgttggctttttccttcataaagtaactgaaaatgcacattagctcttacctggatgtttacagaagcttcttaattagtttcttttatctttagtcagttcttgttctgacccattctgtttgccattacctgattaatctttcccaaagcacttttttcattatatcaccctccagttcagaatccttcagtgtcttcttaccactttaagaatgaagtcttgatttttcttttaacagcaggattaaccatttttgtatctctagcatcagacatagtgactagcactgagtaacttcttctgaagtgaatgaagaaaacatatgactgaacaaatggaacaccatttgtattcttaaatttattgccttccaatgctactataaaaattctctattataatcaaagtggttacgtttttttcattcttcaaacaccttgttcttttatatattccttttaagatgtaaattatattacacttctgcttttctggcttgttatccacttggattttatccaaagtccttacatggctcacaagatcttacatggtctggaaccctgccacctctccagttcatctgctgttcatctgtcacccattgtgcttcagccactttggactcctggttgttgttccttgagtctgtgaaactgtgccaggcccagcacctttgcactttttcttctcactggaatattcttccccatatacctgtgtgtttccctcccttacttatttagttctttgctcaaatgtcaccttcttaaaagatgtttcctgatcattgtacaagtacaatgttattgtacaaagttcta

SEQ ID NO: 40507 - DNA, 1684 bp, Homo sapiens
tctttggctctttacttttaataaaatgactccaaatttcttttttgaagcaatgcacgctcccccacatagcatatagccactaaccacatgtaaaatgtggtagaatgattgcagttgtcattagagggtagcagtgactatgtactactgttttcgaaaaagactgctgggatggtgagagctaagctagtttttagaggatagttttattaattagctttaaaaggtggtctccataggttcataaacataataccttacatctagggaaaactaaaatgaaacttttgaaagcagcaagaactgaataaagtttattgagaggaaatatgataatatacataaaatgtctcagcatatgtttcatataggtgttctgtgctggataggtagaaaaataaagtagtttttcttaaaattacccttatctctgaaattcatttgtcctgaaaccagtccagaatttcttagattgttgggaacggcttctaggagacttaaaacagctattttgtctaagtctgcctttgtactattgtagatactaccctgtggttatatttctaataaaattctttgttcctcccacctcccaccccaagcttcccaagtgtgaattcctttaggtcaggtctgcatctttttcatctttgaatctctaattcctacatagtgcttcttatatgccctttagagcataatatactatgtaataacatagtgggtaaaacaccacaacagcaatccttttattatgcttacagattctgtaggtcaggactttgaaaagccaagggcagctcttatctgctctaccacgtctggagcctcagctaggatgattcaatgtctggaagtaactctaattcaatgtctgtgagtaactaaaggccgagactagaacagctgaagctggaggatccagttcctagatggcttcttcttcagtaatacatctagtttctaagctagaatggctggtggacaagcttagctggaactgttgacctgagtgctgtctgtggcctctcgaacagggtattctcagggtcattggacttcctacattgcatttcagggctctaaaagtgagtattcccagcaaacaaggcagaagctttatggccttttattaccaaaccttatagccacataatgtcatgtctgctgtgctctttggtcaaatcagtcacaggatctctcagaatcaagaagtgtcaaagaattgtggccatattttaaaaattacacgtttttcagcaaacagtggaatagccaaagcaagacagagatagagatgcagggtgggggaggattgggaggaggaagaaaattaaagattgtgaggtgttcttaatatcatagtaattattggctccagtgctgctaagttagatagattggtggtctcttccaaaatgaaaatgagggcatattccataaatattttgttcacactgttgcttgtattctaactttcttttttagtcaccaattcctaactgccccccggcctgagctcattcttttttcttctatgagaattcaatacataacattttggataagatctagtgcatgtgtgcttgcacagttataccctatccatttacatttgaagaggaagataattgtatttgaaatcccaaaaaccagtataacaacttcacatattttataa

SEQ ID NO: 40508 - DNA, 1047 bp, Homo sapiens
caaactagtctgatgaatgcagaggatacatgctccagtagaaagttataccagattatgaaggactttgaagttagggccagagtgtagacctgggtgaggaggaaatcaaagactataggttttaagtagaggggtgtgatgagagcagttctttatacccttcatatgctgttctgtctccctgaatcataagatccttgacagaaagaccttacctgtttctttcccttaatccgtctgcttgaaatgctccttgatttcttttctgcctggaaagtttatttcctttcgggtgtaagtgaaatatacagtttcccctattaagggtttccaggttccccaagaggcaagtgttgtccttcttgtttgccctgttcatatttgtatcacccagaacatttaccacttgaaatatctccttcactagactgatacttattgagggccgggaatttgtcttattcataattataacttcagcacttaggtatccagctaaaagtgcatgacgtgtctgttgaatggtgattatatagatggttctggcagtaatatgcccaatgaattgaaagagaactttaagcaaactttaagcaaggaaactaggtaggaaatcattgtggtaataaaggctaataatacaaaaatgccaaagtaatttttaaaaatacataaaggtaggagagtacattagttttgaagtcatgactgggattgagtgataaagggaataaaggaaaggaatgatctgatgactcaggttggtcctgtatgtagtcaggcaataatatttaaccaacattttcagtaattaggaaattttaggaattatgacttagacaaacctaatagcttcttatacttaaatacatcttttacttatgtttaactactgataaaatgtttcactgttcctgtggtccaagatttctctcattggtgctcttgaccttatcaccctaaggatatcaaaacactttaatatcatctcattttttcttcagtttcagccatataaatgcagaggttggaaattttcaatga

SEQ ID NO: 40509 - DNA, 1035 bp, Homo sapiens
taattacttatgtggattttatattaaagttatatatatgcatatatacaaatacacatgaaatccaaatgtagaggaaggatttagttttctactacatgggcataaatcagtacaggttgaatatatccgtgtactaaaatgctattatatgaaaagcttgggactagaagtgttttggattttggatttgtttagattttggaatatttgcatatgcataatgagatattttgaggaggggacccaagtctaaacataaaattcagttatgtttcacatacatcttatacacaggctgaatgtaattttatgcaacattttgaataattttgtgcatgaaacaaagttttgactgcaacccatcccatgaggccagatacaattttccacttgtagtgtcatgttggcactcaaaaagttttgaattttggggcattttggattttgaattttcagattagtgaggctcaacctgtagttttcaagctgtttttcaaacaatagcttttcaaaagaaagcttatatgcaaacacaagatgcagaactaaagtcaagagcagctctggtgcagtctgagagccatgctttctcttagcccttccttcccctgctacctctcagaaaagtgtattattacccagagatacgttacagatattctgagcaagatcatgagctcatgtctgaggtggcttttactgaagcatttgtaattttgtgcccataaggaagttttggtcacattacaccattttttaaaagtgactttctttaaatttttgcagcaaagtcatagccttagctgcatcaaatgctttgaaataaaccagtttgctctgaaattaacatagataattctattaataacaccaatcacctatacaaaacttactgtttttcagatccacttaaattatgcagatatgttaaatacactcagacacaaacttgatgtggataagaacaatggttatgatatttattgcctttaggcacttttcacatagcagttttacctttgaagtacatgt

SEQ ID NO: 40510 - DNA, 2554 bp, Homo sapiens
ctaagatgattgactttaaattgttgatcataatctcaaatggccatcagctctagaatgtttgcttttctgctctccaaaatgacttaatgacttacttcagaacttctcttttttttttttttttttttggagaaagagtgtcactctgtctcccagtgcaatggcagtctcggctcactgcaacgtctggctcctcccgggttcaagcgattttcctgctttggcctcccgagtagctgggattataggtgcctgccatctcgtccagctaatttttgtattttttagtagagatggggtttcgccatgttggccaggctggtcttaaactcctgacctcaggtgatccacccagctcggtctcccaaagtgctgggattacaggtgtgaaccaccgtgcctggcccggaacttctctttgacataaaatttaatacgtactcttctccaatccattcgggttaacatcttgcctcataaatcattgaaaaatagaattggtcaggtaagaattcctatctttacagctttaaatctcccaacacatctgcttcatattcaacctctcagactattcttcttttatgttagaagtgtcactttctatcaagagctaattccttccctcgtgcactggatcttaactcttctcacctgttcaaggactttattgtttgtgtattttcacttaaatatttacttcctcacctcctagatgtcctcagccatccatagttgagcttcttcatcatagtcttcatcaagccccaaactgctctgggaaggccgtcaatgacttccatattgtttcttccaagggttcttatttcttctttttgtaacctctgagcagaggtcaatcctgttcaccattgtcgtttttctgaagtacttctcttggcatccgcaatgcctggtttcctttttacttcattgaccacttgtttttgcatatattctccacttgcttcatatgaaaatgttataatatcaaatggctctcagttatggatccttttatcattgacccaaatttatgtcaacaactctgactttaatcccttaactctagacccataggtcagattatctgcttaatagctctacttgtataccctggacactcacctcataagttcttcctttagtctttgccatttcaggaaatagcaccattgacctatttccttatgcaaaaacctgaaacttctttctttcatactttaatgtaatttaccagcaaatcccactgaatctttttccaaacatatctttaaagtttcagtcttatagtttcgcacagtcgcctcctacctggtctccctgcatctcttcttaacccctctattcactctttatgtataatccagagcagtgtttttgaaacaatcacatcatgtcacttctgtgcttactcttttccagtagcttcccaacatatttaaaatacaatccaaatttcttaccaagaccagtaaagcctcaaatgagatatgatgtcttcctgtctagaattttataataccaagcctactaataattgaggaactttccactcattttctctgccttgaatgtttttcttccaagtctttattgactttcatttaatcatgtagttcaattgcagcccttcaaaaggcttttccattcatagcagctaataaaataatgatgcttatcctttaccaattactttgccacattactttgctttgtttcattttcacagcagttacttctgttcaaatttatcttgttttagtgtccttttcttttctttccaaaaatgtaagctctaccagtacatgtgctatctctgacttacttgttgtcctatgcctagtacgttaaaacagtgcctagtatgtggtaagttttaaatacaattgttgaatgattggaattcagtgtgttatttaaaaaatatatgcatggttatatcgtcatagaaaaagcatctatgttttttctacttccttttcctcctgttatctcctaaaaggttaaaatagatgtactctgacaatcctttggttttagaaagaacaactcctataatcctataaaaagatttgaccaagtacttaagtatgaccaagcactctggatttgtgtacatcttaatcgttacatcatttttgccacttctttttggtttgggttccttttctggtttctgggtttccagtaccattcaattatgaaacacctgtaatttttaaataattgaattaaaagtcgagttatgtgacttctgttatctgaatgtgttaatggtgtttaaaacatgtttttggaagtatgtgttgtgttgatttagacctagtctgcatatgagaatgggtatgattgggtgacacatatttattttctttttagctgcaggttatatacagcacaatatcaagtgaaaatgtttatattgccagagcccatttaccttctcataacttcagtttattttttagggtgtcattctagaagaacaattacgaatgtatcttcactgttgtttgacactttgtgatttctgggagccaaacattgc

SEQ ID NO: 40511 - DNA, 1031 bp, Homo sapiens
gttaaataagcttaattgtttattagagaagctaaatgtctttccctaagccataactctacttgttgggaagaagcatcagaacccagatctcagttttgttcatgaatcatttatggaggctctttggtgaaacaggcaccgtggcgtatataccatgtgggtattattctatctttcagagagctcttagacacttgaaagcagataaacattaaacttaacaaggtaagtatgatgatgtaggtatgcctagtgtgccataaaagcgtaaagaaaggccacttatctagtaagggagttaggaagttttctggagaacttgtagtttgaagtgtattttaaataatgaataaagagttaaggccttgtccaaaaaaaattgtgcattgctgctttttacccatatttgggtcactcttcattcattgaaaaggttttgtaccaagatcactgtgttcttctttacctgtacactatttctgctagtgaccctgacgttattgggtataatcgaactgtcctttcaatttcttaatagcctcacttcttattagattttcttttacttgccttatctacctcctcccatggttatactctacagcttttcacttttcatttttcttttcattttgcccgttaccattgaccttttcatttttctgtcctcttccatttcctcactttgtttcttaaacaatatacacaaccaattatttttaatgaatattccaataagtccattaaatgaatatgcctgcttctaatctctgctttagtcctttttttttttttctgaggcggagtctcgctctgtcacccaggctggagtgcagtagcgctatttcggctcactgcaagcttcgcctcccaggttcttgccattctcctacctcagccttctgagtagctgggactacaggcacccgccaccatgaccagctaaatttttgtatttttagtagagacggggtttcaccgtgttagccaggatggtctcgatctcctgacctggtgatctgccctcc

SEQ ID NO: 40512 - DNA, 1949 bp, Homo sapiens
atcaccactaaagaacttattcatgtaaccaaacaccacctgttccccaaagactattggttgtggggaaaaaagtaggtcaggtgaccagccatcctatcctggtttgcatggcccagagtttcagtgtgaaaccaggaaacatctgagcaaaccaggatgagttagtcaccctagaagtaggaataatatgactaatctaagaaacatgctctatgaatttaggtctagcataaagtcaaaatatctttcctatgggaaaagaggcgattataatatttatgaagaagtagttctgtggttctctgctattccttcagttttagtgttccttgattgtatcaaattatattctataagtagtataggactatgtgttggatttctggaaaccaattttgtgggagcagtagtaggtagttgtaaagaataatatatttggatagaactgtcagtttgattatatctattttcctcccattgaggtaaattgaaatctgaccatggtcatgtactttgacttgatctccaacagtgacagtggtgaaagagtccatttgctgtatttaaacaaaataaaaatcttccaaatatacagcagccttcaaataaaattagtgtacacttcattatactttttgtttttattttttgtttaaagagacagagtctttcactgtcacccaggctggattggagtacagtggtgtggttatagctcactataaccttgaactcctgagctcaagcacttcttctgcctccttctcccgagtcattaggacaggtgcatgccaccatgtctggctaatatcttcattttatagacagatcttgctgtgtttcccaggctgatcttgaattattggcctcaaggaatcctcctgcctcagcttccaatagtgcttgggattacagatgggagccaccgcacccagcctgaccactacagctttaatcaagcaaataatgttttgaattcttttttctagctagagaggatctgccagaaacagaggtggagttttagtttagtaaagagaacgtatattgctcaattttacttacttaagtacagttttttagaggtaatcctatttaatatttgtgaatgctaattgtaaacgtgtgttctacctttgggaacagcattattgttttcatatgagaaagatttttcatcttttgctgcctgctttttaaaagcctcattgttttctgagatcacagaagtaatttttagttttataaaggttatggaagggtatttaaaaagtaagcctgattttaaaaaattattttgattttttaaacacattaatttggagagtccaggagtagaaccaactcagaatgtgattagatctaaataatgtgggacaatagtctttaaataactaactaaaaatcagtgtttcttgagtagaaggatcgtaactgggatattgaagcccaactctattctctcctaaaaataaatccaattaggcaaacttctggtaacagttactgtttagactgtgaataaattttcttcttgtgatggtttctgataggtaggctagttatgcataaataaatgagtctttgttaaattatatataataaccagttgttaaattgccatttcttttttcttttttttttttttgagatggagtctcgctgtttcgcctagcggagtcagtggcgcgatctcggctcactgcactccgctaggcgacagagcactccgtctcaaaaaaagagctaaaagagtgaatgtgcaccttattagtccaattaaagatttgacctatgtagtatgcccaaatgtaatatgcgtacatttgattgttcaaaataaagataagacattctttagaaaaggactaaagcagagattagaagcaggcatattcatttaacggacttattggaatattcattaaatagctcatattctctcc

SEQ ID NO: 40513 - DNA, 1027 bp, Homo sapiens
atgctaagagaatttgccactaccaagccagcactataagaactgctgaaaggagacctaaatcttgaacctcaaaatataccaaacaaacctctttaaagcataaatctcacagggcctatcaaacaataacacaatgaaaaaaggcactcaggcaacaactaccacagtgaatagaatagtaccttacatctcaatactaacgttgtatgtaaatgacctaaatgtgtcacttgaaagatatagaagggcagaatggataaaaattcaccaaccaagtatctgctgtctccaagagacttaacacataaggactcataacttaaggtaatggggtggaaaaagatagtccattcaaatggaccccaaaagtgagcagaagtagctattcttgtatcagacaaaacagattttaaaacaacaacagtttgaaaagacagagggacattatgtaatgataaaagtatccaacagaagaatatcacaatcctaaatagggaacatacacaactaacactggagctcccaaatttataaaataattactagacctaagaaatgagatagatggcaacacaataatagtgggggacttcagtactctactgacaacactagtcaggtcatcaagccagaaagccaacaaagaaacaatggatttaaactataccctagaacaaatggacttaacagatatttacagaacattctactcaaactgcagaatatacattctcttcaccagcacatggaacattctccaagatagaccatatgataggccacaagtctcaataatttttaaaaaattgaaattatatcaagtactctcccagaccacagtggaataaaattggaaatgaattccaaaatgaaccttgaaaactatacaaatacgtggaaattaaataatctgcttctgaatgatctttaggtcaataatgaaatcaaaatagaaatttaaaaatcctttgaactgaatagtaatagtgacacaacctatcaaaacctctgaggtacagcaaaa

SEQ ID NO: 40514 - DNA, 1050 bp, Homo sapiens
gagaaaacctttatagacacactcagaataatatttaaccaaatatcttggcatcctgtggcctgttcaagttgacacataaaattaaccattctatttgtagttgtacaatagaatgaggaagatatctgaactgatacggagtgagttgcagaatgtattgttaaatgatagaaataaagttcaaaactataggatgatgttaccttttgtataagaaattaggaaaaaggcaatgtgtgtgtgtgtatatatatgtgttcaattgtgcacaaataaatactggaaagacaaactattgagattggtgggtaaaaataaagatgggtgggtgaaaatggagtggaagggtttgatgtaattatttgggtagttctgactttagaatcgtgttaatgttccacatgccctaaaattaaatcaatctgtatgaaaggtgcactcaatggaatataacagaaacaactgaacttaaatgtattttaaatgaataacactctttgaggggattggcaatgttaacccaggtaacttaagaatgtactattttgacactatactataaggctaaagacaatcataaagaattgtaaatacttaggagatttgttttttacattgttatgtgaggattagcaattttaaatctattatatttgtattcttggactggacaaattaataaatacattgtgggtaattggagtcaggtttgtctgtgttggggaattgagttacacatatggaaagaaggaaagccagcatgaagcacattatgttggattagaatttgttatagtatgcaatacttctttttaatatataggactatatataaatgtatatgtgtgtgtgtgcatacctccatttcctacctttttcactgggtgggcttacaagcaatgatactgagtaacaatatacacattgcagctatatcttagtttcaaaataaccattctgtagtgaaaggaaacgagtctttgaacaaatggctgattacaggatgaagcatggaaagtaaacatgagcctgaaacatcttgtacca

SEQ ID NO: 40515 - DNA, 1021 bp, Homo sapiens
gtagtcccagctacttgggaggctgaggcgggagaatggcgtgaacctgggaggcggagcttgcagtgagccaagatcgctccactgcactccagcctgggtgacagagcgagactccatctcacaaaaagaaaaaaaaaagagaaagtttgctgaccacggcactagatgattaaaatttttttttaagttgaaatcaaattaatctgtgctttttgttttaaaatggaaatttgtcttaaaagttaaatgaaattgcacattttcaataaataattttgtctaattgagaataaattcttagtcatctaaatcattcttttaaaagtatttgaaagatatatggcatttaaaattctgctgctgtcttataaataacacattttggttattttctataggttaggtcttctgaatcattaatgagtgaccagtgtccatgtttatgcattaaagaattatgggttctacttattcatcttctagaccacagaagtaaatggtttgtctcggaagtaagttggaaaattgatgtgttggttattgttactaacctttatattgatttaatccaatggttttaactgagaaaaatcttaacttccttttttataataaggcaataataaccaccaatagagcaataactgagtactgaatatctactttatttttaaccctaattatttttagccccaagttagtaatatgaaaaatctaagagcagtacaaggttcaacccttactttttttcaagttttgttgttgttgttctatcagaaatctttcagactaaggtatttactacccattagtaacctagaaaacattttagtcaggaaatacggcagatttagaagatttgtggagaaataaaacaggtttctattactcaattttatagcaatttcaaggagggaggaagagaagcagaaaagggaagatgagaaactttcacttcattttcagtcatgtcttcagaacagggctttattttatttcaagtgctgtaggttattga

SEQ ID NO: 40516 - DNA, 1040 bp, Homo sapiens
aaaattatgtgtttttattaaattatgtttatcatagagtgtttaatggagacagtgatttaaaggtgctacagaacatgtttatttttaagtagtataaatgtttgtagagtattatctgttattttagattacaagcgtaaagactgtttttgggaaatcaagattgagggaaaaggagttttataatttttcaaaatttagatttttttatgcattatcaatatttttacaatttagtgtgtatgtgtattagtggattaaccagatatgatagaataacttttaaatatttatttatttttgttaattgacaaaattatacatatttatcatatacatcatgttttgatatgtgtatacagtgtagaatggctaaatatagctaattagcatatgtattatctcacattcttattttttgtgtgagaacacttaaaatctatgcttctagtgattttcaagaatacaatatagtacattgtttttaactgtagtcatcatgttgagcttattcccttatctaactgaaattttatatgctttgatcaacatctaccccgcctccctcctaatcctcctcacagcccttggtaaggatcatcttactctgcttctatgagttcagcttttttagattctacatataagtgagattatgtgttacttgtctttctgtgcctggcttatttcacttaatttaatgtcctccaggttcatccatattgttgcaaatgacagcatttccatcttctcaaggctgaatagtagggtcatacactgtgtaacaaagttttagtcagtgacagaccacatatacaaggtagctataccacatagcctaggtgtgcagtagtaggctgaaaaagtttaagtacaataaatcatgttagcctaaagacgtgcttctcagaacatgtcctgctgttaagtgacacatgactgtattccattgtgtatataaaccacattttctttatgcattcatctgttgatggacaatttggttgattccatgtcttggctcttataaataatgc

SEQ ID NO: 40517 - DNA, 1029 bp, Homo sapiens
ccagtgttaatataggagcatttgtaaatcaaaaccagattaaggtttgacttgtttcatttgatttttaaattatcagctttttctccccacaaggagtattcattcaagaaggagagaaattagtcagaattacagctctggaacctgactgcctgagttgaaattcttgccccccatcctccttttattaattgtgtgcttttgggcaaatgacacctcagcctccacatctgtgtaattcttacaacttaccagaatcattggatgaattaaataaattcatatacatgaagttattaaaacatagtagtcattgaatcagtagctattctcttgatttatgacagtataagtgtctgaaaattttaaagcaaatgaaataatctttattttctgaaatttttatcatatattacagtaagattcaagatcagcttataaaaaaaactttcaagaccacatcattatgtgtattctgacttttgaggcctttttggaatgtgattaagattgttttgactgtgccctttttttcctacctgtgataatcattccctctgaagtttggtttttaaaactttatattgttaccgtgcctagcttatagataagtaatagattctgcctatgaaaatgggagcttatatgaataacaaattatggtaattcacagtgagattccctgaagtctcaacccctttcattatatttgactttaccgttttgaataatatttactctttatgaatatatctttgttaaaatataaaaacggctaagcatggtagctcatgcctgtaatcccaacactttgggtggctgaggcaggaggattgtttgaatccaggatttgagaccagcttgggcaacatagcgagaccccatttctacaaaaaattaaaaagttagtccagtgtggtggcacataccttgtagtcccagctactcaggtggtcgaggtggggggatcccttgaactcaggaggttgaggctgtggtgagacatgattgcaccactgcattcca

SEQ ID NO: 40518 - DNA, 1040 bp, Homo sapiens
aactattccctggcttgtgtactctttatagggaattgttttctggtgtttttccctggcgttgggtaatatttttcatgcttgaacagatcgatacttaaatctcagagggacacttctgtacccttccagaactctattttgtatagcttctttcttcttgggtacttttgccctgcaaatttggacttccctaaacttggatcccatatctcctcatctcaaagagtgagttgggctgtatttgggttctcttcctcatattgaagcctggaaactgtctctaggtggggagctggtacagttgtagggctcagtttctctctgggagagcaatcttatattgtcttgtgtccagagcctgaaaacttgcttgacgtaatttttatggttttcagctttacagtgggagatggagcaatctgattattttactccgtcttgcctggatgcagatgttcactgcagttatttttaagagagtactgccttaatgggccgagaattgtgaaaattgggatgatatgactttttatgggtgaaataaagccataaaaatgcagtttaatatggaggtatttacacaactgcttcacacttatgcttctattctgccacagtagtggcatgattgttcatttgaattaaactttagtttcatgtttagtatggctgtaaatttgtagcctataattctcatcatgttttctttgcttttgtttactagattgtctcttactcattctctatataatgattattagtgttttgcccatagtaactacctagataattattgctgatataaatgctgaagtaagtgagggaaagctgacatggagtgaggttgggagaaaggcagcaactattaaaaggtcgttcagagctttataaattattattaggagttttgattttattctaaatataataggtattctttcaagagttttgacttgggaacaagataaattgatatacattttaagcagattttttacttagtgtatagggggacaaaagagagcatggaaagacct

SEQ ID NO: 40519 - DNA, 1050 bp, Homo sapiens
tattcagacatggttacagaggttttgtttttgtcttgtttcactgtaatggagtggccctgtatcattattatttattattattattattttttgagatggagtctcgctctgtcacccaggctggagtgcagtggcatgattttggcccactgcaacctccagccccctgggttcaagcaattctcctgcctcagcctcctgagtagctgggattacaggcgcacaccaccacacctggataatttttgtatttttggtggagatggggtttcaccatgttggtcaggctggtgtcgaactcctgaccttgtgatccacccacctcggcctcccaaagcgctgggattacaggcgtgagccaccgtgcctggactattttttatgttttatgaaaattgtttattttcagtaggggataccatggcctagctgttagctatcagcttttaggctgttttatattttttgttttcttaatatgttacgtgatttgtaaatgttaagtattattgtttcattatcatctgatgggtccctggttcatgccaggtactttgcaaggtactgacgaatcaaagaggaaaaatatgctgctgatgagtttgcagttgtgtagacagctagacatgcaagcatacatcagcttggtaaatgaaaaggtacggtgataaaggaatgtacaagctgctgtggaagccaagggctttgtctatctgtgagctcctcactaaatgatgccagatctgggtcttcacagatgggaagaaattagctaggcaaaagatttgggaaaagtttttcggacaggaagaattccaggcagaaaaaaataaaactgtataaacaaagacgtgatgtgtgtaaaaacataaaagtttagagagcatggattaaatattaattacatatggttggatcagaatgtgtgtgagtgatgaatttggaagggataaaagcagagttggctttgtaaaccatgacagagagtatgatttttattttggaactcctgtggagccactaaaagattatagtggaaagaaccaa

SEQ ID NO: 40520 - DNA, 1033 bp, Homo sapiens
gaaacagctcttggcgtgctactgggccttagtagagactgaacacttaagcatggaccgccaggttaccatgaaatctgagctgtccattatgaattaggtgttatctgacccaccaaggcctaaagttgggcatgcccatcagcaatccataataaagtggaagtgatatatatgtgaggggacccaaatagaccgtaaggaaacaggtaagttacatgaagaagtggtcccaaagcctaaggtcctcacttctgctactcggccttctctttctcagcccatacctatcaccacatgggaagatcctgatgatcagctggcaaaagaagacatctagggcctggggtgtgaattatatgcaggcacaacctaaacgtaggtagctgtagcactgtagccttgttcttgggcatcctaaatgagaatggtaaagggaaatccttctgtcaagcagaacatggttgttctcttagttcagaaggaaaaatggccagatgtatgtactgattcatggtctgtgatcaatggtttgatagtatggtcagggtcatggaaggaatataattgaaaaattggtgacaagaaaaaatttagattagaggtatgcagacctttcagaatgggcaaaaagtgtgaagatatttgtgtcccctgtgaatgttcaccagatggtgaactcagcagaggaggattttactaatcaagtggacagaatgacttgtcctgtgaaaattcagtcagcctctttctccagccaccccgtcatcacataatgaacttatgaacaaagtggccacgttggcagagatggaggttatgcataggcttagcaacatggaattccattcacaaaggcagacctggctatggccactgctgattgcccaatctgccagcagcagagactaacactgaactcctgatatagcaccattccttggggtgatcagccagctacctagtaggagattgattacattatactgctttcatcatggaagggactgtgttctgttctttctagaataga

SEQ ID NO: 40521 - DNA, 1042 bp, Homo sapiens
cagaatcaaagtaaagcagacatgagggactccaaataaaatatttggccctttgctggaagtttcactctgggaaagcatagcatctaatctgatgtgttctttagttgccttgcaaaaattaggtcctatttatgaagttacagctactgagaaaactggggtgtctctttactttcatggctttgaccccatatatttgccccactcaaaaatttgttttggagaagtctagagatgtcataacacacagagaaagaaatgtgtgtgtgtatatcaggaagatataatgggtccccaaggtccccaggaaagaattactgtggtctgttattttgattaataagaaagaatagtcaagaatttgaaaattaatgaaactgtagggaaaattacttttcatcctagagttttaacgtgacaaagggctagaaaactgaacattatcggataaaatttggactttgtaaagtagattttttaaagctcagagaaaatataggtatgaatccctgaccaaagactgtgaaaatttagcaacttgtgtaagatgagaggttctgttaaggaaagtctgatgacttcaaatgattgaagggtagggaccttatatccaacaagatggatgtagctgtccaggtcccctcaaatgagctctggtaatgcactaaacatggagagaagggcatgccaccaataatacagtggcatgatcttacagactggaacagggacttgtgaaaaacacaaaaacaatacaatgtacttaaaaaatgttacctttttacaaatatttgagagatgcataagcaaaaggaaacgtctcttgctttaagcagatataatgatattataataactgggagaaaatagaaccattcaccttctactttgcatctccatctggagaataatttttgaagtggaggtggtataaccaatattattgtgatggaattgaaggtagtgaaaagccaatcccccaggttgagatgagcagcatagaggatgttgtaataacttgcagattcagtttgactca

SEQ ID NO: 40522 - DNA, 1061 bp, Homo sapiens
cactgtcagcagggtatgtctggacatgtgcacagaaaagagaaacacttagattgaggacggttctgcctttgtctttcaaagtgccttccgctttacaatctatacagattccttgcaaaatcaagagtcttattcatttcctgctctaggtgcatccattttaccagggcctagagtatgaatggaaagtgctcctggagcatcatcaggccacattcctcggtgccttcagcccttctaaacctgtgtagcaagccactagcctcagttctccgtagccttaaatctcgcctcataaaccatctgggcgattaaaaaaatattttaaacattaaaataccaagtgccaaagaaggtgaatttcttaagcctagtggtacactgataagtggttagctaccaactcttgggagaaaaaagctccagtttgtagtgcttcccaatttttgtcatgtaatactcccatctgtctgatttcaagctatcaatgtgaagtcacttaatgctgagttggaatgagacgcacatactttgctcttttgagatgatatgaactggctccaggtcccctctgccagataaagttattaaacattgatcccataatttctgaaaaataggcataataagctatagctggctttccctcagaggtggtattatgtgtagttaaatggtccttcaaaatctatgaaattcctatttgccatcgaatacattataagaatacaattaaaagaaattttctaaacattcaataatcatgtaagaaaattaagcatattaagaaaagctttgaaaaattttataagaagcaaattattttgctgatgtaaatctgacataaatcatatacattgacaagagcattgtatgtttatgggattataagtttttaaagagtttccctgtatttccatggctttgaaaattatatccccagataaattgtggcatttcctttgtgcatgttggtgcaattttacattatgaaattgtcatgtagattcattacacctattttccaaacaaaaatgaccataattcaaatatgtacc

SEQ ID NO: 40523 - DNA, 1047 bp, Homo sapiens
aacatggaatcatgctaacttattttcaaaggaacactgagcaataaagtatcgtggcatttatgcaaaaaaaaaagttaattttttacaccttcatgtaaggatgtcttattaagcctgtgacctggcaagtgttttgtttggtatgtacaaaatggtcagagctagttggagaatgagacatgcttttccagctgtttggttatttctctggattaactgttcaactggaaaatttttagtttttctagccaggtgtggtggcacacacttgtagtcctagcgacacaggaggtggaggcaggaggattacttgagatgggattttgagactctagtgtacttatgattgcacctgtgagcagccactgcactccaacctgggcaatatagcaagtccctttctcttaaaaaaaattgtagtgtttccacttttcttctgatatttttgtctatttcactactggataatgccaatataaaaatttgggtataatcaagaataagaggtaaactactaaataaaaaaagctttccaactgttagaagcagatgccttaacattttgtgaaaggtaaagttttgaggtttctgaattatataaaaaaacataaatgtggagatatatattatatatacacattatatatacatattatagataatatatatccacatttatgatttttaatatatacatgtatatattatatattatataattatatattacatttatattatatgtaatgtacatgtatatattatatacatatatataattatatatattatatagagagagatatatatcttgctagggtgtgtggatgctggaatataacgattttgcacttaacaggacaatgaattttgttatactacagttaatattagttttgtgttcaaaacagctgtgccttttcatgccacaaaatattttctgtctactttctgagtagcagaattaattcatttttttaacaaaacgatgtatgtcaagtgttcagtagtcacatgaggagaatgcttcctttgtgcctggca

SEQ ID NO: 40524 - DNA, 1081 bp, Homo sapiens
gacatagactgctttgggatttaattcattaacatcttctgtctggagtgctcttaaatggatttttaaataaatgagtactcctggctgttttatgaaacagtggcagatccgtgaggtcagtgggcagatctgtattaacaaggatgtggatttgtttacatggaagcaaagcaataggttataattaagaatctgacttactctaaacagtttgcatgtctgagcataacatgtaaaagattggaattatttgatttccagattgaagactatgatgtgatagctagcatgataggagccaagtgtaaaaaactccggaccctggatctgtggagatgtaagaatattactgagaatggaatagcagaactggcttctgggtgtccactactggaggagcttgaccttggctggtgcccaactctgcagagcagcaccgggtgcttcaccagactggcacaccagctcccaaacttgcaaaaactctttcttacagctaatagatctgtgtgtgacacagacattgatgaattggcatgtaattgtaccaggttacagcagctggacatattaggtaaggttacaatatataaatttgttttaaatgtctgtttccttgacagaaaagccaatctcagactttttgttaggaaaaagaaaatttttggatacaataaaaattttatcctgataagatggcttggtttgataggaaatgcaagatagatcagttaatatagggaataattatatatgtactttaataaaatagtgaggacaataacaattttatagttgaaactgtaaaaaactataaccattaattcttggtctacttgtaagagtgagaatttacatgagctgcgctctctatttttattaaggagagaagaaattaattcatttgtataatgaattcaagctagttttttttaagtttcttaattaaaattcttgattaaggaatatcgtgaaatctttatccctgataattctagcgtttaggaatagttctaccccaggcagatctattgaaaatcttttccagctctgggatttcttgaatccttgctgcatt

SEQ ID NO: 40525 - DNA, 1028 bp, Homo sapiens
tccagagttgacccatggaaaattacctctaaaggataatcaattttaaaggctgtgtatttgggggtggagtggagattcctaatgaaattaggaagccaggtatggttgctcaaacctatagtcccaactactctggaggctgatgtaggaggattgcttgagcccaggagtttgaggctgcagtgagctatggttataccaccgcactccagcctggtcttagagttttacaatggtgtgtgctacaacaaagaaactgtttacctttgctaaaaccagtgttttcaaaccttgcctgactactgaactcatttttctatattacattttccatattacattttattgttgactgtcaatataatagcaatgtttagatttgtgatatttatgaagcaactgttcacagtatacatacatagagcactgtgctgactttcccatggtgattgtgatctattatataccttcgctgagtattcacctcatggcatactttctctgtagtgagtttaatgtagatactaaattagttgtgtcactttttttctgaaactaatctttgtgccacaagtgccagttagacagatttgcagtgacaagaacttctgaggagcagtgtctcacctgtaataaacctgaatattctagtcaatgccgtaaacatgtttttaggactacttagaaatatttatttttcctcttgattgggaaagagacaaattttatctatttctttttacttctaaaaatgactttaaaaagtttaaattccactattatataatgctgattgaagtaatttaaagttgcctaaattaaagaatcctaagacctacctgctattttcttaagtttcctactaattatgtgatcctggttaggtcacttaaattcttgctgatagttcctctgtgacatttgccctatttttaaaattagataatgaataagaaaataaatatgtctaatatttttggggaaaaaagagtcctgcataatatctaaaatttagaaggaattat

SEQ ID NO: 40526 - DNA, 1031 bp, Homo sapiens
agagtgagactccatctcaaaaacaaacaaacacccagaattatgtttaactaaatatctgggtaccccatggcctagtaaggctgatacataaaattaaccatcataaatgtaatattgaaagtgacctatatcacctctacaatatactgtttgttaaaagtgagtcgctaagttaagcccactctctcaaagggagaggaattaagctctacctctggaaggaaagcatatagaataacacgtggacatatttttcaaaccactctaaccgctggtactaggagactccagtgttatactccagtgttcattgaatagaagttactgaagaaaaaaatggaaggaatggtagaaaagtaatatttgaagagagaattgttaagaatcattatctttcatgaagagagatatgagtcttcagatcaaaatgggcacttggggttttaaacaaaataaatgaaaatacatttttagacagattgtgatgtaattgcaggagatcaaaaataaagggacaagagctatcagagacaaaagatatattacctgcagaggaaaacaattagattgacagtagacttcttatcaagtaagagactcataagcaatggagtaatgttttcagagtgttgaaagaaggtaactgtcatctgaaaattcgaagtctagctaaactttcgttctagattgaggaaaaatctcaaatatgcacaataaaatttattttaaaaaaagattgagggtaaacattaagttatttaagtttctgtctttctgattccccatttataatgataggataggtaaataacggtatttaccttataggttaactgttctgttcactgttatatcccaagtgcctaaacggtgcctaacacatagtaggcatgcaataactgtttattaaatgaatgaatgagtgaataggattgttgtgaggatttatatatataaagaatttacagcaatgctacctgacatgttaataagtactcaataaatgtttgttgttaagattttatcac

SEQ ID NO: 40527 - DNA, 1036 bp, Homo sapiens
tataggcgtgagccaccacacctggccttactcttacttttaattcaaagaactgattgtatagggaatttatctcaaactgtatcatgagaatcttattgtcccagtctggggataatcagctaggtgacagtgttccaagccaccccacccaggagtttggatggaagtcttagagaaagaagagattttgttttgggcagatataccaaaaagtatatagtgacctggtattggccatgcctcctggtcagaactgagctaagccttctactggtcctgcagtatccgcagtgccactgcagagcaggacctctataccttcagcagaagtcctggttctagaagggagcaatgtgcaagacccttagacaaggaggaataaaaaaagatggggtcaggagatggcagttcaaagaaatagtgaaagtaccttgtgaaaaagaactagaaattttgaaacataaatagactaaaacaagaacacatagttgtgaaaaaaactgattggaaatctagcaaataaagtatagtcattaggaaataatgaatagatgtgataaattctaaattggacacaggattactaaattagaagagaagtctgaggaatgtactcagatttctaaaaggtatgtcagacactgctgtaagttttatacacacccacacaatctcaatcaataaatctctctctctctctctctcatttactcctaaggcaaggcagtcctactcatttaataaatatatattgtgcctactatatactagtgactctgttatttatctattgctatatatcaattgcttcaaaattagtggcttaaaacaacctacatgtattatctcacacgttttctgtgggtcaggaacctgggagtggtttagctgggtagttttggctcagggtctctaaggaggttgcagccaggttgttatctggtgcttgactatggctggtggctcagcctccaaactcagggggatgttgctacagttccccttcagcttgtgaccagaggcccctgttccc

SEQ ID NO: 40528 - DNA, 1032 bp, Homo sapiens
tttatgtgcctttacataatttgcattaataaatatagtatatttatgccattttacaagacttagacaagtccgtatgcataatgcataaagcttttgaggattttgaagacctggatttttagtcccaaagtttgggaaaaagctactgaatatattctgttggctgtcctagatattttgcattattatttctttacaccagtctgaatagggttggtggtattctcatctttacacataattaaattatggtctcaaaagattaataaattgcctgctggcacaagcaatagagtcaggatttgaactcaggtcttgtggccttggtgttgtagttaaaattataacatatataaaagcatagaatagtagttattctgatagcttggctatttacctaaaacaaggattttctttactacttactatttctaatttgtagttggtaaggagatacaacatagtaactaacatatacaacattataatccatgataaaatacagactattatgtttatgttttataaatatcttctgcaggaaaacggattttttgtctttttactatgaacaagcttagtttgaagtcttagttgttctgaatttataaatcacaatttgttattcaaattacatttagaaacatttaagtgaaagtttgtagaatcaatacataattaactgctttaagtaagtagtttatataggcctactctcaattttatactgtaatggagagcagcattgagacagataatcctcaaaataattttgacatgtaaaatgatgtgttgttgatagctaggtgatgtattcttaagtcgttagccatagccaggcatgcagcaggcctgatgactcagtaagaatgagacctcaggagaatagaactgtggcagggtcagaattgtcttgtatgctgatgtgggtccctccctgcatcagtggttgttcagaatttttagccttataagatagtaaaatatagttcaacttggtttcttaatttatttcatgagatctttttc

SEQ ID NO: 40529 - DNA, 1027 bp, Homo sapiens
attttgttagtgactccatcatcatttgttggaattctatttttccctgctgatcagtcctataaataccataggccctaaattcccgtgtattcttgggactttctgaacggtctagtattctttggctccctgtggtgatcctggcttctgtgatgctcttattgctctaggtttataatgtgttttaatatctagggatttgaacgatgcctggcatattgtagacatcactaaatatttttgaaatgaacacatttagtgggggcaagttgattccctttctttacctcttgcctccctcccccctttaaaattttcctgccagttattgagattcatttattttagcttgctttttccatggtcagttgaatcattaactgttagtaaataaatcccttctgttgctcattcagaacttgcgactagagttgctccttacagttacatagagaagcagcctgattaaaaatctgcatgccttttgactttgcaccgtgtcatagtaactgtagtgtgtctctccccatcacctgtgatttaggatgttctgtacctggtttctaagagaaaaatggttatctaagagataaatggctgtagaagtgttccctgggatatgaggaagatatcctcatatccatttgtattttaccatcacaactggatatctaaaatataataaattttacactggacacttaaaactttattagcccatgaaataaatgtatgcattctttaaaaaagatcaagcaatacagaaatccttaaaggaggaagtgaaagtgctgtgtgcccacctacccagtaaccttgttccataaagatgatcactgcttgcagattttaaaaataaatatatttaagtctacttttgtttcataaatggcagtgtaccatctataattttctatagcttccacttaataataattgataaacatccttctgtgtcagtgcatataatagtatcttgtcttttttgtaagtcttttggtatttcattgtaggaataacccaa

SEQ ID NO: 40530 - DNA, 1042 bp, Homo sapiens
tcttgagtgacagaaaagaagaaagaagtgctcttaggttatttgagaaaattttgttttagaggtttggaattttgaaagtcataggattttgttgttgtccttgtcatttatcttttaaccacccccaaaattgatttatcaaaatgagttcagggccaagtgcgcttcctttcagccctgaaacccaccgcttctgcatggatagggcaaccagcctgggctgaaggtgggagagaagaggctggatttttcttccttaaagaagaaaggtctgcacaatcaggttttcctgtattcatttattcattcattcatagaacaattgttgagtgtattttcaataaaaggttggtggcttttgttgatagggaacaactcaggttattcttctttctttcttttagggttttttttttttttaaacagagtatgttattttattgttcctgactatgacccaggatcctttgttctcctttatatgcagtgctatttaagtcaaactagaactgataaaagtacactcaatgacgaatacttcccaggctaaatgctgggctctgggaacccatctttaacaggtccagggatcaattgcatgtgattgtgaagtgcttgacctttattcagttgcttccagtggtctggatataacttgggaagttcaaaaggattcccttgttgggtgaggagggacgggcctcttacctgtaagactcttgctactgtcaggcgtggatgcgaacatctgtggcatgttttcctcatctgaattccttacccagaaactcagatttttggtccctgactttcaagaatatcttaaggatatttaagtttccttaatctttgagatgagactgctggaaccagcaacgttagccttgccagttagagatgattacagagggcactgaagcatagatttaaaaaaaaggggttcagctgttttggagctgacagggtgacctcctcaaccattctgctttcgccgaagcaaggaacttgtccccagacctagaccctctaaaactcctgc

SEQ ID NO: 40531 - DNA, 1026 bp, Homo sapiens
ccacagaccttaatgctattttctgaattaggaggagctcaaccttctgtgctctaggaaaaacctcattcagcaactttcaccagcaattatttattttattgaatgtcctttttacttaatacttgatagattaaaaagtggaaaaaatgctgcatctccttgaccagcatgtaaatatctcctcactcctgcactcttactattctccatctggagggaagtgttcaggaagaggttgtcgtgaggagatttgggtttcaggaaagggctggaacgaattaccttggcctgtttttgtatttggagatctgtgaattaatattttttagcttcgaggagacaaggcaaagggggtgttttcattacagtattcaagtattttaggaacttttctgaagaggatatatgctcagtgtcctccatgcctgcatgacagatgctaaaaggagcaaccaagggtgtagtcagcgcctagcatggatctggaacagggaggtgctgagtaaatacctgtagagcaaatgagtgtgtttggatgttggcctatgttttccaagttattgctggttcgtgaccaagggctggcaggtgctgctgcgagacattggcatgcttctctctcacccacattcctgccttgtatgattggcagctgggagaaccttacttctggattctgggtttggttgacaatgttttcagcatcaagttgtacagaatgttttgattattagagaaattagaggaatacaggaatataaaatacatcactttatttgaagagcagggagggcatttccatttgagaaactttaacagaaaggttctttattctatctgggattatcttctgggtaggggggcattcggctttctgataaatatcctctcaagttgtctgagaatatcactttgtttcttaccaattgattttattggatttttaaatttgaaaagtaatacatgatggttacagtaagttgaattacaaaggtatagtttaaaaagtttatggccttctcc

SEQ ID NO: 40532 - DNA, 1032 bp, Homo sapiens
ggtcaggctggtcttgaatgcctaacctcaagtgatctgcccacctcggcctcccaaagagctaggattacaggcatgagccaccacgcccggccgcccaaagtattatttatgttaattttgaccaaagaaacacaatcttagtactttttttgtgtaatgtgtaccttggatgtgaggcctatcagaattacaagagatatgagaggggaagctaaggagcaaggatacgtagaaccagtgctaggggatgaacatatatgtgtggggtgggtgtggggttgtagccagaagtaaaattcatggtggaaatggcatacggaaagatagctcaccttggattgatgtgccagggaccagatcttggggtgtgtgtatgtgtgtgtgtgtgtgtgtgtgtgtgtgtgtgtgtggtggggtagggtggtgggatatacagatggttcctgacttatcattgtttgacttatgattgttcaactttgaggttgtgaaaaacaatacttgttcagtagaaactatactttgaattttgatctcttcctgggctgtccatatgtgtggtgcagtactctcttctggtgccgagtggtggcactgagccatagttcccaatcagccatataatcatgagggtaaataactgatactgtatagtgtgctgtgttgccagatgattttgccttactgtaggttaatgtaagtgttctgagcacgtttaaggtaagctaaactaatgtatgatgtttggcaggttagaggtgttaagtgcattttggactatatatatatatacacacacacacacacacacacacacacacatatacatatgtacatttacatatacatatatattttaatggggtcttgctctgttgcctaggctagagtgaagtgacatgattatggcttactgtaatctcaaactcctgggttcaagtaatcctcctgtctcaacctactgagtagctgggacttcatgagtgagacatcatgtccagctaattaaaaaatttttttttaaaaata

SEQ ID NO: 40533 - DNA, 1053 bp, Homo sapiens
cagctggactctgtgccaggcctggcagattcctcctttgtcttgagagcccaactgagtgcctggaacacatgaggcatccagcagatatttattgaacaagagtgtaaggagcagttttgggattgtgcttttaaaagaaaaatggccaaactagtgtgtttccagaggaggctggtcaggagtagttagtggggaaaaaatttcatgtgaggaatttgaggatactgggcatggatagtatggagaagtaaagctatcaggtaatatactaacttttttcaaatacttaaaagtggctaatgacttagttgtcactgtagatgacaggcataagagggaggggagaagagacagagaggaaggtgagatgtatatttggagaaataatagctttcaactcagggtaaggcagaattttaagacagagctgtccacaattgggaggacttgtggtgtggcctgagctgctattctccagatgaggttggatgaccactgtcatgatagctgaggaggggtcttttttacagatggtgagatgtttagaaatgggaggtctttctagttctaatggtttcatgattttatttatgtatgtatgtatgtatttatttatttatttttgagacggagtcttgctctattgcccaggctagagtgcagtggcacaatcttggcttactgcaacctccacctcccaagttcaagcaattctcctgcctcagcctcccgagtagctgggattacaggtgcccaccaccgtgcctggctaatttttgtatttttagtagagatggggttttaccatcttggccaggctggtctcgaactcctgacctcgtgatccacccacctcggcctcccaaagtgttgggattaaaggtgtgagccaccgtgattgacttcatgattttatgttcactctctggggagaagagtagagtcattttataagtcatgaaacaaggcagaggccaaagtagagattggttgtctcgaattctgtttgctctgttgggttgtgatttatgtttaggctgctactcaccc

SEQ ID NO: 40534 - DNA, 1027 bp, Homo sapiens
ttgtgggtgggggggggcgagtgggttaaagctgggcctgagtttcttctcttgatctctctactgaccccttaaagctcagggtggggtacagggtgctaggtggctggatttgatgatactgatcatgatgaggcagcacagattactaaaacctaatgtttgtttgcttttaattggatttgtatagatcctgggtggtgatacagcagctatctcatgggaaaagtagatgaataattggtaaatagagttggtttgggagatacagtcatatagagggagaagaagaaaaatacagtttcagttgtgaggctcagctgtggaccagtggtggtcaataaatatctgctggatgagtgaataaaagaatgaatgaatgtcagaatgctgttagcagatagccaagcatggactccaggatctgtggatcttaggagtgctttctgagcaaaaaatttaaatttgtaaatgtatttaagagtaagtaggatcagaaatagtaatgggctgtgcaagtggaaactgcgatgttattttcagccacttttctgttgttagacaccttaggaggagagtatacttgtaataattagaattcaggcagaagggtaattccattgacttaggactgtgtggttaaacacatatgccttgaacagtgtgccaggctttttgtgaggggcttaagggttggtggtgaacacattgggcacagccctgagctaccagagctgccacctgagggagatattgcaggtaaacatttataaaatctcagcacttgtgaggggtgccactgtaaagtgcaaagtgcagtgaggaatttttttgcaggggaaatgaacatggtggtggtagtgatgaagaggtggttctggaagccttcttcaaggaggtgacatttactggttttttttttttttttttttttttttttttaagatggagtgttgctcagttgcccaggctggagtgcagtagtgtgctctcagctcactgtagtctccgcctcccaagttcaagt

SEQ ID NO: 40535 - DNA, 1056 bp, Homo sapiens
tagctatggatatagttttaaaaattgtaacttaattcaaactaaaataaatgaaattcaaactacataaaacagttaaacaaaatgagctaatttttattttcatatctgaaaaatactctgcagtcaaatcaggtagagttagaatagaaaatatgattttatgatataaaatacattaataatatttatcatgaattgctaggaggacagtcataattatctcagtactgggaagacatttgatgatgaagtttagtattcattcctgataaacactcttagtaaaataggactcaaagactagttcctgaacccgatggaagggtattatattaagccaacaactggtgtcatacttagtgttgagtcactaggagcatccccagttaaataaaataccaaacaaagatgcctgctcttgctattatttaatgtagttttgggagggttctgacaatgtagttgtacaacatgaaagaaatatatctttgtattggaaaggaggagacaaaattagtatttatagaaattaggagattatgtagctgatataatggagaatcaactaaaattattacagttaatgagagaattcagtaagtttacgaaggatacaaagctaacatgtaaacaagttttcttgagtatctcaaataaccagttggaaaatataatttaaaaatattaggagtatgatttatacgaaatattcaggacctacagaaataaaatgaagcaatcctaataggagaaacatttttttagaaaatggagaggtgtaccttcgttcttcattgacttgagaatgataactccagaactcaaaccccagctctaaggccttgggcaagcctcttgacttctctgggcctgaatttccttgtgtaaagtaggaacagtaatggtgagaagaaaagtaatgcatgcaaagtgctctgaaaagtggtcggcatgtagaagtaatcaaacagcaggcaaatgtggagggcaggcgtgaccagcatctggaaggagaggtttgtggtgctgtgagagctgacagttggagggttt

SEQ ID NO: 40536 - DNA, 1081 bp, Homo sapiens
ctctccctcatctgcagtaatttccagattcaccctcatcctcattctagagcacattaagtacctcacctctgctaggaagtagagtttagaatttgttttgttgaagaccacctcgtgccttaggaactggaagccatgctgggtagaggccgttctggatataacctgtcccttgcagagtgacccactctgactgcatctttctgctctacatttcagacagttgctagacctgaggtccttccttgaaccccagcttgcagagggcagatcccagtaccacatccagctcttggctagcttcattacgggagttatgttctgggggtgggggcttgatactggctggactccttcaaaagctctgtctggcctgcagaattgacattgtctaggccttctgttgttttgctccactgggaccaggtagacctgcttgatgtagatgtgaatggaattaacctcaagtttgcctcattcctttggaaacttaatgctggactcttggcctcagaaaccaggctcacaactgggccatttctccttaacaatggctatgtctgttcctggcttcttccccttcctcaccggctcatgctgttgtgagcctcagtaagcaaggaattgagcccctggaattatgacagaaattatgctataagcaccacacatctttaacagtgttgcttttttaaccagagaggggcgaccttcacctttcgggacatttctggttgggaaaatcagagagcagggtgatagcaataataatggtaactgacaattgtttctctcgcgtttagcgatttagacaatgctttctccccagttttcaggagatagaagaaaaaggaatcactgatagctaggctggatacatgataagtattcaaaacagcattaaaagtctggattttctgggatgagaagctgagcaggctagttgaaaagttggagttagctggcgttatattctgtgaggcccagggagcagtgtagttgtgaactctgtgataagagaagcactttttctatatttggggagggagaggctctttggctgaatatcataatttgt

SEQ ID NO: 40537 - DNA, 1032 bp, Homo sapiens
gggaagatgggatagtttcataaattgacttaaccaagatcttttctaaaagccaagagactactctttctgtttataactttgttcatatgttctccttttctttcttttctccccaccccagttttagatgtagcgagggcccctgtttgggggagttgatgtaatgcttgtgaaacttggtgaaactacagaaacataccatatgctcctgtattcttgagtagatattcagagtataagcaaaagacagcaaggatgtagccctatgcagagaaaggcattctcatgagttggaagtccaggtgttgatactcagtcatcaaattgtagtttgttatgggttcccacttataaatattcatttctatcacgggccaggtattaagttataatgcatgatatcttcattaaaataccaggggtcagcttctctttgaccattttcttgttcacctgtaaacatttttgagcaggttttgttcctctgttctaagatagtcttttaaaaaatctctttgaccccatttttgcagaagagattagatacattcgttgtgataaggaaaattagtatttcaacttcttgaaatagatcctcaaaatgataagttaattgcttagccttgtcagctttccaaattgaccctctctgtcctcttcagttaatgattcatgattccttttgcagtgggtctcctcccagtggagagtgaagagccatggattccaagagaaaagtggcagccccttcttcattttccgtaggcacatctctttgttctcttttcccatttttctatttaagtatgtgtcatctcttagaaacactacttagcagtagctggctcaaaagcaaagccttttttcatttaatcaataattcattatttctgcaaacttaatgaatgagtgttagtggccaggatggtatgtatacctgttatcaagtggctcaaaggctggaggcagacatcaaggctttgtaatggttaatgctgggggagggtttgaagaaccaagaaaaggcag

SEQ ID NO: 40538 - DNA, 1373 bp, Homo sapiens
tgctgttttatcacagaagcagtgataagagagtatgccaacaaatgagcatgaccgtgttctgctaaaactttattatgggtactgaaacttgaatttcatttaatgtaccatatccttcttttgatttttttcaaccatttaacaatgtaaaaacttcttagcctgtggactataatttgatgggccttgatctagactagaactcactgagttgaggaagatagttgaattgattggactcagggctttttaccaatactgtataaactgttgaattaaaataatattatgtcagagactcagaggagggaatggaagactaagtcaagatagaattcctagggtcaattgtccatagataacaagagcttctgtatgttccagaagtaaagcatactactcctttctggattttctttggcttgattgcaaactcctagtttgtattccccaagtttgaaccatcacacgagttgatgagttttccctgttctgttttttgtagccttgagctggcggtggtaccatgtgagttaagaagatatggttcttgctttacaaactcattagtctatggtttttgaaatttttctttcatccattttctggagtttctgcacctttctctacaccccagtagatagagaaagtttctcttgatttctgcaaactttatctttttccaaagattgaattaagagttgttaagcccattgtttttggcattaattgttatctgcaggcagatgctggcccagtagcttttattaaacctctcccgctgagtgatatcctcaatatgggcttgactggagaaggttctttcttctcctcctcccctatttcatttattctactctctttctaaatggagaacttgctgttcctatctcttggattttaagtgaccctcttctttttctctttttacttttgattcttgcccagtttattccagggctgacctaagctccacttctacccaccactccctaaagaggtgatagagtaggcagcaaggagggggctggggagaggctggagacaggggtacagattagtgtggaagtaatcagactcagtgttcatggaatgaaccaggtattttccttacaatagtggtagggaactgttggggctcccctcccaaggtgtgcagcagtcacagtcacagggaaccagaatgcatgactgcatctgacatgcatagcttccaggaaaaacttagcttctgagaaaggccttgcgaagagcccatcacacttgcttactaggctccagtcagttctgctgctgtgaagggaaaggaaggacctgcacaaggccacgtgacccatgttccttccctcgacagaggccctccaaggcac

SEQ ID NO: 40539 - DNA, 1045 bp, Homo sapiens
actgggaggttggagggggtgggctccccactcagccaagcttttgcctgccccaataatgatattactcctccagctcctgactccccatagcctgtgctttttgagatagcttctgtagagaagaggggaagggggtggcagtgatccttctaaggcaatgctgggacaccatggttgacatgctttagtttggtaagtgctataatgcagggcctctggggacatggtgaagtggcaccgagtccagacttcggattggggcatcagggaggacatgggatgtttgggaacaggaagtgattagaaagggaatctttataactggtaactggaatgcatggggggagtccagagagagcagcagggagaagattacttaggacttgctaagacagcaatggaagaaacaaggtctgcagcatctaaatgcattggctcatatttgaaagatcgttgttcagcttggttttggcagtcagcacttgaagatgtgtgtcacttggagactcaaattgaaggaagagattgctacccaacagctacctgtctctattccatcatcactcttgaacagattgcctcacttagccatgacagctttggggcagtgggagcccaaaacctgaattttgtgcagtgctgtctctgattactttcaagaacttttgtgctcccccacctttgataaaataatcctgtcgtttgtggtggctgcagcagctgccaggcttttctgcactttcctttctgcccttcaagccgtcaagccctgactgctgtagacctgtctttacctgcagcatatctgcctttgttcacattttagagcagctgcctgtagttagtgtaactggagcagcaggactcatgccttgctgtgaagcctgcagctattacagaggtcttcaagaaggggcttgcttaccccttccaaaattattatttgttattaagtatatttttaaaaaaagaattgtatagggctgtttttcttctgtgaagtctgtatggaaaataaatggagtgggcaatgctccagggg

SEQ ID NO: 40540 - DNA, 1048 bp, Homo sapiens
tattatactctcacatttgataaatttatgttcaaagttcttttccttctatattttaaaaatattaggccaggctggtggctcatgcctgtaatcccagcactttgggaggctgaggctggtggatcgtctgaggtcaggagttcaagaccagcctggccaacatggtgaaaccccatctctattaaaaatacaaaaattagctgggcggtagtggcgtgtgcctgtaatcccagctactcgggaggctgaggcaggagaatcgcttgaagtggggaggtggaggttgtggtgagccgagatcacgccactgcactctagtctgggagacagagtgagaccctgtctcaaaaaaaaagaaaattgatgttaatctcattcttctttctctttctctctaaattatcttagaatttgtatttaatcttaatattctcaagtttcaatatggcatgtgttggtgtgggtctttatatatcctgtttggtcctttataaactcttattatctgaggtctttcatctcttttgaattctggagaattaattatcaattttgttaaaatatttccttttcttttatgtttgtttttcttttccctcttcttccttgttccctattatccagattttggaaactctgcttctattttctatgtctctctactctctacttgaattcttttctgcttctttctggaagcattcctctctctgagcttcctttgcattgctctatgtgtgtttgttgttgttgtttgtttgtttttgtatccattatgctatttaccccatctattgtgttccttattccaacttttgtatttttcttcttaatgttttctttcagtttgtattagtaatctcttcctttatccattggaggatatttattatgttacttaaattttttggtctgtcccaataattctgcttcatgtcgtataattcagtgcactgcccttctcatagtagtggtacttatctagttattttggtttgagaactccttttaccagggatgccaacttctctgcctgggaatttgt

SEQ ID NO: 40541 - DNA, 1029 bp, Homo sapiens
gtagagactgggtttcaccatgttggccaggctgatctggaactcctgacctcaggtgatccacctgcctcagccttccaaaatgctgcgattacagacgtcagccaccacatgcagcagatcagggaagattcttagataacattccattgaaactaagatctgaaggatgagaaggaatcaattaggtgtttgggaaaggaaaggaaggatgtgggaagaatgttccaggcagaggggacaacctatttgaagtgcctgaggaaagagcatgcatggccagtccaaagaactgaaaaaggacccatgtggttggagtgggaaggatgaggagaatagaaggaagtgagtttggaaagggagaaaactgggaactaaataattcagaactttgtaaactatgctaaggattttggtcttttttctaatggcactgggaagatatggaagcattttattcaggaaaataacaatcaaatttgtattttggaacaatcactctagatgcatcatggagaacagattggaaagggatgaggtaggaatcagctaccagttagaaggctaggacactagttcaggcaagagatgatgggtgcttgcgttagaattatggcagtagaaatggagcagagaagatggaggcacctgtgctcaaatcccagctctacaatttacttaatctctctgagcctcccttttcttatctgtaaaatagggataataataatacccaccttgcagagttgttggaaggattaagtgaggtaatatatgtggagctcttaaacaatacctggaatttaataagtgctcaataaatggtagctattattattatttatttatttattttgagacagagtctcactctgtcgccgaggctggagtgcagtggctcaatctctactcactgcaacctccacctcccggattcaagcgattctcctgcctcagcctcctgagtagctgggattagaggtacccactaccatgcccagctaatttttatatttttagtagagacag

SEQ ID NO: 40542 - DNA, 1038 bp, Homo sapiens
gagaattttacatgaacattttcttagtgtttttgtctttttctgtttcagaagaaaagcagcaaacagaaagggttacaaaagagatgaatgaatttatccataaagagcaaaatagtttatcactactagaagcaagagaagcagacggtgatgtggttaatgaaaagaagagaactccaaatgaaaccacatcagttttagaaccaaaaaaagagcataaagaaaaagaaaaacaaggaaggagtaggtcgggaagttctagtagtggtagttccagtagcaatagcagaactagtagtactagtagtactgtctctagctcttcatacagttctagctcaggtagtagtcgtacttcttctcggtcttcttctcctaaaaggaaaaagagacacagtaggagtagatctccaacaatcaaagctagacgtagcaggagtagaagctattctcgcagaattaaaatagagagcaatagggctagggtaaagattagagatagaaggagatctaatagaaatagcattgaaagagaaagacgacgaaatcggagtccttcccgagagagacgtagaagtagaagtcgctcaagggatagacgaaccaatcgtgccagtcgcagtaggagtcgagataggcgtaaaattgatgatcaacgtggaaatcttagtgggaacagtcataagcataaaggtgaggctaaagaacaagagaggaaaaaggagaggagtcgaagtatagataaagataggaaaaagaaagacaaagaaagggaacgtgaacaggataaaagaaaagagaaacaaaaaagggaagaaaaagattttaagttcagtagtcaggatgatagattaaaaaggaaacgagaaagtgaaagaacattttctaggagtggttctatatctgttaaaatcataagacatgattctagacaggatagtaagaaaagtactaccaaagatagtaaaaaacattcaggctctgattctagtggaaggagcagttctgagtctccaggaagtagcaaagaaaaga

SEQ ID NO: 40543 - DNA, 1054 bp, Homo sapiens
agtgggtagaaccaaatgcccatgtggttttgttatggttatttagatcatttcagggtggggagtattttcagcaccataatatttctgtaccagggagattatagtattctaatttttttagggaaaaattgcttagctctagggatttctaaactttgaacaataaaagttaattttagaaatactttcagggtcatcattaagctttagcgtggctttgttactgccctgttaagtagttttgttggttagtatggacagtacagcaaacccattatcattcctttacagtgagaaaaatatgaaatagtccagaaagaataagatattaagtaacctttgcctgaaggttctgtgaactccttaagcgtttgaatgtatacttctccccaccccgaataagcgtattcttctgggaaaaggcaatgaaaaaagaaatgaactttcttctcagaccttgaaaagtttttagtgcatagtataatttttttcatatgatagactgagctttatgcacacaggtggactgggtggttatggatcaggagacagtgaagatgagaggagtgacagaggatctgagtcatctgacactgatgatgaagaattacggcatcgaatccggcaaaaacaggaagctttttggagaaaagaaaaagaacagcagctattacatgataaacagatggaaggtgtagtataccttttagacttaattttggtccagttttgtatttctttttattttttaactaacctaaaaatatcaaaggataaaataaaggctatattataaataatatgtgatataactgaaactaaagtcacaatttttgtttggttgttttaggagccatttattgcagtggctataagccaagctatttagggtatttttatttcttgctaaaagtcttgaaatgaaaaagatgacttttgaaatgggaaaaatatatttgtaagactattgaaaagtaatttgtagctaggatatataaggataatagagaacctagaagttttttacttaagatactttacctaatactag

SEQ ID NO: 40544 - DNA, 1226 bp, Homo sapiens
tgaaaccccatctctactgaaaatacaaaaattagctgggtgtggtggtgcacgcctgtagttccagccacttgggagactgaggcaagagaatcacttgaacccaggaggtaggggttgcagtgagccaatatcacgccagtatgatccagcctgggcaacagagtgagactgtctgaaaaaaaaaatggctttgcattttaatatttttgaagatgtcacactattagtagctataataattagaaatactgtataaaatgctcttttttagatgttgctgacaaaaatgcttctaacagaaattctgctggatgtcacagatgaagaaatttattacgtagccaaagatgcacaccgcaaagcaacgaaaggtatattttggtgtttctggttttgcttttcctggggtattttggttctgatgactattttggcctttttttgttgtccttgttggatttctaccagatatttgaatattctcttgcatgttttaactcttaaagattagattcgtagacaccatattaaagctatacaaatatttttgttttatctgacctacatgagtacaaattagcaatcatgctgttttcctctaaaatgtattgtggaaaattccaggtgttcagtttatttcacctgattttttttaatagataacatggcattgttgtgtgacttctgatacagtttattttgactaatgaattttgaattatctacctacaatttttagtttaccacttatctcttacagaagcaagtgatttcctacccctagatttttagtaacaccttaaaaatgtattgaaaacaaaaattaagttacatgtcataatctcagaagtagacatacagatatacctgtcaacattttttctcattataaaccaatttcagctcacatcagagttataatttcaaagccagacatgatactggtttaaaatgaatgttatgtttttaatgtttcttctctccccaaaaagcagcaatagtagtagatttaacaataccatagactcatgactatgaaatcgtggctatttgtgttaacatgttgttcctgttgttgatgtgatacaaagctcctgcaaaacagctggcacagtccagtgcactggcttccctcactggactcggtaagtgttttccatatttgtgagagggcctaaagggaaaaatcacacatacattgtctctctgcgtgttctattttg

SEQ ID NO: 40545 - DNA, 1068 bp, Homo sapiens
gttgtatgttgggctttatttacttcattccctctgccagggtctacccttaaattatagtgctaggtgtcattttgaaataactgattgcaattattaacttataaactgctatcataatttaaaattttgaaagaattatttcatgaattctagggtagatttgataatggacatctagtattcaccttgagatggtaatcctctcattaataaatattcagatacttgtatacttggtatacagatacaacagtttttatgttgtttgaagaaatataatggcagggagcatctgcttaccctacttttgcatggtagatcccatgtaaacaagacaaagagctgtattggcagctggcctagaaaagcctctgaaaatagcaaaattgcagaaaatatttaatgattcattaacttctatctttgcttataaatgaatatatctgcaagattatagaaacagcttaagttgtttagttcactttttgttcactgtaagtaggatgttgaaattgacaaaaatgtctagttaaagagaaattagtatctatttgatgtcttagtgttggtaggattagcttgtaaatggattcagaatgaaaaatttcatatacttcttgaaagtagcttatcagctggcttttagaagcctctttgcatttacatagccggaaaatcttaagacaagtaagcctaggttcttgggaccatagaagtatcggtggatattagagccatggaattcttggatgtgctgcacacatggatttctactgtcccagttcataacacacgtgtgtcccagagagtatattgtattaatttgaagaaaaaataaactgcaatactctttcagcatggggctgcttttggtccaccgcaaggtggatttcatcctccttattggcaaccaggacctccaggacctccagcacctccccagaatcgaagagaaaggccatcatcattcagggatcgtcagcgttcacctattgcacttcctgtgaagcaggagcctccacaaattggtagctatttaacttagtttagtggaccacaattggc

SEQ ID NO: 40546 - DNA, 2109 bp, Homo sapiens
acagtatgctttaatatttaagatctcattcaaaaaaaatttttctaatttccctcataccctctctgtctgaaatatttaagatctaaggaatagttgagctgcttattttacatagaggcactattcttttaactcctacattctgaatgctgaagtcagtgttaatttacgttaggccagattgattgggctgcattggcccaagcttggattgcccaaagagaagcttcaggacagcaaagcatggtagaacaaccaccaggaatgatgccaaatggacaagatatgtctacaatggaatctggtccaaacaatcatgggaatttccaaggggattcaaacttcaacagaatgtggcaaccaggtttgttgtttatgttttcacaattttaagacttttaaaaaacagaatgaagattattattaaattttttaatttgcttagttgtatgacttctggaaattaatgcttcttaaagaataggcagttttcaatttgatttgactttgacattttgtggttaaaattattctgtactcattctgctagctttgtggcactcagtttgattcttttcttggttcttcattcctaggctgacaggggctgggaacactctggaaacctcacttggcatctagggaagagagcattctttgtctctctattgcaacctctggccttttcagaagcagcactggcagagtaaaacatgtctagcctctaattaaagaaaaattgtgtcactgtgtgacaaattagtctgtcaaatatactctgcccctaccatccgcctacctttttcttccctttttttttttcagatagtgaagatctttcataagtttttgtgtgttttacttttttgtttgttttatttcacagtatgatgtagatttcttgatgctaattcagtcttccatggcttgtgttattcctttttaatagtcacttgaaactatggaggaatcagcctctcatttgggtatgctgatggtgaagtcataacctcctttccctattaatactttttgtttctccttataagaatggagacctcagtcgagaccagcctgggcaacatagcaaggccctgtctctacaaaaaaaaaaaaaaaaaaaaccttaaaacttagtcaggcatagaggcgcatgcctgtagtcccagctacttgggaggctgaggtgggaggattgcttgagcctaggggattgagactgcaatgagctgtgatcacgccactgcactccagcctgggtgacagaatgagtccctcatttaaaacaaacaaacaaaaaaaacgagaattcagattacttttaaaaacataaatattctagtctttgatactgtgaggtggttcatttctagctttcttgaaagtgaaatttccccacatttgaaaatgttttagttcctaagtttaagttcttaaatgactcccgcgggcatccctaccccttagttttactctactttgtgaccctgggcaagtgatttacctctgtgtgcctcgattttccctcccgaaattggcaaaaataatacctaatttctccctacctcacagggatgttgtgaggataaatgtgttcgtgtaagaaagaaattatataaaacctcaaggtattatttttgtggtgttgttactaaacaaatataaaaattcaacaaaaatagtgctttggattttgttacatttgttaaaaataactttgggcatttggttaggatatgaattagagtggagttagctcattttgaattatatatgacagtttagttcattgcttatttttaagataaacaaaaggaatttgaccaagaagtcataagttgttttttaaatctgtatgtttactgaaaaatctttcttgagatcttaaaattctgtgttgattttgttataaccgcctgttgaatgtttttatgcctaaatcttaaatagaatggggaatgcatcagcaacccccacacccccctccagatcagccatggatgccaccaacaccaggcccaatggacattgttcctccttctgaagacagcaacagtcaggacagtggggaatttgcccctgacaacaggcatatatttaaccaga

SEQ ID NO: 40547 - DNA, 1028 bp, Homo sapiens
gtttttagcatacaggaaaggatcaatctagaaggattcatttagtaaacatttattaaatgcctgctatgaactaagccttgggatacaaaaataaagaagaaaccatgccctggttatgtgagtcactggttcttgaacagggttgtgtatcagtgttggaataaagtacaaagatattagacttgtaagacttttaaaccttttattaggaatgttttcagactagcttacagaaaagttgggctagtgtgatgattcccccccataccatctcctaaattaatagttattaacataaagtaccttccctcccatcttttccatgctatttatatgttaagaaaccaggtcttggaggctgtcttactttctggatttaataccgtttatctcatttctttatcctttaaaattgctttatattggaagtaaaatccaaaagctcagttggactcagttaaacatttttgatgagaattcttagtgattctgggagcatagtagacacctaataatctgtaggggtgatattttggcaacctttgaatttctgatttctcatcaacttttcttgtaaggtttcctgaattaatattttattacttttggcaatatgatagttttctaattctgttctacattcttcatttttttagctgtaattatttataaggaaaaatttttcttcatctgctgaagctatttggttactatcttaaaggaatcttgattggggagaaatgaaatcacttttttcctacaatcttcaaaataattacatatccagaaatttatattgtacaaaaaatagagttttttttaaagtcttttttgagctaaattcattgtgttatgcttgccaccaaattctgagaccagcattaacataaaattttctacctcgtttggtaccctaaaaattctagttgcctctggcaagctattgacaagaattttagacctctgatgaaataaatgtatcatcatataataatttctgatgtgaggttttaagattaaataac

SEQ ID NO: 40548 - DNA, 1027 bp, Homo sapiens
gactacaggtatatgccaccatgcccagctaatttctgtattttcagtagagtggaggtttcgccatgttggccaggctggtctcgaattcctggcctcaagtgatgaacccaccttggcctgccaaagtgctgggtttacaggcatgagccgccatgcttgtcctccacttttaaaatagtcttttgagctacaagctgcaagtatttcagtatatactaaaatgcatgtcacataaagtagcaaaatttctgttttccgtatttcgaatgattacaagattaatttttaccagtgccatttccacctaatctgaattaaacaaataaattcttttttgactttgaggtcagtcaactcatgtaagactgaaatgtcaggggtgaagaggattgttgtattttctggcttctcagctttgtggttgatttgagaaatatttcatcctatgcatcaaatgatagatgtgtttctgtagctctttgattttgtagttgatgctcaaggactttaaaataccacattttaattctcatccatctctgtcacagtctctgagtgacttttgtaaatattaatgattgtcattttggccacacggggtggctcatgcctgtagtcccagcactttgggaggctgaggaggatggatcattgaggccagaagtttgaggatagcctgggcaacatggtgaaactccatccctactaaaaaatacaaacattatcctcgcgcggtggcatgcacctgtagtcccagctactcgggaggctgaggcatgagaattgcttgaacctgggaggtggaggttgccgtaagccgagatcacactgctgcattccagcctgggcgacagagtgagaatttctcaataataaataaatgattgtcatttaaacaagttgttttaggacctcaaagcgatgaagttctaatatagatacatttaagaaaaggataaaatagatgatggccatttctggttgtattagttttctagggatattgtagcaaattaccacaaac

SEQ ID NO: 40549 - DNA, 1034 bp, Homo sapiens
tgcgctaagcaactggccagaattggtttggtttggtttgaccctggggttcctccgtagtctgtaagtggagttgcgaactcaaccccttctccaaggcgggagtgtttctaggagggaacatacttccccttaaaggaagatcacgttgctaaagtaaaaaatttgaaggcgccctatgtgtagaacacttacgttcttggctttctggccactataaagatgggtcgggaatggcgccagctacgttaaaaagtaacgtgcaggaatggttcagttgcccggtgttgaccagagtagagatggttttgcccacaaaaaaaatggcgccgaaacatgtcaatccgcacaatcacgtgttcacaaacctggatgagagatggtatggcttcagatgacaaacggatgttattattctttacttccgggtgagacaaatcgggcgccatcttgtcttgttcccgaagaagtagaagcatcgaaagcgttggagaggtgttaccggaacggcggcgacaagggtgttcccgaactagagtgggtaagtgatggagaacaattatacgtgggcacttgccggaccattacaacgttcttggtttctgtggcgaaggtagcataacttaaaataggctgcgtacgctgcttggcgcgaccgctggaacctcattcctttaaagcgctgcggtccgccagacttggtaaatcagagcgctgctttcgctgaaaaggaaatgtccttgttaaagagagtgctcacggtcccatcttctcacagagtttcctctcggacgagaagggactaattgttgggttcctgaccggccgttaaacactgcgcgtgcgcagtgggaacccccttgtgggaagggggttcatgggggcggaggaggcgggggctcgcgacctggagcttataccctttgaggctctgactacgcaggcgcagttccttagtttgtgtttttcgtgtgttcttacccaatgatggatattatgtgttaagcttcgctaaaggtagtatccaatatttc

SEQ ID NO: 40550 - DNA, 1049 bp, Homo sapiens
aatgtaaggaaaatttatgtcaatggtaatgatatggagaaaaatcaagcaatatggactccctatgaagtcatgcagaaattaaggtacaggggatgaagatatcctagagataaaaggcatggtgatattagtactgatattcctgaaagagaaagctgagtgttgtaggaaggatggggttttaattctggggccctctcttctggcaatatagagacggagaagggaagtcttaacatctgtatgttcccagaaaaatgtatctccctaattcttgtatgtaattttgaaggttcatggacacttctgaagccatttcatacgtattttaaattgcacccaagaagaaatatctgagatgtttgcattcccatatgtattaggataggctgagttgtgctgcagtacaaccccaaatcccaactcttaagggaccggggccaaaagtcccatcaaggtaaagttttatcctccaagaccaggctctctggaagtgctatatcagatttggatgtttgctcctactgttctggagacccaggaaccaaaaggatatcttctgttttccacatacttaatgtacagtggtggaactgtatctgcaacaaacattctgaatggggaagaagaatgggagatacagttaggatccctaagtctaggtatggggtatattcatgattagggttcttttctatctcctaggaagaattcccttgtatattgttctccgtgactctagagtccaacctctgggaaagttttgttgttgttttttttttttttttttaatcttcatggctacatctgaacagctactgagggatatatatgccaactttgggagttgcacagcttttttgagaccatttcttagatgactagggactgtaatttctcttaatttggaatagccacaagttgttgtagccaaggtttgtgtgtgtttttaatacaattcttaaaattttagtaggcttctcatctgtagatagatttgaaggggtgggttgcccctccacacctgtgggtgtttctcgtaaggt

SEQ ID NO: 40551 - DNA, 1059 bp, Homo sapiens
ttttgatgggaaaaagtgcaagtttgcatacggttctaaaattagaaaagtacagttctaataacatctttaaggtactatattcaagaagcgaaaatttaaatgacataaatgtatttcagtcattaggaagtttacgtttagaagttatttccaatagttcaactacagaaccagtttaatcatggaaccagaatgattcagtagttaactactttcagtactagttttataaagatcaataaagtcttgttttgctgattagtgaagctgttaataagagtataaagatatttgtgacaaactttatagtattttttaatctcttacagtaatagaagcaccttgcatcttttaaaattatactagaggcacaagtactgatttgatcataagtttttgagttttttaccttttctgtttgccaaattatatgagttatctcattaaaaccacacaaaaacttaatatgaagaatgataaaaataattacataaaaatagtgaaattagctgagaaaatcttgccctcaagttggaagatgttatctctgagtaccttgaaaaagtgcattttcttttgcttactgataacaggcaaataatccagttaaataaagcactgtaaaactagtgtgtgcaatttctggcctaaatacagaaaaaatagtaacaggaggcagatacgtaaacagagtaaatagccataggcctatataaacatccttcttgaaccaaaaactaaggtaaaatgagctgcaacaaatggctaccaaaagatattatgtgaagtctattccataggctatttttcttcccttctttcccctccccacagctttttaaaaaaccatcatgctgattgaataattgtagagactggaaaatctcaaattgatatccttatataaaatcctgcctcagctcattagttcagaaagaaatccaaaagttcagttctctgagttgcttcaacacataagtatattagttttatgaaagattttttttttatttcataaaaccttaatacttctgccagaatcagaagtgcattgtg

SEQ ID NO: 40552 - DNA, 1001 bp, Homo sapiens
gagttcttaattacctatgttaattccttacacttgccttttacgactgttattttcatagccgtgatcctggcatccgtagtcctgatagcataatctccttttccattcttctgggtacttattggttagacatgaggttttataagttttaatgggagtggttgaggtgtggtacgaatagtggttgttttgttttacctcttaagaatagttcattatttcttggagactaaagtagttgatagtcgtaaatctgctacaaaattgtaaaggagaaagactttagaatgttgtatgtatagtaaaatgtattattaaatgtagtacagaatatcttattcagattacttttgaataaccagaagatagcctattatactgctagatggatggttgacatgttttttgcattaaaaagtatgatttttacagcatatggaaaagaaggtgtgaaaatgaacttcatagatcggatctttattggtgaattaactagcacggtcatgtgtgaagaatgtgcaaatgtaggtactttagaattcaattcagcatggaatggattacaatcacatcatttttattatattttctttcacatataatcattggcagtcatttttaaaatttgacagatgattacataatgattcttgaaagtctttttatacgctacactcctagaaagtaaatgtgataatttatatatttttaaaagtaaatgtatttttgtgttatttttcctcatgacacacctatgaggcagttttagcctatcttaatatactgaaattcattagctatctgtttgaagtgagagaaaaacttctgtgaagagagtaactgtgctacgttgcagtgccctaaaatgtaattccaggctgggtgcagtggctcatgcctataatcccagtactttgggaggccaaggccggcggatcacttgaggtcaggaattcaagactagcctggccaacatggtgaaaccccatctctactaa

SEQ ID NO: 40553 - DNA, 1027 bp, Homo sapiens
tgcttgctttttgtacactgataaaaatacattaaatccaagagagaacctaaatgtaaaaattctgactcttacttgggaaaatttgacattagagcaatctattcatggaatttgagacctggaagaaattacattttttaaaaaatttggtcattttattttcaaactagggaactgaaatccacagtgtaccttgctgtttgaaagtacttttattaggaggatgaggcctgagttaactattattagaccagaatctattaactttgttttacagcgaatacaagctagcattctaaaagcatttaacaacccaactactaaaactgctgatgatgaaactagaaaaaaagtcaaaggtatgttgactctttgttaaaacttttttctttaagaaaatattaaaattttattttagttggaaaaagaactgaacattatgtgaactaatccaccaaagtagtggctttaaaaggaggacgtagttgctgcagtgtctgaaaaatactttagtggaacatagaaaatgctagaatgtattcatgtgaatttataagaataaagctataccaagtatacagattgacaccgatacctttatgtgaggtcttctaagggaaacttgaaaggttgttgaaagtagcaaccacacttggaagttcatatgtatcatattgtatcatttgacatgtgtttggatcaatggatttatggatattttttagatgtaactagacaaaatgtttaagtgctccaaagactcctgcaaataaaccgtttattgaagagagtgctggtaagtcaagtgtaagtgcactttgcctactcctagtgtttgctattcatccataaaaatatgagccccaaatgatgattacctaatcaaagttggttatttatcattatcaatactatatagggtttatataccttgccctaaatgtatattctgcattgagatactaactaatgttagcatgaagtgatttttagaagacatttaaaaatattatttgtatttttt

SEQ ID NO: 40554 - DNA, 1079 bp, Homo sapiens
ttggccgggcgtgatggctcatgcctgtaattccagcactttgagaggctgaggtgggtggatcatttgaggtcaggagttcgagaccagcctgaccaacatggagaaaccccacctctactaaaaatacaaaaattagccgggcacgatggcaggtgtggccagcaactgtagtcccagccactcaggaggctgaggcaggagaattgcttgaacccaggaggcggaggttgcagtgagctgagattgtgccactgcactccagcctaggtgacagagtgaaactccatctcacaaaaataaaaatgagataataattaaaaataattaagtactgcactctgtcaaaagacctgtagttatgttagtggcacttagcttgttcttcgattttctcaagcataaagtagaacttatattaattataaattcctgaacagtgctgttttgtatatcacatgagatatgttgtaaatatcataaatagttgtaaatgtgtcttctactataatatattctaattattttgtattttgacagaattatttcttcatcttaggtctgaacactttctagatttaatacttgtctgcacttaaggcaaaatgttcattttagcatagagtttactgtaggttactttttaaagttactgaaatcaaccaaatatttcctatgtcagtgtctccatgaatagtacctgatctttctattaagttaatacagaggaaatttaattatcaagtccttaaaaaacatattcacagggagatcaacttatagtcctttatatgaaatagaaacactctcttgctttccttttggttaaggtaggaagataataaatcacagtggcttgggtttgaatactggtttatttgctagctgtatgaccttgcaaatgatttaaacaatactgctgagtcctcatgtgtaagttggagaaaacagtacatcccaacaaagttgttggaggattatgcctgaacatgtgaaaaactactagtattgtgcttaacatatagtagttgcttaataaatgatagccatattctcagtgcacacttaagatcacaccc

SEQ ID NO: 40555 - DNA, 1050 bp, Homo sapiens
tctgaccaacatggtgaaaccccatctctaataaaaatacaaaaattagctgggcgtagtggtgcatgcctgtaatcccagctactgggtggctgaggcaggagagtcacttgaaccctggaggcagaggctgcagtgagctgagattgcacagctgcactccagcctgggaaacagagcgagactctgtctcaaaaataaaaaataaataaagtgtaagttggaccatatcatggccctgcttaaaaaccctctcgtggcatttcattatacctaagataaactgccaaaactttcatttcaactgtaagtctctgtatgaattgtcctctgcttatttctctagacttacctggtggcttcccctttgtattccctcccatgtaatttaaagacaaaagtaactaaataccaactttgttatctgatgtgcaaaattattgagaatattttcataatattttcttaaattttatactttttcaggtgttatgaatgtgatgaaaaattatcaacgcattgtaataagaaggttttggctcagatagttgattttctccagaaacatgcttctaaaacacaaacaagtaagttaagcgatgactaaaggaatctgtgttaaaatacagtatttcatatagagttcataaattcataaagaatactttagattttactgtgacagcccagccaataatttgaataaagatattatgagtatcggctgggtgcagtggctcatgcctgtaatcccagcattttgggaggccaaggtgggtggatcatgaggtcaagggtttgagagcagcctggccaacatggtgaaaccccgtctctactaagaatacaaaaattagccgggtacggtagcacatgcctgtaatcccagctactcgggaggctgagacaggagaatcgcttgaacctgggaggggaggcggaggttgcagtgagccaagaacatgccactgcactccagtctaggcaacagagcaagaccccgtctcaagaaaaaaaaaaaaaaattatgagtatcatgcattcttaggt

SEQ ID NO: 40556 - DNA, 1059 bp, Homo sapiens
tgttcctcttaaaaaacaaacaaaaaaaaagccttctggaaagattcagcggatttgacttcccctcatgttgcattaaccagaattgcatctcatttctttacttacctagtgagggaaatcgctatgattggtctgtgtctcagtagttctcagtaggctggggtgaagttgtgtacgggattgggaaatgtgtgtttgcagaagggcaccactggcctgccaggatgctgggtgttccacagtgtgcacatttttaaatgatagggaaattaactttgcccatgattgttttaggtaaatactgtatattgagcatgttagcctgttggcaagaaattaaatttaatgagaatccatattacttttttgaaactttctcctctggcctgaaattaaaaacaaaacttttcagtataagtgtgagtataatttaagttttgattaatttgaaacaaacatttgtaagtcatacaaaataaaattctgttcatcttcagggatgtggtaaaaactcagaaagccaacattcattgaagcactttaagagttccagaacagagccccattgtattataattaatctgagcacatggattatatggtaagttaaattttgttagttcttgtgtccactaaccacagccccccaatttttttttttctttaagcttttaaggtaaaatatttaaagatgttctatcagcttatggttttttaacctgaacacaatctatgggatacttcaagaaaattaatattacctgtgaatataaaatttaaattggaaaaattttaactatctctctactttttgttgttgttgagacagagtctcactctgtcgccaaggctggagtgcagtggcgtgatctcagctccctgcaatctctgcctcgtgggttgaagcaattctcctgcctcagcctcctgagtagctgggaccacaggcgcatgccgccatgcctgcctaattttatgtattttagtagagacagggtttcaccatgttgcccaggctggtctttgaactcctgagctcaggcaatatgccctcct

SEQ ID NO: 40557 - DNA, 1029 bp, Homo sapiens
aaactggctatcgaaacatcatcccattttagtacatgtatagctttgtataaccaccaccaatcaagatacttgactgtgtcatcaccactctatgtgctgtccatttatagcaacaccctctgccttgcgtccattgctccctacaaccatgaatctcttctcattctataattatgttatttcatgaacattatataaatggaattatatagcatatatcttttgagttattttgtgtgttcaatctctgtgctttttagttaacagcatttaatacttttgaggtttgctcagtaatggtagcactttggtgtagcaaagaaaatgttgagattttgttttatcttattcagtaggtttaacttgccaacatgtaagtcatgctatcagcgtgaatcatgtaaagagagcaatagctgagaatctgtggtcagtttgctcagaatgtttaaaagaaagaagattctatgatgggcagctagtacttacttctgatatttggttgtgcctcaagtgtggcttccaggtaagaaaagtattatttatatgtgagtttgtctgaaatgttttccttaaatgcttattgtgagttggactgttggtcatgcataggagttaagataaatttattccaatttagatagaaattttccaggaatgaacttaaaaatgattgttaaggtaaagtaaaaggtatgctatgttcagaaagtaatcaggtgtggtttataaatacttgcagaggtaattcaacctatttgcagtagttcccatatctggaccagtctttaccttttgtatttacttaggaaatggatctacctttcagattaatttttttctctctcaaaacagattattctgctgcttttgcaaagtaatttaaaatcttaaagtttaaaagttattgatatctgtaataaaggaatttttttaatgaaattaaaagtatatacttttttaaaaaaataagagaaatctttattatttcacacaaaatgtccagaagtaaggccacttcaggat

SEQ ID NO: 40558 - DNA, 1034 bp, Homo sapiens
tacttactccgttgatgaaaactttagttttggtcattcacctggacatcatatatttaggggttgtgtcttggttcagcctggtatagcaaattattatagactgggtggtttaaacaacacagacttatttctcacaatactgggagctgggaagtacagggtcaagatgctggcaaatctagtatctggtgagggccttcttcctggtttatagatggccatcttctcgtatatcctcatgtggatacaaaggtagctttctagcctcttattataagaggccagtctcattcatgagggctccacctacatgacctaattacctctcaaaggcttcacctccaagtatcatcactttggggattagagttcaacatatcaatttggagtggggacacaaacatttagtccataatggtatagttggcaaaagccaatggaatataccatgtgtatactgatttaacaaagatttatttcatttcaagtgatgttcccctcttcttcctctgttgatttcccggaccagttgaaattgaagtcatttcagttttaatacacattaaataaaatataaaattttaattttgaagactaaaatgtatgaatttttttccctcaatcccttcagtaaataacagatgcgggtgaaagatccaactaaagctttacctgagaaagccaaaagaagtaaaaggcctactgtacctcatgatgaagactcttcagatgatattgctggtaaattgtgatatatggcatcccaaatagtgttgagaagaaataacaatgcagttgacccttcaacaacatgggtttgaacgctgaggatcaacttgtacacaaatttttttccaccaaacctagatggaaaatacactattcttgggatgcgtgaaaactgcatacttggcaggctgacttctaaatgcagattccacggggcccactgcgggacttgagtatgcacagatttgggtatatgtggggaggtcctagaaccaactaccccaccccacctccctgcctca

SEQ ID NO: 40559 - DNA, 1050 bp, Homo sapiens
ctagttgataaagttattacccatgggtgtacaagttaacaattctgataatgctatacatgtatatgggaattaaacaattacgtaaatcaatagcaaatgtttgagagccgggtttctcattgttggagcgggaatttacagataagcaaagggctggaaacagcatgaactcgtgtaccttaatacaatatagatggttagttacatatagaaatatttatagataagtgtatatacatgggttagtgtgtgtatttcttggctttctcagctgaaagggtctataagcaatgacatcccagtagcaatgagctcacctagtacccatatcttggtttctaatatcattctccaataaaaggtaccagggctccttggagaaatggttgattctaggactggggcaagaaatacacaagatggacctggaccatctcttaatgccagtaataaagaagtattcaaaacaaacaagaaaaacaaaaacgtctattgatgaggatatgtcaaaaggatataggagctaactaagagagctcccactgaccaaagctgaaagaatttgagcatcaaaattttaaaaatagcattggataataactcaaagtataaactaaatatccatgagtccatactgatataaataaatgagggagaagagacatgtcttccatgctgaagaattccaaataatatatgtaactattctgccctcaagtagagggagcataactccccactcctaaggtgctggctatacatgttaacttcctgctagtgtgtacatatggaaagggaggaaaaaggtaactttacagtggggaaacctgagaaatactgccttagccaggcgatcaaggtcagtagcaacagtgataaatcacattaatatcatgtatcattgatgtgatatgatgaagatggtactttatctcggtggtcttcctgtcaaaaacccattttctctagtctaatgagaaaaacatcagacaaattccagtagaggggcatttgacaaaatacttgactggtactcctaaaaactgt

SEQ ID NO: 40560 - DNA, 1056 bp, Homo sapiens
tacagaattaggccccactcttatgtcctcatttaatcttttttttttctttcttttttttttttttttttttgagacagagtctcgctctgtcgcccaggctggagtgctcacttcaacttccgcctcctgggttcaagtgattctcctgcctcagcctcctgagtacctgggactacaggcatgtgccaccatgcccagctcatttttgtattttttagtagagacggggtttcaccatgttggccagactagtctcaaactcctgatctcgtgatccgctagcctcggcctcccaacgtgctgggattataggtgtgagccaccatgtctggcctgtcctcatttaatcttatccctttaaagaccctctctccaaatacagtcacattctgaggtactaggagttagggcttcaacatacgaattttggagggggacatatattggtccacaatacttggtaaactttaggggctatcatcatcatcatcatcttcaatgacaacaacatcattatcactggaaaacactgtgccaatgcagtggcattggtaccaaggtaaaatacaaggaatttaaggacaaaaaaagaagacagaaacataaaaatattaatacagaaggaaataaatagtataagagagttacagagaatgctgtgaatgttttgggtgggaaaagattgtttcatgaatccagaaaggattaagtagaacttggtgaaggaagttgaactggggaaatgcaagagatagacagtctaagaacactgaatagtttagtcaaatagggaaagctcatgagttagattaactgaatggtgagtaaggaaatagtggggaaaactccttacctaatttcagctaatagagggccttcgatgctaaatgaaggaatctgcactttgttctattgacagtaatgaaagttagttatttgagatggagtctcgctcagccgcccaggctggagtgcagtggcacgatcttggctcactgcaacctctgcctcccaggttcaagcgattctcctgcctcatcctccctggtagct

SEQ ID NO: 40561 - DNA, 1045 bp, Homo sapiens
tagtgtgtacgcatttacattcctcatacattattttcttttgtattttcgtgcttcaaatgtggacttgaatagtcggtaggctcatttggtcatagcagtgtttctcaatgagggcactattgatatgttggagagggccagtctttgttttatggacagtcacacatatctcaaatgtttaacctttctgggcattaaatgccagtaacttcccctttcccccatcattatgacaacccacaatgatgaccccgtgagtgaaggatgaagcaatatgtagaatgcactgggattttcaccttgggataattacatggctttataaacacgtcgaaatggacaccatagctaaagctttgattgttgctaatgcttccctttgttcatttcaaagtaaactggttaaggagagctcattccgtccatcccaagcttgggtccagaccggtctttggaatcctccctatttcattaaaagtcagtgacattaggattgatctgaaggccccaatactactactcttgtctttagaatgagacatgtgctagacaatattgtttccattaataaaccttcctgtcagataccactcagaagctgagtaattttaatctgtttctattcttgctttctatttttctgattttactttgagtatctctagtttggtagactggtaatggaaacccagagcaaagggcaatcacttgccaaagaatagagttaagtgaaaatcctggcttaacctacaggatctggaagaaaatattagaaataaaacaagaagaaaagataaaaggaaagcaacgaatagtgtgatccaggctttctctgctgcattaagcagtttacagctttcatatattcctacttgtttctcttctctctttttatattgacttcagactgttttgagaataatttgatttatggaatatactttggatgcactactcctccatattttatctctttccttggctccaaacaggttgttattaaaattataaatattgtctaaaaaaattttttttgagacag

SEQ ID NO: 40562 - DNA, 1026 bp, Homo sapiens
gccatttgaccctatcttccatctcagttacccatgtttgtttatgggctcagccctagttccagggctcagttctcatgataactagtctctttctagattacattcttattcttcttctaatagtttatatacattttttgttctacatctttaatagtgttatgcttatgaaagatagattttctccacaataaagggaaagtatcttaaactattttctgtttgtttggcttggtttttgatattctggacataaaaggccttgtgagggtcatgttccttcataatgcttcttgactcttgttccctcctcactgtctttgtctggttccaggctctctggaagaggacatcacatttagagaacttcatctgcctctttattgttcttttggtctctgatcattcctgccaggataagattcctgaaatatgatattcattatgccttactttatctgcttaaatacctacagagccacctcattggttagagtatgacatccaatcttgacagtctggcccattgcctgcctcactctacccactccagtccacctgccaagcctgcccccatgtcagcactccactttagctagagtctgtttactctgcctgaggataacttgcttctcaaatcctatccacccatcaaagcacagctgcagctttgtctctcatccttacagattcctggatatatgtcataatttatgttcagcatgtcacaattccatagtgtagtgtggtttggatctggggaagagttagtgtcaaaaaagaaatcaggcagcgggtggagcaactgtgctaaatcaaatgggaagcctctgcttctggcttaatggaagtgatgctgcaatttgtgattccgctccccagcttaaaagaagagaggaggagaatggctgaatctactatcaaaacgtatctagggaaatttgttttaacaaaatctatagaataaaatattattaaaactaaagagtaaatttaaagagagcaatgcctcatttggcagta

SEQ ID NO: 40563 - DNA, 1047 bp, Homo sapiens
ctttcttctagaaatgttctatgaaatgcacatgcacacacatatgtccacataagatttatcttgaagtttgtgtatttgttattgtggttaatgcttatataaactagtccttagaatttcaaccatacgtctcatttgaaattgcacagtcgtaaattaagtttacttaacatttatgcacctagttaaagttattctttaattgtgtttagataatcatggtgctaaatcaatcattgatgagttcctactgcatgggttgttgataacctagagatcagaaatggaacatgctatcctgggtggtatagacagacaagtgagcaggcatttacagtgaattgtcataggctgagagtttcctctggggcacactggaaaagcatgttgtccagggcaaactcatcaccgtttctgttggaagaagcaacttagaagtcctccatcttggattctaaattctcaaaattttttttaaattagcttctcaaaaatcttatctggtccaaattgtttgtatactgttaaggaataattcacttttaattttcatgcatcattgctattatgtgtttttgacttaacagatgctagctgaatacctgcattaaaaagatacttctctggccatcaaaatagttgggagttaggggttggattaaaaagtgctagactataaggaagtggtaaaagaaatatccttaagtttcgcagtacagatgaagtcataaattatatactagaataactattgtctaggagatggtgtatacaaaggacattgctggtggtgtaagcaatatggactctggcctagctgaggaaagtgttgtgaaagacctagcgtcgagggtagaactcaggtatatgggcataagggagaggagaggggacttcaggaagcctaagattatgaggaaatgcaggaataaattgttaatgtgattgggtctggaggtggagtggaggagggttggtgtcatttaatgagagcaaagaagaagtggtatgtttggaaacatagattggtaccaactatatgct

SEQ ID NO: 40564 - DNA, 1074 bp, Homo sapiens
cactgtttgggtcactcctgaaaaatgagctcacaggtgtggttagactgctttctggctagatagtaggtagggaggagagacagtgggaggagttgggcaccttgggaggggtgtgtgtgtgtctgtgtgtgtgtgtgtgatgtgtatggtaagggagttcatgactggcagcaaggtaactggctacagattaaggagttcaactttaactctctcaaggacgttacccagggtgggccctgtttatctcattgcctcagggagagggagcagttgtgttgatttttgtcctgttggaatgatgttttgtcctgctgcagatgggatttttcaaaattttggggtttgagttctgataggattatgaatctcagtgaatttttaaattaaagaattctagattcaaaatagtctttgcagatgtattacattttgaaatatgttgtcaattattttggatgtttataattttttttgcttcttttttcttttataagaggtaattctcaggtattgttcctctgtctgggagagactgggaggtggttgttagctctaagctgaaagaggcgtggcacattgttttgttcattgcatgcttaggaaggctgaggagtaagacagactcacatctgaagggcggctgctttgtgtgagaggccagagaagctaagtgactcagccaatacaacatagctagtgagtggtccagcgagcataccaacccagggtctggactccagcatccacctgctttcctctttggcatgctttctttaagtggataatgctgttttagggtgaaccatatgaaattgtcacttctatacattaaaacagttcaatattggcaatttcatatgattccacctaatacttacatagtcatttatgacattttgccaatattttgcatggtctatggacagtttactctcttttttaatatggggtctccacaaagtgactcagtttcttcagagtttgggtatacttgggacctgctcaattgccagtcgatatcctgagcccatctcttcttcactaattttagcatcaacagtcatgatg

SEQ ID NO: 40565 - DNA, 1050 bp, Homo sapiens
ctttgaaaagagtaggatatattcgaaatcatcatgttgcttccctttctttttatacccctgaaatacctggaaggtaagaagaatcctactaccaaagttctctttttttttttttttgaggcggagtctcgctctgtcgcccaggctggagtgcagtggcgcgatctctgctcactgcaagctccgcctcccgggttcacgccattctcctgcctcagcctcccgagtagctgggactacaggcgcccgccactgcgcccggctaattttttgtatttttagtagagacggggtttcaccgtggtctccatctcctgacctcgtgatccgcccgcctcggcctcccaaagtgctgggattacaggcgtgagccaccgcacccagcctcctactaccaaagttctgaaagaattaaatatgattgtgattacaaaagtggttttacatttttcttctatttttatattttaggtatatctacacattatatttcatgagtgactgctaccttggcctggaccagcagtatgacatctatctcaacgttacacaagcgagtctttctgcacaggtcaacaccaaggtctctgattccctgactgacctggcattaaagtaacttgacctgaacaatccatttgaaaggagtggctaagaattctctctgttcagtcatctagacaaatcgaattacttgatgtttgccttgaaagaatcaacttctaacctcaaccatccaggaaattgacagtggctgcagtattgactccagtgacataaagttaaccacagtggccttttaacaaatgttgccttttataatgttatctttatgagtttcttgatatgtaagatgaaaaagcatttagaataatcttttaatttgtgtatatttgggatgatatttaggagctatcaatcaaattttacatctcacaatgtactgtttacatggatattggctgctttttttaaggaaaaccacattgagatgtgacaagtgttaggacttgtcacagatttctaactctgccgcataaactataa

SEQ ID NO: 40566 - DNA, 1029 bp, Homo sapiens
tctttaggctgttctttggagaaaataaatttttggcaagaaaaactatctccttaccattattgattttaaatttgaaagactacatgagattcactctttaaattcagctgctaatgttcttaatacagtgaattatatgagtatttgctctcatagtaagtatactgagtttttatctttgttttaatgctagctaccaattttatgtagctagccctgctgccctaacaaaactgattatttggccctttttaggaagtaatgtacagtaaatgctatgatcagatttgttccctgcaatccaactgtgatttattttctggtttctatgttgatgaatagtaatttagagatacaatgcttggtttctttgttttttgttaaagctaacatcagaatcccagtggagggggcaagtaccatgatataattcttgtaacatgtgcattttccctgttcaggcaatgctggacgtggctgcaaaccagggctggctggtgactgtcctgaatatcaccaacctgattcagatggtgatccagggtcggtggttaaaggactcttctcttcttacactaccaaacatagaaaaccatcatcttcaccttttcaagtaattgttttacttttcaatgtaattgttttgttttgatttcaaaaaaatattttttatatatgtagtcactgaaattttatgttatggagaatactgattattgacatggaaaatactcctgtttcccagagtgagacatggccaagtgacgtaacattcttgtttggaatttgatcatcagtcccaagctgaactacagtttaaacttctcctatctaaatcattttccatttgaagcattggaaacatttttatgttaatgtgtttattcttttataatatcaatcttcatttaagaagatatcattaaaatgctttgtgatctaaagcaaaataaatgatcaatgtctgttatcgttgaggagatttgagatatctgaaatccattgtcaaaagtaaattgtgcatct

SEQ ID NO: 40567 - DNA, 1031 bp, Homo sapiens
gaattaaatacataataattttgtctggagttcacatttttctgctgtgtgggaaacaaggtcagatgtaagccacctcagattctttttgaagcaagacagaatatgcagaaatcagcacacgtaatagaatacagtgtaatgagcacatatatgaaactggaaaaccaaaatcaagccttaacttcatcatttgtttaccatagtcactaaacttctttaagcttaagttcccctttctgtgaaggggggtaatattaatgcctgcctcatagttagtattgttaaatattagatgagagctgttactgaaagtgttgtataatctgtgcaataatatacaaatatttttatcacaccatattgcatactctctacactgtctgactttatataattcactgttcagagctttttacaataaattcatgggatttacttaatatgaaatgtagaagatacgttgtcaagcttaaaatgttagctttttaaagtataatctgcaactgtggaagataagaagaaaagtgtctataggtttggataaaactgttctttgcagaaatacttacaccactgtaaaaatgtggttgaatttaaatgctaagaccaagcctgttatgcgtaggaaattcttaaaattgattcgaaatagatgttgaggacatgtggtgtatccaagtcataagggatacctttggcttcaggaaccccacacctttaaaaatttccttacagagactgcccattttctaaactctagaggagaccagcggaagcccctcttttctatgagttcttgcccacatactctggaagcagataatttatcttcctctgaccccagaagggtcttttctctgtatagcttatttcctgcttagtatatgctacccctaacctcaaggatattacagtccacctggaaaaatagaaagtaagctctgtaaaaacaaatagctatatagtatgagtatgttggcattttattgttgaaaaattaaagcttacagaagatagaagccattaaa

SEQ ID NO: 40568 - DNA, 1032 bp, Homo sapiens
ttaaaaacaatgctaactatatatatttgataatatatagaaaaaagttatatcacacttagtttttaatagataatgatccaataatatctgaagaaataaagataaaaatataaggcattttttttatccgttgatatatctggacctagtgtggtaaacgccagattgtttttcaaatattattataaaatacagaatacccaattaatttaatacttcagaaattaaacaggattcctatcagggaaatttactgaaatgttttttctaaagcttcagtggccaaaagacagcagtggaatgtgagaaactaattttggtttgttttaacgcctcagaatgttacaaattaatcaagtgctacttaaagtctagaactcattaactttataagttttacttttcccatgacagagattaagttatagcataaagcttctttagtctcacatcgagcaggctgccatccccactgtacaagtgccctcttatctgtgatttagtgagttcagtgtaggcagcgatgtgtgcagtgacataaaagtactagtttactgttgcgtaatgtttatgtgcaaccaggtacaaatccattctggtcgtgtctttcctctattcccagtaatctgcttaggtaaagcagacactaatagttactgtacctggaagaaaaaatatatatgtatgtttaaaaatacacacacactcaaccaacattcatttgttcacatgctttcagtaaagaaaaagtcaaagtagattttaagtatttaatcatttgtttcttattttaacaaatctaaaaggtaaagttacagtcaatgttgttaagggtcacagtacatgtaagatttacatatcaaataaaactaccagagctttaactaaacccaagtgccagctaattgctgaaaggcatatctcatatttagctgtacagattttgccatattattcttaggagaacaagcaagtgagttatgtgacataagggtgtgagtaaaccattatgtaatagtgtatatcccc

SEQ ID NO: 40569 - DNA, 1018 bp, Homo sapiens
ctcaaatcagtgacctaaccctccaccttaaaaaagctggaaaaagaagagcaatcacaacggagcatgtaacaaaaataaatgttgagataaatgaaatagagaatataaaaagagtagaataagtcaacaaaacttagtctgcttctgctcgctcagtagatattcccatgtcgctgttcctctgtgaacatactcaacatgtctaaaatcttgtgttcatcatgcccagaagactgaggagtcctaccattgttctatgtgagctgcattcacagtctttaatacttccaagatgaatttttgggggtaatctttggctcctccctctctgctccccaatttcacatattaaaccagctgccttttattcagtcctttctttattattttttttctcaaatttctcccttaaaaaaaaatgttcactctttagctcctatttgggttctcatcaccctattcctaaacaattgtgctgacagtctcctgagtgatcttccaactttagtttctctgacatacttaatgtacccaacacagtcttgccaattaatctgttttaaaccaccgtttgcatcatttctcccctccacagtctacaattatatacataataaagaattatttcgttagcctggctgtcaaggtcctccacagtcttagttttctacctacaccttccattagactgttataaattacttcttcccctttctcctgattaacattcttactcccacctttaatcatgttgtgtacatatttcgcttcataaatttgcttatgattcccacctggacaatgtatctgacattcatccatccacatggtatggcatcctcttaacatttccttaatttagcctcagtgattattaccttttctaaatttgtagcaccagcgttcatttcatttatttggcaattgtgcctgtattatggtatttcttatatattggcctgttttgatatttcatttttagatttatttaactttttgtgtatgtatttcttaa

SEQ ID NO: 40570 - DNA, 1200 bp, Homo sapiens
caaggaggcctgcctgcctctgtaggccccacctctggggacagggcacagacaaacaaaaagatagcagtaacgtctgcagacttaaatgtccctggctgacagctttgaagagagcagtggttctcccagcacgcagctggagatctgagaacgggcagactgcctcctcaagtgggtccctgacccctgacccccgagcagcctaactgggaggcaccccccagtaggagcagactgacaactcacatggccgagtactcctctgagacaaaacttccagaagaaagatcagacagcagcattcgcggttcacgaaaaactgctgttctgcagacaccgctgctgatacccaggcaaacagggtctggagtggacctctagcaaactccaacagacctgcagctgagggtcctgtctgttagaaggaaaactaacaaacagaaaggacatccataccaaaaacctatctgtacatcaccatcatcaaagaccaaaagtagataaaaccacaaagatggggaaaaaacagaacagaaaatctggaaactctaaaaagcagagcacctctcctcctccaaaggaacacagttcctcaccagcaacggaacaaagctggagggagaatgactttgatgatttgagagaagaagtcttcagacgatcaaactattctgagctacaggaggaaattcaaaccaaaggcaaagaaactgaaaactttgaaaaaaatttagacgaatgtataactagaataaccaatacagagaagtgcttaaaggagctgatggagctgaaagccaaggctcgagaactacgtgaagaatgcagaagcctcaggagccgatgtgatcaactggaagaaagggtatcagcgatggaagatgaaattaatgaaatgaagcgagaagggaagtttagagaaaaaagaataaaaagaaacgaacaaagcctccaagaaatatgggactatgtgaaaagaccaaatctgcgtctgattggtgtacctgaaaatgacggggagaatggaaccaatttggaaaacactctgcaggatattatccaggagaacttccccaatctagcaaggcaggccaacattcagattcaggaaatacagagaacaccacaaagatactcctcgagaagagcaactccaagacacataagtgtcagattcaccaaagttgaaatgaagga

SEQ ID NO: 40571 - DNA, 1050 bp, Homo sapiens
caagtcatacacatatgcacacatgcacataattaggtggaaagcactgaggtgggagatacaaagtaatttaaaactagatacatgctgtaaaggaagtttgtgaaaatcatatgcctactacattctgtacccctgtttactccactaaaaaagccaaaaaaaaccttaaaatcccaggggaattaaacgtttgttttagtcttctctttgaaaaggtattgatcacaaaaggtctgttcccatcctgtcagcagcatgtttctttctggcattacactatataaaaccagttatgccggtatatttttgttaattaaagtcagttctccagttaataactaaataaatggaaccatctgaaaatatgtgtaaggaaagctgtataacggaatatttatatagatatggtttggtctaccccataaaaatttccacagcaagaatatcttcttctcccatggtgtttagtccaaggaactttcagcttgcgctagatattgtctcagtctgtattatctcaatgagggttcattctgaatgaagaaccataggactcacattgacaaggagatacgtaggtatcacactgttttcttaatttcttgcctaggaattattctttgttcactattgaacactatgtgtagctaccagcaaaatgctaaataatacagcaagattgtataattgtggtgtaatttccagaaatccttcttcttcttaagtttctttaaatgacttttttttttttttaccatgaaaagactaccaaatgactcaaagaactcagtatcctccctactcttgcctccaaaaatgcatattaatctcattgtggttttaaactaaggagaaagtgtagtcagacagaagctgtagggtgcaggatgataatagcataagaagatgaggaaagctgtggggataacattagtgtttcaaagatctgtttccattatcattgcttttgttattataatacttaagaaagtcatattatgtttttgtacaattcactcatataacattcattgttaatgcttcctt

SEQ ID NO: 40572 - DNA, 1050 bp, Homo sapiens
tgttttatgacaccagaacaacttggataccaaaacctgataaaaaatttacgagaagggaatataacaaacgtctctcattaatatagatgtagaaattctaaacaaacaatagttaatcaaatcaagcaatgtataaaaagataatatattactaccacatgcagcttattctataaatgcaaagatgattatttgaaaaatgaatggatataattcaccacatgaacaaaaatgagaaaaatcatataatcatttcatagatgtaaaaaaaattgatgaaattccatacctatttataataaaactgttagcaagcaggagtatgagggaatgttcttaatctgataaagaatatctacaaaaaatctatatcaaacatcataatttataagaagatattgaaagctttccctttgagataggaaatgatagagggattttgctgtcacttcttccagtaagcattgagctacaggcccaaaccactgcagtaaggtaacaaaaagaaatggaagtccaaatattcttttgagaagaaagggactagaaaagcacaacaggagggcttctgggacactttcaatgcttgatgttgatgttgattacacaactgtgttcacattgtaataattaattgtgttgtacctatataatttatgtaattttttctgtgtatacttcgataaaaagttaactaaatttttttttggttttgtaccttgatatgaccgttattattttatgtattacatagtatttcataatttatttattcatttctctattaatgtgcacctagagaatttccagttttctcctcttatgtataacgttgcagtgaaagattttctttcctattctcacatgtaaatgtttctctagcagatcataatgaaaaagtgaaattgctggttcatagtgattgttcagatagatattacaaatttgatctcaaaattgactggaccaatttgtagtctgcagctggtgacctgagagtaacatagcaacttttttaaaaattcaacttattataactattttctc

SEQ ID NO: 40573 - DNA, 1247 bp, Homo sapiens
tttccatattcctgcttaacagttcataaagtaaataatacaagaatactaggtggccaaacagaatgaactatttatacatgagctatttagacattgtattcagttcagtgaaagttgataaataacatttcttatgtgtatgtcattaaaatatcacctagtttgtacagtgcttttttaataccttagtaattattataaagctaaactttattgtcctattttatggattattataagtataaaacagcttgcttccacattaaaaaaaaacttagaaaatttttctgactagtgaaaataaaatgaacaagaaagcagttggaatgtttcattatgtggatattttcatacatttttactaaactgcagcagcagcaatagtttctcaagctgaggattttgtgatctacttattgatttatgcacagacaagctactaagtatattgcaagcatgcttatatatattagaggttgctaatagaaaaaaggaaataagatctgaagaaattgtcacttttttatacttctatctcaggcatataaaagttatgcatttactatttccaagttacttctcccctgttgcttactgctggaatgtggtggtgaaactttagagatgtatccttcttttcagtgctcatgtcttctcaaatcacttggtcttaacattattctcctcatggagtttcccggaaagaacttccttatgctgtgccttatgttatcctctgcttcaaggacagagaactatctgaaacaaagaaactggactttctttttttcttctttttttgtgagacagaatctagctctgttgcccaggctggaatgcactggcatgatctaaacttactgcaacctctgcatcccgggttcaggcgattctcctgtctcacctcctgagtagctggggttacaggcatgcaccaccatgcccagctaatttttgtatttttagtagagacgaggtttctccatgttggccaggctagtctcgatttcctgacctcaaaccttacatgatccacccaccttggcctcccaaagtgctgggattacaggtttgagccaccacacccagccacaactatttagttctttacaacaaattttgtaagaaaataagatttgctttttcttcccataaaatttgtgttactttaagtattttccatgttgaatggaaagtgatagaatattcagagagcgtttctacaacatgagtttcaaaaacca

SEQ ID NO: 40574 - DNA, 1058 bp, Homo sapiens
tgggtataccagatatttaagaaaataatttatgttcaaagtaatgttgataaaagatttttttatcctgtattatttaattgatatctgaataatcatcctgttgtgtctaaggtagtatcataacttaggaggcaaatgatgaaaaatagatatacaaaatattgatgactcagtttatgtgtggtatctctctaggcttaattttattttatatgttatcctaaaagtcttccaaatggacacttttctttgaagtcaagatacaatgtacaaacctaccaaacacactttgggatgtttgcttaaagtatatagacattgtgcattatcacagtgtacacttccactgtgtttctttttgttgttgttgttaattttaatatatgagacctaaagaattgtagttagctcagactttgtgtagaattccttctctgtttcatattttttttatcggcagaaaactttatccacaaggctaggtagaaactatagaatatactctcgtggtttctgctgttgtagatttttcactgctaaaataggatacctagaatatttattttattataaatttattattgtatttattaacaaatatttgttataattgtattatttttatatttttttcttcaacttttattttaagttctggggtatataaacaggatgtgcaggtttgttacataggtgtattagtctgttttcatactgctataaagaactacccaagactgggtaatttataaaggaaagaggtttaattgactcacagttcagcatggctggggaggtttcaggaaacttaccatcatggtggaaggggaaggggaagcaagacccctacctcacaaggtggcaggtagtggaagtgctgagcaaaaggggaagagcccggtataaaacgatcagatcttgtgagaactctctctatcatgacaacagcatcggggaaacggcccccatgattcaattacctccacctggtctctcccgtaacatgtggggattatggggattacagttaacgatgagatttgggttagggtcac

SEQ ID NO: 40575 - DNA, 1022 bp, Homo sapiens
tatcactgataacaaaaataaaagaaactttttgtggtctttctagacattttccgtcacttgacaggacttgattttctcaccagaccccaggaccagttaactctgtaatatcactgcttaggcaaacacaaatagctgagaaacacaacttagtacagaaaactcaatctaagatttagtgtccatgtatagctcttaatggagagtctcagtctttaagtttctccttccttggcaactcagaatagaacttggacccagcataattaaatcttttctctcctaggcaatatactctctaggtagggccatcaacctttcttttcctattatctgtctaatatgctgccagatccatgtagtacctgcaataatgccacatttcatgcctaaattgtttacatcattagttttcatgtatccatttgatatcctaatgaaattcatattctggggttaagtatctttccattttatttcccacaacttttcaacagcaattagaagccattctccagccaaacctgttttgatatttgtctcatcaagacgtcaaactcgtcttactgctttggaattgatcgccttcctggctactgaagaagatccaaagcagtggttaaacatggatgaaagagaggtaagcaacatattttatcttctactacttacacgtttcaggttgtattatattagaatgatcattacatatgtaattgtattatagggaaagaagaaattcataataccgccaccttaccacactattaatattctgttatagtttgttctactatagtcccacttaatatttattttgtatattcatatttataattttttcctttaacgttatcacctgtgtatattgtaacattcaatcattttcatattctttaagtattcactgcccttactgaagttaaaatcaattttgcaaaatttgggttttaaaaaatatataataatctttttttaattttaggaagcactaatatataaaaatttaaaacctgtta

SEQ ID NO: 40576 - DNA, 1045 bp, Homo sapiens
ctttggtagttctagctttagctttttttttgtttttttttttgtttttgttttttgaggaagctacaaactcttccttttgtggttgctgcaatgaccaacacaggcttgttaaatgattaacattgatttttccctattttctaggggaggaaagaggccctgttctagaggtcattgtatctcgaacaaattttatctcatcacacacagaaaagcctgttagaatagttggactatctactgcattagctaatgccagagaccttgctgattggctcaatattaagcaggtatgtagaagattgataaattatgcatttatttagtagtgttactttgatgattccttttaagagatattataaccttataaaattcaatataaaaattgaaaatggtttctctctcatatttactctagatgggcttgtttaacttccgaccatcagtacgcccagttccactggaagttcacattcaaggctttccaggtcaacattactgtcctcgtatggctagtatgaacaagcctgcatttcagggtaagcttcagattcttggaataaaatagtaaccattgtttatggtagctatcaaatatcttctaattggtgttggtttctttgaaaggatgatactggtccagcttctacgtatatctaaaactgtttgtctcaactgttaaggaatacaaatatatgttaaattacctagtgaagattggagcgatttcacaaatggtaatgactttgtagttgaataaaagtatgtaattaaaaaaagttatcagagttttcttaatattaatcaaagtgtttttatgatagtagcttggacagatgagaaatggaagctacaggtcaaaaacatctcataatcatttttatgagaaatcataaaacttagaaatttcagtactttagtacagtgcttctgtttttagtttttcctcttctaacaaattaggcaaacaggaaagatttaagaatagcactcctattttattgaaacatgttttatttgggctgcataaagaatattt

SEQ ID NO: 40577 - DNA, 1025 bp, Homo sapiens
gtgtgtgtgtgtgtgtgtgtgtgtgacttttgtgttaagatttacatagcagaccctggaagcctaggtaacatcttaactggtaaagaaaataaacattcttaaaatttagagtatatgtatagaacattaaaatcaggtttgactgtttttgtgacattttaaattattgctttggtattcaacactttgctagttcagtattctttcatacctttaaagttgactcaaacaatacttgaaagtaggtaggatataaatattaagtaaatgaatactttgaaatatttgtaatcaaatactacttattttgtacaaagtcctatattaggtacttcttaaagagcttatacaaatttcatttaacattccattcatattattgataagtctttttagagaatgaaaaacacacttactatttcattttctctattaagaagtgtatattccaaaaggggagaaaaagacatgaaaacacagtgcaataatgttggaaagacagttctgtagaaggattcagcagaaggagaaaataggtttctcccaggctatcaggaaagtcttggttcatgaatgtggtaaaatttgatccagtgagagtatctttattttatgagaaaattgggacttttaggtgaagtgagttagagtaacagcttgtctagtgcagaagatctgtgttggagagtattcactgccagaattgggacagtcattcaaagaatggataagttttagaagataacggttagagagaaaagcatgaaaggcctcattttctattagcaaaattacaagaacatttttgaaaactgagaaataaaatttgaatccaaaggaaatattatgatagctcaatttcagtcttactggctactgtaattgtgtggcttaaataactacgtgttgggttaacagtgtctaatgtacagaacaaagtctcttaatataaaatgatagtggcagtgaactgaggacctgctgtataccagagactctgctcagtgcttcacgtacattat

SEQ ID NO: 40578 - DNA, 1632 bp, Homo sapiens
gtcgtggaaagaagttctgcatgctttcactgggggaaaggaatataatgccttaattgtgctgatggattatcttagcagttgcccattccgtttgagttttactgactataaagccctgtgtggaaagttcacttgtgaaaactggaaagattaagtcagaggaaaccaaacttagacagttctgaaactacataccttacttcctttaccttttcacagctggtattcttttgtgctggatttccatgtgtagaacactttatccagtgagtatagtattggatctcaaatggcttctgtggagaatccaaatcgtctgttcacaaaatgtgaacaagataaagtatatctctgtagttattcagacagtagcaaaacctgggctccgtgtagtgctagctttggagaaccgagtagaaaaagcagtgatttttctgatgctttagaaagcagcaggcatcttatagtaaacaagtttagctccataatttatggtcttaaccatctctttgtccttcatttctccaaataaaacttcttttaaaaagcttcttacatttcttttgaggaaagatttgtacaacaaccattgtgtgtttgcctgtgtgcatgggtatatgttttaatacaaaaaagttgcatcatgttatatacacctttttgtctttttctttttcatttagtaatataacaaggaggtctttccaaatcaactcagaaagatgggtttcattctttttgcaactgtataatatgtcacaatgtggatattacagtaattcatatatggaatcctatattgatggatacttttgttgtttccagttaccttttattgttaacaatgctgcagtacacattttcgctcctactcttgcaatgatatacattagaaaaattcgtagcagtgaaatttatctgtcatgtactacatgcatttaaaattttgatgagtggccctaaactgcctactggagatattgttccaatttatacttcctccagcagttgttacagatggccctccatgtccatgggttccatgaattcagccaactgcggattaaaagaatttgggggggaaaaaaagttggttgtatctgttctgaacatgcacagatgacttttctgcagattaaaagaatttggggggggggaagatggttgtatctgttctgaacatgcacagatgaattttccttgtcattattccctaaacaatacagtataactacttatataacacttacattgtattaggtattataagtaatctagagatgatttaaagtatacaggcagacagtgtaaattatatgcaaatatcacaccattttatataagggacttaagcatccatggtttgtggtgtctacaggggaagagaaggtgtttgttgaatcaatcccccatggataccatgggaagactgtgctttacccccacataactttgccagcactgggtagtgttaacgtttttaagtttataacagattaacaggcaaaaaatggtacttcattattattttgattggcatttctttaattatgagtgaaactgagcattttttacattggctatttgtatttcctattctttaaattgttcataatcttggcccgttgt

SEQ ID NO: 40579 - DNA, 1938 bp, Homo sapiens
taatatgaaggaaaacattacttaaaatttaaacaattatcatcctattcaacaacacctattttttgtgtagaaggaatagttttaggaaaatatttacaggccttttgacatttttaataaaagagaacaagataaaatcatgttactatgtcaaccttagtctttaatgtattactgtcacttcttgtctaaaaacaatttcattagtaaaatagagccatttttaccttgtactattataggtaaaatattcacctaaaaatatccaaagtgactgttaccataatacaacagttaatgtcctgtaactgcattgcatgaatgttaggtgtctttagaattctagggagtcattttagacttgtacacaaagggagagtttatgatatacaattctgcatattttaagcttcataattgtttcaagtgctgcttttcagaaatatttgctgcttgtttttttcagttatgtttcaatataatttgattatgtagttcatttttaacatatcagtaggatagatgtagaccttcttttatagctttagaatgttttcagctttataatttaaaagataagcagatgattatcacagagagatataaagagaagacagttgtttcacatgcttgtcagccaccttaaaccttattttctttcagttgcatcatacaaattgttaaatcacctaaagctaattaaatccaaagtatatttcactacagtacgttaccatcataatcatgaaaggaatgggagaatgatgtgagtgttatgtctaatttggaataatggctttggccagaaatgaatccaaagtacactgaaaaagttattgggagttttgtcttttgtagagggtggggattgtttttaaattattcatgaggagtaaattatcctatgatcatctcatcctacttagccgttataggtcataagagttccagtattttaaaatgtttacattaatgaaacaaaaaatccaaatcattgtcattttagatgtacatgatgcttttcatcctcttctaaactcttactaatacatgttaagtggagagataataggctgggtcacatgcctactcctttgggttagccaccttacctttttggttagaagctttctcatcattaataaggaatatgagacccttttaaatttttttaaattgatacatagtagatttacatattttctgggcatatgtgggcataatacattcataattatatgaatacattgataattatatgcatgtattaacttacatgaaaatcttcggtcaaatctatttgactgaatatcaaattagtttaattgggatatccataaccttaaatacttagagaccctttcttaattcataaattttatattagatttccaattaatctgaaaaatgtttctgtagaagcattctgaatagcaacctctctcaatatacattacagaaatagtgtgttaccttatgttttagctctgtgtgccatttgacacttgatccgtagtgttctcgcaacatttagaatcatacaggaaaggtgtgctctatggtttatataatgaaatatatggaaaatagcctggagaatgggcttctcagaaaagcagagagaactttaaaaattattctaaaatatttgtaactaacaagaatatccttaaagatactgtattttaaaaacttggtgggtttagaaagttagtactcagaaactattatctgagttactctatttgtacttttaagttgcgttgcatattttttaatggattgttatatgttatatgtttatgaggtatttgatacctctgcattctagatagcctgaaagcttaaaaaatgcattgtaattggcaaaattttatttgtagttagaaagtttataattgtttcacatgattttttttatgttttaaaatcttc

SEQ ID NO: 40580 - DNA, 1050 bp, Homo sapiens
attaaaaggagaatttatgcaaactgataatagaaattttactgaatggactcttcacataagggaaaaatgcaaagtttcaaaaaaaaaaaaataagatgttaaacatcactagcaatcaaacaaatgcttattaaagtacgaagctgttttctcataataaactagtagttaaagataataaaagtaccccatgcagggaaacctacagtgtaacttcagctctcaaccttgcaaatagtgttgtaaaatcattttggcaagtgatttccttaaatgaaatcggggtaatatggtgagaaagagttgaaaagaaaatggatattggagtcttggtgtccaagaaattcatcttaagttgtaatatcagatcactcggggaatattttcctattatatacactgatattttgccctttctatcatgctcctacccttactgagaattatatgtcattaaaataaaaaaggatgccttttagcagcactttcctccttaatatataacatacaatgtttttattgattttaggttgtttaaagtagactttttataccctgctctatggttttattctaattaggattggaaatgatggttctggtatcaatcaatgtgttctcagaaatagagatatattatctacaagaagtaaaaggtgatattctgttacatcatttctagcatcaaccagttttgcagagtagcttagtttgttttgttacataagtatattttgtaattaagccagtgtagacactttgggctactaccttgcttatgattttattctttccctgatgtggcacctagtggtttccctgatgtgtctttaccagttaattgcccaaaatagtggtagtagtgatggtggtacaggactggggatagggacagcaataataatagcagacacttacataagcttagtatgtgctttgtgctataatcttttttatatgaaataattcccataatcacaagaaacctaaaaggtaagtaccgttttaatctccattttacagatgagaaaattgaagcagggagag

SEQ ID NO: 40581 - DNA, 1045 bp, Homo sapiens
gggaatatttttgcatattattaaatactagttcatattatgtgacatttgatagctgcagagtattcctatcttagatataccaagttaactgtgtacttctgatgacttacttattaagaataacgtttttcgttcactcacctacagcaaattgaacactgtttgacggggaagaggcaaaaagaatatctcaaaaactaagttgatatggaggagaacaaatagttcccttttagtattaaagttgattcttcatgaacttcaggaaaaggaaatttcctcacattcatatttatcagtcacattaccacagatgtcttctgttttagccatcggcataggcttaaatttctttaagcccagagattccttgggtctggtccccttaaagtgttctttgtcttttctgctgatggatgataggcatgtgtacaatgcactcctctagacttactcattgaatggtctatgggttatccacttcttggcgctccaggtagaactcttctttttctccagtcatgaaagcacaactgaatgcagactaatcttggatctgctatgtctaaaaaataagattaagattattttcaaatataatacttcagttctcattattatttaatttatatattgtaaagtatttcatatattttaaaggaatattgagcaggcgaatacattgtgtgaaagatgtggtgctttttgaggtgattcaactgtgtctgaggcaggcccagaactccaactccaaaactaacagtctgaaagaataatatctgtgctctctagtctttccaatttaccttaaaaacattttcactggatagtgctttgtttcatcaagttatagaagactaaaatattcaaaaacagtatcttgttttactgttattatttaatacaatgtatagaaaacaatttgaggataacggttggtacataattcgctttcaacaagtattagttcctttctgcttcctcattttttttttaatttctccccctaacttactatacttcatgaaacatagccccaaag

SEQ ID NO: 40582 - DNA, 1064 bp, Homo sapiens
tttttgttcattgtgcttttttgaaaatcccagtttatcccaagtgtatgaagttcttccacatttttcttctgaatgatttaaagttttattttttagatttaagtcttaagtctctctggatttttattgttactttggtaagagcagggttattattttatttctttacctaaagaaagccattttgtcatcatctctctagccttttctagtgaattataatattatctttgccatattctcaattctagtgttgtcttgtggctattactgagctgtgtttgttgttgttgttggtggtgtgtgtgtgtgtgtttgtgtgtgtatatctgtatctggccctccttgaggactacactgttttaattactatcattttagtataagtcttgattataaagcaaattcagcctcattattttattctcatgtattagaatagccatagctacttactgaacattttaattttgaaattggactctttcattacatcaaaagatctgtttgggtttttattagaagtatgtttctgcaatactttgaacaaagttaacacctttattatgtctctccatctgtgagcattgcatattttccagtttttaagtctcttttaaagctcttcaaaaatgtatttcgtcataggtcttgtacattttaaaagattaatttccagatatcttgtattatttgtcactatttttaaaaaaaaattttatatttcataatggctgttgttggagtataagaacacttggttttattcatattatatcccacaaccctgctaagtattcttactaatagttatagattatctgtaaattctctttgactttctgtgtaggcaatgatataatctgcaaattaaagcagtttgaccccaaaactttgagagaagcccagccttagaatcagatattttcatcattcaattcccttagtgtatatacatgtataacgttactattttaaatattttctcatctttttatacttttgaactgagagaagggagtttccataagcccagttgactttattgagtgaaggttaca

SEQ ID NO: 40583 - DNA, 1030 bp, Homo sapiens
aggcctttgggagataattggacttagattaggtcatgaagtagggaggactgggtgacagagtgagactccatctcaataaataataaataaataaatagaaatattgatagatttaattcaaaaagacaaagttctttgtgacctgaataattttaaagattacaaaggagtcccaaagccaaaacaatttgaaaactactatgataggtgaaagtgccttatatatgacatcagattctttttattgtctacatccagcctggttttcaaccttatctcccagatgcttctcaatataaactatagtcaggccatttttgctttttctaaaatagcattgctcaaataatattttcttaaatgaacattgctttttagtaagtttcctcatgtgttttctcctttttcttagtatcttcctttatctattgacatttgtccaaatcttgcccattctttaaaacccagttcaaattctgtatttacttcttccctgaatcccgtagcaccattcatttatattcataaaataatacctagtgcacaaagtctgtgcttttggacctgatgtagtgttaaaaacctgaatcactctcaagtaaaattttgattgctcttgtcctatatccaactatgttactgatgctaatgcaagaatgtttgtggaaagacaagggagataacatttaaattcaatttatgagttagtcactatgctaaatgcatatgtgcaacttccctgagtcttcacaagaaccctactgggtagtacctccattttacaggagcagaaagtaaaaccaaaaaaatctacttagacttatgcctagtctgtcctgcagactctggccaagcaatggatgtaagaagtatgcagacacaggtattttgcctgagaccatggctaggggactgcacggcttagcatcactgatgagagtgcagccctgccaatgagagtgcagccccaataagcgggggacatttgcatttatttagtacagatttaatgacaaaggcttgaagc

SEQ ID NO: 40584 - DNA, 1047 bp, Homo sapiens
atcagttttaggaatcaaaaaatttaccttaaaaataaaagtgtaaagtaatgaaattaataagttttacaagcctttaacttggacttttaatttagactttggtgtcagatacctgagtttcaatctttgctctgcaatttactagccatttatcctggttaagttctttaaactcaccatgccctacttcccccctctttaaaagaaggacgataaaaagacctaccgcataaattttctttggatgctaagtgaaataatgcacttaaagcatttaaaacaaaacctcatatgtagtacgtgctcagtaaaaatggttgctaaatagattagtgaacagtttacttgccaaattaaataaggaatatattatcttatgtatttacctttaatttaagagcattagaaatcacattgtagtttttgtgttcagttagtctactgacttgtcacaaattatgtagtttgggattggtgtatttagtgaagtagtatgtaagatcttctctggtttctttaaacgttacaatgtggaggtatgtggaaagaaagtcatagttggagctcatgaaatgggtttctggtagtctagattcatctgctgcaatgtgagctcttgaggacagaccacgtcctcaaagcctgacacttggtaggcagcgtttagtacatgatggaggagtaggaggatacattttagataacagcaagatgtgatttaggcttgcagttaataacagatctggtcctctggtgaagccattgaggtttagatgagaccacgggtctgatgtcacaaatattggaggtagaaagaacacttgctgttttcttctgtgtctaaacttttaattgggaagtcctttgaggaactagccatgttaagaccaaaaaagagaacgctgggaagaacactgagtaggggacatatggtgtagaataatttgaaggggcatgagaagagtaatttaacttactattttgtttctaaagggtagaattcaaggaataatgagaagaacttaatatgaaatatttatataa

SEQ ID NO: 40585 - DNA, 1072 bp, Homo sapiens
catttgttggctgcttgtatgtcttttattgagaagtgtctgttaatgtcctttgcccattttttaatgtggttatttgttttttgcttgttgatttaggttccttatagattctggatattaggtctttgtcagatacagttattttctcttgttctgtaggttgtctgtttactctgttgacaagtgggacctaattaaactgaagagcttctgcatagcaaattttctttaaaaagaaaaaatatatatacttactatgggccaggtagtagtgtaatttctctccaactttttattttgacaactttcaaacttaaagttacaagaataatacaatgatcactgtttacccttcacatagattcattagtcattaacattttgctcttcctagacccgttacccacacacctactttttaaatttttgctgaacaatgacaggaagttctagacatcatgattctttacctgtaaaatctttagcacatgtctaagcacaatacaattatcacactgagcaaattgaacactgatagtgtcatgtattacacatattttaaatcccggaaaaattaagagttggctagggaacaaaacttatttttataaaagcttgacttaaaacatagctgatgcgaaactcaggttttaagtggtaaataggaaaacaatttttttttacctttaccacactgttttttgccagccttacaaatagttttggattttaaaaaagtatatgagcgtaagaaatttggcaactgtcttcaaactattcaacatctatccttcttgtaagttacgtcctcattttcttacatttatgattatgacactaaaaggaaatgataaaaacagctataatttaaatctaaaatttctgacagattttctgtttcttacagattctcttgattactaatacatgttctcagagccttaaagttcctttgagattgtaagaaacttggaaaatataaatttagcaattttgtctgcaggtctgtttgttctttgagtgtattgaacacttctactctgccttcctccaagagcgctcccacctt

SEQ ID NO: 40586 - DNA, 1056 bp, Homo sapiens
tttgctcatttttatattgggttttctttttattactgagttataagagttcattgtatattttggatgcacaccccttatcagatagatacatgattttttttttcctattctgtgggttaccttttcactttcatggtggtatcctttaaagcacaaatagtttgtttattttgatgaaatctaaattatctgttttcttttgttgctcattctgttgatgtcatagttaggaatttttttttaccatatctacatctgtaaagatttattcctatgttttcttctgagagttttatcattttagctcttacatttaggtcatttattcatttgagttgattttttatatggtatgcagtaaaggtgcagcttaattttttgtacatcactggccagttgtcccatcatcatttattgaaaagtctcttcttttccctttaaatagtcttggcattcttttaaaaaattggttgaccatagatgcttgggtttatttctggactctctattctgttgatttgtctgtgtatcctcatgctggtactacactcttttaattactgttgctgtgtagtaagttagaagtatgaaagtgtgagtcttaaactttgttctcttcaagtttattttgactattctgagttttctgctattccatctgatttttagaatcagcctgttaatttctatgaagaagtcacctgggattttgataggaattggatttaatctgtagagcaaattggggtttattatgatcctagcagtagtcttctggttctagtcttctgattcatgaagatgactgttttttccatttatgtagatcttctaaaatttctttcagcaatatttgtagtttttagtgtagaactcttatacttcctttgtttgatttttttttcccagtaatgtattattgttaatattgagtgtaaacttgattggattgaaggatgcaaaatactgttcctgggtgtgtctgtgagggtgttgccaaaggaaattaaaatttgagtcagtggactgggagaggtagacccaccctcagtc

SEQ ID NO: 40587 - DNA, 1026 bp, Homo sapiens
atcatttgcggttgctgaaagacttgcagtctttttgttattcctttataagcgttctttctgaatattcatgtatttctataatcatttctataatcctagaacattccaggctataatcttttaaaataatgcctttctgtcattctttctagtcttcgtctttcaaaaatcctatcagagatatattggaacctctcactctatatcttccatctcttcaatactttaaaatttttttaaaatctatttacttctgtcttgcattcgaggtgaattctttgtactatttccacagaattatctgaggaatttttagtgattattttttatttcttgatttctgcatgtttctttttatatccaccagttcttctttaacttttttgttttgttttataaattccttttttaataaagcaactgctttatcttttcagctttataatacttatttcaaagtctttgtcatattgtttcatattattttcttatgtttcattgatgattttgttgactgccagttttagtgtaatatttcttatggttcagaattttaatttttagactgatcttaatttgaagcttcccccttcacattcctccttactccatgccctaaatttctatagtagctgtggccccaggaatcattttgatggtagttcaacttttttttcatgaacgcagaagctccatgcctaatccctggcttccattaagattagctctagttcccatttgcatggatcaatttttatctaggttacccagcaggagccaaactactggcctagctgtccagaagtggagctgagcctactgcaacttttagctgtgttcattgctttgcctattttgttgaatttctggttgagggagatattagtcttatttttaagttcaagtgtacctttttgtttgttttttttcctttttttttttaaccagaagagttgcattaaagtatgaattttgtgccatctttatcattttaattgataataccagttctctcagcaggca

SEQ ID NO: 40588 - DNA, 1048 bp, Homo sapiens
gcctggctttttaatgtctgactaccctaaagaaaatcttttggattaagtttttgaagtgagttctgatattaatagttcttgttaagatggaaaagatgttaataaaaacacacttgagaaatatgtaaagtgggatctgaaaggctagcatattggagatgtattgaagtatacatatctcagtattatttcaatattacatgctatttgcaaagctattaatgctgatgtagatactgatagagttattgtataatcagtttttagaaaaagagagttttgagttttattgatacaaccgtagtttgcttttgtgcagatgggctgcttctttatagcatttgtgatttgacatttgccgttagtattatctcttgactctatgcagatggcgttacttgacccatgcaagttcatttctgaacctccagatatgtgtctgatgtcaagcagtgtgagttatttggttagattgtcttctgagggaagactgtgtattttttggaacttatttgcattggaaatgattctatcatcctttgaaaatttggtggagaataattagcttgctttaatacagtgattctcgttttttgttctcaaaactcttttgcacttttaaaaattactcagaacctcataatttttctttatgttattgaactctattgatatttgtcatatttgaaattaaaattgaatttttactatattaatttaataaatgtctattaaatcatttgttttttagtctttcttattattctttcagagacagagtctcattctgtcacccaggctggagtgtagtggcatgatcatagtttactataacctgtaactcctgggctcaagcaatcctcttgcctcagactccctagtagctaggactacaaggatgcctcaccacacacaactaattttttaaagaatgttttgtagagacagggttctgtgatgttgtcctgactggtcatgaattcctggcctcaagtgatcctctcaccacggcctcctgaagtgcagggattgcaggcatgagcca

SEQ ID NO: 40589 - DNA, 1078 bp, Homo sapiens
agagtgtggggattatatggagccattacacctggtctattgctatgatttgactgttagatttactcaggagaatatttgtggtaattttttggaagatcgtaacttgaaccatgattcaattgagctaatactgtttcttttgtctttgaatagttggaactgataatgggagagaagcaattgaaagtggggctgcatttctcttcatgacatttcacttgaaggactctgttggtcacaaggaaacaaaggctatcaaacagatgtttggcccctttccttcatcatctgccactgcagcttgtaatgctactaatcgaattatttctcattttagtcaagatgatcttactgctcttgtgcagatgacagaaaaagaacatggcgatagggttttttttggtaaaaatttagcattttcatttgacatgcatgatttggaccactttgacgaactgccaataaatggtgaaactcagaaaactataagcctagattataagaagtttctgaatgaacatctccaggaggcttgcaccccagaactcaagcctgtggaaaaaacaaatggctcctttttgtggtgtgaagttgaaaagtacctaaattcaactttgaaggaaatgactgaagtgccaagagtagaagatctttgctgtactttatatgatatgcttgcttctattaaaagtggtgatgaacttcaggatgaggtatagttgaaatgatttatttttttatattaatgtgaactatcctaatgaaatagtgttttttaaacatgggtggttagcaaagaaagttctttaatgttctgtatagtagttgaatctatagccaaatggtttcacatagcaggcctgtatatacgttcctaatggatagttacaggaggtctgaaagtgtaatgagtgtagcagaggagtaagcagacaatagttgggtgtccacatgctctggttactgggacagtgctggtttgatgtcaacttaattttaatactggacaaattgaatgagtaatatatttcatgaaagattaagagggatggcctactgttgtagaaaggacagg

SEQ ID NO: 40590 - DNA, 1452 bp, Homo sapiens
caagagtagtggacaagtgggtagaaagaccttaccattccctaatcagctctctaactgtcaaactgaatatctcttcaagagctagaacagaatgtttgaagttgtcccagagtgcattgatctaatgattttactatagtatggatgcaaatcaagactcagccagaaatgaactagtttatttcactattcaacttgtcataaaaagacctgtttgttttgctttttctaatttataagccctgatttatatgagttttgacttttttatgcatcttacctttaataacttcatctttaagaaaactatgaatcaaaaggtaggttggacaggagtggcttacaaagtatggtttaaggcatttgtaaatccattgtagtttgtgagttatcaaggaagtaagattttgctgttaaaaaatgaggaatcaaaatctagggtggaaagccatttataaagcaatgactggaataggaagtataaaaagatagtagcagaatctggcaattttgtgtgtggacataatggtagatatttagaattctaaaggcctgttaaagggatatagcagtatttgtgacagttattttgaaaattgcagattgcaaaagagttcaaagagttttacttcccacaaagtggcagacagggtaatgtggaacaaccctctacagagaatacctagaaaaactgcaaaatacaaaatttgtttgactatatcagagaagttatcaaagcagtgaagatttttggggccaagatgtggaagcagaaattaacccagaaaatgtgatcctggcatttgggctactttttcctagaagtgaattgtccattccagaagaggaggctggatggaaaagaggaggatgagaagatgagcagagcttctgacagattcagaggactaagatgacaaaaatgactaaaatggacaaaagaagaaatagaaaatctgaatatttgactattaaaggaatttaatctgtaattaaaaaccttaagtacaaagaaatctatatgctatgatggctttaatggagaatgtcataatgtcatttaaaaaggtatgagagtactattgtagattaaaagaggttaaaggcatataataatcaaaatgtaatgtatgatccttgattgactcttgaatcagaaaaaaattacgtatttttggggccgttggagaaatctgaatatgggctggacatcattaggtaatattagatctcaggtgtgataatgttgtggctatgtaagaggatatcctaaatctcaggagaagcatactgcagtatatatagtggtatctcatgaagattaaaatgtactgtcaaatgtgtcagcaaaagaaatacacatgatgtgtgtgtgtgatcaagtgtttataatgagtggattaataaatatgagaagatagggtgatttgttgtaaagtaataaaggtt

SEQ ID NO: 40591 - DNA, 1072 bp, Homo sapiens
gtaaacaacatactatgtaaaggaaagctaaaatttcctggcatctaagtattcataattatgaaagacagtcctggccaggcgcggtggctcatgcatgtaaccccagcaccttgggaggtcgaggcaggcagatcgcttgagtccaggagttcgagaccagcctgggcaacatggcaaaaccctgtctctactaaaaatacaaataaaataaactagctaggtgtggtggtgtgcacttgtagtcccagctactctggaggctgatgtgggaaaattacctgagcctgggaggttgaggctgtggtgagccaagatcatgccactgcacttcagtctgggcaactcgagtgagaccctgtctcgaacagaaaaaaaaagacagtccgtatctatcagcgagcttcggatagagagtgacaggctggggataggcagaagtaaattagtaattataatactatctagcatgaaggatttgtaggaattcagtgtttgaaaaccactgtcttgattaaaataaggataaagtaaattaaaattttaatgtagctctaaggaagcttaaaagctatgtagctcagtcgcttattatagatgcccacctagtacacagtgaataacagcacttaaactagactttgactgcttcacttcccttcctacactaatattcttatcaattgattatatttgaaggaaaatgtaatttgaaattacaatattgtatacgaactcaggttactttcctaaggctaaaaatcaaactaaatgaaacaaatgactggtaaaacccctgtgtttgtacattgaaattcatcatattgcaaattctgataactaaaaagcataattaacactattatagttctagattttccaaatttagcaggtttgcaactataaaatgtccatacacctattctggtcttgcatgatctggccttcccctctgtctgacctcacttcattcttgccttcattactgtgtcaaacacgtctgtcttcaacttcctcaaacctaccaggctagtacctgatttgggtcttcacacatgctgctctctgtgtt

SEQ ID NO: 40592 - DNA, 1020 bp, Homo sapiens
acatggttgatgaacgagttttacaaatggacagaggagaaggctgtttcatatacacaaaaagccacattcaaatgtttgaaggtgccagttattttcttgaaaaagtcaaaaattttcatcaaaacataaagaccattcacaggaatagactagtatctgaagggtatagtatctgaagaacaattataatagtaagctgaggaatttatgcttaaaagttgtttttaagtaggtagatggagtgacaagagcaacaactataaaagcaccaacaggcatattttcagcaaaattagaggactaagaaaactcccaaatcaaatcatgtgattacttcaagatgcaataaatctggagagagaggcataattttagaagatctcagaaatccctaggaatagttcattaccttaaggaatggaactctcacacctagtacagacagtagtgataaaagcgaatatgattatatagtataaaatgctgcacttttttaatacagcctaaaggctgttgatgaaggctaagaatggacaagtcttgaatgtcaggtaagcaaactgagagacaatatggaaagatcagtgtgatccagaaatggaaactcagaaggtaaaagcaaaatgtctcttgtaaatattaattgaattgccataaagtccagactgtgtctcattccagccaacagcttgtgaagaaacttgaagctcagatctgttattaaaaacctttgaaccaagtttgggtaggaaaagtgcagaagacatggcaacaatcattagcaacagcagcaacacaagagggagttcatgagcagaaaagtctgggaagcaccctggcccactcatcccttccagagcaaatgcttacaaagagttgattagcaaaatgcagccattcagataaccacaaaataaaaatataccacattcatacaaaaatattacagatgacaagataaaaatagtacaattttgttacaggttattaaacttaccagaaagataatgccacaaa

SEQ ID NO: 40593 - DNA, 1033 bp, Homo sapiens
gtgtagtcttaacatttatgtgagagaatcaacagcataataaaatttattgtcagttatgtttaaaacaaattattaatctacaaatgcaaatatgagttcgagctgtataaacaactttagatgacaatatataggcaataaattacagagtgaaatttatttcttaaaaatgcaaatgaacccatctggaaaatatgataaaatgctagtaattcagcaagagaaaggaatctggaaagcagtaatgatggagagttttctagatgaataatcgttggtactggataaaaaattaaaaataagcatttgactttgggggttggtaaagtacatcttttgagttgcctataacagtacaaatctgttaaagcccacaggtacagatcattctcttatgattacagaggtatagtttcaattttggccacttgtactgagaaagtttcagccagtggaagggaatgttgatgaactcgaaggaggtaacaggaataattatgtctctggaaaaacccactttggaggaaatgttcagataataatacagtttaaattgcataagtcagatcaatgagaaattatggccctcatatgaagatagtctataaacaatagcagcagtggcaacagcaataataaaaaagtttaagtgtctttaagagtcatgaaaatagaagcaggagttacctaacagaaatatagtacttgacatcattaagaaatataataaagcagtttactggtaaaattgtgcacttgcctgggggcactgtagaattttttttactgaaatatataagtaaaagttgatttagaataacaatgtgaaactcttctccaaaaacgtcttaacatacttgtaactttttactttatcttgtgttaaagtatcttgatcatcagtaatttgtgctagtaatggatcaattcaatttttatactttttcttggaatgcctttctttacaattagctaatcatcctttaaataagctgactttattttagcaaaatccattaaggaaggttgt

SEQ ID NO: 40594 - DNA, 1049 bp, Homo sapiens
ccctgtgccttctgctttatctccctttgagaagtctacctgtgtctcttagtcttcaaagaaggtaatgatgccgtaatgccacatataattacaattaattattaaaaatattaggaaaattatcttttctttgcaaatatataaaattttaggcttatatttaataataaaaccagagagcttcaaattatagcaatttagagtgtcaaatttggcccaattgagctcagagggtataataaagatatcatgccaatttcagcaaattgcacagtttatatctattaacaccttcccagtgtgaaactacctccttgtgaggactattagctctctccataaatgattcagactgtggaagatgcaatattactggtatttgcagtttaaataatggtaataataatatctaaaatatagctatattgagcaacaacacaaaaaaccagaaacatgcagacctgtgaccatataccaccttatttctgcaaaacaaatttgggctgatgatagatccctctttctcctctcttccatttctaaagaacctaaacatacaaacaaaggaatcccaaagaacaaaatgttagcattgaactctaatatctcttataacatgcaacatccgttcccatgtagctaatgtaattttgatttttaatctacacatgactcactaaagtcatgattgaaatatttattatactagggatggattgtcctgccaatttgaaactaaagtttagtccatgggacaggtagcagaaatcaggcctcatgtcatatctcagtttctcctttgctttagatgttcctagtaagagcaatatttattttactatattgtttttgtataaaatatgataatttatgtaatttggagtaatatatgaataccatctaggatttatccaagataatgtactaagaagtattttaacaaaatatagtggctgtaataaaagaataaagtatggtccctcctatttccacattaattccaatcaggacagcagctatcaaaaagctaagtttactttagcatt

SEQ ID NO: 40595 - DNA, 1031 bp, Homo sapiens
tatataatgcgtaataaaacacatacatattccaagcagagaatagatgggtacctttccttatattttagctcaccatattcagctcacatatttttaaataatttatctccaacttctaaaaatatggcctttattccttgatcttaatcctgtttttcattcataggaaagtgctatttttatgggccagtgaagcttatataccattgagtgacatttagatactacagttatttctgtgtgaggagaattaatctcttcaagaaggaaactcagagtccttccctctgttgccaggcccatcgcagaatatctccagttatgttttctgttgagagagcacagccttcaatagtgttttaaaatttaaatgtgaaaaagttttaagagccaatgtaatattttgtttgttgaaccacttttgtatcatattttgtgacagttaattaacaaatatgtataaatgtttttatgtataaattaatttttattagaaattaatggtacttgtgtcaggattgtgaaagtattgagtgtgaaagtatgtgagcaagtgagtaaaaatttctgcagttggaaatgaatgaaaaatctgctggaatatgtttatgaaaagggaattatagcttttgcactgatttaaaattttaaggatcaagtaactgagtttgattctttttaaacattgatttgatttttacaatttagttttattttcagtcctgtctccagtaatcatttcattttctttctttctttttttaaggagagctctctgacttttttctttcttcaggcagtggaacacaggctggttaaaagtacaatttttcttcctttatctgccattctcctttcttccctcctgcccttcttgaagctttattccttggttcctctgcaacaatacatccattactgatggctaaacagaccaagtataaacaacactgagaacgttctcagtttggcttttttttttcctttggtctttttttagtctggcctttggcaaaggttcatgacag

SEQ ID NO: 40596 - DNA, 1029 bp, Homo sapiens
acttcaaaaacatagaaggtctagttatctaaccatcaaattgttaagtattaataaaaaagcaaaaaaattgtcttttagacagtgtttccatttaaaatagttggagctgctgtcctttaaaaagcacacgtattttctaatctgccaagtaaatctacttctttccactctgctttagtggtttttctgtattaaatgtgcacaaatagaagaaaccacagcacctccaaaatgctgctgcttaattctcctgtatgattctctgtattgaagatgtctacctaaacagatttcatgagctttgtgaaattttgacttcaaagagtgacacttgaatttttaatcaccttactcaggaacaatgttttcttggtatgccttccatttctcttttatgtagaaaaattatatgcatttttactaagtcatcaatttctacttgaaattctatcctcagtttcatgcatgcatgcatggctttataaaagtgggataagtttttttgtgcttcagggactgttcagtgaaagcaggctccagcagagctttgtccatatccgacaaatgcttgctgtcagattttcccttctcctctgtttgacatgatggaatcccttacaaacatgtcgatttggaccagcacgctgcatactaaattatgaaaacagtattcacattttagcatcaaaaaaagtggactcatcatgtggtattgttctgaagtgaaaccttggtgatgaaaggagaaaacaagcctatccaccaattatctcaatattttgaaggccatggcatagggtggatgtttgactcttgctgtgggatggcaggtttgctatgatttatgtagatctaactatatgattttggttttgatgacagatgttacaggaataatattcggctttgtgatgttttgtaatatccctcgggtaaaaatgaatctgtgtagaattgaataatatggtagttgtatttgttaattgaagttgctatgctttgtactttatttcagagcatcatgcc

SEQ ID NO: 40597 - DNA, 1135 bp, Homo sapiens
gtgttatatgattctggtattgtgtattgttcacaggtaagtgctttagaagttcctatttgtaggcatttatcctggcatatcagaaaaaaaacctttgtcattcaataatttctacctgttagcagaatgtacttttatagtttttttaaaaaaattttattatagtatctattaaatgcatactccaattaattttttagaatgatacaaaggcgggccaggcgcggtggctcatgcctgtaatcccagcacttcggaaggctgaggcaggtggatcacctgaggtcgggagttcaagaccagcctgaccaacatggagaaaccctgtctgtactaaaaatacaaaattagctgggtgtggtggtgcatgcctgtaatcccagctacttgggaggctgaggcaggagaaaagcttgaacccgggaggcggaggtcgcagtgattgtgccattgcattccagcctgggcaacaagagtgaaactccatttaaaaaaaaaaaaaaaaagaatgatgcaaaggctacttttactgaaagtttttattaacttgttaacatttgaaatgagatgttatgaaagtattgcttataatggtaaaaatagacaatggtgattgaagttagaagagtgaatttcttgggagagggcgtgcacgaacaggagggccaagtgaagcttctgggtgttggaaatgttctgtgtctagatccgggtcatgggtacatgatgtatgcatatctaaaatttcacttaatgtttgtgtactttactatatgcatgttatacctcaatcaaaaaaagtagagaaaaaagatgcaatgtttcaaatgatacggaatgaattagttggacttagataggcaaatatcaactttaccttctcttgtttcacaaaatattcctaactgatataataaaggctttatataattcaagtaccaataggtaacaaaaactgataagaaatgcattagtgcctcaaacttgaagttggtaaggggcaggaaatgaaatttcaaaaaagtggaaatccagtaatcaatgaacatatcaaaaagatgtccaaaatatttacctaaatagagaagctgaggcacaaaatataattttaaatagtttacttaaggcaaag

SEQ ID NO: 40598 - DNA, 1061 bp, Homo sapiens
gtgccttaaagtaggccttaattactcatctgttcttattttatacaaaccctgttctgggtccattttactttggattgaatattttctgagctgtgaaatatactcagaatccttagtcatttaagttctgccttgaatgtagattttatcataaagctatctttaattccttttcccttaagccatctccatgtatttttaaaagctcatcaatataaatgtttgtgtctgtcttatttgtttctcatgtttagaaggggaaaaaggagattgattacaaggatcataaaagtaatgatgcatttaatgaaagcatgtattttatagataaaataaactttaaaaaataacttgaagctagtacccaaattaatgtaatgaaatgaccttcagaaagtaatttctttatacttgggtcattttagcccttttcttgtttttatttatttacttttaatttgattttctgttttaattttgatgactttaccctagttataatactccagattctctataaaacttaaaaaatttctgataagccttgtaaatttctgagttttatcatagttatgatggttttaactgtataaaatctgaatgacctgttgcttcgaaaaaaatgcttattactatatctattgcatacccagtgtagttcaggcagtgttctaggcactaaagttcctgttttcaggtagattacattccagtaagggatataatctacctgaaaacaggaggagaaagccaataagaaaatagagctgattttagttaaaatccagattagaaaataggaaccagtgtattccagtgggggaaagccaataagtaaatagaaagttaaaatccacattgaaaaataggaaatagtctaggactcttgattggggagtttattatagggagattttagaacccccaacaagacatgggatacatagaaaactaagtaaatgaaacattacacagttttgtagttcagagaaaaaacaaagttgtacaagaaaggaaatacagttgactcttgaacaacatgggtttgaactgcacag

SEQ ID NO: 40599 - DNA, 1050 bp, Homo sapiens
ttgacttgattgtataaatgaatatagtttgcaatgtaaacactttaattatatctttctgttccccaatgttgcttgttagtttttctatcacatgtgacttagagacttacttcagctgtgtctgtaacataatatttttctagtcatgtttataacacaatttttccatttatttcatgttttggctcaaatgaaggagttggtcaagaaagaggtggtttacatgtgccatgttggtgtgctgcacccattaacttgtcatttaacattaggtatacatatgtaacaaacctgcacgttgtgcacaggtaccctaaaacttaaagcagaaaaaaaaaaaaagaaagaggtggtttgactggtttcacctttgcagttgcattttggattctcctgcacctctcttaaattgtctctcttcaatttgtttcatccttttgttttggctattataatgtttcttgaagtctggaacatttcggttctgttttcttgacaccaagtaggattggatcccccagggctgtgcatttcctggagaccgaacactttcagctggcactgctaagttgaatataattgccagtctccatcattaatttatagccaggtgtaaataaatattttctaggcagaagttacaagagtttccaataagaagggaactgtcttttttggggaaattgcatttcagtggaagcttatagcttaaaggcattcattagaggtaaagcaagaaagagatggctaagatgctttgagttagcaataacatttctgttatgtggtagagatggacaggtaaaagtgagggacaaggatgaaagggaagtgagagccaaattctttgaaaagatgtccagaccatgttagtaacaggtgtgactaatgctgtatatgaaaaaaaattttgcattgctatgatgttagtctgtcagcagaagatcaagaacatccaagatgacatctgggttttatttatttttttagttaaatgtgtatttgaggaacatttataatatgtgtagtgcccttcttatagcagtc

SEQ ID NO: 40600 - DNA, 1054 bp, Homo sapiens
agccattctgtttgaaaaatgaaggaactcgagagcaatgagtttacatgacaggggcgttacataataggcaggatatatagatggcagggcatttgtttaaacagggcatgtccatgtaacactgcctcaataaagaaacaaatgggctttcagaatgttataccaaattcagtcaagggacatcgagtgcccggtgttaagtacggcatcaaaccaggcactgcaagtgttaaagagatgcatgaaactggcttcaggggttcagtaaggaagacccacacacaggtctcaggtgctagttaatggtccaggaactaattacctagtacatctattaatgtttgtttacatatctgtttgtagatacaatcattacctagagcaattattttggtgtcattattggtaaactagacatacacttaaatcttcaaatttcattgccataaacatctataatactgggagcatatccatattatagcacatatctgtccccctaagtggactgtgatttccttgaggtagggtcatgctttattcatctgtagtgtctggaaactatatggtctgatatctgataggtattgaatacatatttgttgaatgatttgaagtattggaacaaaacatttaaaaatataaataattattgctaacaatatatgtctacatcagattctaatttaagaatctgtttattgcatttacttccttacacatatgtatttattgtcaacaatccataatcattgtccagaatccttaacaattgaatactatttttctctgtctctacagtttagtaggttttggcaagtatacagcagtgattattagatatgtatttcttttatttctctgttttgaattctatttctctaatttgaattcaaaatgattttcatctctgtttctaagaggcagccagagattacttctagagttaaaaggagagccctcatttgaacctgtttgagtatttcttatactcaactgctttggttcatggtttaaataaagttgcagagtatgcattatatttttcatg

SEQ ID NO: 40601 - DNA, 1021 bp, Homo sapiens
aaaaaaaattaattaataccaaatctgaacagatatttcctttagctactcttaaagaatggtttttaccagttttttggctaagatgatcaggaaatggatagcagacactcactgtaaaaattttattcattttttggtgttaattagtgctaacacataagtgagtataattcttataactgtctgggctcaatccttcttagcaaggctgtcagtagtctactgactctgtgaaagaattcctgcaggaaaggtgagaggcggacttgtcttggtccctacttgattattcaggtcaagactctaatgtctaaagtggcaacctaacctagggttggcaatgacccatataccatttatatttatgtgaatgtgctacacattataaacgcaaacattttggatccaaacagcttaaaatttctttgcaagtaaaaagatacaaggatctttttattctcttcattatactggagggatatcttttatcattcattattgcctcatgttttcccagttttcttattttcatctgtgcatctatatttatatcgcttctcattatgacttttacagatacagtcttgactctaaattattcttaaatattctatgtattttaaaatatgtgtcatgttactctttaagtaccttctttttcctgagtttcacggcaatcaaagacaaagaaaatgatgtctgacctgctgtatatatcaaaacacaatattcagttggatacaaattcgttactaccttcatttacttttgaaaacatgacagaggtttaagtataaggcattagtatgttgtgggagattgctgtgtcttccatagtctaccctgctcttccttggctcacggcagcctagctagagaagctgggagtggtcacttgactaagttctcaccgaaatgtgattgaaagatgtgtatgacttccatctcacttgcttgaaagaaagttgcttgtcttggatgctttccctttcccattcatgcaagctggaatctggat

SEQ ID NO: 40602 - DNA, 1041 bp, Homo sapiens
tgtcttaatttttgagaatttttttttcctggtagaatataatgtgtgttacatagcatagtggagatatatgttgtatctgtatctatataggtatttatttgttgtttttggcctacttcctgtaaacataaagtcttatatgagcaaaaacagaggtcaaatttatgatttatcaaaaatgaagaatagtaccgctaatcataaataaggaccaattattaaagaaacacaagtttaaatttttaggaaagtttgataacgaggaagagtttttttttttcccaaagcaatgatacagatttaattattggaagttaatattacaagcaaggattcttctttgcccagctttattgaggtataactgaccgataaaaatgatatatatttaagatatacaacgagatgtttgggtatgcatatacattgtaaaatgattaccacaatcaaactaattaacatatccatcatcatgcaaggattcttaaaaatcttcaaggctgtcagttttattataaatattataagtcaacataatgtctgtacaccgttcataatggatggttgaatcacatacagttatagctaatcaaaaaccattacaaatatatttactctctttaaacactttcatatttcattacaaatggccgattgaacacttccacatccattacagtattatatttccattcaatttactattaagagttcttgaacagctaccgtgtaatagtagctattgtgaattataaatatttcatcacctctctatggtaatccatttctcatttgcttgccaaaagttataaagtgcttattaaacattgataaataatattacagcacatgatatgaaatattgtcttgcaaattagcttattggtaaaccttgaagttggtgatactttaatctgtattattcagtcttcataattcattataaacaatgattattgctatgtcattggactgtggagaaatggatcattctcagagacagcatcaccaacttgagcaattttcttattatacaga

SEQ ID NO: 40603 - DNA, 1032 bp, Homo sapiens
ctgcttatacatatccatacccatttgggctattatattttagcttttcaattgattacttttgtagcttttaattatttacatatttctttgtctgtcttacctatttctgtgtcaaacattaggcaaaagcctctctccccactatactcagaggaaattagcacttctattcttctttccaattccccttcccctacaaccaactcccaactatcattagctatgttattacttttctattgtcaaggtatgtcagatttatattctgtctggtaattctatttatgtcttctctcttttataggttgattctgaaaatggaaaatcaataaagaatttttataatgttatgattatataaatattctctgcagtaccaaattgtatgattgaacctgtagagaagataaaatcttaatgtggcaaagcttgtgtcattcaaaaaaaaccattctaagtataaaacccaagtagattttaatttttaaaaatcgaatcaatttttgaaaatcatgccactgtttctttggtcaacaaatttttctacatttttttctcctgctatttctaattctttttcttttctttcttttttttttaacatgagaaagatatcatatcttaagggtatctagctgcttaatcacaatatttctttaatgtacgctaaccatattaggtacatatgagggtacaggggaaataagctttctcagttgttttatgtctgaaaatatctctgtcttccccccacatttggtaggattccttagtattggatttcagatttaaaattaattcctccaaatttgaggctgttgctggctatcttctagtgttgagtgcaatagaaaatggatctgatgccactgtggttctcattcctgtgtaagaaacctgttttttgttggcttgttttaccccaaggaaggccttttggaacttttgcttgtctttggaatttttaatttcacaaggatttgttcgtgtcttctgtgtggttctccctggggctctcagtatgacgac

SEQ ID NO: 40604 - DNA, 1051 bp, Homo sapiens
actcagtcttatcataggcttgtgtatgtgaggctctcttttcttaacctcctatcttatttgggtttgacacaagtgattccatcttgatattgacaactttcacacatctgagtgcatttccaacaaagaacgattttaaaccacattcttaacctgaaattttgggtggaatttggattagaaacccaaatgaaagtctgttttgttgttatgaattctttacattgaggtctcttattagactccccggcttgggcaggccctggactttgccttgtatccccgtatcctatgaccttataaaaaacaaaagccagggtcatcaaggatcagtgcatatcattagagtgaaaactgactttggtgttgagcatgcctctctaggtccacattttcatgtaattttaggcatctcagtgttccttacctcctgccagcttatcagcacatcttaaaaagtttttttcttttaattttatgcatcagttttgggtgtttttagtggaagggtcaatcggactaggttgtaatactgcctgaaatgaaaatattcattattgtatcgtcagaaaacgaatgaaatttcccgtaattcagaaagccatctcaaattcattattagcatcacatcattatcagagcacaggttggctaatcagtttgcctaggacggaaacttggctctaatatttactagctgtgcggtcacaggtaagttaatcaacctccaattgtcttggttttctcagcagaacaatagtacctactgcataggcttgtgataagcatttaataaattaatatatataaagcatccagatttatggaaaatattaagtgctcaatatatattagctaacataattattattattctttcaaggttacctttgagccaatctactctttcattgccctttgattgaactaagtgtatattattatttctcttaaaacaatcctctaactgttaataagaggaggtcattctcaaataacacctagcccatctcttagggagaattttcaaccctgcccccaaccagac

SEQ ID NO: 40605 - DNA, 1048 bp, Homo sapiens
gaataagagactattgctatatctgggaatgagttgtatagtgggatggacttctcccactttgtaacttttttttccctgtttctccaaatcatatgcctatgttattttctgtatgatacatttacatatatatgtgtgtgtgtatgtatatacacatacatatatataaacatccactatctttaatccagaaaagaagtatcattaataggttttttgaatctataaagtgccataaacagtattttatgtagtgataaacagtattttcataatcacaaaacttataattttgtttagtgtgtttaatttaaaacaagtttaattgaactctttgtaaacagttaaaaaaaaaaaaaaggaatgctctcttgcccacaaagttgtttccacgttgcctgataattagcactgtttttagctctctctaattctaccaattagagatttatgaacatttctctcccttaacttttttaaataacaaaaggggtacttaatatgggaacatctgcaaagcatagattagtgtacgaactggtaaaaagcaataaattataattctactacccaacaattgtgttatattttcttctatagcaattcattttttacacagttgagttcataaagaatatagcacgtagtatcttctttatttacttagcattttgttttaaacatttttcatgtcattaaaacttttttaattaaaaaaagtgcgttatctagagatggaggtctctctgtatatgttgcccaggctggactcgaactcctggactcaagcgatccccccacatcagccttcctagtggctgggactgcagctgcatgctattgtgcctggcttgtttgtaaacattttgtggaatggtggcataatgttttgttgtatggattcatcataatttacttgaccatgtctctaaaattaacatttagatttctaatattgttgcttttataaataacaggtagcctcttaaaaactgcttatagtctaggagggataatattgtctgggttatttgttgaaatgtcc

SEQ ID NO: 40606 - DNA, 1043 bp, Homo sapiens
gtgtagttaatataaagagattttacaaagattaaaaatactatttagaggtagcatctttctaatttactccattcccacaatttcttctgtatgtagatggatatgttgaatgcaaggtagtatagaaaaatggttagattttctcctttgggaaaaagattatattaataggaaaatgactcaattcttaaaacatggtagtttcatataaggaagaaaacagaaataaaacactcgaatataaagcaagggaatgtattataggaaactgattaatgaaactatctgggcagagtagattaagttatccaaatagtttgaggagatagttattaaccacgtagttaataaaatccattttcaagttaaccccaaaacaaaatgtaatagaaggaaatcccagcttggaaataatctgctgaacacagcctctactattcaggcagtcttttgggtatcgggaaacgcaagctttaaaggatagctcacaagttggaggcccaggagatgattcctactcacatgttttgtttgtcatactgtttctaaaattttgaatgagttaccaagattttacaaaacctgaagatttcatgcagaagtcaggagttttgggtccttttgagcagtgagacaatctgacaatattgggtgcatgggtgcatattcctgcaaagcattatggaattgagtaaatgctgctgctttgaataactaaatgccctctccagtttgccatttcctcctctctctctctcccccctccctcccccctcttttttctaccctctttttttttttttttttttttttaactctgttgcccaggctggagtgcagtggcatgatctcggctcactgcaacctccacctcctgggttcaagtgattctgctcctcagcctcccgagtagctgggattttaggcatgcaccatcacacccgaccaatttttgtatttttaataaagacggggtttcatcttgttggtcaggctggtcttgaacccctagggacctcaagtgatccacccgcctcagc

SEQ ID NO: 40607 - DNA, 1044 bp, Homo sapiens
ctctgactttactaagttgagctgattcacatttgggaagagcaacattgtaggcatggtcttgatttatacagtgataataataattattaagcatttagtatttgccaggtattttatatgtattaactttaaaaacgctcacaaaaaatctcttgaggtgagtactattgtccccattttacagatgagaaaactaggccaaagaagatatggaacttgttcatggtcatagagcatgtgttagtgataggctatgaactcatgttccctgaccccagataccatcactgttgccagtctgctgcttggtggcatgagtaatcagagggacttggctttagaactttttgtgtgactttgtgtctttcataggggagggctatgctgcactgagaaaggaaacttttaaaaaatttggtacaaacgtctaaactagatgtgcatctgagttaaaggattcaggttaaattctagagttttagtgaggagaaggtatcgagtagctccagtgtactgaactggaggtgtagtcatccattgtagacagaaggcatcaagagatgactgtggactgttcttccatactgtgctgcttgtgaatttatccatgatagaaccagaatataaaaacactgaatcgtgtgatgctaggtaagctgatgcctatgaatactttcatgattcagtttctaactattagtatgagttatataccttacacatagttccaacagatgaattcaattattttgttgtattaaaaaaattgattggggcttaaaatatttttcttaatatgtacattttattctggaattctcatttcatctgtttgtttttggtcagtttagtaaccagatgggataataaagatcctttctttttcttcttcttgaaaaaaaatcgtaacaattaatgtgatattcatgaagtgcttcaaatttcttgagagaatataatgttagtcatttttattcataattatgaataatgaaagcatacttaatattattgaaagcttatcttcagcctagaagggaa

SEQ ID NO: 40608 - DNA, 1067 bp, Homo sapiens
tgtgttagtcacatctctttaactctattaaacagtttttagcaagttcttggagtttttactgctcttacattacatgcagtgttggtacatagtaagtactcagtactttctgattaatcaaaaattgtagataactcacagtttgcttacctggcagatgaacaaaagggagagactctctttgctattcaagagatcttattcttcaatttttagggtggagaatgggaagggataacaaattacgttccaatttctgcatgtattctaaaggatagaagtaagaataaagttaggagtaagaggccgggcgcagtggctcatgcctgtaatcccagcactttgggaggctgagatgggtggatcacctgaggtcaggagttcgaaaccagcctggctaacatggtgaaacctctctctactaaaaatacaaaaattagccaggcgtggtggtgcgtgcctgcaatcccagctacttgagaggctgaggcaggagaatcacttgaattcaggaggcagaggttgcagtgagcagagatcgtgccactgcactccagcctggacaacagagtgagactttgtctcaaaatgacaacaacaactacaacaataaaccaaaataaataaataagattaggtgtaagagattattttcatgaaaaattaaatggaacacgcaacgtaatttttctgggtgtgaaaattcattgtaataaggcttggatttaaaagaattgagaataaatatattcaattacatgtctgatattaagttctgagacataaccaaatttatcaagtcttttgtgttgaaaatgtaggaatttaaaaaaatacatttctctaggtagtcaaactatttcagctaagttctgtctttttgtaaatagttattgaaatgttcaaacattatccagtaactccttattgtaaataaagatctaagaatgattatttgtagaaaaggcatttagcaagctagtaaatctgataattagatgactgatacactgctaacatattttactcttattttttgagctagccttttaaagatcgctgtg

SEQ ID NO: 40609 - DNA, 1046 bp, Homo sapiens
ctctgctttttactttctattcctttttcccttcctggacaatttagtcaaaaaacatctgtattaggtatccactttgttgacccagagagggaggtgtttgttgcctgactagggtgaggagggtgtctacatgtgtagtggtggcctagtgtggggttttggagtttggatgtgattaagaagtgtgtctgtgtagaagagggtcccagtgtgagtcatgtgggttagagtggcataaggaggatgtccatgttggcggtggttgcagctgatcagtgctgtctgatggagcctcagtgggatgcaggggccatgtcagtgattggagattggttacataccaagggagtggggttgcaggttgatcaaataagcaagtatgagagtctaacttctcgttgttggagaaaggagttacaaaatggaggaaattagaaggaaccttgtgttgaattggagttaccagtttgaatttagttttaaatttacatagatacatgtagcaaacctggcacccagctcttggtctctcagtgccattctcaatgaaccagggctccttggagaaatggctaattccagggctagatcagggaaagtataaaataagcctgcaacatcttattgtgtaagaaagtaaggaagtgttcaaagactgatggggttatgttaacatgactcggaagacagcttgaatggactcccactaccaaatttggaagaatttgagcatcaaaataaataatgatggcaacataaacaggaatctatgagtctgtactgaaaaaagttaatgaataaatggaaagtctgatgaagggtaggatgattacacagtctcagattatctcccagcagaataattgcaaagagaaaaagggtgccttacagtagagaagcttagcagtgatcaaagcagacatagcagtgtgccagctgataggatgctctgaggacatcatggcatcacttctgtggtattcttgccaaggatacacaccttaaatctaatcaggaggaatcatcagactaaatacagttga

SEQ ID NO: 40610 - DNA, 1612 bp, Homo sapiens
atttcaagtaaaaatctttgctagttactgagttgctgtgatgttagactggaaataccattttaattcttaccacattttgtctgaggtagcaattgatccctaatttccatttcattaacaaggtactctaatgctactttattgttcaaattaactaatgggttttccattaagaatgagtgggtttataggccatgtgtttttagtaggtgaaattgtttaacatcctgttattagttttctgatttattttagaagttcttcaagttagtcttaacacatagccattctttcagcattaagagatgtttatctagtgccttgggaaatttggagcatttgaaggagaagatcatttttatttttgaagcacagtgaacatggggaagacaatttaggcttcctgagtcttgctgtgttctttttttgtgaatagtaagctgtgactattaatggtttcatagacttacaatttggaaattttggtaaccaagaaagattgtgaaacttttaacttcaagatcttatcttgtgggttgtggcatttgacattaggttaagaatagtcagactaacaggatatcaatgtactatgaatgaacattaagttaataatacttttctgccaaattcattcctcatttcagcacttcttgaaattttaaaaaatcgttcagtaagctcgagattgtatattttgaaatatgacttaaaatgcttataaatcatgtatgattggcatatcattgttactatatgtagaatataattcttcagtaaggatcactcaataataatgaatgaagcagtattttcacagtaccaagaaacctgctaatattttcagtagtaattaactcattgttcggtaacaaatggtatgtatggtgtttcttatttaatgtattttattatttatgaatatagaaagtatcagatatagtatgcaatggtttatttttaattttaaaatttatttgaatcctttttgttggtggctgctaccatagttagaaattaaagttattttcatagtattcttttttgtgattgaagaatgaattttctgaatagatcttcaaagagaaaacttcctaggtaaactcacctcaaggttgggatttagttttaatgtatgtatgattgaagaaataaaaggtaagaaaagagagaaaagtaaagaaaggtccaatgtggtttattacttatcttattttttttctcattcttctaattatttgctgtgttcctttattaaaaactctggcttttcgacatctttgttgtcacttttacacatatccatttttttctttggtgttatttctgcaccactgaaaatttgtctttcattttttacacattgtcaatatttgaaaataggatcactgttggtttagactcagtgctcatctgcatgatcagcctgtgtcatttcttgcgttaggccttacctcctttcagtgtgttgattttctaggttttatcttttctcatttagaggccaattattcttttttctttttgtttcaagcagttttatatcaccacctgttctttccatttcagaagttcattttctgatataaagctaaatagttttgctgac

SEQ ID NO: 40611 - DNA, 1083 bp, Homo sapiens
actcttggtgtataggaatgctagtgatttttccacgttggttttgtattctgagactttgttgaggttgttaattggcttaagaagcttttgggctgagactgtggtattttccaaatatagtgttatgtcatctgcaaacagggatagtttgacttcttttcttgctatttgtttggccttttgtttttttctcttgcctgatggccctggccagaacctccaatactgtgttgaataggggtggtgagagatggcatccttgtcttatgttggttttcaaggtaatgcttacaggttttgcccattcattatgatactggctgtgagtttgtcatagatggttcatattattttgaggtatgttccttcaatacctagttttttaagagtttttttttttaaacataaatcgatgttgaattttatcaaaagccttttctgcatctgttgagataatcatgtggtttttgtctttagttctgcttatgtgctgaattacatttattgatttgtgtatgttgaaccaaccttgcatccttaggttgaagcctacttgattatggtgtatgagctttttgatgtgctgctggattctgcttgccagtgtttttgttagggatttttgcatcaatttcatcaaggatattggtctgacatttttttttattgtatctctgccaggttttggtgtcaggatgatgctggctttatagaatgagttagggaatagtcccttctcaattttttggaatagtttgaatgggaatggtagcagcttttctttgtatatctggtggaattcagctgtgaattcatctggtcctgggctttttttggttggcaggcttattttctgtaatttctataacagtagtgaacaccgttgctactttccatctcattcctattttgggaccttacagacaccacttctaggtcaatgatcagaggaaagccatgattagaaggcccacgtagtccttctcttataaaatagtgactgaaatacttgtttttcttatatttgaaagctatagttgactacttgttttcagtttagaggaattacatagattataa

SEQ ID NO: 40612 - DNA, 1047 bp, Homo sapiens
cgccttggctacccaaagtgctcggattacaggtgtgagccaccgcgacgggcctctctcagctattttaatggattttaaaatgttgtctctatatctaaatagcatgctaaatgctacttcctggttttttggttttaggtatcacctgttgactttctggaagatgaggctattgttctctttttcagcccctcctcccgccctgtggtgtataagcacattagccttgtatccctccaatacaattattgtaattttagttagatcatttttgtgtgttattatttttttgagtacacgaaaactattcatagttaagccaaatagttggttatagttgctttcctttcttgcataacattttattttccctgtagttaatgattgtctttttttagaaattaagataattgtagattcacatgcagtgctaagaaataatagagagagagagttgccctgcactttttgccgagtttcctccagtggtaacattttgcaaaactatactataatattacagtaaggacatggacattgatacaatctgtcttactgagatttcctcagttttattttattttatttttttgagacagagtctcgctctgttgcccaggctagagtgcagtagtgcaatctcagctcactgcaacctccgcctcctgggttcaagcaattctcctgcctcagtctcccgagtagctgggaccacaggtgtgcgtcaccatgcccagctaatttttgcatttttagtagagatggggtttcacgatgttggccaggctggtcttgagctcctgacctcaggtgatctacccgccttggccttccaaaatgctgggattacaggtgtgagccaccatgcctggccttcctcagttttaattgtatgtgtgtgtgtatgtttatgtattttaagttctattcatttttattacttgtgtaggttacctgtgtagttttattacctgtgtacatggtaggttttcaccaccatagtcaatattctgaacatttctaacaccacagagatatgtcatg

SEQ ID NO: 40613 - DNA, 1910 bp, Homo sapiens
gaaatatttcatgtaagtcatatgtccagtggcatcctcagttgaatacatgctccagcagcggtatcaatacagtggccattcttctgtcaccagacctcacaaaacaaaacaacaaggaaacacagagaatttgcttttatttagtctgcagattgcttttttaaaaaacataattttatacgtgtagaagcttgtgtgcattgagtctccttttttttataatttgacaaatcattgctatgataatgtccactaaatcattcctagttttctaaatcactatagtcataattcatatacatagatgtactttattctttgcatgcttgtttctttggcaggtcaccattattgcagatgataactgcagatttttatgctggtcaagagaaagattaacatactttctggaatcagaacctttcttgtatgaaatctttaggtatcttattggaaaagacatcacaaataagctctactcattgaatgatcccaccttaaatgataaagtaagtgttctctgagtttattttgttaaataaatatgtatatgaggtatatttcactttatgaaatatgttttcctgaatttttagtaactagccatatgttaaatgtactggggatacttgtaatcttgagaggagaaagtattttgtaatgattagatttgctgttacttagtaaggagtctacaattgtcagggactagcatttatggtgataaggcaccctcttcatcaagagcattttaaggaagatggtaaaggagtaagagggggtggaggatggagtaagttagggaggacagggcagctggaggtttgcagacagagaaaggctgacagaccccagcgatcaggaagttggcctttgaaccctgctgtcttccagtcttgcatatcttcaggtcaggcgagaaagtgaaaggagaggtgtagagctgcatagatcttcagcaatttgcaatttgatcttaattttcccgtatctttttagaaagaaattaaaatgattacaagagagaatttttaaaaacgtcgtttctgtgataagtactgttacccagtgacaattgagtatatgtgccctttcaaaatcatcttatctggactgtttatcaaattaagctggtgcttatttcagttaattatttagcttattataaataggctactaagtatatttgattttgtataatatatttatagtaatagctaataataaaaatcatagcttatgtttattggccacctaatatgtatcaggtattcttttttttaaatgcactaacgtatttctaggaaaagtacatgctgcttaaatggaatgtatgattcaactcccataattctcagaaagcttaaaactttgctttgtagaaagccaaaaagctggaacatcagctcagcctctgcacacagatctccatgttggaaatgaggaacagtatagccagctccagtgacagtgacgacggcttgcaccagtttcttcggggtacctccagcatgtcctctcttcgtaagttatcccaaaactgatactactccagagttctgatgggtatctctggacatagacaaatgacaactttgattagaaaaataactttgcaggtaactatttgaaaggcaacctaaaggtaacaataaaaacaatcaaattttgtttagcatttcccccatattgcatatgagctaaaagccaactttagaactattatttctgtttcagaaattgaaattgttcactggttttgccatatactttgcttaaatagtggctcactggctgggcatggtggcttacgcctgtaatcccagcactttgggaggctgaggcgggcagatcagcactttgggaggctgaggcgggcggatcacgaggtcaggagatcaagacca

SEQ ID NO: 40614 - DNA, 1030 bp, Homo sapiens
tatatggctatatattatttgcatatatgataatgtattatgtatgtatgatacagtgatttaatggtggtataaaaatagagccttctaaatatcctaagccttcaaatagatgtgagggtattcatattttttaagtattcaaataattagttttctagttatttttcctgtgtttggattcagtcaccagtgggaatttgatggaagactagactaaataactttgtaattaccatggtttatgaacattggtgattatcttaaagactaattccctcactcctcccttccctacaagtgtttatacgtatatatgtgcctatgagggaatagttttgcactatgctaagtattttatgtatttcatttcatttgatcataaggcaaatgaggtattattaccatcttttaacaggtaaggaactgaatacatttaatatgtgacagagttggatttgaatctgggtctgtctaattcataagcactagagaagtctatttaattcacagaaataattttggtataatacctatgaaggtaaaaagatacaattgccatttttacgattttacttttgtttacttgtttttacaggaattttcaaaatgaattatacagagtccagcccattgagagaatcaactgccataggttttacacctgagttagaaagtatcatacctgtgccttccaataagaccacttgtgaaaactggagagagatacatcatctggtttttcatgtagcaaatatttgttttgcagttgggttggttattccaactactcttcaccttcatatgatatttcttaggggaatgttaactctaggtaagatacctaactgatactttatgtaacttttctgtaactgacataagatgggctttacattgagagcttcagagtattctttgtcaggcccatagcaagccaaaaaatgtaagtctttgttaatgaattagcagtatatcaattagcttagagcataggccttcacatgccatatctctcccttacttactt

SEQ ID NO: 40615 - DNA, 1025 bp, Homo sapiens
gtttactttgcatttcattgagcatccttgtatcttcatttacatttcctattcctttataactcgtaatcttaacaatttaaagagaaaaaaacccagatgagcttggaacaactgtgtttatttgcacttaagtttgtcttcatcatttgtagctcagtgtgctaacttactttgcagtgaagatcaactctagtgcttaggaaagaaatccattgtgccactttggcatgtcagcatttatttacgcaaaacatgacctcaggcttacaggcctttaaggcagacagctggttgatgaatcatgttggacattcatatagtgctgctggcacatgtcagaaggacactcctgctcatcacctgcccctgtcagttcttccacttctaataaagcatatctgttttggtgaccaaataaaaacacaagtgaagaagggctgggtgtggagtaatttaatcagggcaagtcagcacgctgcattgagcagtacagtatcaaggataaaaagatggtttggtaacagctgaatgaaacgaagtagattagtaaagatggaagcacagttccccttataatcataatgggtcatgaccctggaatgcagaagccccaatatatcctacaaatcaagatttttaaggagacaggattcccagaagttcccttctgaattgccacgaacgttttacatggcctttctctattagcatcattttaacatttcgctgaggattataaatttttaaggaagttcaaaccaaagttcagagctccactagcaaatctttttaaactggctttcgtgggtgtgtttggtatcctgaagaattgattgatttaaaataccctagttttgaaacagcagggagactgacatttgcagcctggtattttgcagttctcactactcattgtatttgaacaataatttttctttgttgtaatacccagtagaataaaattttgtgctttgtttaaaagaggagaaattgaacatgttcaggatgctggcctgtcttca

SEQ ID NO: 40616 - DNA, 1036 bp, Homo sapiens
gggacctctagaacctgagagcaacccccaaccaatagccatcaaggaaacaggacctaagtcccacagccgcacaaaactaaattctgccaacatcccgagactgcaagtaggttttttccagagtttccccgtaagagtccaaccagccaacaccttgactttgaccttctttgaccttggaagacccagagcagagaacccagctgagccaacccagactgctggcttacagaactgtgagataagaagtctgtgatgtttcaagctgctaaaatttgtggtaatttgttactgtaacaatcaaaaggtattattatactttatatcaaatatatgggatttccttttctaaattaagtaaagaatatatgctcctgaaatggcaggtcaagagtaggggaagggggtgttgagtatggtggctcatacctgtgatcccagcactttgggaggccaaggtagatcacttgagcttaggagttcaagaccagtccttcatgggcaatgtggtgaaatactgtactgtctctacaaataattagctgggcatggtgatgcatgcttgtagtcccagctactcgcgaggctgaaatggaaggatggcttgagcctggggggacagtgagccaagatcacaccactgcattccaagaccctgtctcaaaaaaaaaaaggaatatattcaaatacaattaaacttcttttatgctcaatatagctacatatgtttgaaactgcaagttgcattattgaaatcttacacaacttccattgtatcctgcaaccactatgctgataacaatgagtaaacagacattaaaacttctttttggcccttcattccccatatgtaagagttttatttttaatcaccagtgtttggctctcagactggcacaagaagcctgttcctcctattagtaaactacaaattttgatgaaaataactttagtttctaaagttttgtttttttgagacagagtcttgctctgtcacccaggctggagtggaatggcgccatctcggctcact

SEQ ID NO: 40617 - DNA, 1027 bp, Homo sapiens
taaaactttatttactcttttgcttttgtcatcttatctctggttgacttctctcaggatcatattcagggattggcattcatgccaacgctggcaccagccaccttctaactcaaattcagaagaatattcacagatctgttttggaaattgtagcccaagacctctgccccttgtgcggtgagtctggatggccacttctgtactcataaaagcaggtgatttttctacctgcagggttacatctgtcccagtgtctctcaccctatttctgcctccctaataggtgatggtagacaattaataggattagcaggccatctagaaacacaactgtgatcattgtttagatttgctctgcctagagaaggcttggcagaaaagagttgggggtaatcttttcctgcttttcttaaacccccggggcaacattttagtttgccagcaaaactcaactgtttttggctttctgccatactgttttagaacaaaaggagaggagagacaataggagcttcgtgtgggctgtccacctgctacacagatttcttccctcccctcccctccacttgctttgcctggagttacactgatggtcgacgggtgatgggtgagtaaaaatagacccagtgctggggatattccattatctccctaaaggaaaaaccattactggcattactgtcattggtctgtgaaggagggaggaaaaaatttccatctccacaagtgtagtcttttgatttggattaagtgtaccttgacctggttttagggaggtagactggattattctctgttcaccctctgtgctgactcaatgtaagatatagacagaaatgttgtcatagttataaaaatggtagtaaaatattgtgaagtggaaggcattgtgagggtacctcatagaaacacatgcaagttccttgtcattgtctgtgttgggtacatgctcctccacacaacttttgatgctcttcttcatacagccgcgccccagtgccgccccgtagccccggaccaccat

SEQ ID NO: 40618 - DNA, 1024 bp, Homo sapiens
atccttcacccactttttgatggggttgatttttttattgtaaatttaagttctttgtagattctagatattagccctttgtcagatgggtagactgtaaaaattttctcccattctgtaggttgcctgttcactgtgatggtagtttgttttgctgtgcagaagctcttcagtttaattagattctatttgtcaattttggcttctgttggcattgcttttcgtgctttagtcatgaagtccttgcccatgcctgtgtcctgaatggtattgcctaggttttcttctagggtttttatggtttttggtctaacatttaagtctttaatccatcttgaattaatttttgtataaggtataaggaagggatccagtttcagctttctacatatggctagccagttttcccagcaccatttattaaatagggaatcctttccccatttcttgtttttgtcaggtttgtcaaagatcagatggatgtagatgtgtggtattatgtctgagggctctgttctgttccattggtctatatctctgtttgggtaccagtaccatgctgttttggttactgtagccttgaagtatagtttgaagtcaggtagcgtgatgcctccagctttgttcttttggcttaggattgtcttggcaatgcaggctcttttttggttccatatgaactttaaagtagttttttccaattctgtgaagaaagtcattggtagcttgatggggatggcattgaatctataaattaccttgggcagtatggccattttcacaatattgattcttcctatccatgagcatggaatgttcttccatttgtttgtatcctcttttatttcgttgagcagtggtttgtagttcttgaagagatccttcacatcccttgtaagttggattcctaggtattttattctctttgtagcaattgagaatgggagttcactcatgatttggctctctgtctgttattggtgtataggaatgcttgtgatttttgcacactgactttgtatcc

SEQ ID NO: 40619 - DNA, 1053 bp, Homo sapiens
ctcgagattcagacttctctgcctttccttcctccaccctttttcatcagggacctttcaagatgtctcaaggccagctgtcttcctggtagcttcctgggtacctcttgctccaggggaaggcatatccatgggttactctgttctggaggtacaggatgtgttcactgccctcctcactttcagccagggacctcgggaagcctcccacattcagtccctcctgcacatgtccaaaatgctgggctcaggaacaagagctcccttgtgcccctggggtgtaacatgaaacagctgccattgggctttgatgggcagaggtgccagttatttaatatagactgtgaggctttacttgaaggacagtttcatggcaggagagaaattgtcaggttctattggaccaaaaaaacccaaaaacccacaaagctctgttttaaagtgaattgtgagcatctggggagaaaaaaaatcctaaagaaatcaaacactttgtggcactgttcccagcagagggtgctctagaatgaagattgtgaaaatgcatcatccctttagaaaggattaaggaaaaaatgcccagcttctttgtgattatctccctaaatcctatattgagaacctaattctgttatacctaattcttgaaaagtttttttttcaaaagtaatcctgaatcttagtatctgttgtgtctccataagccatttttatatgttcacctgtgaaccctagtaattaaaaacatatgtattacacatatattaacatataaagtgtgttgcctgatgcttgacttatagtaggcatgcagtgaatgttaatttccttactcttcccatgtcccctgtggaagttcatgcacatgaagaccagcagggtctcaccttccagaacagacacagaaaagtccagtggtgttcctggtggggggtccctgcctcctctgccccttgctggttggctgtttttgacttggaccagtaattgctcagtagccctcttcccagttggcacagtccatatttattccccaagtacttagcccttgcc

SEQ ID NO: 40620 - DNA, 1031 bp, Homo sapiens
gattattttttcttcaactgttttgacttttattgttgttgggtttctttcttggaatagatggggaaaaaaagaatcaagtgatgattcatggaattgagccaatgttggaaacacctctgcagtggctgagtgaacatctgagctacccggataattttcttcatattagtatcatcccacagccaacagattgaaggatcaactatttgcctgaacagaatcatccttaaatgggatttatcagagcatgtcacccttttgcttcaatcaggtttggtggaggcaacctgaccagaaacacttcgctgctgcaagccagacaggaaaaagattccatgtcagataaggcaactgggctggtcttactttgcatcacctctgctttcctccactgccatcattaaacctcagctgtgacatgaaagacttaccggaccactgaaggtcttctgtaaaatataatgaagctgaaacctttggcctaagaagaaaatggaagtatgtgccactcgatttgtatttctgattaacaaataaacaggggtatttcctaaggtgaccatggttgaactttagctcatgaaagtggaaacattggtttaattttcaagagaattaagaaagtaaaagagaaattctgttatcaataacttgcaagtaattttttgtaaaagattgaattacagtaaacccatctttccttaacgaaaatttcctatgtttacagtctgtctattggtatgcaatcttgtaactttgataatgaacagtgagagatttttaaataaagcctctaaatatgttttgtcatttaataacatacagttttgtcacttttcaagtactttctgactcacatacagtagatcactttttactctgtgttaccattttgactggtcgtcattggcatggggtggatatagggcataggattacttgtctcagaagctgtcatagaatttcttgctgccaattaaaaaacctgtgttctttacacactacacgtataaatattgtaactgttc

SEQ ID NO: 40621 - DNA, 1025 bp, Homo sapiens
ctgagtgtctactgtttttattttgtttgttttgttattttagtgttcctatatataatcctgaccactcttgttgaattttttaaatggtgattatgaacatcagacacgtaaatgaaaagcattcaagtgctttgaactgacactctcagaatacacctttattctgctcttatacccaggttacaagacaagattaacgtgaccctacacaagaaaggcacacaaatttgtgaagctgttcttttaaaagagattctttgttctgttaaatttctaggctgctctacgtgtacatccttttctaggggatacacagtgtgacttcccttgtggttttttttttttttttttttttttagaggggagcagtgaggcagcgcagccacacaacctaatccacaaaccttccttttaggtgatttcaggtgctgtaggtgagtacatctgtgtgacagacttctccccatgcaaactgtcaaatgcttctcttgactgcagaacacacacttcattgaaatgacatagataatgcctattcttttcaggtatttttgatggtatctttcataccaggaggaagccacatctctaacacatctcagtatcttttctttagaaaaaaacttttatctttgcttcttctttttattacgtattaaaaaaaattgtcatttaaaaatctatgtagagtatccaaaacatcgagtcactgtttcagtaaaaaactgtttactgcctggttcagttcacctgtagtattgtcagatgtgtcaaacatgaagcattttgacacacctgcattcaacttaagttgaaagcgaaagactttaagattgggtgtgtatggataagaacttgctgtcatcacatgatgaaaagagaaagtacttcataaaagttatgtggcaccattgtcttctactccctacaagtgattcagtgatgaaagaattttgtctgatttcatcatatgaaagtcaaatgtactagtatttatgaatacgtgctttaggtcattgttc

SEQ ID NO: 40622 - DNA, 1052 bp, Homo sapiens
ttattcatgaggccatgtttatcatcttttaagacctggttctgaagagggatttaaaataagtacagtgattatagcttgtaactacagtataccctcttttgctagtgaattctttgacacagaatgctccttactcaaccccttaccaaagtctcttttgcatttctcagatggataaattgtcacctaaattatacaagaagcacattaatatttgatgtatactattttcttagaaccctgtttaataatcataagttaagcctgctatatattaaaatgtttatactattttaaaacttccattgtggaaaataagcatataatttgacttgatgaattggtggtattattattatctcaatctgaaatactgttgggatgtatcagcctactttggattcaatagaccattctctcttcagatattgtattccaaaattttgaatttttttgtggaaataggtacttacattgtaaataatagttaagttcctaggacaagccatataagtaatagtgaaatagaactataaactctgacctggatttataacattgttcttttgtaatgccagattctaattcagaaatctataaaaggaagagttcccttactatggcgtttctcttccccattcaggtcacagcagtgtgggtgggaatccagaggttccaagctagtgaggaagaaagtgaagatgaggagttcttggctaccctaactggtggcgagcgttctggaaaagctcgcaaacagtggacgcagtgagtccacaatgtgggtagcaatttgttagtaaggacatttttaatggtcccatatttgatacttttatttcatattactccttataatgaaattatgtattttagtaaacctttttaaactagcatattgtaatttcaaaacttttcagcttcattttcagtatcagaacatgaatattaaatgagttttggtgaacagttaagacaaagttatttaaattcctacaggtaacttaaaatcaccatgatgctatacaatttttaagaaaaaaacttgt

SEQ ID NO: 40623 - DNA, 1027 bp, Homo sapiens
aatttttggggtcaagttcgggaagtttagggccattattttttcagatactctgaccctttttctgcatcttcttctgggcctctcattatatgtatattggtatgcctgatggtgtctcttgggtctctgagcctcctttccttccttccttccttcttccctctctttctcgcaattgacctatctttagatttgctgattcattcttctggctgcccaaatcagctgttgagcccctcaagttaattcagtttttgtgcttttcaactccagaatttttgtttggtacttttttgtaactcctatttatctctataatttctatttctgtttgggaatgatacatgcaacaacatggataaatctcacacaacattgtgttgagtaaaaagagctgatataaagagaatatactctatgattctgtttttaagaagttctagaccagacagaactaatctgtagtgacaaaaagtggttcttctgaaggatcagaaatattgttctgatactttcctgtagttctttagataaacttttttttagttctttgcgcatatttaaaataactctcttaaagtctttgtccagtaagtccagcatctggtctttttcagggccagtttctgctgctttttccccccagtttgtggcttatacttgtttctttgcatgtctttgtaattttgttgttgttgagacctgaatattttatatagtataacagaataactctggaaaccagatgcttcccccctttcccaaggtctgtttttgttgttgctgttgcttgtttagtttctttcctgaactaattctttcaggtttttattttttatcacacaggcccctaaagttactgcttggtgagtttagtgatcatctgatgattagaagagattttcttgaatgcctagaactagagtatcttccaatctttgccaggggcctatgtgtgaatgttggggcattgccttcaatgatacggcaagcaatttataactggattttactttcttcttgt

SEQ ID NO: 40624 - DNA, 1064 bp, Homo sapiens
aatctgtgcttaaaagtatgatttgttcacttgaaccctgggaagtggaggtggagattgtggtgagccaagatcatgccactgtactccagcctgggctacagagcaagactccgtctctaaaaaataaaagtaaataaaagttttaaaaatatgatttgtatctcatatgtaaagacaagaaagtatagaatggatgcttagtgcttaaaaggacttcacttctgattcaagtaaatataacagttataagataaatactggtatgttaaagacagatcactcaggcatctttttgtaatgatagtaatctaaggtcagtctatgaagttaatttcatttcttcccagaatactttaaatattgattaaatacccaagaagaagtcttctttagtaaatgtagagaagctaaggctctgtactgtgcttatgtctttatgctcctcacaatgcctctcacaaaatagggactgcataaatatataaactatatgaacaaactaaggaaatcctaaccaactatataagcagtgattatttggggctcgtaatatgatgtactataatgttcatatcatacattttatggaattcgggactggattttcaattaggcaataattgttattttctactattgctctaaaattgtacaacaaagtattatgggatgtagagtgatttttaaaatctgtattatagcactttatatcttgtaaaatacctttatgctaccttgtttgactttcataacacttctgtggggtagacaaggcaagtattattttttaagttggaggtcaatgaccagacaaaggacagccagccggtaagcaatggaacaaggactaaagtacaaatctgcctcaaaatagtatatactgcatgtgcatattataaagaaatatcttttttgcaagaagatgaatatgtttattgaggttttagcagttgcatatgagatctttcatgggcatagtttggttcagttaatgaagatttcattggagcattgtgtgatttgaattttaaaggattaaagaaatacagcccaactttctt

SEQ ID NO: 40625 - DNA, 1047 bp, Homo sapiens
tttggtatcataaaatgagttagggcctcataaaatgagttagggaggagtccctctttttctattgtttggaatagtttcagaaggaatggtggtaccagttcctctttgtacctgtggtagaattcagctgtgaatccgtctggtcctggacttttttggttggtaggctattaattactgcctcaatttcagaacttgttattgttctagtcagggattcaacttcttctggtttagtcttggcagtgtgtatgtgtccaataatttatccatttcttctagaatgtctagtttatttacatagaggtgtttataatattctctgatggtggtttgtatttttgtgagatcagtgatgatatcccctttatcattttttattgtgtctatttgattcttctctcttttcttctttattagtctagctagtggtctattttgttaatcttttcaaaaaaccagctgctggattcattgattttttttttttgagggtttttcatgtctccatctccttcaattctgctctgatcttaattattcttgtcttgtgctagcttttgaatttgtttgctcttgcttctctaattcttttgattgtgatgttagggtgtcgattttagatctttcgagctttctgatgtgggcatttagtgctataaatttccctcttagcactgctttagctgtgtctcagagattctggtacgttgtctcttttttctcattgatttcaaagcacttctttatttctgccttaatttcgttatttaccaagtagttatttaggagcggttttcatgtagttgtacagttttgagttagtttcttcatcttgagttctaatttgattgcactgtggtctgtgagagtgtttattatgatttccattattttgcacttgcagaggagtgttttactttcaattatgtggtcgattttagaatacacatgctatgtggtgctgagaagaatgtgtattctgttgatttgggatggagagttctgttgatgtctattaggtccacttggtccagagctgag

SEQ ID NO: 40626 - DNA, 1071 bp, Homo sapiens
gtcagaatgagaagttctccagagtccaggaggcaaagggaatgctcacagcagcctttaggaggtgggtgctgtggtggttgggtagttgtggcagcgcctacgtagcctatagtcaggtaggcgagaggaatgtctgtggcatgctaggcatctgggtgctgggtgtccacccaggaggagcagagcttgtgaccctcatctgggcaggtgaccaggaaatggaggtagcagtgtgctccccatcccctttctgcccagctgtgacattgttggtgtgctgtccctgcgccagctggggatgcagggagtggcctacacatctctcttgtagaagcttttctgtattgtggggtggagtctgtttctacgcacggagcagactgactttccagagtgctaatggaggcagaaggagatgtggtttcctggtgctgttggacagagggactcaaatttggaaacaggcccatggttcatcagaagaagcttaacaaaagaatgaagactctattatttcctccctggctggctgagggaaggcacagaaagactcgatttgaagccaggttctgccactcagtgatgtgacactggaggagttacctgtcctgggtttctctatttgttgaaattggaactaaaatagctcagggtgaggcacaggcacacatgcagtggccagcccagtgcctggtgtgaagttggtgggctgcagatgttacaggggatgctcacctcactccccactgcgcaagccaggggcaggcgcgaggtttccaggccttgcaaatgggagattccccagcttcttaatgagtgaagctgatttgctggcccggagggaaggggcccaccatgctgtgttctgggctacttctgggctaacctagcatctgtcactagtctataaatggacacggaagtgttttccaaagcacaagcactcggtgtcttgaatgcccaggcagccgcaccagcaccccttcctcccacctcagctgcatgagccctctggggtttctgcccactgcaggtggctgagatgtgtgctcttccttcatcacttta

SEQ ID NO: 40627 - DNA, 1047 bp, Homo sapiens
tcctacatgtggtcatccagtcactgaaggcttccaataatagggaacccacagcttgtcaaaaataatcattctgttgttagacaactctagtcatttgaaggttcttttcttatttataagtggaatcttcttccgagaaactttaccttgttgctgtttgttctgtcccctgaagcacatagaacaggactgttccttcttccatttaattacttcagatatttgaagatggcttttatatcctcccttcctccaggttaaacattccctaggtgacatgtttccaaatccttcttcatcctaatactggacccaatctatcatgccagtgcccctcttgactcatggcccccaggactgaaaatagttttctaaacattagttgaccgtccgtgtgctgtgagaccattcctgcctgtgttttggacatgtacacctgctgatgctgccaaagtttgcatttgcatttttttgtacctacatcacagccttggctgataccaagactgtggttattaaagattctcaacatttttcatgagtcactgccaaattgcagcttatacttttacaattaatttttgaaacctaaatatacaactatataattatccctgttagattttactggctactatcagtcttttgttcaacatgtcaataccgttaaaattttgatactatccatgtgttacctatctctcttggctgtgtgacatctgaaaattaaaatttaatatgcatttcttcttcatcttcattcaagtaatgcatagaaacgtgataagaagaagaaaccaagcattaagttctggtagcatgacactagagactgctttcctgttctaagcgtttttttttttttttttttttttttgagacagagtctcattccatcaccaggctggagtgcagtggcgcgatctcggctcactgcaacctctgcttcccaggttgaagcaattctcctgcctcagcctcccgagtagctgggactacaggtgtgcaccaccacgcccaactaatttttgtatttttagtaga

SEQ ID NO: 40628 - DNA, 1074 bp, Homo sapiens
tgtagtcccagctactcgggaggctgaggtgggagaattacttaaggattacttaagcctgggagatcaaggctgcagtgagccatgattgcaccactgcactccaccctgagtgacagagcaagaccctgtctcaaaaaaaaaaaaaaaaaagctggttgtggtggcattttgggagcccaaggcaggtggatcacaaagtcaggagatcaagaccatcctggccaacatgatgaaaccctatctctactaaaaatacaaaaattagctgggcgtggtggtgtgcacctgttgtctcagctactcaggaggctgaggcaggagaatcacttgaacccaggaggcggaggttgcagtgaactgagatcacaacactgtactccaacctgggcaacagaatgagacttcatttcaaaaaaaaaaaaaaaagtttatttttgctaaatatacttgaattttaaatgtattttataatggactgagtttaatgtgtaggagctaagagagtttctccttcccctctgaaggttcaagcctgcatagataaactgacaatagacagattaacagggaaaatttagcacacaaatgtattaatgagcacatggacctgacagtcctgcagatatgagactcagggccagatggttgagacttaaatactctcttcatagaaaggaaggtagttggaggtctgtaggcaattttaaagcggtagtaaatgatttttaggggaatgaatgggctcaaagacaagacagtggtttgtaaatgattctctttggacgctgaatgggatggaaggacaaaccagttatgggaaagtgaggggcagaaattcacagtgaactaaggttgtcttaatatgcagataaagcgtcctaggtaatctctcagagctgccctcagaagaatagatgaaaagtctctctgggcatggtgattacttttagtcttttctcttttttggcagtgaatctttcctggttgtttttttagattctcagggagagggagtcttaagacaattgcatttctttctctttttttttttttttttttttgggatggagt

SEQ ID NO: 40629 - DNA, 1030 bp, Homo sapiens
tttttatatgatgtgagataagagtctacattgttcttttttcttttttagttttttattttattattattttttgagatggagtctcactctgttgcccaggctggagggcaatgttgcaatctcagctcactgcaaattccacctcctgggttcaagcaattcccctgcctcagcctcctgagtagctgggattacaggcgcacgccaccatgcctggctaatttttgtatttttagtagaggtggagtttcaccatgttggccaggctagtctcgaactcctgacctcgtgatctgccaaccttggcctcccaaagtgctaggattacaggcgtgagccactttgcccggcctgttctgtgttttaaaaataaatatatgaatattcagttgccccagcaccattggttgatatgaccctttttcccattgaattgtcttggcacttttttcaaaaattaattgaccataaatgtaaggatttatttctgtactgaaaaccctgttccattgatctctatgcctatcattataccaatactacactacttcaattactgtagctttatcgtaagttcaggtagtagtacaagtcctctaattttgttctttgttttcaaggtagtgttgcctattctaggcactttgcatttttacttaaatttataatcaccttatcaatttctttttttgagagagggagagtgttgtccaggctggagttgcagtgacatggtcacatctcactgcagcctcctgggaccacaggtgtgtgcctgtgatgcctggtatgttttttgtagagaatggggtcttgctatgttgcccaggctagtcttgaactcccaagctcaaacaatcctcccgccttgccctcccaaagtggtgggattacaagtgtgagctgccgtgactggcccacattatcaatttctgttaaaagtcttctgggattttgatagggattgtgctgaatttatatatcaattgtggagaactgacatcttaacaatactgagtcttccaac

SEQ ID NO: 40630 - DNA, 1030 bp, Homo sapiens
tcctgtcagctttaggtaaaagttatagatggtacttttgtagaaaaagtagataggcccagctggagaattcctggaggaatgtgtgagaatacaagcaacagtggagaacaagataagactacagtctgtctctagattcagaacaagtcctgaggtataaatttaacacgttgtttcctgtttataggtaatattaatcataatagtataaaatgagaagtaaaattattaagttaaacttattttcttaagttagctctatttatttaaacttttggaggccgatttttactctgcctcgtagactaagaagttattcagtattaacatactttaaaaaatggattattacaccgggtgcagtggctcacgcttgtaatctcagcactttgggagtccaaggcgggcggatcatgaggtcaagagatcgagaccaccatctgagccaacatggggaaaccccgtctctactaaaaatacaaaaattagctgggcatggtggcacacgcctgtagtcccagctacttgggaggctgaggcaggagcatcacttgaatccaggaggtggaggttgtggtgagccgagatcacaccactgcactccagcctggcaacagagcaaaactctgtcttaaaaaaaaaaaaaaaaaaagattattagacttgtcaggcaaaaataaaagtcaagtgtgtaggtttagttttggcactcttctataattacctgtatacattgagaaacatgaaaatttgagacctagactttgaaagtggtaatttgcattctgttttaaatttacttatttgattagaacctaatatcaacatttttaaactctctaatatagaaggattaggatttggcaagaattatgtgatactagggccgggcgcagtggctcacgcctgtaatcccagcactttgggaggccgaggcgggcagatcacaaggtcaggagatcgagaccatcctggctaatacggtgaaaccctgtctctactaaaaatccaaaacaattagccgagc

SEQ ID NO: 40631 - DNA, 1050 bp, Homo sapiens
cctgagtagctgggactacaggctgcgccaccgtgcccagctaattttttgtatttttagtagagatggggtttcaccatgttggctagactggtctcaaattcctcacctcaagtgatccagctgcctcggcctccccaagtgctgggattacaggcgtgagtcactgtacctggccaatatttttgtttattagatagattccatgatgtggatgtactaagctaaaattataaacattttttagtgtttaaattcactgccagattgcatttttgaggagttctaaccaatttgtaacactatcagcatgtatgagagtactagtatcactatatctttgccaatattggtcattatcattttagaaagatttttgctaatcaggtgaaaaaagttaccctgagctacatgtaatttatttgaacattatgtttctatttatttgtttatctttgtatgtcttgtttacatatgtcttgtggtcttgtttcttattaatccttaggagacattatatagtgaaattattgtcttatatgctgtaagtgcttctttaaaaaaatttttattttttataaaaattaaatagagacgggggtctcgctgtattgcccaggctggcctcaaacttctgggctcaagcaatccacccgcctccacctcccaaagtgctaggaatacaggtgtgagtcactgcacccgcccagataagtgctttttgaaatccaatttttaaatttacatgttgacatctttttttttttgtagttcttctattttctctacagttaagtttttctacctaataaaggtctgtggtaaatacccagttctgttttatttctttaatggtttagtctctgcctttagcaaattgctagcaagctaagaagtttcgggacttgtgagtctagatctagctctgtgacttactctaccaaagcaagtgccagattaatttgttctatttacatactttatcaaaattggaaacagtttttttaaaggactggagaagaaatctagcaattttagcacagtcctaag

SEQ ID NO: 40632 - DNA, 1008 bp, Homo sapiens
aaaggtttacttgtgttatagttgatcaacaaatgtttattgactcactactgtgtattaaagcacaataagggatatgttgaggtaaaaaaggttcctgcaagagaacttggggaaactagatgcaaataatgatgcagtttaatgatacaaggtccagtgtggtggcttatgcctgaataccagcactttgggaggctgaggtgggaggatcacttgagcccaggagtttgataccagcctgggcaacatagggagatcctatctctataaaaataaaaaattaaagaaattagccggatgtggtaatgctcgcctatggtcccagttacttgagatgctgtcatgggaggatcacttgggcccaggaggtcaaggctgcagtgagccgtgattgcaccactgcaatccagcctgggtgacagagtgagaccctgtcccaaaaaaaaaaaaaaaaaaaaaaagatgcaagataaaaataatcataattgttagtaattgctaaatgaagtgtttagctaagtgctacaggacttcagggtagaacactgtgggctggctaaaccaaaggctttatggaagaagaaaaattttaagaagctgctggaaatgggtagaattgtatagatggaaaataggaagaagttgtttctgctctgccttttacctggaatgccaagtgtggaaatcaggaagaggagtggtagtattatgttacttttgagtcaaaatcagcagttaatcatgtgggagaattttaacttaatgagcctaagaaagcttcttgatgatttcagcatattgtaagtcctcttaattcaggtctgtaaaacaaaaacaaaaaacttctttaaatgctggaagggcttcgggagagtgatataatccaggaaattcactatgaaagcaacaatattttattattaaacttggacatttcaagtatttaactgagggaaataacagacaaagaagccatgtgtctctgctggagaaactttattttcc

SEQ ID NO: 40633 - DNA, 1035 bp, Homo sapiens
gccctgtcctgacctttgccttagtcacggcattcatcttgtgtatcattcttcaaagcatagaacatcatggttgaagatagtgatcaactttttctaaaaacagagcacaaaagaatacacttaaattgtagcaagtgctgattaaaattaagtggggaagctttttgaagctataccacttgttagcaatggattactacaagatgctgttgcatccttttattttgaaatcttccatgggattgacttgcaccttaaagacagagtgaaggacaatataaaattccttatgagtctctgcagtgtactagtgagtaattggaatagttcagaaaattttgactgtatcttatatacactatgaaaatatattagttttaaacattatagatatagatagaatttcagaacaaattctaatcagctggtgcacaacctctgtaaaaaatgtgaaatttgtcaatccaaaatttgttcctctctcagaaacagctgtctctaaatagggcctcatattgttggtaaattcattataaatgctggaagcaactccagtttgatatggttgggatttgtagaaataatgtagacgtaggctatctacaaaccattttttttaaagtaacaatccaatctaaatactcatatgcattacaaatgagtgtcataaacttaaattctggaacctccaaaaatataagaaacctctggaaatataagaaagggctcatttaggatggaatgacaaacaatagggagagttctcattttggtttctgcccacctgctcccaccccttaaccaaaaaccaaaacaaaatatctggaattatttaggtaatatagctattcttaaaagaatggatttctaattataaaactctttgctggcacttaaatgtccttttagatagatagaattcatgattggtaaaaatatgtttgatttcataaaggctctctcaaatcatgagtgcagattttggaagtatcagggacaagactctattagtcaattttcatgctgctgata

SEQ ID NO: 40634 - DNA, 1068 bp, Homo sapiens
gatgtgcttttttgaaagctgactttggcggctgtggtggttgtgaattgcagaaaagaaaagctagaggcaggaaagcctggcagaagactgctatggtttattcatttcttctttcagcagctagttaagtgtgttctctaatggccaagtactatgcttgttagtcagggaaacaacaccagacactgacccacatccctcctctcccttcccctccccaggatttatattcaaataagggaaatagacatgtaaaacacaaagtgcaataaattgttacatatgttaggataaaagtgtttccaaataaaatgaagacataaacaatagagtggcaaaaggtctcaacgagatgatttaaacattgaaaattgagatgttcttgcggatagaggaatgatgatggtgagttataaacttaggcagtagtgatggagatgaagtggaaagactggattcaagctacatttgtgaagtgaggttggtaattgcagacttgataattgtgagagtgaaagaacagaagaagaataagctgagcaattgagtatgttgagatactagcagaagtatgttgggtgtagagtgtagggggaaattttgtagacctgttgaacgtgaagtatttgcagcaagtggaaatgtccaaactgaagttaggaatgggttaggtcctcctacaggaggtaaacactaaggctagagttggaagtactcaatacaggtgagatttaaagccataggggtttctcatctctcagggaggaagtatagaattatctcagcattgtttagttgcaagcatagaaattgcttttgttttttgttttttgtttttttgtttttgttttgagatggagtcttgctctgttgcccaggctggagtgcagtggtgtgatctcagctcagtgcgacctctgcctcctggattcgagtgattctcctgcctcagcctcccgagtagctgggattataggcatgtgccaccatgcctggctaatttttgtatttttagtagagatagggttttaccatgttggtcaggctggtcttgaactcctgatc

SEQ ID NO: 40635 - DNA, 1045 bp, Homo sapiens
ccagataccgtgtgcagagggaccactcgccgcccacaactgatccctgtcactgacgacctttgctggcccagagcggcggggtgggaggagctgaacctcccaacccgggttcacctccaaagcaccgcccctgcgggggcgttctcgggtacgccgtaaagtagagagtatacttaacaacccgcctctgtctttacggcaggccgcattccatgcctccaatatggcgtcctccacataggcagtggctgtggtttctaccccgggtggccgggggcagtgctgagctgggactgttgtttgcccagcctgggctgcagaaagcagcagttaaagttcgtttctggtcactgctccaggaagccaccttactctgagggtcaagaattgccgcttccttttagttactgtaagttcctcctctgcccctggtttgtttcccgcggcacttctggatacccccaggtcccagacccttccagactcaaaccatgaactttcggcagctgctgttgcacttgccacgttatcttggagcctcgggttccccgcgtcgcctgtggtggtccccgtccctcgacaccatctcctcggtgggctcttggcgtggtcggtcctccaagtccccggcccactggaatcaggtagtgtcagaggcggagaagatcgtggggtaccccacgtccttcatgagccttcgctgcctgctgagcgacgagctcagcaacatcgctatgcaggtgcggaagctggtgggcactcagcaccctctgcttaccacagccaggtgagctacccctctcccgctgacacactcgcactcattggaatacttttttttctggcgggcatacgcattctagctctctcagactggctcctgatttatctctttttagtccttcctttttactcactcctcctagacattccgtgttgtctcttctctagtccacttaacgttcttgctcagctgagtgcataagtggttttctttgaaacacttgtatgctttcctcgattttgcttcttaattgttgag

SEQ ID NO: 40636 - DNA, 1048 bp, Homo sapiens
tttttttttttctgatttgggtccatgatcaaaacatttgggcaccactgctttgtggtattgatagggtgacatttgacactcaccacctgagatcacagagtgatatactctggagttggtgggttggcattcactgtgtgcagccctactgtagctgccaagagcaaagtgagacttttatgagatagagctgagtaggtctggaggtgggattgataggcaaggggagggttctgcacaacggttgtctgtggagtgcaggtggtgcaggtatggagcagcagtgctggggacgacttgctgggactttgagcaaatcacagcctgttgctggtcctggcaatcagtgactgctgcaaatggaaggtgagtgtgggaaggactggccactctgttcagcacgaggttgtttagcgttaacctatcagcctgggtacacaaagggagctgtagccctcataccttacccgaaacacctgaggtttacactttaacatctggataatagcagcaatggacttcagtgtgaacagattccattaagagttaacttcaagctatttctctgtattttccagcctcgttccagtagagggcgatagggctgtaattttctttaacaaagaatggtgtgtttcgtttcagactaaaagccacgattaaagaaatgctttgtaatttatttgtatctgcaccttctgggatttcctccctctcttttgatcttttatgtttccccctaacctttttcttctttacatgtgtcctttgttatttatttattatttttttagaggcagggtcgtgctctatcgctcaggctggagtacagtggtgcaatcatagctcactgcagcctcaactcctgggatcaagtgattctcctatgtcagccccctccgaagtagctgggaccacgggcactaacctggctcattgtatttatttatttagagacaggggtcttgctatgttgcccaggctggcctcgaactcctaacttcaacccttggccacccaaagtattggcactataggcatgaac

SEQ ID NO: 40637 - DNA, 1043 bp, Homo sapiens
gtgatatttaggccctgtgtgaatgtcctattctccaacagtgttttacccaatcgttttaaacatatgttgatgattcttttctgaatcaatttttactctgctcattctattcagtgtagtttttatttctctgaagagtgaaacttaaccttcagtgtgtttgagttgtctttttaatgtgtctgtttgtgaccattgttcacttttgttgagtcttaaaaagttgttttgggatctttttttaatgttaagaaatcagccctttgtgatatgtgttgcaagtatttctccccagtttgttgtactattctggttgtttctaccagatagaaatataaatacctatttgtttatccattttcttacttattttttgtagtatgatttaaagaatttttttttaatagtttctaggtttgtgttatagttaggccaaactgagattaatttaagaaaaaaagattccttcatgattttttctagtttttttaaaactggcatattttaatatttaatcttgactgtaaaatctggattttggagattggagcagatcactagagcagatcaccagagaatacaaatgtcatttttaaaaaattgttcttttgtccaagtggaatagaaactttttaagagtttgttactatttgtatttgaagtttatgatttgatgataaataaaatatcttcttgacctttggcattgggcgtttattctagaaataagaaaatttggcaggaagtatctcctatctagtgaagtctgttgttttattccaacatttcatttacttatgcttttatacctgcttaatttcttcaagatgatagcatagaatttggttgctttaagtactgctttcttgaattgtggagagacaaattaacctcatcagttctgcataatttgatttcctctttgggaggtatttataatatgtaacatacatttcgcttttttttattattgtttataaggactttagtaacatttattaggactttctgtatcatctgcagaaaaaacctggctgtta

SEQ ID NO: 40638 - DNA, 1049 bp, Homo sapiens
tgcctctgccttccaaagtgctaagattacatgcatgagtcgctgtgactggccccaaaattatacttttctataaactacctgtttccttaaataaaatatgattgatgtttttgaaagcagaaccatcttagcctttgtgttattgggctttgcaaatagaaatacttttatttgacaaattatgaagaatgaataaaataactaacaatagacagactagccagatattaaactctttagtctgactcccacatctttataagtaggaatgtttataattttaaaaaattgtatatgaatagtgaaattgtcatcgagtcagtttagttaaattgacaataagttaacttcagggattcagattgatatgttctcattgagatatgcagaatctttgtgtttgcctttcccttttaggaagctgcagtaaaggaagatgaagaagaagtttcagataagggcagtgattctgaagaagaagaaaccaatagagattcccaaagtgagaaagatgatggtagtgacagagactctgatagagagcaagatgaaaaacaaaacaaagatgatgaagcagtaagccttataggtttaaataatttaaataattggaattatatctctgatgatagctttgggttttgttgttgttgttcatttgtttgcttgctcgcttgctttctttaaataatatctgtatattttataattttattactttgaagaacgtttttaaggaatggtagtcaaggttatacagaaaaatgatttctaacaaggattggaaatcctcgttttcttaaatattaaattgttaggtagagtaggacctgggtttgaggttaggtcagttggtctcataaggggattttcagtgttggggatatctctgggaatatgagtaaggaaaggtgtttgtgaaatgcatagtgcttacttggaaggctgtgtcacaagctccagttcatgtttactgtagagaaacagtactgtggaccctgatgtcaagaggttggttaagggaaaagctaacatttatagaatac

SEQ ID NO: 40639 - DNA, 1073 bp, Homo sapiens
tgtccctacaaaggacatgaactcatcattttttatggctgcatagtattccatggtgtatatgtgccacattttcttaatccagtctatcattgttggacatttgggttggttccaagtctttgctattgtgaataatgcggcaataaacatacgtgtgcatgtgtctttatagcagcatgatttatagtcctttgggtatatacccagtaatgggatggctgggtcaaatggtatttccagttctagatccctgaggaattgccacactgacttccacaatggttgaactagtttacagtcccaccaacagtgtaaaagtgttcctgtttctccacatcctctccagcagctgttgtttcctgacttttgaatgattgccattctaactacaccttatacaaaaattaactcaaggtggactaaagacttaagacttaaaaccataaaaaccctagaagaaaacctaggcaataccactcaggacataggcatgggcaaagacttcttgactaaaacactaaaagcaatggcaacaaaagccaaaatagacagatgggatctgattgaactaaagagcttctgcacagcaaaaaaaaaaaaaaaaacccaaaaaaacaaaaaactatcatcagagtgaacaggcaacccacagaatgggagaaagtttttataatctatccatctgacacagggctgatagccagaatctacaaagaacataaacagatttacaggaaaaaaacaaacaattccatcaaaaagtgggcaaagtatatgaacaggcacttttcaaaagaagacatttatgcagccaacaaacatatgaagaaaagctcatcatcactggtcattagagaaatgcaaatcaaaaccacaatgagataccatctcacgccagttagaacagcagtcattaaaaagtcaggaaacaacagatggtggagaggatgtggagaaatagaaacacttttacactgttggtgggactgtaaactagttcaacccttgtggaagtcagtgtggcgattcctcaaggatctagaactaggaatacttgacccagcaatccc

SEQ ID NO: 40640 - DNA, 1084 bp, Homo sapiens
ctcattttatgaggccagcatcatcctgataccaaaacctggcagagacacaacaaaaaaagaaaatttcaggcgaatatccctgatgaacattgatgcaaaaatcctcaataaaatactggcaaactgaatccagcagcacatcagaaagtttatccaccacgatcaagttggcttcatccctgggatgcaaggctggttcaacatatgcaaatcaataaatgtaatccatcacataaacagaaccaatgacaaaaaccacatgattatctcaatagatgcagaaaaggccttcaacaaaattcagcagcccttcatgctaaaaactctcaataaactaggcattgatggaacgtacctcaaaataagagctatttatgacaaacccacagccagtatcatactgaatgggcaaaaactggaagccttctctttgaaaaccagcacaagacaaggatgccctctctcaccactcctattcaacatagtattggaagttctggccagggcagtcaggcaagagaaagaaataaagagtgttcagttaggaaaagaagaagtcacattgtctttgtttgcagatgacatgattatatatttagaaaaccccatcgtctcagcccaaaatctcattaagctgataagcaacttcagctaagtcttaggatacaaaatcaatgtgcaaaaatcacaagcattcctatacaccaataacatacaaacagagagccaaatcatgagtgaattcccattcacaattgctgcaaagagaataaaacacccaggaatacaacttaaaagggatgtgaaggacctcttcaaggagaactacaaaccactgctcaaggaaatgagagaggacacaaacaaatggaaaacattacatgctcatggataggaagaatcagtattgtcaaaatggccacactccccaaagtaatttatagattcaatgctatcccaatcaagctaccattgactttcttcacagaattggaaaaaactactttaaatttcatatggaaccaaaaaagagcccgcatagccaagacaatcttaagcaaaaagaacaaagctggaggca

SEQ ID NO: 40641 - DNA, 1036 bp, Homo sapiens
gtattaaccttaaatgtaaatgggctaaatgccccaattaaaagacacagactgccaaattggataaagagtcaagacccatccgtatactgtattcaggagacccatctcacgtgaaaagacacacataggtttaaaataaagagatggaggaatatttaccaagcaaatggaaagcaaaaaaaagcagggtttataatcctagtctctgataaaacagactttaaaccaacaaagatcaaaagagacaatgaagggcattacataatggtaaagggatcaatgcaacaagaagagctaattatcctaaatatatatgcacccaatacaggagtacccagattcataaagcaagttcttagagatctacaaagaggcttagactcccacacaataatagtgggagactttaacaccccactgtcaatattagacagaaaattaacaaggatatccaggacttgaactcagctctggaccaagcggacctaatagacatctacagaactctccagcccaaatcgacagaatacacattcttctcagcaccacattgcacttattccaaaattgacagcataattggaagtaaaacactcctcagcaaatgtgaaagaacagaaattataacagactgtctctcagaccacagtgcaatcaaactagaactcaggattaggaaactcgctcagaactgcacaactacatggaaactgaacaacctgctcctgaatgactactgggtaaataacgaaatgaaggcagaaataaagatgttctttgaaaccaatgagaacaaagacataacgtaccagaatctccgggacacatttgaagcagtgtgtagagggaaatttatatcactaaatgcctacaagagaaagcaggaaagatctaaaatcgacaccctaacatcacaaaagaactagagaagcaagagcaaacaaattcaaaagctagcagaagacaagaaataactaagagcagaactgaaggagatagagacacaaaaaacacttaaaaaaaaatcaatgaa

SEQ ID NO: 40642 - DNA, 1297 bp, Homo sapiens
atgtcatcttctagtatagatgcttactgggacttaaatcctaaatttactggttctgtactgattctaaatggattgtatggttggtggatatagctttaggatatgtagattttcatggtgttttttttttatagatatggggtctcgctctgttgcccatgttagtctcaaactcttggggtcaagcaatcctcctgccttggcctcccagggtgctgagattataggcatgagccaccatgctccacctgtgatgattcagttcttagtctcaggtctcaggtccaataagcagtatcactgacaatagtgaataaactaatactagtctcaagggtttttttgttgttgttatttcgcacatcacactgacatattgtcaaggttttaatgcagaaaatagtatatattctcataacattaaaatactcaacgtttgcttgctaagaataaaagtgaaattttaaacaaatatttttactgtatgtatccttactgtgtttgtaaacttgagtagactgtacttttcaaaacttgttcaagacagatgtgagatactttagaaggtatctacctgcataggcacacattcatcagctagtaattgctaaacgtctccttctttgtcaattgtagccagttaaaaatacttaataaaaatgcagtttgaaagattgctttgtttgtctgaaagataaatataggttgacagattttgtatttctcttcttgccgccccccaggaagtatttgaaaaggagcagtccatctgtgctgcagaggaacagccagcagaagatggggtaaaaacttgggtttccgaacctatttttcctagtgaaagaaatattttatttacttttccaattgacttatattgctctgggagagtaattcagtttagctatttccacctaaaaattactacaaccttcaattgaatctgttgctataacttaagagtgtgacgtgttatgattcacagcagggtgaaactaacaagaacaggacaaaaggaggatggcaacagaagagtaaaggacccaagaaaactgctaaatcaaaaaaaaagaaacctttaaaaaaaaaacctacacctgtgctattaccacagtcaaagcaacagaaacaaaagcaggcaaatggagtcgttgggaatgtaagtttattattatcgttattatcattattaagctaaaatatacaaactaaaatgttcaagtcttacgtgtacagcttcaaaagttttacataatttatgcacccgtgataccctagaaagctcccttgtgct

SEQ ID NO: 40643 - DNA, 1053 bp, Homo sapiens
tctcccaacgtgctggggttgcaggcatgagcaactgcgcccagcctattttattttttgttgagacacggtctcactgtgttacctaggcttgagtgcagtggtgcagtctcggctcactgcaacgtccgcctcctaggctcaaatgattctcccacctcagcctcctgagtagctgggaccacaggtgtgcaccaccatgtccagccaattttttgtatttttagtagaaatggggtttctccatgttgcccaggctggtctcgaatgcctgtcctcaagtgatatgtacccctcagcctcccaaagtgctgggattacaggcatgagccaccatgcctggcctaatttttttttttttttttttaatagaggtgcgggtctctgtaggctgcccagctgatctcaaactcctgggttcaaaggatcttcctgccttggcctcacaaagtgctgggattacaggcatgagccaccatgcctggctttcagtttctattatttatattttctcctgagtcaactggtagagactgtagtattttgactcaatttattcaactagtggtagattttagcttctttctctgaggtttttgagcatctgcaagaaatacatgccacatttatatcccatgcctaaaattgctggtaggaaaaacatatatatatttttttcttagagagatggaggtctcactgtgttggccaggttggtcttgaactcctgacctcaagtgatcctaccatttcagcctcctaaagtgctgggattacaggtgtgagccaccaagcctggcctgaaaatcatgttttgtagtaggatatattgaatcaaagatgttgtttttattatagcaagtgataaggaagcatttgtcatggactctaggtgagagagctgcctcctgggagaagaggaactgaaaccaatgctgaaattgggtttagaatccaaatctagactacccatatcctttggacttcccagcctgaaaaatgagcaaaaatttggtcttgaactattgacatttctggagtaattggtagaaa

SEQ ID NO: 40644 - DNA, 1026 bp, Homo sapiens
aatgagaatattgcatagtaaaactttgaaggtgcgtctttattgaggtttatttttacttttattaggtaaaagtaaacgtttattattaaaggtttgttaatagtaaacctattaattgctaattaaaggtttttgttattaaaattgaaaataaactgaggacatcaattgacaaagttcttggttgagtcaagattcttattttttccctccaactttgttttttctaatttaaaaaaataagcctgtattaactttataatttaaaaattcttaatttaaattttcttggagaaaaaggtcatgaaatgccatatcgttattttgtactttgaaatgcacattaatcaacacttttctaaaagttgctggattttgttgtggttaacatgtgagtaattttctttttatgaaaagctttgtgagttagggaattatgtattttcttttttttttttattcagtataaaattaaaactatccaggatttggtgagtttaaaagaatcagatcgtcacactctactgcacttccttgaagatgaaaaatatgaagaggttatggctgtccttgggagttttccatatgtgaccatggatataaaatcacagggtaagtgggaggtttctctgttgagcattgcttcccttttgatagattggttctcatttatttgactcaggattctcaaaacactgtacttaataacataacttgttattagactttgcagaactgtagtttacctgtcagatttactatgttggaaaatgatttatacctaatagtttgagaacactgatagagtcctacttttattatcctcataatgggatgaagtctgaacactctgttctgtagttcaacttttagcaatttcttaactttccaaagaatgatgaagacttccaggcataataaaagaatgagatatttgaagtatattattagtatgaaagaaatagctgcctagttctaaaattaaatttttaaaacccaacttatttatgttaattaaatgtt

SEQ ID NO: 40645 - DNA, 1053 bp, Homo sapiens
tacttgggttcaaatcctggctgtgcaatttgctagctgtgtcctaggacaagttatgtaacccatgtgtactgcaggttttctacctacaaaaggagggtaataatggtaccttcctcttggagtttgagaataaggattaaacaagataatacatgaggaatccttttaatagtggctcccccattgtaagcctcaaaataaattcatggatgttgttttaatttacctgacgaaggccataattctttttctcttcaattttaggttttacttgtatatggattggcatttatggttatccttccagttgttgtggtaagttttagctttttaagttaatgttttttttggaaaggagattgacatgttttggagtctccctataacattttaaatgtatgttagaatataacccattgatccttgaatttaagagtcttgccactgaaggtgaggtgggaggatcgcttgagcctaggtgtttgaggttgcggtgagccatgaccccacctctgcactccagcctgggccacagagtgagaccccaactgaaaaaaaaattatataactatacttttaatggtcttctaaatgtgacattacttgagcatgatgtgtatatcctcccaattcaaaaattacccacaactgaccgggcatggtggctcactcctgtaatcccagcacattgggaggctgaggtgggcagatcaatttagggcaggagtttgagaccaacatggtgaaaccctgtctttactaaaaatacaaaattagtcagacatgctggtttgaacccaggaggcagaggttgcaatgagccgagattgtgccactacactccagcctgggtgacagagcgagactctgtctcaaagaaaaaaacaaaaatcacaaaagttacaactgagttaacacagatacatatatacatatgtatacatatgtgtgtatgtatatatgtatgacatatgtatatgtgtacatatgcatgacagatgtgtataaatgtatgacatgtgtatatatgcatgacacgtgcatatatgt

SEQ ID NO: 40646 - DNA, 1522 bp, Homo sapiens
ttccttattatcttgcaacctgtctagtaatgctttttattggctcctgtatttttctgtggcctttcatcaaatagtgtaagtggagttacaattaaataaggattaaagacatcaaggcacctgtttgcataaatgactaaattgataaatttaaaaatattttcaagtcatcgaaaactaatgaatgtcctttttgctattttataaaggtatttctgcattgcctatctcagattggagttttgttaaatagaaactacattgcctcttaagttttgagaagtagaagtacggttaaaattagatttgaccatatggaagatcttttaccagttggtctccaagaatgtcttccttattatgttattggtcatttttgagcgtgtgtgttggtggggtggtttctgccttatattccttaactacattgtatatttttgtaaggaattgggaattcattttaatgctttttaacatcttcactgggaactggaataaagttattcttgactctgtaccttgagccattgtcaaagtcaggggttacattttaggtatctaaaaattactctttaactttcacattccctgggttaggaagctgctgttcaggagaaattttcctggttcttctggcaattggcttaggagaaaattgtgatcttagcacagtgcaaattaccttacccacagcaatggagttttacatgtggtggtcatctgtttctttcagaatgtggtgctattgttttgtggggaagctaccattatgaattaaatttatgtttttaaaaaatgtgtatttatcattactaatgtataaacatgctcattgaagaaattttggaaaatatatgagagtataaggggaaaaaaatcgcctacaattctccctgccttcttagaaaatgtagttgcctttaaagtttgatctggttgaactgagaaccatctggttgaacatgagaactggttaagcttgagaaccatgggccaaccaggaattagtatcaagacgcaatagttagcattttctgttaatgcgcatttcttgctcctccctttccctttctcctgatttcagagaaacttttcttgattcatggaatcagtatcttctaagaaatgagttggttggctaatggagtttgtctatatgagtacttgtttttcagatgtggctttctaattttgcaactttgttcttttgatgctagtttaacggatgaagagtcccggaaaaattgggaagaatttggaaatccagatgggcctcaaggtgtggtaaatgatgattttaaaatattggcgatatggtatatattataaaaatgttaaccagattaaaggaataatattattttcttactaaacttatactcacatggagtttaacatagataaattgagctctcattaatttttgctttatttttctttctaaagactagtttgaaagatataatttaagttgatccatagagaagaataatcactatcatttccaattactagttga

SEQ ID NO: 40647 - DNA, 1030 bp, Homo sapiens
acaggtgtgcatcaccacacgagctaatttttgtattttttagtagagttggggtttcactatatgttggccaagctggtcttgaactcctgacctcaggtgatccgcccaccttggcttccaaagtgctgggattacaggctgtgcctggcctattttttgatatttaaatgtcagtattattttatgtaaatttgtcatctgttttcactttcaaattatcagtgcttagtttactatgtggcacatagtaggtgctcaataaaatacatatattggacaatataagtgtttttatttaatatatgggatgaaatttatgggaaaaatatataggatgaaaaatggattttgtctttctcaaaatactgagtagttcatattttaagttcaaaataggattgattatttctttacagaattgtgcttatttttgctaacagaaagcttgttttttttttttgtttttccccagggagccacagtagcagaaattaaaaaacaatatcgtttgctgtcacttaaatatcatccagataaaggaggtgatgaggttatgttcatgaggatagcaaaagcttatgctgcgtaagtatcaggatccattacaaatttttaagaatggtacagataagccaggtgcagtggttcatgcctgtaatcccagtactttgggaggctgaggcaggaggatcgcttgagcccaggagtttgagaccatccctggcaacataccaagaccccatctctacaaaaaataaaagaattaaccctgtgtggtggtgtgtgcctgtagtcctagctacttgggaggctgaggtgggagcgttgtttgagcctgggaggtcaaggctgcagtgagccgtgaccatgccactgcagcccaacttcgatgacagtaatactccatctctaaagaaaaaaaaaaaaaggatagttttctgttttaataaaatattaaaatagttgtcatacactttttccaagtgcttacttcatgttgagtctatcatttaggggctacacagca

SEQ ID NO: 40648 - DNA, 1034 bp, Homo sapiens
cccgtttttctctttgagaagctcacttgggcagctgctgcagtggagataagcaccaggtatcgtcaacactgcaaaagggcccttacaggccctgattgaagcagcagggcagccctctaattgagtgaagctcattccttgggaagtcagttgctggagcttccttcttcacagagctgtttctcttctgagggtgtacgttcaacctcgccaactctcctgtctcctttgcttttccagatattttcctaaatagaactaaaaaggatactacaatggtattaatgattactatctgggtgttggattggtggatttttttcttccactgtatgccaaattttctttctttttccttcttccttttttttttttgagacacggtctcactctgtttcccaaggctgtggatagtggcacagtcatggctcattgcagcctggatctcctgggctcaaggagctgattcctctgccttcttgaggaagcttctaagtagtaggactatgtagctggactatgggtgtgtgtgggtagctggactatgggtgtgtgtgccaccacacccggctaatttttaattttttttgtagtgatgaggtcttgctatgttgcccaggctcaaattttctttatgaatttgtattaacacccaaaatcttattaaaacaatctctggctagcattgcgatcttgagcaagacacactctgcacttatctccagaggccctttcagctcaatgaattgttactactttggggtatgtggtgtttaaagttctggtgggacatacatccttgtatgttaagttgcctttccttcttagctagcatttatttactttcctagtacttgagtttctcttccactttctctttgttttacctgtttttggttaaccttttacttaggctatggattatcactataagattaagactaaaagaaaaataggaggacagagctaacagggtggttagtaaattaataatgaagcttcccaggtcctcctctcccttcttccctccc

SEQ ID NO: 40649 - DNA, 1604 bp, Homo sapiens
ttttacatagctaagaagcacttacagaacagtaacgtaaagttctgggagttaaaagccagatatttttgtcaaacaactttaatgatacaagtttacaatcagtttatcatagttgtctattaatggcttccagagtatttaccattgtgctatgattggagccttatgtaatttggatatccttaacattttgaaataattgcacataattaccttaacactacccatctttggtattgccaacaatactgtgctgtgaccttttgtgtgtactgcccactttgtgctttcttgtaattgttaatgtttgtctttcctagtgcttttaaaatgagaagtgttcttaatgtttatgtggaatttcaatccaaccattatttgtaagtgcataattttgtttactgcttttttgatttacaatagaagagttatcactttaaacattttatatcattaggctttcattgatatatttgacaagagtattatctgacaagagaaaataactgattgcttgtaattattagaatttcgaataatcaaaagcatgcttttattctttccgtaggttatggaaagaattccttttgaattgagataaaatgtatcatttaaaaaaagtttttgttgactccttgatcttacttttggggcttgatcttcccttttcaaaacttacttaaccttactttttcaaaatgcctggttttgaaatgtggctctgcagcctactgtaattttaggcaagttatttaacttccgtgtgtttcagtatactcatctgtattggttactgatttaacttctgtgtatctcagtatactcatctttattggtcatactcatctgttacggtcagagaagatactttgtatgatatctgtctttcaaaataaaatatcttgtggcttaacatatagtctatcctgcaaaacgtcccatggcacttctgaacaatgtatgtgctgctgctgtagggtagtgagcgttgtatatgtctgttagatctagttggtttgtgttaagtcctctatttccttatcttctttttggttgttctatccatttttggggatggagggtgtattgaagtctgaaactattattgtagcactgtctgtttctctcttcagttctgttggtttttgcattgtacattttgatgatcattagatacgtaaatgtttataaatgttatatcttcttgctgtattgaacctcttactaatatgtaatgtcttttatctcttgtaatcttttttgttttaaagtctattttgtcttatagtcaccaccctgctatcttttggttactgtttccatggaatattttttccatcctttcaccttcaatctgtttgtgtctttggatataaagtgagtctcttgtagatggacgtagttggatcaggtgcttttaatccattctgccagtcttttgattggaacatttaaccatttacatttaaagtaattactgttaaggaaggagggccaggtgcagtgtttcattcctgtaatcccagcactttgggaagctgaggtgggaggaacacttgagtccaggagtttgaaccagcctgggcaacataatgagaccg

SEQ ID NO: 40650 - DNA, 1028 bp, Homo sapiens
tgggtgtcagtttgcccgttttacatccggctctctgcttcaggcttgccttagtccatatgcatattttgatgtatttgtttgctcttgctcaaaattgtgttatgaaaattaaggtgaatacttaaatgctattctaatcattatgaaaattgttgggcaccacttggacttttttcttggatttaccctaataacttgagttgtttctgtggaattacagttgtagtaaaaggatgttttcatcatagtgactttttttctgcagcccagttgcagtatcttgaatatgaaagagaaatcttgaattactgcctcattcaaagctctgaataaggaacttttttcagaagtttgctgcaaaataatttgccgacttgtactgacaggaggctactgaataatctttatctcacttaataaatagttatgttctgtcttggaatattaatttgtttggttattggtgcactttagaccccatagggtctgtttgagtgtaaacgctgtgttacttttctaaaatctgaaaaattctttttttttttttttgattttttttttttttttaattgatcattcttgggtgtttctcacagagggggatttggcagggtcataggacaatagtggagggagggtcagcagataaacaagtgaacagaggtctctggttttcctaggcagaggaccctgcggccttccgcagtgtttgtgtccctgggtacttgagattagggagtggtgatgactcttaacgagcatgctgccttcaagcatctgtttaacaaagcacatcttgcaccgcccttaatccatttaaccctgagtggacacagcacatgtttcagagagcacagggttgggggtagggtcaccgatcaacaggatcccaaggcagaagaatttttcctagtacagaacaaaatgaaaagtctcccgtgtctacctctttctacacagacatggcaaccatccgatttcccaatcctttccctgcctttcccctctttctattccacaaaacc

SEQ ID NO: 40651 - DNA, 1026 bp, Homo sapiens
cggcctcccaccccctattctaaatgacacttgtttccaaaatatgggggctggaggagcagatccagaacccaaggaaacgtgatcaaccagggcaattaatccagagggcaggacaggctgagcctcagctcttctctgaatatctgggacccctgcgcagccaggtgaaccgcccgcgaccgctgctccggcgggaagccttctctgggatcctgtacgccgacgcccggaatccggcgtggtgcgctgggaaactgagcggtggaggaaggcggagcggttaggggcgggaccctaggggaggggttgggggagggctttgacgttagggcggggctaagggcgagacctcgccgagttccaccgttgcgctcgccacgtctcccttagcgagctcgctggggacacgcagggggagggaaaactgagcggggcgggaactatctcctctcgcgagagctggcgacggcggcggcagcggcagaggtggcggcggcgtgtccgtgagagtggcgtgggggcggggaggagaggcggcggcggcagtgtccaagctacgccactcgggccggggcgttgggagcgggagtgcagagcgtggtcgtggcggcggcggtgagaagagcgaggcggaggagggggtgccatggccgggcagcagttccagtacgatgacagtgggaacaccttcttctacttcctcacctccttcgtggggctcatcgtgatcccggcgacatactacctctggccccgagatcagaatgccggtgagtcccgccggcctttgcccgcgaacccgcgcaggccccgccagcgcccccaggccctgcggcgcccgcttgcccggccccagcccgcggcgtccgggatgacagggacggtgcggcccggcctgtgtccagcgtccgccactggcggggcccgggtcagcagcgtttccctcggcgcttctccacctcccttcattgtcctcaggagtttcgctcgctccatcttctccattgttgtggacgctccttg

SEQ ID NO: 40652 - DNA, 1026 bp, Homo sapiens
aagatttatggtaactggtttcttacttgacttttataaatagtattttacatcttatttttgcctttatttcataagtaatttaaaaatcactggattgctttattatattcagggcaatatggattatttttataccaaggatttgcatcgtgaattacattaagttatttggcaatttataatttattactactttaaatcaaatgtagcattatcacactgtatttaaattgtcattttttaaaggaatattttcttcttaagatatatagaggattttggagaagagagacaggaggggtaaaaccagcttaaggttcagcgagcagaaagggacctgagaggatgctcactgtaagactgttggacagtggtgtgtattgaggggatgaatcggaacgatagtctcatgcagaaaatagtgagattaagatcatccttattgtttctaaattatttcaatcagatgaaagtgatacgattgaaatgaaatcacatagttcgtgctcagaaattctattttggtatgtttgtattagcctttagaaaaaacactccgtttcagaattgttcacagttttatttcttaggtttttagagttcaggatttcatttattaatttcttcttgcttttttggtggaaataggctttgttgtaaacattaagaatataaaatctcctctatatagaaacaagaattttgttaaaaagagaatttgaatcccttcctatactataaaatgctctatagggagacaaagtgtttcttttttcttttatgtttactgtttatgtggagtgaaatataaggctcttggatgtataacatactcaaaagctgttacactttctctgatctgctgtgatccactgaaaatgtgctggggtttgttctgctgtcactgtttatgctgctggaacttagcactgtcttgatttgaagcatatgattgagagccatttgaagcaatcttcattaatgcagataaaacaagtttacatgtgcagagttagaaaatga

SEQ ID NO: 40653 - DNA, 1048 bp, Homo sapiens
tttttttcatctgaaaatagaagcagttttctttctttctttccaatatgtatagctttccttttctttctcttgccttgttgcgctggtgataaattagtggcatgatgtcaagcaagaccaggtattttcgtcttattccagatcttagggggaaaaatcattcagtctttcacagttaagcataatgattgctatagaatctttgtacatgctctttatcaggttggggaagttttcactgaattcttttaagagaaattcagatttggatttctaacttagacttttagatgtataattttgttattctaccttatagcactttcattgtctaagtacatttatttcacgtacattacatatttaagattgtgatgttcaagaagatataaatgatgttgttttatttgtactgcttctaacaaagtcatgtgcaatttctaacaaagttatgtgtttttaaggttggtagaaaaaagttttaattaggttttaattcttataaggctggaactgttaggattcaaacatagaattaatagataaatactatagattacataaaaatagtaaataatcatgtttgataattaaatttaaattaaaatataattcttttgatttatctagccaaacgtctcaagtccagtaccagttttgcaaatattcaggaaaattcaaactgagacctacaaaatggagaattgacatatcacgtgaatgaatggtggaagacacaacttggtttcagaaagaagataaactgtgatttgacaagtcaagctcttaagaaatacaaggacttcagatccatttttaaataagaattttcgatttttctttccttttccacttctttctaacagatttggatatttttaatttccaggcatagcaatgttatctattttaatgtgtatttgtcacaataacagaacatgcaagaacaatcattattttattttataggcatttgattactattctagacttctggtatcttcttactaacataaatatctcaagtagaaaagtttttgaaaac

SEQ ID NO: 40654 - DNA, 1037 bp, Homo sapiens
agaagctagaatcgcctgaggacaaagatgatgggggctgaaaggtcagccatccttgagttggggcgggggcggggttgaggtcctttgggcaagttcaggggtcagacagtgaggtgtgggaaggtggtgatatgtgggatgggatggcctggcaggtgagagagctgaattccagttgcagctcagtgcctggcttggtgatcttggtccagtcacttctctgggccccaggatttgtgaggatgatggagcagattatctctaaccctttcctttccaggtgaatcgtgctccttaacagtcaggtgatgacagagttgcaggaaccaggatggatgccaggtgctggaaaagaggaggaaatctcaggaggctagagacagcccaggcctctgcagcacccggggctgcggaaagaactgggggctggagggagagacagaaggtgaagttccttccaggggaggaatgggtgggggtatccacagcctgtgactcatcagtgtcccaccaggaccaggtcaaaccccagcagaattctccaagacaacccgactttctctcattcctgccctgatctcaagtcctcttgcgggggggtcaggcctgccatcagaggagaaggctgctgtggccagtaaaactgagggccaggctggacgttttcaaagagtaagcggggagggcaaagagctgaaggggctctcaggactgtccaagtaacagaccaagcccctcacataggtttttttctctagtgaccccattctgccccatggatgtcacttgtttttttctttttcttttttttttttttttttttagcttttgggaaggaggagcaaggcgagggaggtgggaagagactttttttttttttttcacatgagccctcagaattacagttcacaaactattcagtaaactgaccggcctcaacctccccttcaacggcctaatctaaggggtggatctatgtgttttgttgcttgtcagaaacaatcgctgcgcggcccattacatttacagcacgt

SEQ ID NO: 40655 - DNA, 1028 bp, Homo sapiens
ccttttcttaaattcccattatatatgaaatttatatatatttaattatatatatattgttacattttttatcattttccttctttctttaactgacatccttgagctatccttttcttaagtttcatgctaaattctaccctgaattaatggtggtcatttatttaacacagtggttccagaattctttttttaaataataattgtgtagatacagatatttttccctgcccaccagatagccattctactggaacgtaatggttagcattcctttgtttctcagttatagaaggtccctgcagattttaactctcaactaaacagatgttaacatgggggtgagatctgagaatgctagcataaatttacggagacaaatccatagatatcttcatcattggtcatctgaggagagtaaatctaggaagggattataaagtttatttggacatttggtttttttgtttttattttgttttttgttaatctatatgaagtcgagttgctctttcccttttttaccctattgaattttgtttgaggataaacaactcgttgtagaaactatatcaagggtttaaagttttaatttttttgaatatgtgtaatttgtattattggtgaaaagaaaaatatgtatcagtttactatatatatttctccttgttctgattgtttgcttacacatttctctgtttgcgtttaaagtaaggatccagctaagtggttggtcatttaacagatatttgagcttctgttgtatgcccagtttttcttaaaataaccacaagaagcctaagacaggggtcttgatttgaagacattagtatgatagattgatggttttccaccaaaggcagttttatcccccaggagacgtttgacactgtctagagacattttttattgtctcagctgggggtgctatgttgtctagtgggcagaggctagggatgctgctaaagaaaagaatgccagcctggccaacacagtgaaacaccatctccacaaaaaatagaaaaatt

SEQ ID NO: 40656 - DNA, 1059 bp, Homo sapiens
ttggcatcaaaataaattaaagcaaggtctcactctggtgtctctcatttcagccctgcctcagaatgacatcagaggcaaggagtcatggaaggacgtggtgtgctcagaatgatgaaaagttattttgtgactagaaagtaggtaaaaaggtgtgggtatggtaggagtcctgaactagatgaaggctagtctgtactcatttctcaagtttaataagggttttctttttttttctgtttctagcctaagataaaagtggctgcatatgagcacaaaatatgcagatcatagcattccaacaaaaatgtaaagaaggccgggcatggtggctcatgcctataatctcggtactttggtaggccgagtcaggaggatctcttgagcccagcagttcaagaccagcctggggaacatagtgaggccccatctcttccaaaatttttaaatatgaataaaactagaaatacaaaatctgtgttaagaaagctctcaaactttaccaaaagaccagacctaaataaagaggggccaggtgcagtggcttacgcctgtaatcccagcacttcaggaggccaacgtgggtggatcacttaagccaaggagttcgagaccagcgtgggcaacatgcgaaaccccatcgctacaaaaaatacaaaaattagccaggcatggtgacatgcacctgtagtcccagcactcaggaggctgaggcaagaggatcactttgagtccaggaggcagaggttgcagtgagctgtagtcttgcccctgcactccagcatgggcaccagagccaggccctgtctcaaaaaaaaaaaaaaaaaaaaaaaaaaaaaaagtgtaatactgtattccttgtaatactgtattcctcgtttggaatgtttactgttgaagatttttttattttataaacattttagctcgtcctttgtgttctaggagttacaggtagagctatgaacaaattaaggtcccctcttttatggtgcttatatcctattaggtaaattgcgggggagggggttgttgaagagaaggcaggaaaaatatagt

SEQ ID NO: 40657 - DNA, 1321 bp, Homo sapiens
aaaacatccgatcaattgtttttttctaactaaatttcttttttagagttgttaactttaacttgagtagctcctgtgggtcagttgatttattgagtacttgcaatgctaagtttaataacacatgttactgcattcagtaagttcacagcagcctgaaacagggctagatttctctgataagttttccccagaactgtccaataaatgaacatttatgaactgtctgttatattccagacattgctagatgcttgtttaaaagatgaataagatatgcctagcctttggaagcttccaaactggtggtaaggagagtggggagaggtaaattcataaaatatgcataatctgtagtgggaacccaggtctgccctgaggggccaggagtgtgtgtgggcagaaagtgagccagtagtctagctagggggagcacctgtctcttttgtgcttcactgccagcatctgacatcaatgacatgccagaatcacacagtaataatactggagtgattccttgttactctctgacacaaacatttttctcgatttttatttataattttatatataatgtataatttggttttaaaattgttattttaatttttattttttaataaatagtgacagggtcttgctgtgttgcccaggctggttttgaactcctgagctcaagcaatcctcctgcctctgcctcccaaagtgctgggattacaggcatgagccaccacacccggctataatttgttttaagcatcgatgttcaggcggtatggtaggcactttcactctgtgttttctctgatatagtttattctactgcattttcttacaaactgtaattactcttatttccagttaaaacaaatgataggctgggcgtggtggctcatgcctataattttagccctttgggaggcagaggtgggaagatcacttgagcccaggtgttcaagaccagcctgggaaacatagggagacttaaacgttgtttttttttgtttgttttttgttttttaattatctgggcatggtggcatggactagtagtcccagctacttaggaggctgaggtagaaggatcacttgagcccaagtggttgaggctacattaagccgtggtcgtgccactgcactccagcctaggtaacagagtgagacccggtcacactcaaaaaatacatcctagatattgaccacttcatcattcttacttagcaataatcgtttcctgtttcctcctgtcttactccattttcacactgctataaatttactacccgagactgggtaatttgtaaaggaaagaagtttaatt

SEQ ID NO: 40658 - DNA, 1049 bp, Homo sapiens
ctctgtcgccaggctggagtgcagtggcgcgatcttggctcactgcaacctctgccttccgagttcaagcgattctcctgcctcagccgcccaagtagctgggactacaggcacgcgccaccacgcccagctaatttttgtatttttagtggagacggggtttcaccatgttgaccaggatggtctcagtcccttgacctcatgatctgcctaccttggcctcccaaagtgctgagattacaggcgtgagccaccatgcccagcctggatttcttttagtatgtaatgtgttaacttaaaactaaggacaccatatagtaaggaaattaggccttatttgagcagcatatgattttttagagtaattatagtcttgcattaaggcagagtggctatgacatgaatagtttaatattttgtaatttttttcttcttgagataagagtctcgttctgtagcccaggctggaacacagtggcatgattgtggctcactgcattctcaaactcgaggactcaagtattccccccgcctcagcctcccaagtagctggactacagggtactactatacctggctaattttttattttttgtcagatgagacttgctatgttgcccatgatggtcttgaactcctggcctcaagtggccctccccctctcagtctcccaaagtgttggaattacaggcatgagccacctcacccagccctgcaattttatttattattttctaaatgttgctgctctcccgaacccctactgactaccttttgctgttgaatttgctatgtggaaaaccattttatgttccagaatttgggcttttaaactatcttacagttactgtctcattctggtcttgagaaaaatttacagttttacaggatctgattgaaattactctaattcacagggcaattttatatggatggtggcacttagaatgcaagtttcccaatctccatttatcttttggtttgaggatagtgtttaagactattaggatcacttgattagtatctctgggcttttgaaaataattaca

SEQ ID NO: 40659 - DNA, 1070 bp, Homo sapiens
agaaaaaaagaaatataacatgcatatagaaaactgaaaaacatttatgttaacagtacagtttaatgaattattataaagagaacaaccaagtgtaactatcacctagatcaggaaatagaacattactattcccctataaatccctggagtgcccttccccatcaaaaccatcctctcgacttggtgcggtggctcacacctgtaatcccagcactttgagaggccaggttaggaggatcacttgagcccaagaattcaaggttgcagtgagccatgatggtgccactgcactccagcctgggcaacagagcaagactccctgtttccaattaaacaaacccctcttctctctccctaaaagtaatcattttcctaacttttgtggtaatcatctctttgcttttctttatagcttgctgtgtttgcatccctaaacactgtaatctcatttttttcctgtttttgatcttcatatgaattgtatcacactgcatgtgttcttttgtgtcttgctgctgcttctcaatattatgttcctgagattcatctatgttgctgtgtgttgctgtattcattcattttcatggctgtatgacatttcattatatgaatagttatctatctataatctataatactttattgatctattctaatgttgatggctaattgggctgtttccagtttagagcaattgcaaacattgttgttctaaacattcctgggcacatgtgcatgagtttaatatacgcttttacttatttatttatttttaattttgtagagatggagactcgatatgttgcccaggctggtctcgaactcctggctccaagtgatcctcctgcctcagcctctcaaagtgctgagattacaaatgtgagccaccacgcctgacccgagtttagtatatacttaatagaagaatttctgggtaatagccctatgcatcttctacatcactcaatgccagattgttttccacagtggctgtagggtttatactctccacagcactgtgtgagtatctacttggccacattctcactagcacttggaattgttgg

SEQ ID NO: 40660 - DNA, 1031 bp, Homo sapiens
aaaaaaacttaatttaaggcaaacttacaaacaaaatgagtttctctaaaattatttaactgcagagaaaacatgccctgtagtgctgtctcttgtgaatttagtttttatttttcataaatttacattctaaccgtgaggtgttgttttagatgtaataataattacactttttctagtttaagacacctaggtggaagtactgctttttcattttctgacgatgcacagggattgatatttgggttggttgagttttagatgtacaaacacactggtcttattttgtatcactgatgatccacagggttggctgctatgtgctgaactttctgttctagactttctgccaagtactttatgcaaaactctggttttagtgaaacaggttttattgtttttaatcagagttgtattataagctgttgttagctatgtaatgctaacagaagagttggtatgtatatacagccatgaaaacaaaccatcaaaacaagcctgtctctgttcgactggttgtttttccctcccattcctttagcctcagttcattttgtttactgccaaaggcctgagatggtgtaattttcttttctaggaacttggcattagaattcctcgaccactaggacagggaccaagcagattcatcccagaaaaggaggtacgttgtttgtgaaagtacatagtgaactgtatgcttttaaggaagagctttcatgacccacatgttggcatctgaagaactgttggtcaacaacatgttttagtcagagttggttgcagttaatcattctttggcagtgaatctgtgggaataaaaagctgttgtacttgtgttgatttctagtatttcatgatgtgtttttaacacccatatttaatcaagtaaagccaagatttgtttttgaccagtgatacaacatctgcttatatttagatgttgtttaggtgtgcccataacctgagttacttagtcttgactgtctccacaggctgatatcagtgctagattggatctttaattctat

SEQ ID NO: 40661 - DNA, 1040 bp, Homo sapiens
tattgtgatggtggaaacttgttgtctctttcaaagatggttattaggttgttgaggggaaaagattgttctcatgttaatcttccagccacaccttcacagagagcctgtgaggttagtgctgtgattagtatctacatctgcttttcaacaaggccatttgttggtggcagttctgtctcctagaatctggattggccaaaatttgttcaaagtctgtagttaagtttcttacagctacagatgaaggaataattgaattaacctaaataggaagctatgaaatgtatttagtttggcttatgatcaccccattgaacacccgcagtgccttttttgatcagcatctactagaaaagagttgtaaccaatttaacatgtgaccaagaagtgtttcaaaagtgagttttccagaaaatggaaactttttataaaccaagactactactgtataataacagtggtatctgtaagaatctccaaggtatcaagaagtcttaaagaggctcaaaagaataataatgaaagataccaactctagaaccagatgtcattgattcagcccccgtctccaccactcactagtactgactgagctagaatacttgggttcaaatctcagggctttccttggacacagggtggggaacatcacacaccggggcctgtcgtggggtagggggtggggggagggatagcattaggagatatacctaatgtaaatgacaagttaatgggtgcagcaaaccaacatggcacatgcatacatatgtaacaaacctgcacattgtgcacatgtaccctagaacttaaagtataattttaaaaattaaaaaaatctcagggctttcatcagttatgctaaatggagataataatagtacctgcttcatagattaaggtaaggattaatctaagactcttgactttttcatgaatattgtagaacaccaaatactctttctaaactttagtatcatagactcatgttctttgtttacaggtagtataatttaaaacagtgctcagctcatactttg

SEQ ID NO: 40662 - DNA, 1082 bp, Homo sapiens
cacttaacaattgtttgactttactaaggtgtgtaagcaacacacattcagtagaaaaatgctgtggaaagtagtacgatactcacaatgctgggcagtggcagcaagtgacagttctcagccacataatcacaaagacagacaaccaatactctaccatgttgccagatgattttgcccaactgtaggctaatgtcagcattctgagcacatttatggtagtctaggctagactataatgtagaagatttggtgtattaaatgcattttttacttatgatattttcaacttattgagtcataaccccattgtaagttgagaagcatctgtagaaatatttttaggtattttgtccaacatgagtaagaagcactaatatcgaggtcagtttttaacctaatctgggagagggcggtgctgtcagggctttttaaggcttataggaccattacccttatagaaaatggcttcctgctactgtgctatccaagttcttatttctgctttatagaatttttctgattcttcctttgtgattaagtgcttcactattccttttttctctgctatcagtttaatggtagtccctatgccctaataagttactatggacttagaaactagataaagaagcttgttataattttgtaccaagtaaaagtaaattgtctctaagagaggcaggtgaagggttttccactgaatacagtacatatgctatggtatgtaaattttgtgacatctattttacatcttttttttaatttgttctagattcatgagattgttttttaaaaagtcaattgagatataatgaaatgttgctatatcaatagtcaacatctattttggcaaaaattactgattttcaaatgtgtgggaaaacattttaagggtgtgtgtgtgtgatcattgaatttcattctacagaaaaaaaaatcactcattctttgagtaggcagtaacatatttagccactaagaacaatctacaatattctcttatgctttaaatatatgaaagtgactttaataatgattatttgacaatgtaagtcttcatttatgtttttatatttttc

SEQ ID NO: 40663 - DNA, 1086 bp, Homo sapiens
gctgaaatgttacgcagtatgggactgtactttattaactctacaactttgaataagttacataatctctccttgattcagtttcctcatctgcaaaatgagcattatgcttatggttcctgcctcacaatgttgctgtgagaataaaataaatgatgtttgcaaagcatagcacagtgcctagcataaaagaaatgctcagttaatgttaggtatgcctgctattactaggcagaaaccagatcccagaggggcttataggctatttaagggttgtggactttatcatagaaataatggaagccactgggggattttgagcaaggtagtatagtgattgatagtgtgtcagaaggatcactctagagaatggatttccatggtcaaaagtggatgtgtgacatcaattaggaggttgtcctactagcctatgacaaaagtgatagtggactaggatgtgaggtagggcaggagggagtggaaaaaattaaaatgggtctgatagatatcaaggagttagaaaccacaggatatagtatttagttggatttagaagatgaggaaaataacaaaattaagcatggctctaaagtttttggcttgaggtacttggtgaattgtgcaattgttttctgagacaaaagagtggcagggggtcaatttaggggaaaaatgactgctgttttagacatgttgagtttaagttgcctatgagacatccaagtagaaatagctcctaaatgaatttctgcccccgataccgctgttctagttctgtcactgctatgtcttcttctccagattaaactcaccctccacttttatatctatcctccacatagctgtagagccatttatctaaaatgaaaatctatgtaactttactggcaaaagccctttagaatagaattgaatttaaacttcttaatgtcatatagtacccagcattatctggctttcacttacctctccagcttcactgcctaccattttagcatcagcctcacatgagaaagcaaatattaattcaaatgtagcactccataatgctttctgttattcattagtaaagcagcaaaagctgtg

SEQ ID NO: 40664 - DNA, 1060 bp, Homo sapiens
aagtgatttcattttttcttaagcatgtctaaaataattgatttagaaaaaaatcttcatttctcaggagttgcaaaatcctaggggaatcacgttaatggcaaggaaagagagctcgccctttgagtgcacctatgcttccaacatgggaggcaggaatgctgccatggctgctgctgcagaagacccctgggtcactttgagactccagttgggcaacagcggaggaaggaggagtgggaatatggctgacttttactgcttagcattaacagtatggtgatagctgactgtgccctcaaacccctcctctccctgcacagggaaacagaagagggctgaggcccgggagtaacgtctacctctacttcctgggaaagaagtttgcttcccactcctgctcccaccccaatcctgggaattagggtctcccccacctgcctcgtgcctcattctggttctccttcacaataggcaggtgttggaggatgtggatggcagttcactaggacgcattatcccaggaagggattagaaagatgcttggctaagctgcaggcagaggtgaaagggagagaaggaaaaaatcccctggcacatggagaagacagtgtaaggtaccgaactgcatagggtcaggtgccaaagtagggcccttgtgtgctcttgatgccctttatgttggggctggggcagcagcaataaccagtagctggggcaggggacaccagctcccaatgtcaggtccaggcagcaacccagaagcaggaaggagggccctgtgagctttactgccaagtccagctctgctcttagtaaacccaaagtaatttcatctgtgactctgtgctcctgaaaggctgtttgctcagctcattcacgctggaaggtagccaaaaggaaacacagataaagggctaaacacatgtatgcaagtatagtaaccaacacttgcacaattactaagtgccactatactaaggtgtcaagacaggaattatttcatttaatctcagagcaagcctttgaggtgagtattcccattttacggagaggctaa

SEQ ID NO: 40665 - DNA, 1032 bp, Homo sapiens
aacaaactctgcatttagataactattaaaggttgttaagatgaagatttactgtttctttgttactcgttggtacagctgtttgttttacttgcacatttgtacatatacttaatgttttcaagtgccttaattgtttaaaatctctggcttcaaagtttcttggggaaaggtcggtttacctcacattttttgtttccattagtaatattctaggtacctcacaaaatgtattatggtgccatggctgttagtttttagtgagtgctgtaggattaattcgaaaataggcagaattccattcctcccaaggtggcaaaaattagctatactgatgtaattgtcatttacctgggtatgaattccctgacacacattcatgtcaacatatgtagcaaattttgtgaaaacataacaatttgaagcttctgtaattttgagcactgctctaacaacaagcataatataaaattagttagattttgcaagtctacaaatgagctcttgcaacagaactcacagcctttttacttttttcccctaactttagcaatgtagtatcttgagccattaatttttgggtttttttaaaatccagaaggtatatagaaaccttttcagatttttcatctgatttgttcttgcagatgttcttctatcaaataccttattttaccttacagatatttgttgcacaggcagatactgctgtatttagacatttctatttcagttcattaaaaactgcaaaaccaatctgtatcatgtaccaaactgacttaaaataaatctacatgtttattgaattaatagtgtgttactgcgttttgcttataaaatttaatgcttagtggatttatcttagtccgcttggggtgggctttctactcattttattgcacctctagaccagccgatagtaactaaggcacatgttcatatcaatagaaagcagagccttggaagtaataggtggagggaggacttggtacacttgtgggagtgatttgcaagttgatcttccacaaatca

SEQ ID NO: 40666 - DNA, 1791 bp, Homo sapiens
aaccaaatattttaccttatactagtaaattcaaaagtcatgtgaattctcagcactattgacgtttacactcacaattaactaaaagtacatagtctgaagaaattgttgcatattttagaagtgtttgatacattcccagggcacaatttatgtactaggagaatttttcccattgtttttatatttgtactagtacagtagcattgaccactttgtatccttgggtggaatgaaaaatgggatatggttgtcttcctcaattagggataaattctagctgtaaagacttgaggaaatactttatagaatttaacacatggcaaaatagaggctcaggtgcatctttaaattacaatagaggaccatgaaacttaggattgttgtttcttttgtcttatctaacaggtacaacaaataacactgtgactccaacctcacaacctgtgcgaaagtctacctttgatgcagccagtttcattggaggaattgtcctggtcttgggtgtgcaggctgtaattttctttctttataaattctgcaaatctaaagaacgaaattaccacactctgtaaacagacccattgaattaataaggactggtgattcatttgtgtaactcactgaagccaaaatactatcttttaagatgtcccacatggaagacgctattccaggatctttaaatttccatggatgcatataggatgtttgggagcatcatccgtgaagaaaaaatcaattaaatcattgtgttcaacaggaatatttaaaatattctgcatgaatcctgtggctgtcttattttaaatagctgctgctgtgggattatattttttttccttaacatgccaaatataactttctgaaagtgatggaaaatgttgtcttgtgcagacaacatcatggctcttggcagtttaaatttagtaattttaatttagtgaacagaattgagaagaacgtgccaaatgagaatcaattaggtggatttttggctgtcatttcaaaagtggaataaatttattaatttagtagtactaaatggtatccttagattaaaattttgtgcttgataacagctgttttttctacattagaaataagatgccacacaaggaactacattccagatttaaagaaatgaaaggataccattagtgtgtataacagattattgttcatacttgtaaagcatcttatgtcattgagaatataaagaacagtgccttagaagacagtgaaaggtaagctctagcttaatgtctatgatttgttctttgacattaaggaaggtaaggattggtcagaggatgtaacttgatgtgagcagtagtaaacctgttttagatatcatactgttaatattttattgaaaatttatttcagagcggagaaacttaagctaaagtctgttatacagaattgaaagccttcgtatcttgaacctcccaacatttttcttatggctgttgaaaagtatagagctaaattgatttaattacactttcctttgtactttaaaaaaaagtatgctagcactattgtaccttgaaaggatttccaccagactgtcttgagtagtgacttctttggtgaggcaagaaggatatacattattttagaatcatttactatttaaatgagacaatcatattattttagaatcatttattttaaatgagacaatcattttaagttttaagataacagaagtgaccaatgtaatttcacaacacctaaggattttttggttgatcaggttactgtagatttttactgattgtcctg

SEQ ID NO: 40667 - DNA, 1031 bp, Homo sapiens
ggactcaggggctgtgtggccagcctgccttgagacctgagcggggctgccttaggtacgagacctgtatgatgtgctagccaaggagcctgtgcagaggaacaacgacaagacagatacagggatgccagccaccggtgagcaggccttcctcccaaggggtgaccaaaatatgtactacccagcgaggcccaggtggtccctgcaaagcagctgcagcctcaggacaggagcagcgtgccggagcactcattgttggctggtgggttggttgggggcctgctggaggaacggaggggcagcaccgcacaggcagcagttggctgccagtctgaatgtaagcgcgttagtgtttgaaccaccgttacagccatagtggtgctggcaacctcccctgcccccagtttagtctgctgccctctatgtggccagttgcgatttcactttattcactcctctactttattccaaagagattttttttaaaagagaattgggatggagagctgctgatagtcagctttaggctggtgccctagtagaggtgggtccctgactcctcctcccctacagaacccccacatgcagcagctgggctccctatatgcctgggatgggcagagggggccttgggcacagcacagccttctttcccagggtcggcaggcacccaggaggagctgctacgctggtgccaggagcagacagctgggtacccgggagtccacgtctccgatttgtcttcctcctgggctgatgggctagctctgtgtgccctggtgtaccggctgcagcctggcctgctgtgagtccctggcagacccacctctctctcatgatctcagtgtaggagttagcatatccagttgaatcctagagacagtgtgcttccctgcatctgccgacagtcttgtgagactctaatgcattcagatagtggagagctttgtgaatggcacaggcccccaaagccaggagtagtgtcactgggttgggcactgggtagcagagactacacacctaccttcaag

SEQ ID NO: 40668 - DNA, 1061 bp, Homo sapiens
agcatagacactgagaatgtttccactttctcccctagaaccaacacttaaacttaagcagcaccacctccagaaaaatcagtttcagagatgacgaggaggcagcattgattagggcaggtcagtttttttatgtaagatcggaaaattggatcttttataccttttgtcaaagaatgtatgttaaaaataagcctattcagttttctaagaaaaacttgccattacaggttatttaataattctgttgtctactggaattatctaaatagcaaattgatttatggtgctttggactttttttttttttttttttggagtcactgtctctgtcgcccaggctgttgtgcagtggtgctatcttggctcactgtaacctctgcctgctgggttcaagcaattctcctgcttcatcctcccgagtagctggaactacaggtgcgcaccaccacgcctggctaatttttgtgttttttttttgtagagacagggttttggcatgttagccaggctggtctcgctcaaactcctggctcaagtgatccaccctcccagcctcccaaagcgctgggattacaggcgtgagccactgtgcctggcctggatgttgttttttaaatacaagtttttcttcttaaattcagtaaacatctcataggatatggattttaacacatgtactgagcacttactgggaaccagacattgttttaggctttgaggatacagcagtgaatgagatggacaggcccctgccttaaggggccaacattcaatagggaagacagagtacagacaagtatataacacatttggtgttgtgagtgcgttgaagaataaaatgcaaggtaagggggcgggatgccggaaagagagttgctcttttatgcatggactggtttgggaaggtctcacagatgaggtggcatcttggatggagatgagaatgcagtgggggagtgagccagccggccattgaagatgtccaggagagagcattctaggcagggggagccctgggcacagggccctcaggcaggaataaatgtttttgacaagct

SEQ ID NO: 40669 - DNA, 1026 bp, Homo sapiens
gttcctacatctctgatgtccaatatggtggccagtaaccacatgtggtttttgagcacttgaactgtggctagcgtgactgagaaactgaattttaaattttattttaattcatttaaatttgaataaccacatgtggctagtggctaccgtattggacactgcagtcctagtgagaaatcccttcctcctttgagccctttcaggtgcttaaaacccactctgctttggatcagattgttgttaccacttgtatatccctcaacttaattgtaatcttaagtatagggactggggcttaagtcttctcctgtgatccagcagtatctggtgctgtggttctcagcctgcaaattggaatcacttagggagcttctaaaactaccagtgcctagacctccaccccagagcttctgatttagttgtctggagccttggtgcttttaaaagctccctaaagactttagctacagataggttgaagagcttgaattcaggtacttcgaacaaagtggatacttgagaaatatttgttgaactgtaataggttatattttagctttttttttttttttttttttttttttgagatggattctcgctctgtcacccaggctagagtgcagtggcgcgatctcggctcaccgcaacctccgcctcccgagttcaagtgattctcctgcctcagcctcctgagtagctgggattacaggcacacgccaccacgcccagctaattttttgtatttttagtagagacggggtttcaccatgttggtcaggctggtctcaaactcctgacctcgtgatctgcctgcctcagcctcccaaagtgctgggattacaggcgtgcgccactgcgcccagctggctatttttatcaaaaattttatgtgcatagtttagagttaaatcattatacaagacttaagaaaaagcatgtaggatcgttcttcccttatgtcctcagtacagacagtccccgactcacaatggttcaattcatctttacaatagtgtgaaagca

SEQ ID NO: 40670 - DNA, 1033 bp, Homo sapiens
accaaaccattcgcacttctccctgttctctgccttgaccggctacggagcacccaagggaagcagaggcagagggacatgggaccttactctacagcagctgtgtcttctgcttctgctctgagcagttttgttgagtgaagctgttacactggctatatgaaaggtacttgcccagtacctaacagaaaaacagtagcaacctctagggagatgggccttttgtgtcaaacctgccactctgtgttttgcagtggaagctcatgacctgttatccaactgcacatctaaccacagcctgttcttttatctctgcacccttctgtgtcattaacatgatttgctctgcttctctgtctacatggtttccctctaacatctgtacctatctgttcttgttcatttctgtgtacttcgcaccatgtacttggcactgtcgttatgtctttctgtgcctcctacatctctctgggtcatgtcctatttcctctgcttcccccagtctcggtctcctatctatctatctatctatctatctatctatctatctatctatctattcacaagtgataaaatataaagtaaacataaaatagtatagagtaagggaatccagaaatagtatgtttaaatgcagaaaaagtaaatattttaagtttaaatcacaggaggatagaagaatgagtaatgtataaaaatgttataccatttttgtcaaaaggaagtgccactttaattttatttgatcaaactcttgagagtttgatttccatgattctctctggtgatactagactggacatagaccacatgtaaaggcttctcaggggcccttgtcctcaccactctcccaacaggcacagtccccagcctcagagccttctcacccctctgcctggccacatactctggaattctttggaatatgaaatcctggggaaggttttcaccttctccccacagttatcccaactaaggaatcacctcagtatattcccaaaataaagctgtgtggccgattcatccaaaactt

SEQ ID NO: 40671 - DNA, 1035 bp, Homo sapiens
gtggtactggtaccaaaacagagatatagaccaatggaacagaacagaggcctcagaaataatgccgcagatctacaactatctgatctttgacaaatctgacaaaaacaagcaatggggaaaggattccctatttaataaatggtgctgggaaaactggctagccatatgtagaaagctgaaactggatcccttccttacacctcatacaaaaattaattcaagatggattaaagacttaaatgttagacctacaaccataaaaaccctagaagaaaacctaggcaataccattcaggacagaggcatgggcaaggacttcatgtctaaaataccaaaagcaatggcaacaaaagtcaaaattgacaaatgaaatctaattaaactaaagagcttttgcccagcaaaagaaactaccatcagagtgaacaggcaacctacagaatgggagaaaatttttgcaacctactcatctgacaatgggccaatatccagaatctacaaagaactcaaacaaatttacaagaaaaaaaaaaccccatcaaaaagtgggcaaaggatatgaacagacacttctcaaaagaagacatttctgcagccaacagacacatgaaaaaatgctcatcatcactggccgtccaagaaatgcaaatcaaaaccacaatgagatatcatctcacaccagttagaatggcaatcattaaaaagtcaggaaacaacaggtgctggagaggatgtggcgaaataggaacacttttacattgttggtgggactgtaaactagttcaaccattgtggaagactgtggcgattcctcagggatctagaactagaaatatcatttgacccagccatcccattactgggtatatagccaaaggaatataaatcatgctgttataaggacacatgcacacatatgcttattgtggcactactcacaatagcaaagacttggaaccaacccagatgtccaacgatgatagactggattaagaaaatgtggcacatatacatcatgcaatactatgcagc

SEQ ID NO: 40672 - DNA, 1035 bp, Homo sapiens
cccctatatcattttttattgcatctatttgattcttctgtcttttattctttattagtctggctagtggtccatatattttgttgatcttttcaaaaaaccagctcctggattcattgattttttttttttttttttgagacggagtcttgctctgtcacccaggctggagtgcagtggcccgatctcggctcactgcaagctccgcctcccgggttcacgccattctcctgcctcagcctcccaagtggctgggactacaggcacccgccaccacgcctggctaattttttgtatttttttagtagagatggggtttcaccctgttagccaggatggtcttgatctcctgaccttgtgatccgcccacctaggcctcccaaagtgctgggattacaggcatgagccaccatgcccagccaattcattgattttttgaagggtttgtcgtgtctctatctctttcagttctgctctcatcttagttatttcttgtcttctgtagatttttaatttgtttactgttgcttctctagttcttttaattgtgatgttagggtgtcaattttagatctttcctgctttctcttgtgggcatttagtgctataaatttccctctacacactgctttaaatgtgtcccagagattctcatacgttgtgtcttcattctcattggtttcaaagaacatctttatctctgccttaatttcattatttacccagtagtcattcaggagcaggttagtttccatctagttgtgtggctttgagtgagtttcttaatcctgagttctaatttgattgcactgtggtctgagagactgttatgatttctgttcttttgcatttactgaggagtgttttacttccaattatgtggtcaattttagaataagtgcagtgaggtgctgagaagaatgtatattctgttgatttggggtggacagttctgtagatgtctattaggtctgcttggtccagagctgagttcaagtcctgaatatcattattaattttctgtctcattgatct

SEQ ID NO: 40673 - DNA, 1039 bp, Homo sapiens
tcttttcatttattcagcagcatttgttgatgcctgcagagttttgagactgctgggtattggggccacaacagtgaatagacagagccctactttctgagtatacagataaattaacaaagaacaatgaatgttgtcaagtagctcataggaaagagaacagtcctagtctaggaagtcaggaaaggcctctaaaaggaaatgacactgaaggtttgagatcaacctagacagataaatgttgaagtgagtgtggagtctcccaggcaaaggaaacagatgcgtgtgaatgtaagcaaatgcttggtgcagagcatacaagcaatgcaatagctggaaatacattagaaagataagcaggagcaaatcatgagaggatcttaggaaacatagtaaggagtttgtattttattccatgggcaataaaactgaagaagtgagttaccagtgcagcattttggaaagatagctgatggctacaaagtggttaatggattagagagaagtcagcttggaggtcaagagaccactcaggctgttagaatgggtggacagatgatagttataatggtggcagaggagagaaataatgagatagatttaagagatatttaggatgtggaatatatgaggtttggtaattggagaggaaggagtcaaggatgacttccagggctgacttactgttgggtggaacattagaggaggaacaggtttgggagaatggatgataaagtttgggacattaggcagggagaggatcactgccatggatggagggaggaattaattttatatttgtggaaggaaactatgcaggaaggagaaaaagatggtataagtagttaaattgaaggtctgatgccaaaaaattgagatttattttttctttgaagtagatgacaacactgcttagggtgattggggaataagaggagtgtaaacaatgttaagaaaagtagagatggcttaacaatagtcattgtgaaaaatgggagaactttccaaggaaataggaaattatcacaatattgaagcc

SEQ ID NO: 40674 - DNA, 1030 bp, Homo sapiens
agagggaatagaccttactgagcagttcaagcttaccggcctctttgtttacactttgagctactcaagcctcagcaatggtggacacccctcccccgtcaagctgcagcgtcacaggttgatctcagactgccgcactagcagtgatcaaggctctgtgggcgtgggacccgccgagccaggcatgggagggtatctcctggtctgctggttgctaagactgtgggaaaagcatatagtatttgatcaggagtgtactgtttctccaggtagagtctgtcacagcttcccttggctaggaaagggaaatcccctgaccccttgtacttcctgggtgaggcaatgcctcgccctgcttcagcttgccctctgtgggctgcacccactgtccaaccagtcctaatgagatgaaccaggtacctcagttggaaatgcagaaatcacccgtcttctgcatcagtttcgctgggagctgcagaccggagctgttcctattcagccgtcttggaagtgaccccctcttctatgtcttctttctcattgtctggtactggtttggaggcactcttctccatcaagtcatcttctgttaattcctctggtgtgctgtctaattgggttttgaatttctccaagatccataccttgccacgcttcatccccacccttttttctgtatccactgtctatttcattatttccttgactggcactgttaaaaaccctgtgaggtcatgcaaaacatctggacacagttttctcaaattttatgaatttgttttcttgagcttgatggttttcttggctttttcaataataactatgacatctttgatggtataatccctccaaactttcatgatgttctctgttgggattctcttccatagtgttgacagtcttccacagaataccatgtgtaatgagtcttaaatgtccttatgatctagagcctgaattagagctgtcatgtttgcgggcaagtggaccactttgacaccttcagtgtgaaactaatggggttctgagt

SEQ ID NO: 40675 - DNA, 1145 bp, Homo sapiens
ttggtcactgatcatgacgtacagctcttcttaacagtgatttgtagactagagcagcagtctccttgtttttggcacaagggactagtttcgtggaagacagtctttccacgggcagggggtgggggtgtgtggagtgggggatggtttcgcgatgaaactgtaccacctcagatcatcaggcattaattagattctcataaggagcatgcaacctagacccctcacgtgtgcagttcacaataggcctcgtgctcctatgagaatctaatgccgccactgatctgacaggtggtggaactcaggcagtaatgcttgctcacctaccgcccacctcctgctgtacagcctggttccttacaggccactgaccgttactggtctgcagctggggggttggggagtcctggactagagtactagaaatgaagtttgtatttgtgcaattactcacagttaatatgctgtagtaagtgaaatttgaatcatggtgttgggcagtgttgttactaactcgagtcactcaaatttgtgcatatgcgaagcatgcaaagtgagagcagcctataattcaaagatggttgaactttttgatcagttaaataaagatttggtagattccaatgagatttcaggtgcagggctacttggagtatttgatctgagcttttgaacacctgatacattttgtgtgataatgtaaatttgatttactcttacagcttccttaatccttttatgcacttccttagagaggacatctcacactaactctctagaacaaaatccctattatagtaaataaaaacagtgtttttaggagaataatggtgataattgtgaattcaccatgcagcagctgacattgaaagcaagtttttaaaaaacgttttgtataatgttgatattctagtaattggaagttaaatcaattttgattattttagttgggtaatttcatttttattgtcttcatacaagcaaatacagttggcccttgaacaacccagagattaggggcaccaaccctctgcattgctgaaaatctgtgtgtaacttctgactttccaaaaacttaactacttatagactactgttgaccagaagccttaccgagaacataaagtgttgtttaacatattttg

SEQ ID NO: 40676 - DNA, 1087 bp, Homo sapiens
acatctcatacaattagattaattccaagggtgcagggttgtttaccaacaaaaaaaccccacagtcaatataattcaccacactaacagagtaagagtaacatgatgataaatgtaggaaaaacatttgatagcatgatttttttaaaatcttgggcaggtagtaataggaactttgttagtcctagccagagcaatccaacgaaaaagaaagggcatccagatcagtaaagaggaagtcatactgtcgctgttcaccaatgaaatgatcatatacctagaaaaccctgaagactcatccaaaaagctagaactgataaatgaattcagtaaagtttcaggatacaaaattaatatacacaaataagtagcactgctatacaccaatagtgaccaagctgagaatcaaatccagaactcaaacccttttataatagctgcaacaaataaaataaaatacttagaaatatacctaaccaaggaggtggaagacctctacaaggaaaactacaaaacactgctgaaagaaattatagaaaacacaaacaaaatggaaacacatcacatgctcatgggtgggtagaatcagtattgtgaaaatgaccatactgccaaaagcaatctacaaaatgcaatttccatcaaaataccactgtcattcttcacagaactagaaaaaaaactcccaaaattcatatggaaccaaaaaagggcctgcatagctaaagcaagactaagcaaaaagaacaaatctggagacatcacattacctgacttcaaactatactataagggcatactaaccaaaacaacatggtactggtataaaaataggcacataggccgggtgcggtggctcacacctgtaatccctgcactttgggaggccgaggcaggcagatcacctgaggtcaggagtttgagaccagcctgaacaacatagtgaaaccctgtctctactaaaaataaaaaaaattagccaggcgtggtggtgggcacctgtaatcctagctactcaggaggctgaggcaggagaatcacttgaacccaggaggcagaggttgcagtgagctgagatcgtgccacc

SEQ ID NO: 40677 - DNA, 1059 bp, Homo sapiens
tgggaattgctttagtttttttttttttttttttttacatcattgggaaaccaaattacttttggaaccacatgtgttatataatagtcgggaaattcaaaaattggttattttatgttatagcaccgtataatttagccctttttaataaaaaagttcccccttattaagcaagttaggcactgatggattaaaagatgttaaattatatgtaattggttcattctatgcaatgtttaaattcttaaacagtgtatcatttgcagtattaaaaatactgagatgaatttgattttatatttgcttgatgattaaattataccttttagcatttagggtttcttttgttttttgatttttttaaaattcttttctagcctgacaaaggatcccatgaaaaagatggtgttgggattgctctaaaatgggaatcaggcagttttctcaggatttaggagataaagttattaggctttattttactttctgccactgagattttgatagttgagttagataaatgacattagaaatcaccaaggaataaggtagagaaataagaaaatggatctggtgttgaaactgaagtaaaaagaaaggatgaggaaaggttttctctctaaaaagcttttgcattgtacctaaaggcactattttaatcacaatgaaagccatttttcttttgcgatttggataatatttcaaaactagtctgtatgctgtacattcctttcatcaaaatgtgtgtgattttatacccttgaactctgagctagcccataaagatgaagaaatgagtaagatatgatccatccatgctttttcttgggagagtgaaacaagcaagcctatgattccataatacatttgtaagatattatttttctcaaatgtatttcttttccatgcacatacaaaaaagcagctccttagaatcatgattaagtagttgctttagaaagtgtatgtgtgaggcgggtggatcacgaggtcgggagttcgagaccagcctgacacggtgaaaccctgtctctactaaaaatacaaaaattagctgag

SEQ ID NO: 40678 - DNA, 1024 bp, Homo sapiens
acaggtgctggagaggatgtggagaaataggaacacttttacactgttggtgggactgtaaactagttcaaccattgtggaagtcggtgtggtgattcctcagggatctagaactagaaataccatttgacccagtcatcccattactgggtatatacccaaaggactataaatcatgctgctataaagacacatgcacacgtatgtttatcgcggcactattcacaatagcaaagacttggaaccaacccaaatgtccaacaatgaaaattatatttctatgacatataattttttagttaacattaatgtcattttaaaaatactgaaacacctttaaatgatcgtaaattatttcattgaccatgaatgtaaagaattaatcacttgtcattgattaggtaataaaatacttttaattcttatgttctttgtataacccataaagcaattattaactgttaatgtaattatttctgtgacatcttaaaataagcagctattttattttcctctgaattgttaactacaaggagtcctttaaacgttttaaataaactttacaggccattttttgagttctgaaatcagaatttagatagtgtacttttctgatttctcaattcataaaatcattatgacatctgatcttgggttatttttaatactttatatattgcttatactcatacatatatatgcctcattttgaatcaagagaaggcattctttaacagagagtatattatcaatattagcagtagtcatcaaaataaacaatttagaattctgtcaaacattttgctatggttagatttcagtagtttcattttccttgccttcttaaaagagggctttcaatataagatattgtgagatcttataaacagtattgtagctcattttatttttaatgttaaaatctatatcaggatttaaaagtatacccatgaaaaggttttttttaaaattaaaaacagattattaagattttagctaagttattcttaaaaattattttaaa

SEQ ID NO: 40679 - DNA, 1046 bp, Homo sapiens
agtagactagatgaaactttagaatgaaatgtggttagttttgcttggatcctcaaattgctagtgtgtgataccaagtgttaccaagaatgtcaaacagctggaactctcgtaagttgctgatgggggtataaattagttcaagcactttgaaaactatttgacaatagttactaaagctgtatgtatgtatgtgtatatataccctatgacccagtggtttactctctctagtcattccacatttactccataatacacattaaaatctttttaagatcaaatgtttgtcctcttttactcttttattttgagacagagtttcactcttgatgcccatgctggaatgcaatggcgtgatctcagttcactgcaaccttcgcctcctgggttcaagtgattctcctgcctcagcctcccaagtagctgggattacaggctcgtgccaccaagcctggctaattttttgtatttttagtagaaacggggttttaccatgttagccaggctggtctcgaactcctgatgtaaggtgatctgcccgcctcagcctcccaaagtgctgtgattacaggcgtgagccactgtgcccagcccttttactccttttaaggaacttatttgttccttgttgaccaccaaagttcaaaatcttcaatttgattgcttttttaaaaaatcttttattcctgcttctgttttcctttcaagcaagtgtccttatttttcctctcttattctcaacttgctgttttacttgtgatggacatcagtgctgtccagtacaactttctgcagtgaaggtagtgttctgtaactaccctgtccagtatggctattgagcacttgaaatgtggctagtgtgactgaggaactgatttttaaattatttacttcgttttaatttagcaacttgtggctagctggttaatttattggacagaacaggtctaaattactgtcttcctttaacctctttagctggttttgatttcattctctctacatgcataataatttaccttagtctactttagaccttagct

SEQ ID NO: 40680 - DNA, 1480 bp, Homo sapiens
tgtcaaagatcagtgactatttgcacgggtctgtttctgggctctttattcagtttcattgaactatttttctatttctccaaaactacactgtcttgattaccgtaactttatagtaagtcttgaggttgcatagtgtcagtccttcaataatgtgttggctctgctgggtcttttgactctctataataaactttagaatcagtttgttgatagtcacaaaataacttgctggaattttgattaggattgtgttgaatctacagatcaagttgggaagatctggtatcttgacaatattgagttttcttatctgttatggactgaatatatgtccccatcccccacccccaaattcatatgatgacatcctaacaatgtgatagtattaggagataggactttggggagatgattagatcatgagagtggagtcctcataaatgagtgccttttttaaaaagtccccatagcactctctcgagctttctgccatatgagaacacaacaagaagtctacagcctggaacaggactctcactagaacctgaccatgctagcaccttagtttcatagaattccagcctccagaactgtgagaaataaatttctgtcatttataagatgcctattctgtggtacttcattatagcagccccaaataagaaactatccacaaacatagagtatctctgtatttatttagttttttgatttctttcgtcagagttttgtagtttttctcatatagattttgtacaaattttatgagatttatgcttatttcattttgtggggctgcaacatatgttattatgtttttaatttcagatatgacgtattcgttgttaagatgttgggaagcagttgacttttatatattaatcttgtatccatgctgtaattgcttactagttccaagagttttttggttgattctttcagattttctgtgtagacaattatgtcatctttgaacaaagacagttttatttctccttcccaatcagcatacttttattttcttctcttgtattaactaagactttcggtgtgatattgtaagagggaacatcctttccttgtcttgactttagcaggaaaggttgtagtttcttgccattaagtatgatgttagctgtaggttttttgtaaatcttcttttcaagttgaggaagttaccttttattcctagtttgcggagagttttagtaatgaatgggcattggtttttgtcaaatgcttttccagtatcttttgataagatcatgcaggcttttcttctttagcctgttgatacgataaattatgttaattgatttttgtatgtagaaccagccttgcatatctaggatgaatctcacttggtcctggtatgtaattatttttacacattgttggaatcgatttgttaatattttgttgaggatttttgcatttttgttaatgagagatattggcctttagttttttggatttt

SEQ ID NO: 40681 - DNA, 1076 bp, Homo sapiens
tctgctttaagaaatactttaaaatttttttcacacaaaaaaataaacatttttgagttttgtgtgttatatgccaggctttatgctaatcattgtatcttatttgatcctcataaacagccagccaaagaaggcaggactagccacagagggacggagaagttaagattctttgcacagtttgtaaatggcagagccaagattcaaacccatctgatctgtggtcagactctgtactcctaactgctattttgtctacctttaactgctattttatctactctgcttttaaattttacagattaaatacaactagcaatatttttgcttgaggacacagtaaataaaaaattctcatccattgctagagtataaaataccaatattagtttattattttaatgaatgtaacactaaaactgaaagacctttcatttcatgttgactttctggtgtccctggtcattttttgagccttgctctctataaaatgagtaagctaactgttctcattgtcttcaggatagtcttggtaaagactgtactttggtgtgaaaatgtaatttggggaataccactgatatttttaaaacatttaaaatcttttcagggtaaaagagttcagaaatattttggtcaaaatgaggactcagattaggagaattattgtagggcattttttttttcaattggtaaactctcttcttagtcttttttctccctggtttcctgatccaagacactgtttctttttcataagcattcatctgcttttccatttcctttattccctaaataatatagaataaatggcttatcgtattttggcttggtgtatcactgattttttcatgaatgattctgttttcccatctatatccttgacatctttaaaatataactttgccctactgcatttttaccccttgtccttttacaaaaactgtacctatctatttgacttttgtgctttgcttcctttattcctggaattcatgcatcttgccaggaacataaagggagctagaagggtgcacgagaactaaggcttctagaacattgtactcaaactttat

SEQ ID NO: 40682 - DNA, 1065 bp, Homo sapiens
tctaatgttcttaaatttaaatttgcatggtaggtaacattcatttttctgattgttcatagcattatatcataattagaaatgcagtctcaatttgaactctcaggaacagtttatcctttatgctctaagtttctgttaggaaacatttttgtttatattgaatatttgaatgaagtatttgatataaaatttcggaagttttgaataagaaaagttttgtatttgtttttcggtagcagaatatgtcattactaatcgttgccttccattgaatggaaggatttaatatttaagatgaggattttaaccatcatatcagtcattccctaatttatctgattttattttttattcacttttttctttgcaatatcatgtatttaattacttgttttagaatccagtttttttttttctaacttgaatctacaagtatgagtaggcttcagttttgcgtgatctacctgaaggatgaaatttttttttttttgcaaatataagaaaccactgttggttacttgatttttatgttaaaaactgtttacatctcattatttaaaaataaatgattcactataaaaagtaagtgttgtatttttataattttccttttccatctttccttgtttaagcttgttgcatttacccttttgataaaagagaatcacataagcattgcagaggcagttttaaggtatagtaattgttttatggcacttggaagtggcgtacatataatataagttgatggtgtaggattagttgcttggttaggaaatgaccttgcaatttacaaaatggacacctttgtgccttggtttccttatatgtaaatggagataatatttagtaggtagtgtgcataaattcaggaaaggtgtgtttttgtagtccttttaaagaaaatttaaatcttttagctgatgaatgattaaaaaatttctgtgaaaaatacaatgaaaaaatgtcaggattttccatggcatattagaatggctgattaacattgatttttgctttggagaggtatgcctctgaactgaaaaatgtttctcatctatc

SEQ ID NO: 40683 - DNA, 1054 bp, Homo sapiens
ttgtacctagttgttatgctgtgttgtttttaattgttgtattgttattttttattgtttattttgttgaatattctggattcgtgctggttgaatcccaggatatggtgctcatggatacaaagggccaactgtacatgtaaacattacttactaaggaaacagacttaaataatgcctgagtgggtaaatggccttgttcaagatgggcacaaaatctgtaataggtggtttaaaaatacgctacatgaaatatagatgcacagtgacgaagtatataatctagcaatgatcaaaaaaaggttcagttaggtttctcttctcataaaaatgatagagcatttgacaactattaccatttgcttgtgtcagaggccctgatggaacagcaaattcttccttgccctacacttggagttaattatgtgaattgacagtggtttcaatgacaaggtcccccaaacatcagaactcccactttaagactctcatgtaaagctataattacatcagtatattgtcagtatatctgtagcacaaattatcttgtacgtaaaagacaatggattaaacaatattaaatagatttatcttcttaatttttgcctgagaaaatcttttatagtgaattgctaaagtgttctctcattatggagaatcagaccaaaacttcctatcccctgaaagagtttacagtaaatcactattactatttttttttttagagagaagggtcttgctctgttgcccaggctggagtacagtcacatgatcatagtcaatctcctggctcaaccaaactgcccatctcagcctgaccaagtagctagggctacaaatgtgcaccaccatgccagctgatttttaaaattttattttgtagagatgaggtctctctatgttgcccaggctagtctcaaactcttgggttcaagtgattcttctgccttggccaaatcattattaaatgatttactgaacgtgattctgtttggaaggagaattagaaaagaaaactctggccgggcatagtggcttaggcctgtaatcccag

SEQ ID NO: 40684 - DNA, 1043 bp, Homo sapiens
ggaagactggactcaattcagactcctacatgacaagtggagaggtatagccaaagagcagggtggggatcagtggatggaaagttaccaagaggaaacatccaggataaaaggtctctggctaaactgactgcatagtattaggctgaagggaggcctgggtaataagcttttaaaggtgggggatttttgccaagccaacttagcaagattcttgctctaacaggattctccaaggacagaggaaagcccaaggtcaggcctagtcaagcagaagactcacagagctccctccaacacgaccctgtaaaacttccctccagcctctttgcagacaacacctcctctactgtgctgccccaggcaacaacatgttttcataccttctgtaataaacctgcctttctttacccaaaaccatcttggttaaaaccttgactgcctgagagcagcctgactgcagtttttgtcaaaggaaagagtctttgtcacccaattgtagtcaattatagacagattactgtatttctttttttccccaaattcaaacattctttgaaatgcttttctatgtccatattgttctgttgacttaaaaataaacctttcatagctgagtcctgatgtctgtggaaaaaaataataaaccttccaacatatctattaaatgaatagatacagctatttagttggagagactggcatgaggggcagtcaggtgtcccattacaccgaacttgcaactcatacaccatctaggggccaagggaaaaactttcctttcactctctgaaagttcgctgaaaaatcaactcacaaaaggcaggttaattggagaaaatgtcatgggtgtgactagctagggccagtgtctcaggcagtcaaggtttttactaagagttctgggtaaagaaaggcagatttattacagaatgtatgaaaacatgttgttgcaacagacagcatagcagagggaggggctgtctgcaaagagcaggggctggaaggaagttttacagggtcttgcgggagggagctatgtg

SEQ ID NO: 40685 - DNA, 1044 bp, Homo sapiens
tgtcttggctttgcctatagagtaaattccaatttctttaatgcggtattttattcccaagatagttttccagttgcatttctacaccaaacattcactgctcttgtcacatcaaaatatatataaactctcaacatgccatgtctgtgtttttatgtgactgtgtccttacctgtagggttccatgagcctgaaaacttttttgttgttgttgttgtttatgcttatcaaaatcttagttatccttagctataaccccaaaatcttagtatcccttttttatttattgagccacttcatccagccaattgttttaatttttagctcccacaaataagtgagaacatacgaagtttgtctttctatgcctggtttatttaatttaatgtgatgatctccagttctatcctaataatgtttttgtgttaaaagctattttatctgatgttaccatagttgactcagctttcctttggcagtttgccttttactttcagcttttatggttcttacctttaggtggacctcttttaaatagcatggattttgtttttaatccactatggaaatacctgtgtcttttagctggaaaatgtattgttttactcgtcaggcctaagttggtaagtgtttcctccagaaggggtttgctttggcttctactggtagcatctaggtttcctttagtgcccttgaaggtcttagtgattgtggggtagcaggctcagcttccttaccttgctggtggcccaaggctcagtgtccttgctgaagtgcattattggcagctgctctcaggcctaccttgcctttccttaactctccagccataaggataccttatttggagtgagggtaaagtttgttatctcttgtgcaatctgggatgcttcaaggaatatttcctttctttttcctttttctctcttttccctctcctctgctgtctctctccctcttccccctttccttctcccttctcctctactctcctttccccttcctgactcctcccctcccctcccctcctatcaaagacagggt

SEQ ID NO: 40686 - DNA, 1084 bp, Homo sapiens
tgtcttccacaaagtttttgtagatagtattttcattatttcaattctgaatattttaaacttttatggtttctccttttactctgagtaatttagaaatatttaaaaattttcaaatatgtagagttttaattgtattgtggttagagaacatagtctgtttgataaaaaatttcttgaaatttcttgagacctgctagtatatgatcagtatttgtaaatgttccatgtgtgcttgagaaaaatgtgtactctctaattactggatagaaagttgtgtatatgctctctagatcatcctagttaattgtatcctttggatagtctatattttactaatcttttgtctgtttgacatatgaataattgaggaaagtatgttatcattggcctttttactccctgaagttatatttattttgcttcatatatatatttttcaagtacataacaggtttaggattattgcctcttcctggtgaattgaactttgtatcattatatagtgatcatctctacccctaatttgttttgaaattttttaatttttacagacacatagtagattcctgtcctttatcttcccccctgcctcccctccccctggcccccttcacctcctctgtagttctaaaacaccagaggaaggagggacttgggtttcgctggttctgcttaaaaacatcatggctttctgttccatggtcgggggcaagaagtgtgccgaggttccagcctgcgagggactgggtgtatagtagatgtgtatatttatgggttacatgagatattttgataaaggcatgcaatgtgtaataatcacaagagggtaaatggggtatccatcacctcaagcatttatcctttgtgttacaaacaatccaattatactcttttagttatttttaaaagtacaattaaattagtattgactgtagtcaccctgttgtgctatcaaatactacttcttatttattctttctattttttgtgcccattacagccccacttcctcctctctcctgcccctactacccttccccgcctctggtaaccatatttctactctctatctccataaagt

SEQ ID NO: 40687 - DNA, 1029 bp, Homo sapiens
tactttaccaactaagtttatgtaatattccaaattatttgttgttacttcagtggtgtttacagcatcttcaccaggagtagattccatcttaggaaatcactttctttgcccatccataagaagcaactccttatccaaacctgtttgatcatgagatggcagaaattcagttaatcctcaagctctacttctaattgttgttctcttgttattgctaccacatctcatttacttcctccactgataccttgaactcctcaaaattatccatgagggttggaatcaactttttccacattcctgttaatgttgatgccttgacctccttgaaggaatcatgaatgtttttaatggcatctagaatggtgaatcctctctacaaggttttcaatttactttgcccagatccatccgagaaatcacaatctatggcagctatagcttcatgaaatgtatttgttaaagaataagacttggaagtcaaaatgacttcttgattcacgggctgcagaatggatgttgtgttagcaaacaggaaagcagcattaatctccttgtacatctcaatcagagcttttgggtgaccaggtgcattgttaatgagcagtaatcttttgaaaggaatcttttttctaggtagtcagtccgaatagtgggcttaaaatgttcggtaagccatgctgtcaacagatgcactgtcatctaggctttgttgttacatttatggagcacaggtagagtagatttagcataattcttttttttttttttttttttttgagatggagtctcattcttgttgcccaggctggagtgcaatggcacgatcttggctcaccacaacttccgcctcccaggttcaagtgattctcctgcctcagcctcctgagtagctgggattacaggcatgcgccaccacacccggctagttttgtatttttcgtagaggcaggatttctccatgttggtcaggctggtctcgaactcccgacctcaggtgattcacctgcctcggcctctcaaagt

SEQ ID NO: 40688 - DNA, 1082 bp, Homo sapiens
tcttttgctgtgcaggtacttgttagtttaatcaggtcccatttgtttatttttgctttttttacatttgcttttgggcttttagtcatgaattctttgcctattccaatgtccagaagggtttttttaaggttatcttctataatttttatggtttcatgccttagagttaagtctttgatccatcttcagttgatttctgtataaggtaagagatgaggatccagtttcatcttctacctgtggcttgtgaattatcccagcactttttgttgaatagggtgtcctttccccactttatatttttgtttgctttgtcgaagatcagttgactgtaagtatttggctttatttctgggttctctattctgttctgttggtctgtgtgcctatttttatgccagtaccatgctgttctggtaactatagccttgtagtatagtttgaaattgggtaatgtgatgcctccagctttgttctttttgcctagtcttgctttggctatgtgggctcttttttcattccatattaattttaggattgctttttttttttagttctgtgaagaatgatgacggtattttcatgggaattgcattgaatttatggatcgcttttggcaatatggtcatctacacaatattgattctacccacccataagcaggggatgtgtttccatttgttcatgtcatctatgacttctttcagcagtgttttgtagttttccttgtggagagctttcacctccttggttaggtatatttctcccttggttagctatattcctaagtatttttattttatttttttgcagctgttataaaaggggttgagttcttgctttcattctcagcttggtcactgttggtgcatagcagtgctactaatttgtgtacattgatcttgtaatttgaaactttattgaatttatttttttatttttatttatatttatttaatttatttattttgagacagagtttcgctcttgttgcccgggctggagtgcaatggctcaatctcagctcactgtaacctccgcctcccgggttcaagcaattctgcctcagcctcctgagt

SEQ ID NO: 40689 - DNA, 1029 bp, Homo sapiens
tcatttgtgaaaatcaggagtgattagtgtaagtttgttttatttagaacttttggtggtggacacaagagaaaatccgtatgtaattttattgcatttactttgttggtattttgtaggtcaggaacctagcattgtttagactaaaaaatatccaattttagagatggggttaactttttcccctaatatatttattattgttaatactgctgtttaacactcattccaaaacttagtggcatgaaacactttttattatgcacatcgattctgcaagttgtgccctctgaaagggcacagtggggatagatttttctcagccatgtggtgactgggatctcagttgggaagactggaaagttgagattgacacacttgactcctgggggccaaaatagtttgatggctttttcaccaacatgtctggtacctaggctagcattgttgaccagactgccttcatgtggccttgcttgtgtataacctggcggcctcgaatgttaaagtgaacaaggacaaatctgcgtttttttttttgttttttgttttttttgacaaagccttgaaagctgagcattgtcatttccacagccttctattggttacaagtgcacactcagacagaggaggggaattagacttcacctcttgctgagggagttgacaaggttttggaagagcctgtggtacaaagatactgttgtgaccatctttagaaaagacattctgtcacaatagttaaatagttgccactgttgtttgttttgaatatgtattttataataacattagagatagaagatcaggaatccttttttttttgagatagggtctcactctgtcacccaggctgtagtacattggcacgatcatggctcactgccaccacaacctccccagactcaggtgatcctccctcctcagcctccttagtagctgggactacaggcatgtgccaccatgcctagctaatttttgtaaggactgggtctccttatgttgcctaggctaggaattctttatctt

SEQ ID NO: 40690 - DNA, 1040 bp, Homo sapiens
tatagagcaatttagtattcatcatagctcaaccaagaatcttttgtatgtaataatttgacttttataatgtgttttcatatatctcatgagaaatggtcttatataacctaattctgtcttatgtctctgtctttcctacttattgaaaagttcatattattgaaacccagtattctattgttgacctataataaaactataaatattattctctgacagaatgttatgaagatgtgccactgaataatagttgttctttccagcttgattatcttagaggaaaaatggcatgtgatttaatttatacgagagtaccttgtagactttatgggattatgaaaatgcaaagtattattattaatccttccatatattccatgttactcttcagaacttagaagtaaatattttttgctctgtagcaaaatgactgcaatcagtggacttttttccagcacctttgtaaagtctggagtctaaaaagcccagctctctgtaggccaggttcatttttggaagtgtgtagtgatctatctttcccactcaattgtggttttgtttgctattaacaaaaatatagtttttttgttaacagataaaattataagtccaaaccactagttcaaaatatttttctaaattaattaagatttaagatccctccccaccctattcacttaggtatctataactggggccattttctaaatggaaccttttcaggcattacttgtatatcaattattacttaataatccccccattttctttaggcttgagttgaaagaacacttatatttgattcagatggctttctaggactatgaatagagatagtgtttcagagtttcaacacacatcagtgtcctttcctttctgattttctgggacaaggacctggtaacatctgtttattcttactcaaaatgcttgcattaatttacctttgctaattatctcctaaagtattccctaatactttccttcccatctacagaaaaagtatgtgaaatgcttttgctgcatgattataacat

SEQ ID NO: 40691 - DNA, 1048 bp, Homo sapiens
ctcagccacccaagtagctgggactgcaggtatgcaccaccatgctcagctaattttttttttttaattttttgtaaagatgaggtctcactatgttgtccaggctgatctcaaactcctaagctcaagtgatcctcctgcctcatcctctcaaagtgctaggattacatgtatgaaccgctgcaccccaccacagtcatcatttcttcacataatctttctttcctttcctttctctcttctcttattgcagctctcattatacatatgtttataggcttcatggtgtcccatggatctctctccaaggctctgttcatttttcatcattctttttgttggtcagactggatactcttaattgtctgtctttaagttttctgattctttcttctgctgttgagcccctctggtgaaattttcattttagttattatttgtttagttttcctggtggtggaaggacagagtatataagggaattgagagtcagagaggctaagagggactgatagattggggagaatggaggcaacaccataaagagtagatagggcttgttctctgtcatcttccttctacataccattatattacctaatgcctagtattttgtagttcatataggcacacatagctgagaggattttaaggcggaaataattaggaatgaacatttcactcattactttaaaacttgggactatgattgcagaataactgttgaggatatagtgggatgctgggaaaataagttaaagagcttgtaatcatggaataaacttggaagaagtacaagtttacagaaaggaaaaacgtttaagaatgaaatgtgttattacctcgtctcactaaaaaagaatgtcatgtcacgttttaatttcatttgaaccttattgaccaaaggctaattataacctcatacctttgtacagtgctttacactttacattatgccacaacaggaagtaattctgggtgattaaaataccaggatcatgtgaacgtcagcatttttagcctgggattacagggaagttctaatatg

SEQ ID NO: 40692 - DNA, 1033 bp, Homo sapiens
agtattaattcacttaattttcacaacaatctgtgaaataaaattttaatatccccattttacagatcagaaaacagaggcaaaactaattatagctcagaaggcttactattatattaccttattttagttcttcagtaaagattgctaattagggctttaccataatatcacatctattagagatgtttgtctctaaattgttagaaatttatttaaataattgttacttaataattgttaaataattatattgtccgtatccattagggatttctctctctaatttaataactattacatatattgcccacagttccatgtttctgcttcacctgcatggaaacactccttcatcgcttttagtcataagaagtgtggtgcaaagaacacatggggtgggaaatctctagacctggatgtctgtctgccttagtagctaagtagtgatcagttccagtttcatctgttaaataagggaactattaggtctcttctaatcataccttctttaattctagaatgggagcctctccctggactgtgtgtactttgaggggcagaccttgtctttttatctctagttcctaccatagtgtctgacatagcaagtgtgctataaatgtttcttgaataaataaatgaatgaacagaatgaaaaaattctaccagtggtccacaattctaagtttgtgttacttttatttttaaatttttttttagagacaaggtcttgctctgccacccaggctggagtgcagtggcttaatcatatctcactgtaaccttgaacccctggcctcaagcaatcctgccttggcctcccaaagtgctgggattgcaggcgtgagccaccatgcttggacctatgtttgctttaggatgcaaattgtttgaaaaaattctaatttggtgattttccattgattataaagtggtatttgtggctgggcatggtggctcacacttataatcccagcactttgggaggctgttgggggggtggatcacctgaggtcaggagttcgagacc

SEQ ID NO: 40693 - DNA, 1049 bp, Homo sapiens
tccggccttctctaaaaattttatagttttccattttatattaagtcagcagtccattttgagttaatttttgtgcagggtgtaaggtctgtgtctagattcttttttttagcatatgcacgtccagttgtccagtgctagaactagcactgtatgttgaaacaacttctttctccattgctgttccttgttcctttgtcaacgaacatgtgagtatatttgtgtgagtctatttctgagctctctattctgttccattgatctatttgtcttttctgtcaccaatatcacactgtcttgattactgtggctttataataagtcttgaagttgggtagtatcagtcttccaactttgttcttctccttcaatattgcattggttattctgggtcttttgtctttccccatgagctttagaatcagtttgtcaatgtccacaaaacagttggctgggattttgtttgggattatgttgtatctatagattaagttagaaagaattgagctcttgacaatattgagtcttcttagacttatatgtggaatatctctccacttatttagatcttttttgatttgttttatcacagttttgtagtttaagttttccttatatatattttatacttttgttagatttatacctaatatttcttttttgggttgctaatgtgaatggtattgtatttgtaatttccaactgcaattttttattgctggtatataataaaacaattgactttttatattaatcttgtaccctgcaatcttgctataattgtttattagttccaggagttcttttttgttgattctttgggattttcttcgtagacaattacgtcgtctgtgaacaaagttttatttttgcctttccaatctgtatacctcttatttccttttcttgtcttatattagctaagacttgcagtctatgttgattaagagtggtgagagcaggctgggcgtggcggctcatgccagtaatcccagcactttgggagtccgaggcgggcggttcacctgaggttgggagtttgagaccag

SEQ ID NO: 40694 - DNA, 1535 bp, Homo sapiens
cttgcactttgtaatatgcatttgagaatcctctatgtcttgtcatggcttgatagctcatttctttttagtgctgaataatgttctatttctggacatatcaagtttatccattcacctactgaaggatatcttggttgcttccagcttttggcaattatgagtaaagctgctataaacatttgtatgcaggtttttctttagacatgttttcatcttctttgggtaaataccaaggagtgcagttgctggatcacatggcatgaacatgtttagttttgtaagaaactgccaaactgtcttccaaagtggctgtactactttgcattcccaccagcaatgaacgagcattcctattgctccacatccttgtcagcatttgatgttgtcagtgttttggattttagccatgctagtgggtgtacagtggtgtgttttaatttgcaacctctaatgacatgagagttgagcatcttttcatgtgtcctatttcccatctgcatttcttctttggtgaggtgtctgttcagatcttttgcttattttttaattgagttgtttgttttctttttctttttattttcttttcagagctcctctcaagaaaggagggctgtctgttttcttattgttgagttttaagagttctttgtttatttttgataccacttctttatcagatatttgttttgcaattattttctcccagtcaatggcttgtatttttgccttcttgaaaatatctttcacaaagcaaaagttttagttttactcaagtctaacttcccaaatttaaaaaatatttttaattgatatataatgattttacatatttatggggttacatgtgatactccagtacatgtatacaatgtgtaatgatcaaatcaggataattagcatattcatcacctcaaacatttatcatttatttgtgttgggaacattcaaaattctctcttcatggctgggtgctgtggctcacaccagtaatcccagcactttgggaggctgaggagcgtggatcacctgaggtcaggagttcgagaccagcctggccaacatggtgaagccctatctctactaaaaatacaaaaaattagccaggcatggtgacgtatgcctgtagtcccagttacttgggaggctgaagtgagagaattgcttgaacctgggaggcggaggtttttggccaggctggtctcgaactcctgacctcaggtcatctgcccacctcagcctcccaaagtgctgggtttacaggcttgagccactgcacctggccaattattattaactatagtcactcttctgtgctatggaacaccagaacttattcctcctatctgtgattttgtacctgttaaccagcctctccttttctccccatcccctggcccttcccaacctctggtaaccactgttctacttggtacttccatgaggttaacttttttttttttcctatttatttatttatttatttttgaggcagagtctcactctgtcgcccaggctggagtgcagtggcacaa

SEQ ID NO: 40695 - DNA, 1030 bp, Homo sapiens
agtagagatggggtttcaccatgttggccaggatggtctcgatctcttgaccttgtgatctgcctgcctcggcctcccaaagtgctgggattacaggtgtgagccaccgcacccagcctattttgtatttcttttgaaatagggtcttgctctgtcgcccaggctggagtgtagtggtgtgatcaggactcactacagccccaacctcctggactcaggtgatcctcccacctcagcctcccaagtagctgggactacaggtgtgcactgccatgtccagctagtttttgtatttttagtagagatggggttcgccctgttgtccatgctggtcttgaactcctgagcacaagcaatccaccggccttggcttcccaaagtgatgggattacaggcatgacccactgtgcccagcctttaatttgttttatattctttatataattgtccctttatctgtggttttgctttctgctgttttagttactgacttgtggtctgaaaatattaaatggaaaattccagaaataaagatttcgtgtttcaaattgtacccattttgagtagtgtgatgaaatcttgtgctgtccagcgctgtcctcctctgtccctttggggacatgaatcatccctttgtccagtatatctatgctgtagacactacctgtcacttagtagccattttagttattagattaaaaaacagtgtgtatagggtgtctggtactatcccagatttcaggcagctactgggggtcttggaacgtattccccatggataaggggggactactgcatatgtattggctctcacataatttaaaaagttgaattgttactttcagtgtatataaattcatactttattgctgcattagtttttccaatagtataaattggttcttttcgtaagaatataattagttaaggctcaacttttggtcttttcatacaataagctgcattatatataattaattgtgaatgttacctatatattgttgatatgctcattgtcaaatctaaaatc

SEQ ID NO: 40696 - DNA, 1023 bp, Homo sapiens
gccagaaatcacataggttacattaaagataaatgattctggtatatataatgtagtatataaccaaaacattgttcaggtctttagaagaaacattagaagaaataaaatatcattagaaaagtttaatactacagttagcaaaatgttatttcccttgaagtatgactttaggcaatattaattatatcacaaatttataagaggctggaaatgcaagatttacatctgagtttttcacctttaattaaaaatattctctgggtcgggtgcggtggctcacgcctgtaatcccagcactttgggaggccgaggcgggtggatcacgaggtcaggagatcgagaccatcctggtgaacatggtgaaaccccgtctctattaaaaatacaaaaggaattagccgggcatggtggcgggtacttgtagtcccagctgctcgggaggctgaggcaggacaatggcgtgaacccgggaggtggagcttgcagtgagccgagatcccgccactgcactccagccagggcgacagagcgagactctgtctcaaaaaaaaaaaaaagttatttgttcacctttttgttttgcaggaagagaggcttttgacccaactctcctttttatttaatatttatacttttgaatattttttgtagagaccgggtcttgctgtgttgccagagctagtcttgaactcctgggctcaagtgatcttcctgtctcagcctcccaaaatgctgggattacaagtgtgagccatcatgctggacctccaactctcttttactttaaaaaaaaaaaaaaatccggtttaaaagttgttctttttttgttttttcgttttacagacagggtcttgctgtgttgttcaggttggtcttgaactcctggcttcccaaagtgctggcattacaggctcatgccaccacacccagccaaatgttactcttgaagagaaacaagttcagaatatttctgaactttttaatacaagcaagaattcataaaataaattttcttcatta

SEQ ID NO: 40697 - DNA, 1048 bp, Homo sapiens
gcactttgagaagctgaggtaagcggatcacatgaggccaaaagttcaagaccagcctggccatcatggccaaactccgtctctaataaaaatacaaaaattagtcgggcatggtggcgtacgcccgtagccccagctacttgggaggctgaggcaggattgcttgaacctggcaggcagaagttgcagtgagccaagatcgcatcactgcactccagcctgggcaacagagcaagattctgtctcaaaaaaaaaaaaaaaaaaaaaaaaaagcgagaatatactccagaaatagatggagaaaagaatccttcccacagtgttagaataacttgacggggggagaaaaatgaacctcaagccctaccctacatcactacaaaaacttacttgagattgataatagacctaaaaacataaaagcttaaacattttatgagaaaacaataccaccataacaatctggaggtaggcagatttatttagaaaaagtccatttaaaaattgataaattaagactccagtggaaacttctgctcaaaacactataaaaaaaatcaagagtcaagacacacaatggggaaaatatttgcaaaataactgacaaggaattttattcaaaatacatagagttcctataacttggtaataaaaacgaacctaatttaaaaatacacactcaaagacatattaatggccaataaacacgagaacgtgttcattagtcagagaaatgcagactgaaaccacaagataccactacatgcccagaagtcacaatatttgtgtgcaaatgttcatagcagctttactcacacttgccaaaaactagaaaccaataaaatgttcactaacaggaaaacagattaacaaattatagtatattcatacaatcgagtcctactcagcaataaggactgttgaacctcaacaatgtttacgctgaaagaattacaaagctccagggaaggaaataaaaatgaaccctagtctatgatgaaaacatttgagcttggtggtggtgggagattgcttaattgcctgggta

SEQ ID NO: 40698 - DNA, 1028 bp, Homo sapiens
ccggagtaccacttatccagcttgtaaggcgcccagtggaagtcctgcaggacccaactctgagactgaatgctacttactatattaccaagcaaatccttccacccttggcaagaatcttctcacttattggtattgatgtcttcagctggtatcatgaattaccaagggtaagcttaccaaatagtacatgtgctctaactatggagagatttcactccaaattttcagtagaactaaaggttttatgtgctattgatatgggagtgctgggaagggaagagtgtggtcccgtaaaatgatacggaaagcgggaggggaagtgctgggtagagaaaggtgggtccctggctagggctccacccccacagatctaggtgaggataggcactcctgctttcatgcccaaatgttaccattttccaagaccaccttggcctgccatgccccaatcctgggcctataaaaacccgagaccctagtgggcagacacacgagcggctggacattgtgaggaacacttcggtggaagacccaagcagctggtcgtcaagaggagcacgccagcagaacagcacaccgagaggcactggcatgctggcaggccattgaccggcaggacaaggtggagtttggccagggcagtcagagaagagacggggccacctagaagcccaactccaggggaaaaccatctccctgctgattccaccatcagatgagagctacttccactcaataaaacgttgcactcattctcctagcccacgggtgatcggattcttctggtacaccaaggcaagaacccggaatacagaaagccctccatccttgagacaagctagagggtctaattgagctggttaacacaagccgcctatagacagcaaactaaaagaataccctgtaacacacacccactggggcttcagctgtaaacattcacccctagacactgccatggggccagagctccacaacctgcccgtctgtgtgctcccctagaggtttgagcagcggggcactga

SEQ ID NO: 40699 - DNA, 2067 bp, Homo sapiens
gaggacaaaatcattagagaagaggagttcaaggaatcaaggagtatctttattttcttcccacataattgttacacttactgcatataaaataacagtagtccttttcctttaaaattcaagtagatatagtgccattcacctctggaatttagtactgcagaggagaaatctaaggtccagctaattaatatatttgattattgctcctgtctccatattaggctttcctttaggaacctaattatatattaacattctgttctctgttccccatatcttccctcttctcattttcatgttttcatcctctttatctgcatgctgagacatttccatattcctaacttgacttttagtagaactatttagtagaactgttctgctatttactgctttcaatatgagctttcattctgttagtgattttataatccttcctcatttaatcttgtggccttttcctcattctattgctctctacctttttacaacctatgaggggcatctgtgtatatgtatacctacacaagtacatacacacactgtgaagtgtgctgcattgtagtgccattgttctgaagattgacagaaattgtagataaagtaagaccaatttgggtcactgcactgagataagattaacattcaatccctattttgtacctcctggatcacaggagtggaaaagaaagtaatttaaaattataatgtaatatacaaatgtgaagtgctgtttgaactatttctgaatccgaaactgacctaagaatggggactactggttccttaatttccattttgcattgaaatacctgccattgtctagattgcttttgtcttgtagatatttcagagaaatcatctagctggaagtacatatttattaatttgggcccttttacagtatcctttacccattaacactgctttcacttacgtatttggaacatggggagacatttctgacattttagtattttgcttttggaatgaaattgagtggctctataatgtctgtgtagtggggtctagtaactaatgtaattattgggaggagaatgcctgcctttaactagataactcacctcaaatctgtggaatcccattaatcagcatgtcatcaagaaccaaaaagtaagtatggaaagaacaaaaaattaatttgcttgacaatgcttctgtcaatatgtatattatcatggagtataaaaatggtaagaactagaatctcttaaaataagtattatatgaccaagttgaatctcatcaggtctgctttctctaattaaataattttccaatttgttatgaacatttctgtccagtaggctctacatagttttgaattatgattcagttgtactgcacatcagttttacaagtagctttaatatctactatgaaaagtttaaagtgatattggtatcttttagaaccaaatttgctacataaatgtaagcattattataatggtgtcttgcctttttttttaggtggctctaactaactacacctttgaaaatgtgagctttcatgttcttcatcagcgttttcccctctttacctttcgagtcttgtcagactggtttgataacaagacagatctatacaggtactgttctataactctgaagaaggtaatataaaatcatcattgagatgtaatttatatgtaataaaatgcacacatttaaagtgtattgttcaggccagttgcggtggcttacgcctgtaatcctagcacattgggaggccgaggcgggcacatcacctgacatcaggagttcgagaccagcctggccaacatggtgaaaccccatctctactaaaaatacaaaaattggccaggtgtggtgatgcatgcctgtaatcccagctactcaggaggctaaggcaggagaatcacttgaacccaggaggcagaggttgcagtgagccgagatcgtgccactgcactccagcctgggcgacagagtgagactctatctcaaaaaatatataaataaataaagtgtattattgttcaatgactttgaaaaatgcatttatcttgtactcattact

SEQ ID NO: 40700 - DNA, 1336 bp, Homo sapiens
gataatagtgaagataaaagtaaaggtaggaagaaagcgaatcccttcctatgacccttgaaagcagagttactcttgggaagattttatactcacttcccaccaccatcactattttcatcagacaagggataggaaaagcagtgttctgttctcaagattgaggggccagtgaaagacaaatatttgtttagcctctaactaacttcccagttgtacttgaggttggtttttctgtggtgctgaaataatggagaactgtataaagttccattgtattattcattaactaggtttctaccttgggagccagccaccatttcagtacctttttttggtttgttttttcttttttaaagttttctgagttctaaacaagccaatattttcaaaaagctttgggatgcattctctgtataaatttatctgttcataaatgtaggattatctattacatactcttgtgcacagagctccttaaaaaatctcttttgaccatttggtagtcggtcctcagtccgatagtagaatcttgtccaagtttatgaaaaaaaatttttaacaaaaatattttaatttaaaaataaaatcattaagtggataatttgcattttctcaacagtgtagctcttggtagccatggactctcttattaaatgcttcactttgtagaaacttaaggattctgcccattgctaggtttagggttttagatgcctaaagcaagatagaagacattctttggatcctgatatacagataaaagctgtccatgagcatgttgttatactcacccttttttgttttgcttatatagttgaacttcatcctataaaaactaaatcagtattctacatgaaaaattaagatgatattctacagacttgtcatcagattgaatcccagatgggttaacataaaccattctgagaattagaaaaccaaaacatgtgttttctacaaaacaaaattaaatgacagagcatcaaaaatagtatgctactacccacgactctgaaggaaaaaaagtatttttactatttatagcactggtgactagatagattcccatctatttgagtcttgtcattgtcagtcctaccttttatcttctcacagaggttgtcatcaacatgtcagatgctttcagtatccacacttcttttatttctgcaagcaactcagagaaagaaatatgtaagagtttcagtcaatactattttgtgtaccagcacatgtccagtaatgtccctgggcttgtatgcttgccttttccttgttgggtatattcccaatgataggattacctgccaacattgagaattttgttagtcat

SEQ ID NO: 40701 - DNA, 1049 bp, Homo sapiens
tccacctcgctgctggtctcccacagatccaagagctgaagaaatcatggctgctgcagaaaaagaggcaatgctttttaagggtcctaatgtatataagaagactgttaattctcgtataggaaaaactagtcgcgcaagagcacagattaagaaatcaaaagcaaagcttgctaatccctctatagttactaagaaaaggaacaaacgaaatcagacaaataaactagtagatgatggaaaaaagaaaccaagagcaaaacaaaaaacaaatgagaaaggtacatcgagaaagcatacaacacttaaggatgaaaaaataaaatctcagtctggtgctgaggttaagtttgtactgaaacaccagaatgtgtctgaatttgcaagtagttctggaggctctcaactactttttaaacagaaagatatgccactaatgggctctgctgtagatcatcccctttctgcttccctacccactggaattaatgcacaacagaagttatctggctgcttttcttctttcttagaaagcaagaagtctgtagatttgcagacattccccagttcacgagatgatttgcatccatcagttgtttgtaattctataggacctggagtctcaaaaattaatgttcaaaggcctcataatcaaagtgctatgtttactctaaaggaatcaacgttaattcaaaaaaatatatttgacctttccaatcatttatctcaggtagcacagaatacacagatatcttctggtatgtcctcaaagatagaagataatgcaaataatatacaaagaaactatttgtcatcaatcggaaagttaagtgaatatcgcaattccctagaatcaaagctggaccaagcatatacccctaattttttgcattgcaaagacagtcagcagcagattgtgtgcatagcggaacagtcaaagcacagtgaaacttgttctccgggaaatacagcttcagaggaaagccaaatgcctaataattgctttgtaacttccttgagaagtccaatcaaacaaatagcatgggagc

SEQ ID NO: 40702 - DNA, 1037 bp, Homo sapiens
acaaggaagatttaattgaagacctttcacagacaaacaaaaatacagaaaaaggtctagataactcagtcacttcttttacaaacgaaagcacttattctatgaaataccctggatctttaagcagtactgttcattcagaaaattctcataaagagaatagtaagaaagagatcctcccagtatcttcctgtgaaagtagtatttttgattatgaagaagatattccatctgttacaagacaagtaccaagtagaaaatatacaaacattagaaaaatcgaaaaggattccccttttatacatatgcaccgtcaccctaacgagaatacattgggcaaaaattctttcaacttttctgacttaaatcattcaaaaaataaagtatcctctgaaggaaatgaaaaaggaaacagcacagctctgagtagtttattcccttcatcatttactgaaaattgtgaattactgtcatgctcaggggagaatagaactatggtgcattctcttaatagcactgctgatgaaagtggactaaataaacttaaaattaggtatgaagaatttcaagaacataaaacagaaaagccaagcctcagccagcaagcagcacactatatgttttttcccagtgttgttctttctaactgtcttactagaccacagaaactatctcctgtcacatataaattacaacctggcaataaaccatcccggttaaaattgaataaaaggaaacttgcaggtcatcaggagacttctaccaaaagtagtgagactggatccacaaaagataattttatacaaaataatccttgtaatagtaatcctgagaaggataatgcattggctagtgatttaactaaaaccactcgtggagcttttgaaaataaaacacccacagatggttttatagactgtcactttggagatggaacgttagaaactgagcagtcctttggactatatggaaataaatacacacttagagccaaacgcaaggtaaattatgagactgaagacagtgagtcaagtttt

SEQ ID NO: 40703 - DNA, 2390 bp, Homo sapiens
aaaaattctaaacttcatgtggaactacaaaagagcctaaatagccaaagcaatcctgagcaaaaagaacagttggagacatcatattacctgaggtcaaaacgatactacaaagctttagtaaccaaatcagcatgatgttggtataaaaatggacacacaggctgagcaaaataatactacaaagctttagtaaccaaatcagcatggtgttggtataaaaacagacacataggctgagcatggtggcttactcttctaatctcaacagtttgggaggctgaggtgggaggatcacttgagccaagaaatttgagtccagcctgtgcaagatagtcaaagcccatctctacaaattagccagtcacgatggtgcatgcctgttgccccagcagcttgggaggctgagatgggaggatcatttgagcctggaagctcaaggctgcagtgagccataatcatacactgcactccagcctggatgacagtgagaccctgtctcaaaaaaaaaaaaaaaaattgtaggacagatactctgggacattggtctgggaaaaaattttatggctaagacttcaaaagcacaggcaaccaaagcatatagacaaaagggactgtgtaaaagcttctgcacagcaaaggaaacaatcaacagagtaaagagacagcctacagaatgagagaaaatatttgcaaactattcatgaaatgagactaatctccagaatatgtaaggaactcaacaggaaaaaaaatagtttcgtatctgaatagacacctctcaaaaaagaagacatacaaatggccggcaggtatattttttaaatgttcaacatcactaatcatcagggagatgcaaatcaaaaccacagtaagcaatcatcttaccccagttagaatggctgttacggaaaagacaccaacaaatgctggtgaggatgcaaggaaaaggaaactcttatacactgttggtgggaatgtaaattagtacagccattatgcaaaacagtatggaggtttctcaaaaaccaaaaactagaactaccatatgatacagcaatcccactgctgggtatttatccaaaggaaaggaaatcaattcaatatatcaaagatagataacctacacccccatgtttattgcagcactgtttataatagccaagatgcggaatcaaccttaagtgcacatcagtggatgaatggataaagaaaatgtggtatatatacacaatggaattatattctaccatattttttatgaaaatgaaattctgtcatttgcagccacatggatagaattgagatcattatgttaaatgaaataagccaggcctagaaagacaaatatcacatgttcttactgatgtgggaactaaaaaaagttcgtctttagccaggagtcgtgatgcacccctgtagtctcagctacatgggaggctgaggcaggaggattgcttgagtccaggagattgattccagtctgggcaacatagcaagatgtcatgtcaaaaaaataaataaaaagaagaaaggtagttactagaggctgggaagggtgtatgggaagggttccaggaagatacgaagacaggctggttaatggatatagacatacaattagacgaaataagttctagtgtttgatagcatacaggagtgactgtagttaacaacaatacattatatatttcaaaataactagaagagaagatttgaaatgttctcgacacaaatggtgaataatgtttgggctgatggcatcctaagtaccttgattttgtcattacagattgtatgcatgtatgaaaataccacatgtggctctatgagtatgtacaaatattatgtatcaataaaaagggatctgtaatttatgagtaataaaattttttaaagaacatttaccagccgggcatggtggctcacacctgtaatcccagcactttgggaggccgaggcaggcggatcacaaggtcagatcgagaccatcctggctaacacggtgaaacccagtctctactaaaaatacaaaaaaaatttgctgcgcttggaggctactcgggagactgtggcaggagaatggcgtgaacctgggaggtggagcttgcagtgagccgagattgcgccactgtactccagcctgggcaacaaagcgagactccatctcaaaaaaaaaaaaatttaccttctaaaaagtaattatatgaaaattgaaagtagaatttattccttttacctttctattcctaggtaatacattgcatgcaactggatcctgcaagaatcatttatcaggaaattctcttgctgatactttatttcggtgggaacaagatgaaataccaaggttagttaatgttgtaaaggaaatgaaaattttacatata

SEQ ID NO: 40704 - DNA, 1030 bp, Homo sapiens
caacaaaaaaagaaaactacaggtcagcatcactgatgaacatagacacaaaaatcctcaacaaaatactaacaaatcgaatccaacaaaacataaaaaaaaaaaaatacaccatgatcaagtgaaatttatcctagggccaggcacagtggctcatgcctgtaatcccagaactttggaaggctgaagtgggtagatcacttgagcccaggagtttgagaccatcctgggcaacatggtgaaaccctgtctctacaaaaaataaaaaaattagctgggtatggtggcatgcacctgtagtcccacctacttgggagacttaggtaggaggatggcttgagcccaggaggcggaggttacagtaagccaagatcatgccactgtactcaagcctgggtgacagagtgagaccctgtctcaaaaaaaaacttatttcaggggtgcaaggattgttcattatatacaaatcaataaatgtgatacatcacatcaacagaatgaaggacaaaaaccatatgatcatctcagctaacacagaaaagttatttgataaaattcaatgtcccttcatggtaaaaactcttgataagttaatcatagaaggatcatacctcaaataatgaacatcatgtctgaaaaacccacatttaacatcttactgaatggggaaaagctgaaaacctgccctctaagaactagaagaagacaggatgcccatttttaccactcctgttcaacatagtactgaaaattctagccatagcaatcaggtaataaaagacaccaaattgggaaaaaggaggtcaaattgtccctttttcacaggtgacatgatatatatggcaaaacctgaagactccaacaaaaaactcttagaactgataaatttagtaaagttgcagatttttttttaaaacccacaaaaaactaatagcatttctgtgcaccaataacaactagctgaaaaagaaaacaagaacacaatcccatttattaaggctaccaaaaagaatagtaataaatttaacca

SEQ ID NO: 40705 - DNA, 1763 bp, Homo sapiens
tttttttgtgtttttagtggagaggggtttcaccatgttggccaggatggtcttgatctcctgacctcgtgatctacctgcctcagcccccaaagtgctgggattacaggcgtgagccaccatgcccagccaaggacttaatgtttagtataattctgggttccgtgaaagatgaaattcagagcacccacatactccttgttgaagaggcatctgccttttgttatgtacttacacacaatgggaagtagccagctccacagagttttgccatggtgtcaagttttggtggcgctttttaaaataacttttgcagcttctgaattagggaacatcaatcaaattggaaaattcaaactctgaaatttttgaaacctgtgtacatgggcttgttcagccacagacgatcttatttctcttggacttgttgtctaacttcagtttgccatgatagtaagagggaaccttcagaggaggggaaggggagttgttgtttaaagagtatgaagtttcaactagacatgatgaataagttctggacatcagttgtactgcatggtgactgtagttgataatgtattatatacttgaaaatcgctaagagattagattttaaatgctcttaccacaaaataataagtatgtgaagtgatggatatgttagctcgacttaatcatttcatggtgtatacatatcaaagtttcatgttgtataccatatatatgtacaatttttatgtatcagtttacgttaatagagttgaaggggtagggatattttctttccttaaatctatatgttacctagaaatacctaataccctgactcctttaagaatccaaaatggccgggcgcggtggctcacgcctgtaatcccagcactttggaaggccgaggcaggtggatcatgaggtcaggagatcgagaccatcctgattaacacggtgaaaccccgtctctactaaaaaatacaaaaaattagccgggcatggtggcaggcacctgtagtcccagctactccggaggctgaggcaggagaacggcgtgagcccgggaggtggagcttgcagcaagccgagatcgcaacactgcactccagcctgggtgacagagcgagactccatctcaaaaaaaaaaaagagaatccaaaatcatttagtagaaggtttcaaaataccataactttcactaattttataaaaacattcttgaaagcatcctgtatgtggaacttctagaagtatagtggaaaagcgcctggactgaagtcacaagttcttaattagaccactaactagatgttgaaaaaagctgggtttctagtaccagctacctacctctggacttcttttaggagagaagccactaattttaatgctaaatccactgatttgggggcattttctcacaatttaacctaatcctaactaacgggagttgtagtagactggtttatctctaaagactttacagctctgtatctccacacatttgtgtgaggtagagctagcggagggaaataaatagaagtggtctgtatcttgtcaagataaagcaaattacagaactacaaattttatggtaataaaagacatactatttccaaaaagcagttgactctcgtgttcatttttacacatttctctttccttatttaacttttgagttttttattttatcctgtttctttcattttctcttatatcattcttattctatattagagctgttagtgctatgccaagaattccttgtgttgtgg

SEQ ID NO: 40706 - DNA, 1077 bp, Homo sapiens
gtgtcttccccataggttgaatagattaaatcagaatcattcttgttgatatttgcatatgtggagtcataatgcggtgcataagaactgtagggcccataattcaaatataacactggagtgactttgttcttttgtcctctttgaacccctgcaaagtattcacaccagactgaagtcttccagttgtcattcccagtctcacagggcagtagcctggctctcctacaatgagatccacaggatggagaagtcccaacattgttgttccgtctggttttcttctttccaatttgcactgactgttcacaagccgcctggtcagctttcctccagattccttcacgatgcggtcaagctgctcctgcgctctctctaaattattgcttttaaacttatcttcaagcatgtctttgtctttctttttattttctttgctgggactcttgaaggcgtgtgctttggcatctccagagtcctctctcttctcggccagcagcctctgtcctccccactctgcgaggtgtctgttctgtcttcctgcttttgagttttctgcaagtcagccatgaagtctatgctctgcttcaggctctgaattctttcatgtctaagaattttcatccccgagtgcaaccgcttctttgcagctttataataaatggtctctggtttattgtaaatcatggcattagtacacattagtttgaaaatatcctttagtttttctatggactggtagtcattgttcttgatcttttctttcatttaaaatccattgggtgtttaatgatcatggagtagccaggagcagtaaaatcagtcacaggaaatgaaagaaagcacttggatcttttctctgcaattgtctcgccagttgattcaaagcttcttgaaggggtggggtatctgttctacttcttcttgtttggctaaagtgcttgtgagaggcttctcaccgggcaagtctaatcccacaggggcgtgacactggaggtctttttctgcctcattctccaccccgtctcaatctcgcttctttttatcctccttaactcttatctgttttctcccctt

SEQ ID NO: 40707 - DNA, 1027 bp, Homo sapiens
tgtctcagatatgatttgtttcggagaatgttccatatgctgatgaaaagaatgtgttttctgcagccatgggtaaaatgttccataaatgttgattaggcctgtttgtgtactgtgtagcttaactccagtgttctttcttgattttctgtctggatgttctgtccattactgaaaatggggtgttgaagtcccctactattactgtattgcagtctgtctctccttttaaatgtattatttgctttatgcactcagatgctctggtgttgcatgcatagatatttataattgttatatcctcttgctgaattgacccttttatcaatacatagtgaccctctttgtttctttttacagtcttgatagtctgttttatctgatacaaatatagctactcctgcttttgtttccagttgcatggaatatcttttttcagcctttcactttcagtctgtgtgtggctttataggcgaagtaagtttcttataggcagcatatagtttaactcttgcttctttatctgtttagacagaattcattctgccttgtgattagagaattgagtccatttgcattcagtgttactgttgccaagtaaacttactactgtcatttcattgcttgttttctgttgttttagaactccttccttttttctttttcttactgtcttcctttgtgattaagagattttctctggtagtatgttttaattcattgctttttagttatagtgaatctgttataggtttttgcattgtggtaaccatgagactacaaaaacatcttaattacaaaacaaagaatagaaattttttttaaaaaccctctttttttttcctcaggtcccgctttattacctaatacaagtccaacctctggaacattcaaattcactgttgcaaagtttaattaaaaacacaatttacaaatatttaacatattctaaaaagcgtttctaagttaagaatgaaaaagtatgtacataatatataatcaaatacaggtggcctcaacttccacc

SEQ ID NO: 40708 - DNA, 1119 bp, Homo sapiens
aataaaatccacatataagcaggtatctacaatgcccaccatctatttaaaaattactagatatggccgggcgcggtggatcacaatgtcaggagtttgagaccagcctggccaatatggtgaaacctcgtctctactaaaaatacaaaaattagctgggcgaggtggcggcgcctgtagtcccagctactcggaaggctgaggcatgagaatggcttgaacccaggaagcggaggttgcagtgagccactgcactccagcctgggcaacagagaaagactctgtctgagaaaaaaaaaaattactagatatataaagaagtaggcaaatgtaatctataaaaaggagaaagtcttgtgaataaaaacagacccagaatgcaatatgtgatcaaattcaaataaaaggactttaagataggtatttaagtgtatttagtaattttaatgaaaacacaatagaacaaaacttataatacaacatagccgcctgagcgacaaagtgaaatcctgtcccagaaacaaaaaacaccaccaccgatcctaaacaggacacacacacacacatacacacagagagagagacaccatggcacatcataattgaattgttgcaaattaataaaaatctttaaagcagccaagaaaaatctctcaaaccatatacagggaaatcatcataagaacaactacttaaagagatgtagttaataagacaactgataaggcagaattgaatctaaaattttttcaggccaaaagagagcaggttaggggaaaaaaatgagcaatgaataagcaggaaaaatagaaaacaaaatggcaaaacataacctcaaaccttattacttaaataattggattagttttacgtggacttattattctaacttaaaatgcaaagcactaccatatgcagctcataagaatcatacttaatatatagacagtttgaaagtaaaacagtggagaaatgtactttgcaaggaaaagtcactaggaacactggcgtatctaaagatcaggcaaagtagacttcatggtaagacatattatcagaattaaagagggatatttcaaaatgataaaaagttcaagttttcaaaaagacaaaaagttc

SEQ ID NO: 40709 - DNA, 1153 bp, Homo sapiens
gtttttttctttaattatccaaatgtacagcttttctcattactttcttcctctccataatatgtaatagtttgctcttgtagtaccattttaagcccatacttttctaccttttttgttttgttttgtttttttggtaattgtatatagcacttaccctccactgcaggaacttaagttatacatatataagcctgcttaaagatgtaacataggatactaatgttttttggttttttttttttttttttttttttttttgagacagggtcttgctctgtcacccgggctggagtgcaatggcacaagcatggctcactgcagcctcgaattcctgggctcaagcagtcctcccatctcagcctcctgaatagctggaacaacaggtgcgcatcaccgtgcctggctaattttttaatttttagtagaggtagggtctcacaatgttgcccaggctgggctctaactcctggcctcaagcatttctcctgcctcagcctcccaaagagctgggattacaggcatgagccaccacacccgcacccagccttgttcatgtattttcaggctttttctgtgcttcattttggacggtttctatggctttgtcttcaagtttattaatctttaattccggcatttctgatatattcttagttctactcatatttttcctcttcatttatttttcatccgtcatgagatgaaaattttgatttatgtttgtttattgtccacatctctatttaatatattcaggcattcttctacttcttgaacatatagtttacagttgcaataactattttaatatctttgcttactaattccatcatctgtatcatttcctggcttgtttctattgctacatttttttcctcataatgggtcacattgttctgtttattacatgcctagtttttttcactggattccaggcatggtggattttaccttgtgttctggatatcattgtatttttagaaatattcttgagctttattctgggacacttaagttatttggagatagtgtaatcctttcaagtctttttatgcttagttgggtgggaacagaacaaacttaactagggctaatgttgcccatctactgagtcaataatcttatgattattctactcgatgtcttgtga

SEQ ID NO: 40710 - DNA, 1034 bp, Homo sapiens
taatagcctcccagtttgtctctaactttacctgttttcaaattcagcccttatatattttagattatagccctggcctataatctaaaataaaactctagacaacataaagttttttcatgatcgagcacctgcctaccttttcagcatcatcttctgcttctccctcaagcactttgcttttcagtctgaactgcttgctcttgctcaaatgtatgtacctcatgactttgcatatgctgttagcttaatgaaagcaggtaccttggctgtcctaggtgttcagtgtctggtgtggtgtcatcccttatgaaatgactgaatgccattcctctggatggaatggccttttctactggtgaattcttcacacttcaagactgtcctgagacatcatctacactgtgaagcctctcccaactacccttagtcatatcagtcctttgtgccaccattgtactttgtatccctgttaaagcagttatcacattaacttgcaagattgtttgtttttaacatgtctgacttgcctcttagagtgtgcgtttcatgagggcagattcagtatgctgccagtctttgtgtccttagtgcttattgcctacacatgcattaaaaattagaaaaaacagccgggcgcggtggctcatgcctgtaatcccaacactttgggaggctgaggtgggtggatcacctgaggttgggagtttgagaccagtctgaccaacatggagaaatcccatctctactaaaaatacaaaattagccaggtgtggtggtacatgcctgtaatcccagctactcgggaggctgaggcaggagaatcgcttgaacctgggagatggaggttgtggtgagccgagatcgtgccgttgcactccagcctgggcaacaagagcgaaactccatctcaaaaaaagttagaaaaaactcaggaaggaaggacaaatacatgattccacttatatgagatacctacaatagtcaaatttatagagaacaaacaatagaatagtgtttactgagggtgggat

SEQ ID NO: 40711 - DNA, 2420 bp, Homo sapiens
tgaaacagtctcgctctgttgcccaggctggagtgcaatggtgtgatcttggctcactgccaccttcacctcctgggttcaggctattctcccacctcagcctcctgagtagctgggattacaggcatgcaccaccccacccagctaattttttgtatttttagtagagacagggtttcaccattttggccaggctggtttcaaactcctgacctcaaatgattcacccgcctcagccctcccaaagtgctgagattacaggcatgagccactacgcccgaccagtcatccaagtttttaaaagtggcctacctgtctgcttcattatgtaaacagaattctataaaagtagaaaacttttaacaattttttgagaatgaccaacagcccacaccaggctaaatattatcttacatgctacatttttaaacatcttacaaggatttcttcaaatgagaaaaactaatacagaggttgttttgatctgtactcccaccagcaataggagactttttccatgtcttcatcaagattatgttctcaaatgttttgatcattgccaatctaatagacataaaatggatctcagtgtagttttaatttgcattccttttattatgagtgagattgagtgttttttcatatgcttgagaggcccttatggtatttccttctcagcgtactgtttatcttttacccattttcctgttgagactcttggtcttttccttactgattccaaagagccttcatatattagtaaagttcatctccatctgtaaattgagttccaaatgttttcctccgttagttcttatggtagattactttttatttaagtagtatctttttttcatttcataaataatctttatatctgaattaggcttttaaatcacatttagatgaagttaggtttaagtattaggcatgggaatggaaggaaaagatcctggcattatcaaatcttttgtagagaactttttaaaactctggatagttaaaatgaaaaacttcaaaaggatcctgtctttgatttattttttcctcttctaggtttggttttattatgacatcagtcgttttgaccgggcagtccaaggagtaggatcataacctctggagggctgtttttagatgatgagattgtatagtatagatggaaaatactctgtgtaacttagaagaaattgttaataatgttgctttgagtctcgttaatttcattgtgtgtgtgtttgtgtgtgtgatgtgtataaaacatgcatagatcatggtagtgcttctagcaatgctctactcttacgtacagtcttccctctgtatccatcccttagtatctgtgagggattcgttgcaggaatccctgaggatataaaaatccacagatgctcaaatcacttatataaaatggtgtagtatttgcataaaataacctaagcatattctcctatatagtacttcaaattatcacttacacctaatacattgtaaatgctatgtaatagttgtgatactgtattatttaaggtagtaataacaaggaaaaaagtttgtacgcattcagtacagatgcaactctttccctgaatatttttgatctgtggttggttgaatccacagatgtggaacccacagatatggagggccagctatataattttcaatctgttcagccaaccttaacctaatcaaccacatgggtatgttaggatggctagattaggctagccattagcagtggaccacacagaagaaaaacacacagaatgtagactcttttgagaatgcagtaatgctacctactgcccaaataatatcctagattttttctgagattgtgggaagccaggaagaaggtggcagagacatctgtgacctcctatgccacatctgacatgaagtactttgaccttttcccttgacttttgtataaaaaggtattagaaaactgcgaggctggacattttatatgttttgagtaatttaatataattttaaacattttaaagttgtcgaaccctttcttcttatataattttacccagcagcatcaaaaacaaataggaatccttaagtgattagtggggcatggcagaaagccagttttttaccatgctttacatagtttttagtttttcaaagttattgatgtattctttagcgtctgctttattactaacatctttatacatgtttcactgaaaattgaaaggaagtttttcatttaataccaaattattgacttactgttattttcttggttaatcctttttaaacaatttaaaatttcttttttctaattttattttattttttgagacagagtctcactgtgtcgcccaggctagagtgctgtggtgcgatctcggctcactgcaacctccatctcctgggttcaagtgattctcgtgcttcag

SEQ ID NO: 40712 - DNA, 1029 bp, Homo sapiens
ggtaagaaggaaaaaataagagaccataatagttgttacaaacaaatgattactgcaatactgtttttaactttagttattgttagagatcttctaattcaaagttttcagttgatgttacatggctcacagaagggtagtcctagtagaatgggggctgaaggaaggcgttggggttcctgtgaacaaatagcatggtgagtgacaaccaacagttaaaagcagcatactgctccttttgatattttaagtgcattaaatgaggtgtgccttactacttggaatctacttcagcagccagccacagtgtacagctgccttttgtgggaaagggatcatggaattgttactggagtttgtattcacggtgccgaaggaacatgccacctaccacaaggtgcaacccacttacaatgagaggacaaggaagcagggagggtgtctctggtggcccagctccaggcctgactatctgtattcacctgtattggatgctgctcaccacgtgcgtttgatatgctctgcaaggtgactgcctaatagtgcatgtatgtttgtcagaaataaagcatgattttaattttgaaatattcttgatgtgaaaatgtttggttttgaaattcatattaaaattttcagcattacatgtgtcaaaaaatatctaccataacactttacattttttcttctgtaattagaaaatatgataattttttttcaccaggcactgtgtagatgcctccaaatgccctcctgttgtccagtgtgctaaatttttttttgctgacaagttttgtttgcaatgttaaaagggttgagaagcatcattctagtcaaatgtactcattttgtatgaagaaaactgaaatctacatagcaggctcagggatttgtccagtgtcctacagttggttggtgtgaggctggatttgaaaattggggatcttggatcttgactcttcagctctcatcacctcacactgaccccctctccccccgaaacatgagggaatattggaggaaggcatt

SEQ ID NO: 40713 - DNA, 1042 bp, Homo sapiens
atgatcatattgaacttaattatataaattccatttagaaattgcaaaatgattcataaattaaagcaagccagtaatttctggttgtattattcttacttgtatgtaaagtggttttaattttaaaatgttttgaaaagtaacatggttttggcacatgacagcactaaaacagagtaaagactagaattaacttaaatatatatgagagcttaatataggttgagcatcccttatctaaaactccataatctgaaatccttcaaaatctgaaatgttttgaacaccaacatgatgccacaagtagaaaattccacacctgacctcatgatgggtcgcagtcaaaacttcgtttcaggctggatgcagtggctcatgtctgtaatcccaacactttgggaggctaaggtgggaggattgcttcagcccaggagttcaagaccagcctgggcaacatggaaagacgctatctctacaaaaaaatacaaaagttagccaggcagggtggtacacgtttgtggttccagctacttgggaggctgaggcaggaggatcgcttgagcccaggaggtgaaggctgcagtgagccatgattgtatgactgcattccagcctgggtgacagagcaagtccctgtctcaaaaacaatcaaaacaactttgtttcatgtgtaacattatttaaaattatataaaattacattcaggtttggtcccatcctcaggatatctcatgtatgtgcaaatattctaaaatctgaaacacttctggtcccaagcatttcagataaggggtattcaacttgtatatgaaaatggatcccaccttcatttatgagtagggaaaagaagaattgtttaataaacagtgttgggatagccagttagtcatctggaaaaataatgttggcttccagaggagttaaagatttaaatatgaaacaaagaaacaaaaaaggtagggtaattattttttacgtaatccaggattggtgaagtcctttaatagcatactgggttgctggattttaggacataaaaat

SEQ ID NO: 40714 - DNA, 1050 bp, Homo sapiens
taattttgaaaattagcgtgtatcaacaactcaggttcaaaagtttctctaatagaatctgctttgttcatagtctgttttttactaagctatttaaaaatattttaagatcatataacacctatttgattacaattattggagagattttcaggaacgctatggagatgtaatgactcatcacaaacaaattggtcactttttttaaagtaggtatttgaagccctgagtagcaagttgttttagctttaagtgccttaagaacagctttactctccagaagctcacaatgtagtagagatgatgggcatgtaaacgtaagtcaaatgcagtatgactggactatagaaatgtgtataagacaaagcaaggattcattgggagacatgttctatatccaggcaaaaaggggagtcagggaagacttcgtgaaggaaatatggattagtcatgttaaaggaatttttaaggaacttaaaatttcagatagaggaacagctacaaggtaattgacagatgaagacaactgctctttgcagggcagtttggcaatgtatattagaatccttgaagtgttcttttttgacccagtaattctagttttagggattttaatctatgagcataaatcttttggcaaatctggttgtcttttgaatccgtctacttcttttcataatccatcaccaccctaaactactagcatttttggtcaggtttactacagtagcctcctaatcttggtttatcccaatctactttgtccccttctgatctgtttcctacactgtaatcagagggatcttttaaaaatgcaaacctgattacatcaccctactgtttgatatgcttcagtagctttccattgcattcaggatatggacagaactctgtgtcttatatggtggcatctgcctgtcttacaaggtcttgcatagtctggcccttacctttctgtctagtcatgacttgagccatgttcttgacttactctttttgttccagccttgttggccttatctcagtcccttgttcttgccatgctccttc

SEQ ID NO: 40715 - DNA, 1030 bp, Homo sapiens
acatatcaaaatctgccaatgatgtttgactttaaaggaaacttacttaagagattcacaatggggcttcaaaaataggataatggatttgaaagtattttaaaaagtaacttgaaagacagtattgtgttcatattatacttattattaaaaaggaagatttgaattcaggtagaacactgctatcctctcctctgattctgcttttccaagaaatgaggtttcactgtcatctccaacacagcccactctgtgagctagccaagaaggaaaagtcaagagggttggttgagcaaacactgagactgaaagagagccaccatattgattagtgtgtctcacatctctttttctttaaaggataaaagttctcttgaaacccctccccatgttgacttaaataattttcattatatagttccttaaatatgtacaaatatgtagtaattaggtataaatgttttatgcttgtagctaactaaaaactatacaaacacaaaagaaaccgttctagagatctgttgaacaactatgtgaatatacttaacactactgaactatatacttaaattatcttaataatttaccatcttaatggtaaattttattatatatctttttaccacaatttaaaaaatcacaagaacaaatcaaatttacagattaagtgaaaacaaatcatcagttaaattcaaataaaaaaacattaattcagtgtgaaagtggtaacatttgctgaaactaaataactaatattgggtttaattacaatttatacatataatgataaaagtataacatgatgcttttatagattttatttcaattgttgacttatatatttgacttatatttatcaagcatgatacagtcatttgactcataatcattatcattattataatttttccctcctacaaggttattcattggaaaccatcagttcattgttttaattggcccacttaatttaaaaatgacgttctccaaaatataatattgacaaattattttattttaattaattaat

SEQ ID NO: 40716 - DNA, 1031 bp, Homo sapiens
tcaatggtatgtgtttgggttgagggtactgggaataattgttgagaattattggagcatggcgatatacaaaatagaccaaattttcattggttttgttattatttttaaatctccttcagacaatgcccgtattacctgagcccagcacaggccgctctcaccacctgtccccttggtacaccattgactagaaaatcatttgttgacattttgctttcatcctaagatttgaagtcctcaaggcagtccctgcgtccttttcatttgggcatcctcagtactcagtatgatgcctgccatgcagcaggtgctgcttctaagcacaatacctagagaagtcccgtcctatagtccctaggagttagactcaaaagcaaaggccttatggtggcctacagggcactatccgatacagccccttctacttccagacctctgcacctactcactctgctctactcacagtggccttgttgcttgtgaacagacccaacacactccctccacagggccttcgcactgactctcctatctgcctggacccagacaaccacagagcttgcttcttccactcttttaggtctttgctcattttctcagtgagacctctcctaagcaccccgtttaaaactgcaaatctttcacccttgccccagcactccctgtcccctttcttgtttaattcttctccacagcatacatcactgttgaacacactatccatttacttattatctgcctctccccaccagaacatccactccatgagggcagtctgacactgcacccccaggatccctggctaacagtttctgcctctgcctgatcactgaggtctgatgggctccttctactgcaggccagacctggggctggagtgaaagagtaatgaattgatttaagcctacggccctggcatacttcttctgaagtcacaggggaattcacatcactctgtgtgacctctgtcctaccccttttatgtgagggtggtgaaaagcaagttgaaatgcaaagggtaggtagtc

SEQ ID NO: 40717 - DNA, 1030 bp, Homo sapiens
attgtataggttatgtactacacaaccttagggatgctgttttcatagactgggattttacactgtgcaacctgcaaggctagttttaaagacacctgccaaaaatccccagttaactccaccacatttagagctgcattttagggccaatagctttgtaccctcaggaggtgggaagccaagataaggggaaacagaagtaatgagatgtgtccaagaggaagcagggattagctcttttcagtagaaacctcagttaatcattaataccttattgctgctttgatttaaccttttgtcttccttgaaaaggaaaatgagttatctataaagaagcttcttttgttgaaagcagctgctgttttaagacagagaagaagcaggagaagttggacaaagacattatgttttattcctccaaatacattataaatacattgtttggtgtaaatatattgcttgccttagaaagaaaattaatacaaaacaaatttaagtaagttccgactagtagtaactcagaccacatatctacaaatgacttcctttcaaagattccttacattaatgcagcctttgttttaacattttttgaaggtttatatattataatccttattgtagattataaaatgagaaaataataaagctgactaatgcaactggctgatattgccgttggttttttttaatctgaaattatgaaatcccttggaaaatctaacatgacagtatccaaattttaaatagtcactttcagcaacacacacaccttcaccaatgttgagtgattcaaagaaggggaaaaacaactcctttggttgtcattttatttacaggatttgtctgcacagcagagaaaaatgttccatttacttcagagatggtcagagatttccaagccatttggctcaagagatggtttaaataggaatgaatgtagtatacctttaattctctgaagtaagagaactccagctgaggtttggtccagagcaaagtctgctctcaacattgaagaaaatctatc

SEQ ID NO: 40718 - DNA, 1050 bp, Homo sapiens
gaacagtcatattgacattctttaatccaaaaccactgtttgaaattagtaaggatattttcagcattcccaaaaacatgttattagcacgttgagctgaaaacgtttttcttcctcagtgagtacagaaaccaaagcagtctgcgtgtatgtctatgtatagactgtatcgtacctgggctcatggagtagtctaaatttaaaacgtcctctcttctacctccaatgaaaatgtttccgtgtgtggcgtctgatcttccaccgtgtgtgtggtcgtctgctggtgtagcgctgtttaaggagcgctgtgtgctgctagtgttccacgatgtgtgtggtcgtctgctggtgtagtagcactgtttgaggagcactgtgcgccgctagtgtgggtttacacttatgagtgttgtcattacatgtgttctgctcttctctccctctcctgcccctgccctgctccatcagagagagctgcaggtctctgctgccgcctagtagttccctgtcacaaagggatgccaaggcttaccgatctgtctgtcaaaaccaaagatgtctgggaaatccctcgagaatccctgcagttgatcaagagactgggaaatgggcagtttggggaagtatggatgggtatgctgagactcaattactctcttattagcttccccgtttggaagatcccaaacaccaaagatggaaggtgaaaataaagactgcgtgaccgggaagaaagtttgaattactaatagtggggaataataatttcagttttggttttaacattctggaattcctaaaaaaaaaaaaaaaaaaaaaaaaagatagtaagtgggcaaaattggcaaatggctcaagttgtactattacatgactctcaattcataaaccagcaaatggtccaaggaatgttccagctgccataaaatatcttgctcttcatttccaaaagcaaatatttgttgagtgtcatcctaacgggcaagtcaccttccatctttcctagtgcatgcataattatggattataaggactgtgttttctttatta

SEQ ID NO: 40719 - DNA, 1075 bp, Homo sapiens
gatgatgaacacagatcacaatccaggtgcttggtaaataaatgcctttacttatccaagtcctcacacacctaggggaggaaaacaaaatacaagtaagtactcatgggcgtttttctcagaattcttatagggaggaagttattgaaaatactattcctttattcatatcatatctatctaatctgactttttttaatgcttgattatcttcatatacattaagactgtgttttgttatttcccagcagttacaataatgcttagatatcaagagattcaagagttttgtttttttgtttattttttgttatgagacagagtctcgctctgttgcccaggctggagtgcagtggcgcaatcctggctcactgcaacctccaccttccagattcaagcaattctcctgcctcagcctcctgagtagctgggattacaggtgcatgccaccacacccagctaattttttgtatttttagtggagatggggtttcaccatgatagccagcattgtctccatctcctgacttcatgatccacccaccttggcctcccaaagtgctaggattacaggcatgagccaccatgcctggcgtttgttttttttgttttgttttgttttgagacacggctttgctctgtcacccaggctggaatactatggcacaatctcagctcactgcagcctgggcctcccaggttcaagtgattctcctgcctcagcctcccgagtacctgggattacaggtgcccaccaccacaccaagctaatttttgtatttttagtagagctggggtttcaccatgttggccaggctgatctcaaactcctgacctcaggtgatctgcccacctcggcctcccaaagtgctgggattacaggtatgagccaccatgcccagactagagtcttttagataagtgtggaaagggtctcctgcagtaaccatttcaaatcaaggtcttagatttctggttttttgcatacaggtggcagttttaacacaaaccagttctggtcatgtctagaggggaggaaaacaacccacaactcaaatctgattttttttaaaga

SEQ ID NO: 40720 - DNA, 1029 bp, Homo sapiens
agttctgcttagtgctgggacaaagtgcttctgccagagctgccgattgatgactcttgctggtggatgagcaagagtttacatcctctgactgttctaagcctgtatatgtgagtagagctgtcattgctgaaaaaataagctgccttctagcccaaagaatgtgttaatattatattttttatgcaaaactgaagtgtaactgccacttctgcatcatgataaagacattcgtatttgacttgacagagcaaacccctccacagctggaggagaacagtggtgatcccctgtgacctcacattcatctgcacctctaaccctagccactccttcaggatcctcttgtgacaccggtctgttgttggattctacttgttacatgcccttttcagtgggcattcctgtctttcttctgatgacctgcattgcagatgtctatctgtggtgttacctgtcctcatcatgtttaggcagccacttacacaactgtgcaagcctatttctcactcctaccagccccaaaagatatgaagtgttttgtgtgccagggctctcagataatgtcacttatatagttccaaagtagatcacctctgcagccatttatggtttcagatctttattctcacatgtaacaaaagctacggctttgccacagttggggatgatttgtgaggtatgaattatgaatagacaggtagctagaatggatagagtcattggtccacttaggaagtcatagcttacttagatacctccctgtccagccacttgcatgcagtctctttctacccttgccttcttgatctggcacccccccatgcttctcttttctccccagcttcagtatgtgtctatcaagacccagtttcactcctgcttaatactggataagtatcagttgtataatgtgcaaatgcttttgcttataggtctcagatttagccagatctgggttaaaatgcagttaaacctagcactgaggccttaggcaaataactttacctcccttcattgatgatgatg

SEQ ID NO: 40721 - DNA, 1005 bp, Homo sapiens
ccttcatagcatccatctccttcctgatgtgggatgccattttggagggccacttcctgctgactttattgtaagctgtgtagaagagaaggtatcagccatatttttccttttaggcagagtttgatttgcagaggcctggacttcctgcttatgtgtctttccagtgaataagtgtgattcaccacagttcaaagtaaccccatctacaacgcctcatttttttaagtgaaatttttccatgggaatagaatagagaggaatcctgtaggtcttccatgaaattatactccctgcctctcagagttttacaatataattaggttacttgtttgtcttaaatttttttattatcctgtgcttatctggttgaggtgcctgttgaagagcaggagatgaaggtcaagaaatataagcacagtgctcaattttttaaaataactttgtcttactgttgctcgtggatagaaataaaatttttcatattaaactaatacttagccgtttgctgaaacctcttatcaattctaataatttatctgtattctcttagtttttctgtgtaacagacataccatctataaataattacaagtttttgttctttttcaatcttttatcttttatatatttattttttcttttcctaccactctggctaggacctgcaggaaatagcacaggggataggaagtagggatagcggggataggaagtagggatagcacagatccttagcttgttactgattttaaagggaaggctgttagcatttcaccattgagtatggtgcttactgctgggttttggtaaatactttctattagattatgaaagtccccttctgatcctagtttgctaaaagtttctattttaaaaaattataaatgtgttaattattactgagtgccttttctgtatctattgataagatcattggggttttctcttttaatcggatagtacaggaattattgtcatccattttttaaagttaaatcatcc

SEQ ID NO: 40722 - DNA, 1025 bp, Homo sapiens
gcttgcctgccatggcagcatccactccacccttcagtgcttgaagccaagtggttgtcgccccggaaggctctgcccttctggttttagactgctgtggaggagggagccacttggagatacaaagcccacctctctagaatcttccagggtccccacaaattataaaactatggtcacaccaggaaaccaaggcattttcaataacaacctttcctactgatttccagcttcatcttccagaattccagtgcactgccattcataccattcattaactgttctcctttcactagaccacgagcaggtatacagccacaaagaggaacccatctcatgagttaactactccatcagcttccttcaccctgaaatcttttggcagtacaggctagaaggaagaacaggctttgcaatcagacctgggaatgaatctcatcggcatcattactggctgcaagattttgggaaagtggcttaacttcttagtccagctcacaggattaatgtcaggtttggactcagataaagaatgtgaaggctccctgcctagtctctggcttgtaacaagtgccaccaagtgctagtgtcctttttctgtattatgtatgttgagttgtagatatctgctgtcaggccctgtccctgccactggctggtgatgtgaacacatcttgtgtctttgcatctctgcaccacagtttcatcatctcacaatgaactgcctgctctccaagatgtggagttttttaaattatacaatttggttgcaccttaggggatccctctgattatggaggcacagtaaggtcctgagcataggtggtcagcagtccagaaagggagaaggccgagggcagactggagaatgggactggtgagattcagataggaagagcaggggagaaatggtcaaagtgagactggaatcaaaaggttggcatttctaaaaactataattgcacttaagaagttttgccaaaggcgatttagttaccccacagtgaggaacatgggtgcctatg

SEQ ID NO: 40723 - DNA, 1049 bp, Homo sapiens
aaggctcctgttattcccccaagaaaggcctaaacaccttaacctggcatctgaggccttttatgatctgtctgtccaacccacctctttaacacatctaactctttcacttcaaatgtgatcctgtagcaaaaccaaaccatctctgtgcccttggagggctttgaacactcattttctaacctcttgggatgccttcctgctgtcgcttagagtctaagtctaatctgctgcaaggatcttttttttttttttttaatttctagtcagtctctgcttatccagcaaggctcatcttaagtgtcacttcttcctagtccatcaggctagaaaattcacctctgtgtccagtactgtgtctttttcatcataggtgcttaaaaataactgaagtgttatgaataagtcttagaacatattcatagataacacacgccagagaaataggtaaaggttccttccaggtgggcatttatgtcaggggaaaggcctgggtggcttcaacaacagaatcatattttctcatagtctggagactgaaagtccaagttcatggtgcaggcagggccagggtctggtgagcctccctcctcgtcttgcagatggccactgtctctggtgtccccacatggcctttttctctctgcaagttcccctgctgtctcttccccttcctataagaagaccagccctattggatcagggccctacctctttgaacttatttttcatcaacctcctttaaggcccccttctccaaatacagttacattgggggttagggcttcaacacatgcatttgaggggacacaattcagtccatcacacataggtataaaaattcttctgatcctctgagagtgtgtgtgctcatgtgtgcacacaccctgtgtgcaggtctcctctgttacaagcattcgttcctggcctcattcaggaaacccacaggatagcaaatggccttgctcccttgcggtggcccagcttggcctgcctactctagctgcctccgcatgatcccagcccacaaagacgctgcttcggcccca

SEQ ID NO: 40724 - DNA, 1050 bp, Homo sapiens
gaaaagaaaggttaggaaaactgtccagggtctcacagctagctggcaagaagggaggatattactggaaagaaagaaaagaggaattggtttgggggaatatgttgtgagttcaactgcagatatttttccattgttctcttgtcttcaaatatttcaaagggctaaacattcagatatttataagcatagtttctggtatatttcattgtccagttttaaaattttttattagtgaatactgagataatttgtaaattggtttcatcttcctgggaaaaacagaggaaactggtaggtggaatttagtacatcgatgggtgcccgaagcagaggaagaggttgcagtttacagagagaaacataatatgtgttcaattatttctgtttaatgatgtggtttttcttttgttgtggtattgtttttcaggaccagtcctgcctctgttgtagaagacatgtggtgtatataaagtttgtgatcgttggcggacattttggtaagtgttgctgcatttacttctaatgcctcttgctgtaaaagggtgctcacgaagggaagctgttgccttgttctgtccatcttttacttctgcactaaactcaggcagaatggagttctataattaaatgtgacattgaattgatgttttctgacagtgtgatactttttcttgttattgctgatagtattaagcaatatggggttttctaaaacgtaataagtgtatatttagaaaagtttccggatgccggttaaagaatacccttggcagtttatgtgctaagccagccatataatataagagtaataaacttgcagacccaaagaataaaataaattctccaaagcagagagatccgtgtgacccatatattaaaagaaagagaagcaggcagcttaggaaatggaaaattaaaggaagctacaagtccagcttgcctgggagccagcccacagaccagcataacagtggtcttgggagaccaagaacgttcaattcagcaaccacccagaccttgctagcagggaaagaggacagtctttgg

SEQ ID NO: 40725 - DNA, 1029 bp, Homo sapiens
ttttgaggggaggaggtcatttctgggagagaagaagcttttcctgttctcttctcatgtggtttgctccattcctaacactatggatatttttttggtgtttccttggaaagcaaaatatcccatattaacataccatggctgctttgggaagctgtgcatttccgcagattattccttcaggaaactctacatttgcgctgttggctgcaagaatgaaattatccttggcaagttgtttcattttaatctcaggagcaatggtgttaaatgttagccagtcaaagccataagcaaagactgttattcaagtttctgtgttaaccctttatctctgtggtctttccccacctaccccacacccccatgccccaggagtcactggttcaaaacactatgaagtggattacttccttccatgatactaacagtatttatacttgactcttcacagattggagaatatgaaacagaatgtgaaactaaacagctgaggatatatgatgaatgaaactggctgggatctgatcagttttataatttgcagtcctcaattcagagtagtttaggaataagaaaacctcttggacatttattaatgttaccggttgacttaaaaaaaaaagattgtggggtaaaaccttacttccacagtcaagccataaaagtggcatgatttgggagagaaaaaaaggttataatgaagcccaaatatttgaagtgattgaattaatactttcagaggagtgcccctgaagggcagagtgatttggaatatccagaatattaatactaccagttagccaaaagcagtgctcaagggatgaagcaggagcttggccttggaactccaaatggcctttgagggttagtgggaagcagatgttttgaggcagttggaggatcttgtgaacagtcttcaaagcaggtggaggctttttaataaagaaaagtgggtaaacagctaggctgctggatttccatttttctcccttagaagaactagattctggtcatcttctggtccca

SEQ ID NO: 40726 - DNA, 1030 bp, Homo sapiens
tccccttatatcctcagttactaatattataggttgtcataaacttctccctctgccctatctcccagagaatttatagacagttcccttggaacaagcatgctttcttaactccatgcatctagtatattgataactttttattctgtgttctttcagcagagctaccacttttgtcccttctgttatttgtccacaccaccacagtgcaagccttaaaacatctgtcctttaaactctcccagtcatcttgcccctggactctctcccagcactgtgctaccacactttctaactcagtcttcccttgtatgtggtctgccacacgcaggcacacactttaccttgctctcacctccttggccaccttcagtggttctctatcactggacacagcaaattttaaattgccaatttattcactgtgggagctggctctcctactcccatttctgccagaaactatttttccaggttccttgcatatctgtctcaaaccactgttatcccatcttcctgtactgctgacactctgcccctgtaagatcattagtctgtcaacaagccatcgttgggcatctcacattttctgtgtattaagtcactgggctctgcaggaagatgggtccccacgacttggcagccttatttctgtggaggcttgcacttctcttcacctagcaacttttccataccatctgtctggctccattgagtcagtagttcaataaagatactttagaaacactttttaaaaaaattatgggggtggaggaccaggagaatactacaaaggaaatgagtccctgacatccccatgtgagcagcctcatcttctgaggccagctggtctggaggccagaggctcctgctttattcaacaaggagcatggagacagtgatctgttcttctccacatcctagcaccaagccaggcacagggtaggcccttaagcatctgatgaaggaatcatgcatgtatccgtggcatgtctattgcagtatttcatagacttaatggagctggaag

SEQ ID NO: 40727 - DNA, 1888 bp, Homo sapiens
tgtgtagcaggtcattctttcattaatgtaacatttttttggttcctactgggtgttagacatcatgctggactctcttgagacaaaagtgaatgtgactgacaagtactcaggtaatgatggtacaatctgagagctgtgcagaaggggcttggaagctctgactgagggctgagctatccagaaaaactccatgatggagtgggtgtgaggagctgtgaatgcattctttctctgaatgtttgctgagccttctctgcctgtacgtctctctgcctccccaggtgccttgagttcccccactgaaaggctggacgtcgcagctctcgctagccacccaggcgtccttttcggcccccactactctgcccaaccacattgccttgggtgtaacttttcagctgttctgagttatgttcctcaattccctggccacttgggggctgccccttcatcatctgagaatgacttggggttatttctcatcttgatttgagtgcaagagaggcttttctttctgaactagagccattctgaatgcagctcgtttgtctctaagttagggaagtatactatctgaaacattgttccagaacaattgtgagtaactcctgacctttgaccccatgcaggcacctagcttctgcaggatggcctgtgatctactgctagtcacgggcttttcagctcatacaaaccagggcaacttggggaaataacacagctctagttaggacaaggcagaaggagcctttttagaatccgcatgcactcaggttttggctgtggaagccagggattggcaaagactgtcgcctatgggaggtcagtatactgtgacccttctggactaggccaggtccacagcaggcaagagcctatgggtgccaggagccccctcagggcagtattgtgccttggagcccaaagaaatgcctggcatttgccccagactgcaggacttgccctcccctgtccaactcaggcagtgaatcctgcagccacaggagggggaagtccattcatctgggttcccagtcctggccccatgccgggcaaacagcagggctcagttagtggggtgtggggggcactgaatggaatgtgttcaattttgcttcacttctgctgttaacttcctgttagaccttagaaaaatcatttctcctccccaagtttcatttttcttatcagtaaagtggtccctttcacaggaccaagtaaaattactcgcttttaaattgaaaaacacaaaccaaatacattttgtttttgtttttgttttctgacttgggtcttgaattaaaatggaaaaagggctgttggccaccagtctaaagaatgccaggtaagaccagttatggattgggactgaaggagcaatgagtgtctaacaaaagagtgaacacgggtgactgacccgtggtgtggatgtctgtaagtgcacagggaatccagattaagagaagctaaacgggtagaaatgctgcttggatggagtgagtctgaggcacctctgaaaggctctgcctgcaccctctcctcagtcaagtagttgatgacctgaaaaacaatcattgccttaggggagtttgctgttttaaaagctctattctagaagttccactttcagaacctttttctgttgctggtagaacactgttgaacacggatctatcaacttttctttttgtctgtgtttacctatccagaagaatctaatataggatgtgcatctgttgtataagtaaatgatacctgttggccaactccagtggagaaaaattgccaaagttacagtgtttgttcttcatgtggatttttaagtttcctcttttagttgaacgtttttgtaaagacagaagtggaaaattagctttattttgac

SEQ ID NO: 40728 - DNA, 1146 bp, Homo sapiens
tgcttttcttttgattttataagtttagatcttttcatcctaagcatgtttcaaaaatcttactttttgtcatgtttcaaattttatgtttcaaatgttgccaattcctactcaataatcccatgtgatacaatcatctgatgcttcctgtgttgactttgatgtggttcttttactccaaaagcacctttcttggcttcatttttcatctggtcattctgtagactcccaaagttgctaggagagtccttagaaatcacactccttctggatgttgcagctcacgcctgtaatcccagcactttgggaggctgaggtgggtggatcactttagcccaagagtttgttatcagcctgggcaacatagtgagacctcgtctccacgaaaaatcttttaaaaactatccaggcatggtagcatgcatctgtggtcccagctactcaagaggctgaggtgggaggatcacttgagcctgggaggtagagactgcagtgagctgaggtcataccactgtactctagcctgggctccagagtgagaccctatctcaaaaagaaaaacagaaatcacagtcccactccctcttaattggaagaggaaattaattagcctgagaggtgaaactccttgccccaaggccttgcagcttcttaacggaagggcaggaggctcagccagccagctcttcaggcccacatgggtctcctctgtcactcagctgccctctttgtctgtgagtcttgcatattccacggaggttaagtgagcttccaaatctccatgagcagggttctagtgttctgggtagtccctgttctccacaggcttccaaattgttggagcaattccattcataccagccatcataattgttaatgcacttttttttgccatgaatacttcattatattcatctgttctgcagacattagcctagtatgttactttgtgcaaggcactggggagatgaggtcctggaaatgaatacttctgctgtccttgcttttcagaagttcacggtctactagaagagataaaaataattaataattgttaacatttgttgagcatttactatatgccaagcactgtttaagctccgatcttaacaataataatatgaagtggtttcacttataatctcc

SEQ ID NO: 40729 - DNA, 1057 bp, Homo sapiens
atactcttagcatgtatactgatgatgagcttgaaaagttcacagtggcattcacagttgactgagggaaaaagtcctgccaaactctgtaaggagacagtatgtaaataagaaagggaaaactaaattggctgagtgcagtggctcacacctgtaattccaacactttgaaaggatgagatgggaggatcacttgagcccaggagttcaagaccagccggggcaacatagtgtgagaccctgtctgcacttgtagtcccagctactctggagactgaagtgggaggatcacttgaacccaggagtttgaggctgcattgagctataattttgatcctgcactccagcttgggcaacaaaggaagacagaccctgtctctaaaacagattgaaaataattttttaaaagtttttaaagaaaactaaagattcttttttataactaaagttttgacaagataattctatacttcaggaatgtcacaagtgatattggtaagttttcatctaagccaacagcaaatgaccactttgccaactaatagataggactccgtttctgcatgggatgctgatgaccttaacaagctaagcaacatacacagtgtatgcaacatggtgattattaaatgtccattggcatcagcctagcattggagtctgtgtattgttagatataaactttgtcagtcacctttattttcttttgtcttttatccttcagttaaaagacttaggttaaaagtctctacttttaggagaactactatggagtttcatcttttataggagagcttcacattgtcctttgataatttcctcctgttaacaaaatttatgatataatatactttacaaagtaatagtcttaatgttctaggcttttaattagttttagtagtttggatactatgaaataaataaggtataccgaactaagtaataataatacaagtttcaaaaatcagtactacatagagttcataatgctacagtcaacattttgtagctacctgaaatcacccatatactgcagaagccttttcccccagaaaaa

SEQ ID NO: 40730 - DNA, 1021 bp, Homo sapiens
ggcattatataggtataacttaaatatgaaaaggagtgagatatagacggccctcccaaactcactgtcagaaccaaagatggaattcaggacttcatttcctgaatgttgccttcatttccttatccaaaattagattagttaatatataatcacagaaataagctgaaaattatttttacaaatataaattctgaccaggtgtggtggctcatgcctgtaattccagcactttgggaggccaaggcagaagcttgcttgaacctaggagttcaagaccagcctgggcaacataggtagaccctatctctacacaaattaaaaagttagccaggcgtggtggctcatgcctgcggtcccagatacttgggaggctgaggcaggaggatcatttgaccctaggaggtcaaggctgcattgagctgattatgctgctgcactccagcctgggtgacagagcaagaccctgtctcaaaaaaaataaagtttcaaattcttcacaattatattctgaatcatttatgctaatttttaaaaacactttaatcctcaggaacaggatctggacttggcacatttcttttaaaggtgcttgaagacgaattcccagaagtatacagatttgtgacttccatttatccttctggtgaggatgatgtcataacctcaccttataatagcatcttggcaatgaaggaacttaatgagcatgcagactgtgtattgcccattgacaatcaagtaagaaatgacattggaacttatgaataaatgttatatatattcagtcctgtattatgtatgtgtgtttatatgaaacgttctcttcacttttcagccttcttagagaaaaaatcagtttaaattgtttttctttctctttcctagtagaatatcatctacatccactcttcttaatagcttctctcccaatgtttttccctcaaaagtctttatttgacatcattagcaaaatcgacctcatggtgaattctggaaagttgggtacaactgtgaagcc

SEQ ID NO: 40731 - DNA, 1050 bp, Homo sapiens
catcctcacgtcatctaccttttatgtactatattaccaagacatccttgccacttttatgtcaaatatgtacaagaagaattttctgttgagatgagcaaatgactaatacatttgtaatgtaaaccaccaactagtttacagttacaaggtaattttttaatttcagcttttcttaaaccgaggcgcacctgttttcccacgtgcctatatcattattttccttccacaggcaaagttacaggaaaaataaacattcatataagccatcactataggttcaattcagtcatcttacaatgtaaaggaatagatgttcctctttgccactgatccagtcatatatacagtatatcaatagctatatatctctatctacctgtatcttagcgccctctggcgtttgtcaaaaagaagaggttttcttataggcatgacatttttcagctgtctctcatcacttcaactgaagtttccatatcaaaaaataataagtttaatgacataggaataacaatagagctttactctgaagtatcaagccaaagtaaaaactaggggtgttgtgctttgcaaatataacttaaactggatcaaagatcaactcattaaaaattctaaaattttaaatgcttgtgtccgtattttttaaaagcagggaggagtaatattaagatttattatagtttctgcatatttaattttaaaatgaccacaaatactgtttttctggaaagcactggaacaagccaagaagaagactggaattgcaggaaggagtataatgactcagaagacagtgtccattcagagagcccacagtttatgaagggactgatgaccacattgccgctgcacagtgggctctgtgactacaggagccttgctctgtagggaggggattacccttctccaataaaaagcctctgggcatgtgtttgttataataccatttctgcattctcttccttgaccatctgagagggccacttgcttgggttattcctggagagtgtaaaaacgttcccggtaaaatcatggcataatcct

SEQ ID NO: 40732 - DNA, 1029 bp, Homo sapiens
aaaacaaccaataaggctgagaaaggggaaaacccacatctggatttaaatacaaggtaagaaatatttttctctttagaatatcccactcactttgggaaagtgatttcatgtgatgtattattcaagactctcatcagcaaatattttctgaatgtatactatgttctaggtattgggccagctgctggggattaaactttgaacaaaacagatagaatctatgtcctcatgggagtggctaatgggagagtcggaacaaaaaaatagccaaggataatccagcaaatgatttggtgaatgctatcaaagagagaaatacacatgctctgggaacaccaagtaggtacctaatacctaacctgtacctggggggctggaaagggcttcttggaagaggcagagactaaaatgaagaataagcataagttaagacaaagctggggtggggtcagaaagagtgtgataggccaacgcagcaacatgagccaagactcaaaaataagagacagtgtggcacatttgatgtaggaaagacatttagctgggatagaaagaaggctagtgttggggctgaatgaggttgcataaaagtttgtaagccaagttaaggaattgatcaaatttatattttagaatgatcactctgacctcagcattacatgacctgaaggggttaagcccatacatctgtagagagacccgttagaataggactgcagtaatatggtgagagacactggtgcctaactaggctggtgatcatagagataaagggatatatgggagaggtagagccgacagccattgataactggtggtcggccaggtcaaggggacagtgtctgctttaggtaattggcttgatgataatctcattttcaaagatcaggaacacaggcctgagagtacatttggagaggaagatgattcgggtttgcatcatgtagggttcgaggtgtctatgggacactatatgcagaagtccagtaggcaattggttctgtgggcctagcactcagaggagag

SEQ ID NO: 40733 - DNA, 2265 bp, Homo sapiens
ttatttaacacatcatattatagcacctcacaggattttgtctccctactagactgagctgctcatggctagggaacacagtatcttaaatatttgtattctcagcacttgatgcatttcctaatgcaagtaatggtgatgagcacacgttttagttaacctgttaattttgatcctgtagtatgtgaaaaactgatttagagataatgatccaatttttcctatgtctatcaaattgaagttatgtgaataagccagcttttttttttttttttaaactagagagttagtaatctataacatctgacacatttagttctgttcttttacttgtggattcactcctcaataggctacatacagaaatttataattttaacttcccaatgtattacaatgatggcttcagtctatatttgtaactgattgacatccaaaaattcaagccatgactgaattaaggacgacttaactttagctgtaggattttcctaactttttttcttttctttcattttcactatgttttcttgtctgtctgtttttggtgttctcatttttaaaagctttatcttttctgtgcttaaaaaataaactctctatttggtgatgaggctctttcgatagggccttgcagttgttaaaattcttcagcctactgaaaaatgaaatactaccacagaaagctttttttaaatctataggtcaaaacctagagttagggccaccttttctccctctgcaccccaatccagtgactattcatagcttgtactgccatcgtttaggaaacacccaacacaaagcttatttagaccgaattcattaataataagattgcataactttttatattttaaaaataaagtatattttgaaataatatatatacattttatatttcaaaataggttttaatcttttcccaatctttatttttagacgttaaggaagaagataaatccaaggacaacagtggtgaaaaaacagataccaaagggtaaatgatgttccttatcaagtactttttacatactataaaaatactaaacatgtttattggtgtgtgtttgtgtacacacttcagaaatactagactgaaccttagaacatcattatgaggtgctctgaattttagtttgtattggtacataagacaacatatgccatcttacctattggtttatcagtataactatatcagtcagtttgtattcttgtacgtagtttatctgagacccttttttgctgttatcttttatatatgcacttaatggttttcatggtgttcttatttctgtgtacatgatttttttagtgttgtgagataggtaaatttaagaaacaattttaagtaaaaacagttgaggattttagtgtcagaaagcatgtaaatgtttgggcacacataattttgtgccagcctttacaggataacttggaatagtttattaaatcactagaaaaattaaggcattaattactccagaaacacttaagacattatcaattaatgtgtttcttagcatgagcctacaggacctgatcaatataataggtcagtgcatttaaaccaagattgtgccatttttaatatttcacattgcctcttttaacagaaccaaatcagaacagctcagcaacccctgaatttgacagtctcaccaatttcagaaaatcattaaaaagaaaatattgaaaggaaaatgttttctttttgaagacttctggcttcattttatactactttggcatggactgtatttattttcaaatggctttttcgtttttgtttttcttggcaagttttattgtgagtttttctaattatgaagcaaaatttcttttctccaccatgctttatgtgatagtatttaaaattgatgtgagttattatgtcaaaaaaactgatctattaaagaagtaattggcctttctgagctgatttttccatcttttgtaattatctttattaaaaaattgtacttggattatcttttgtctgtttattactacaatatgaagtcttgtttcagtggctaatgacatcatttctgtagacttacaatacactctaggtgaaagataatgattacagcttgaaagataactatttgctgtttctttgggaagagtatttatagtaattattacttatctttgcaatagaaattctaccaccttgccctctatagcttagccagttagtatcagtgaagattaacatcccattacaatttatgaaataatacagactctgcaatt

SEQ ID NO: 40734 - DNA, 1047 bp, Homo sapiens
ctttaaaaatatccaaatggtttttatctgttaaaagaaacttttctagtagcaataataaaaattgagtgctagaattatgtaaatcacatgttgcaactattgaagaatgcttaatgaaaattcccacagtatacagttacatgaagagaacagataaactttgtaaaattaactctgaaatggaaggaaatatagaaaaacgatttttgaataatgtcatttttaggtggttagttttttcattgtccctttttaattttttcccaaatactcttcagtatgcacaaatgtcttttgtaattgaaggattttcttttcttctttaaagattgagttatgtgcctaactggtaatattccgagaagggaacttactggaaacttataaatgtttattgaattatgacatttatccacataaaatatttacttttatgttaggtttactattaatattaaatttctacacgtagaagttgaagtttttgaaaattaatagatgtttttaactcttaagttaggaaaactactcagtaccactacctaaagttaactcagggttaaactatgttgtttagctttccataattattttacacatgtccatagggaaagaaaagtcaataaaaattaatttagatgatacataatgttttattgtaacatgatgaatttcaccatgtaaccctacatgaacatctttctgtgttaataaaataggtgtatattcatattataatcttaatatagttgtgtacttgacttttccatcagggacacctgctaaaatagctagttatatcttaattttttaatatgtattattgtataacgtgtttggaaaggagttttagacttgacattttttacatttttatttgtttttaaaatatttagaaaacccattttggttgagtaacatttgcacttattatctttttaaaatttatttttcgaactgttgcagtatgcagattttgttgttacccaaatcttcttgtcttaggtcatgctaaatgtgtagaagttgtaaaaacttttaact

SEQ ID NO: 40735 - DNA, 1774 bp, Homo sapiens
tcaaaaaaaaaaaagaattagaagtgtatataaatgtcaaaactcccattaaatacccttttttaaaagtagtttggcaattttcattttagttagtttcaactagtaaaaaatgacaatgaccttggaagtttatattctagtattttggatgttttaaactgaagacaaaaatttgaagccagtgttaaaggaaatttttttacctattgagttagtctaactgcctaacttccatatctgaatgaggctttgttctctactgatggatataaaattatctctgagttgttgaaggagttatttttccttatctgtggctgcagtttgagagagagatctatagaggtacttaggaatttggatgttcgcaatgttagttattttttgccatcagttatgacacatcttagcagattctactttgtattatactgagctagtgttttttgcttgtagttattccatgcatgctatccatagaggctgacttttcagtcaacttaaaattgatactgactcctcaaataaacagtgattgagcagtatcagtgtaacatcttgcctgctcatcaggagcaaaggaaaatcatttgcaatcatttgccttgttttttaattgactgttgatgttggttccagtgtcttcaactctttgagcaagttcttgcccactcagctaatagttttaaacaactttaatttgtctggacacatttttttgggtggtgtaatcaaacatgatttaattaattgacttggtgcacagctttccttgcttatctaacacgtgagccgctcagaaactttattttgatcacagcctcatttctgtttttttaattttgtgaagaaattttgctgtactatggtatgctgtttatagtgttatgagaatattcttatgagtgcttagtctggaaatatcaatttacattgtattgttttatttagcacagttatggcaccattatataataaatacaatgctttgccatctaataatatctcacttcactatacttcaaaaggatgacatgagaagtccattttccccttattttgacatgagtatacactggtaacaaaatgtcatgacatggtgattcatgtgactcctaaactgcgtttgagttacaactgtgtcactaatctgtggtgctccaagcaccagtttgaagtcatgagagtaccacatgtagcctctgtcacagctaatcgattctgcagttcaaatgaagccataggtaataaacaattgagcatggctgtctttcagtaaaactttttttatggacactgaaatttgaattttgtataattatcacacgtcagaaaatactcttgttttggttttgtttttaaaccatttaaaaaataataaaaacttcttagttcaaagctgaaaaaagaggcaattggccaaatttgggccatgggccatagttagccaatccctattttatactattgaagatttactacagaggtgttttaattaacaatcttgagtatggtataatcttcagtttttaatatattagaaatatgtgctatgtttttgaagcatgtagaatagaacagatttcacaaagagtaaatatatattttttaacctacattgggccacaagtgggtatttaaaggcctgaggctcaaacctcagatatttgaataacctcttaggctgaatgtaaaaggtgattaaacattctggaatgcaagagctcaaaaatgggtttcctgaatttgtggtgcttcttcccatcttaga

SEQ ID NO: 40736 - DNA, 1068 bp, Homo sapiens
aaaacaaaaacaagattacactttgattagccttagcttggcatgtacatatctcttgtcttgtctttgtgtacttcagttaacctggactataatacacatctctttttctttgttaagatattagtgaagcttttgattctacgtaatgttctcttgtacaggttaaaagtattttatttttagagattagtaacaaattggcttgaaggtagaatgcaaaagtcaacctaaaattattggaacagtatcttttaaagcttgataccaaagttcattctcattagtgtttgtattgactgacttcagtgatgattatactaaattagtgtaggtgctagacatctcatatttacaacctcatacacatttctgccatatcttgtttgatttgttataatgctacaatgtaactagaacatgtagtatttaattttttttttttcaatgaagattccaacttagatgcaaaagaggcatgagtagcccttgggcaaacaacataacaggattgatttaaaacccacataataatgagttctattaagcttatgatcctggccaggtgtggtggctcacgcctgtaatcccagcactttgggaggcggaggtgagtggattacctgaggtcaggagttcgaaaccagcctggccaacatggcaaaaccctgtctctattaaaaaagtacagaaaattagctgggtgtggtggtgcgcgcctgtaatcccactactctgtaggctgagacaggagaattgcttgcttgagccccagaggtggaggttgcagtgagccaagctcacgccattgcactccagcctgggcgacagagtgagactctgtctccaaaaaaaaaaaaagattatgatctctctgtgcagtaagaaactaaaattcatttcttatagtgcttgtgacttaagggtatacaaagatattaatatacaaaacaaggacccttattcttgaagaggttacaattcaagggcatagggaaagactaagaaagggttacatacatctgccatatcctttcattctctcagtgctaaggaactaaatgtgtg

SEQ ID NO: 40737 - DNA, 1030 bp, Homo sapiens
attgtcaccatgtaaggtagagctttatggtagattctttcttaataggtagtttattttctgcaatcatagcctcttaattataattgcagaggaatgttgcaaagggccatggccctgctttgctaaactctatattgtttcttagccttgttggcacctgcattaaaaaggtggctttccctttaaaagactttgtatatgaattgttttcagaagagagctgtgctgaaaatgaagttaactaaaattagaggtgtgataccaacaaaatcaagtatttatgttattagaagcatggattttgtaaaagctgattgtttatcccgtactgttatcaaatatgtaggagagaggacaaaaaagtttttggggttgtttccattaaacaaacaaaaggtgtatttagggaggactttgaaagatttagtggataaattgcattttttattctagcttttattgtaatatataaacccgtgttgaaatgatagacttcaaaccattaaaatagcttgactgtcctgaccctgtggggaattagttccaagacttccacagatagcaaaattcatgggtgtttaagttccttcaataaactggtatagtatttgcatataacctatgtatatctccccttacactttaagtcatctctagattactcataatacctaatacaatgcaaatgcagtgtaaatagttgttacactgtatgatttaggggaagattacaaggaaaaaaagtctctacgtgtttccagcagacaccaccatctattttttaaaaatattttcagtctgcagttgattgaatccacagatacagagggttgactttatatatttgagaggcttcttgttatttactattataggaaacactggagctttacctaaaagtattaattttattgaaatttagttgatgaaaatctgtgattttgttattttctcttttttaaatcttatgcataagtttaaagacattgtgatataagatgccgtttaaaaagacaggctaggaatt

SEQ ID NO: 40738 - DNA, 1061 bp, Homo sapiens
tcaagtcctaagaaggaaataaaagactgcaggtataaagtaagagagggggccgggtgcagtggctcacgcctataatcccagcactttgggaagccgaggcgggcagatcacaaggtcaggagtttgagaccagcctggccaacatggcgaaaccctctctctactaaaaatacaaaaaaaagttagctgggcatggtgacgggtgcctgtaatcccagctacttgggaggctgaggcaggagaatcgcttgaacccgggaggcagagaggttgcagtgagccgagatcatgccattgcactccagcctgggtgggtggcaagagcaagactctgtctcaaaaaaaaaaacaaaaaaagtaaaagagaggggacctttgatagtgtaatcagaaaagggaagacctgaaggaagagaatgggccagccttaaaaagagtttactacataagatattacaaatagcaaagccagatagttattaatagaacttggtgcacttaatgggaaggaagacaaggaaaatgtggagtcccatgttaggcagtaaaaagtgggactgcacaaaactgtgtagtaagaaatttgactttacccagaggtggaaagccattgaaagtttctcaaatagaatgcattctctcaaaataattggtaaggagttgtggaatataggctggaagcaagaattgaacacatattggtccatataaaatgtaatggttgcattttagatagaaatagacatatttaagagagatttgggcctcaaaccaatagaactttttgatggattagaaatggagttggagctgaggaatggtgttagagaatgaaggatgactcctaagtttctggattgagcagttaggtggtatgtggtactactcactaagattgggaatacaaataaagagctctgttttgaacatcttatatttgagatccttattgaattcaagtgaaaagactgagaagagagttaacctctgtgagtttataatccagagaggagagtctagacatagaaatttgggatttctcagcttatatcaggtga

SEQ ID NO: 40739 - DNA, 1025 bp, Homo sapiens
aaaatctttgaatgtccataaaagaacagatatagaagtttttcctctaagtggctgattaaatgggggggggggcaatgaatttatatgaatttaagagaaaatgaataaaataaaagcaatttttatttctgatagtatggtagaataggtaccctatatcatttatatcaccctcactgttgaaataactaaaatatatgatgaaatatttaaaatatatgtctaaatctataaatataaaactatatctatgaggctgctggaaagtaaggagtgaacagatccctaacataaaataaaatcagaacacccaattggtaagcaagttatcaagtggctattgctgtgagaatttttgctaaaccctagaattctttggcttccattctgatggttttgtgggaccagctgtgagatacagcctaggtcttggtcagtgcagggaatctaacaggaggcattcataaaaacagtattctagagagctatactgccaatgtaagaatgaatttgcaatgaactctgatatttcacaagcaaattgattttggcatagtgtgagagaatggaattctctgaggattcataatcccaaattggtctttgcttgagtttgggttctgattcatcctgcatgtgtggtccataaaacctcaagcatgatcccagacgaccatgtccttaggtgactagtagaaaaaaatgtataacttcttcgaaagaactcaacttcagcccaggattcaagataccacaaataaagtttcttataaaatgaacagtcaagagtgaagtatcacaaaacagtaaaagaagtaaggcactgtgagtaaaatgacagaccacaaaatcctcatataatagaatttttgacatggaatataaaacagttatgtttaaagaaattttctcactttgggaggcggaggcaggcaaatcacgaggtcaggagattgaggccatcctggccaacatggtgaaaccctgtctctactaaaatacaaaaaattagccaggggtgg

SEQ ID NO: 40740 - DNA, 1067 bp, Homo sapiens
aggggagtcttttgtccaaccaaagtcagttaaaggagagagagtgagagagagagcctgagttatagagcaggataatctgagtttggacttctcgctgagaatgcttggcatgaaacagtagggatgagccttcttcaccatgactgtctttaggggaatccactaggctgctttaatgctgctctttatgcttctctatttataatgaagtgctgtgagaccctgtagcagagatagtattgttttttgtttcaatatcaactggtactttttctctacaatgaaaaatgttttgtccataatatatatcacctcgtctctggttttattgttgaaaaccacctgacttgcgctccttttcttttcaacattttttattaagaaaatatttggaaggaagcaataatactaaattgcagaattacaaaagggcagcttatacagctaaattttaagatactctgagggacaaagaaataaagccactgatgctgggtaagaaaaatgtgtgacaatggaagtatgcaatgtgatttacttggctggctaccatgtaggaggaataaattctataatcttgccaaaacctaagggaaatgtgaattgaatagcaataaataaccttattggaaacagttgaatgtgatatactgtatcctctagccttaatacatgaaaatttctcattgattgcagcatcagactcaagtagactgaagatggggcaatttttaatgtactccacaatgtcccttctgttccctgccacaaccttctcaaacttgatgagttagaaggtcaggttaatctatgtatgcaactccaggctttttggcctctttcaggattaaataaaacttatagaaaatgtttttctctgttcctttcattttgttgttcagaagccattctatgtttataaatactgtatgtttagtaacattttaatttctcttattcgactaatgttttaaaggtatgaccactttagaacattttcttattcaaccctcacagtattgctgtgagctaaaagagagtattatttttcttgcatgtttaca

SEQ ID NO: 40741 - DNA, 1026 bp, Homo sapiens
atgcctttaccttccaccgtgattgtgaggcctccccagccatgtggaactgtgagtccattaaattgagtccattaaacctctttttctttgtaattttcccactctcgggtacgtctttatcagcagtgtgaaaaaggactaatacaactgccaattctgcctcctaagcagaacttgacaccatctatttctctctctggaaggtctgctaccctactcaagagactcaactctctttcttgacttgcaatagccttttcattggactttatagcctcagcctagcacccctacgggtatgaatcccaatccacaactcaagtgtccagaacagattatattaatactattttccatagccccagctatttactattttgaagccatgttgaacctgccaggatggccagaaatttaaacacattcatttgggaggttcagggtcttccacagtgccaaatctcaggtggggcagggacaatagaaaatctgatccttgatgaacactggctgccaggaggctccaccactgcagtgcgcttcatcctgttttccaggacacagagctcagagagcctctgcaccataattcagaaccctctctcctttctcttatttttctcttctctctcttttctcctctccttttaggcctctctcttttctgcctggaggactgcccttcctgccttgcattttctcacacctccacattctcttcctgttacccattgcacacaatctctaaattgctctaaggcaattttggatcaaaagagccagagagaacatttctgtttttcaccttgccatattccttacctgaggcaatgagcagagggcctgttgtctgcttaaatagagaataggggagaaaaacgaaacacagggagaaaaaaatagatgaatatctgaaatactatctcaccatgcattcaatatacagaagccaagcagactggctgcaagacctaaaacactaattgaatctcgttattcccttgtgtgaacattttcggtggc

SEQ ID NO: 40742 - DNA, 1044 bp, Homo sapiens
tatgtggtcttttgtgactggcttttttcactcagcataatgtttcaaggttcacccttgttatagcatgcatcagtactttattcctttttactgtacagtaatattctattgtatgaatataccatcttttattcattcatcagtttgtaagtatttgtgtttctactttctagctatcatgagtaatgctgctgtgagcattcatgtacacgtttgtgtgtgtggacataagtttttatttttcttggatatgtatctaggaatggaattgctgggtcatatggcaaccctatgttttgtgtgttgaggaattcacaaattgttttccaaagtggttgtgccgttttataatcccaccagcaatgtatgagggttcaaatttctctacattcttaccagcacttattattgtctgtcttttttgttttagcttttctgatggtggtgaagtgatatctcattgtagtttgagattgcatttccctaattactaatgatgttgagcatcatctcatgtgcttgttgaccatttgaatatcttctttggagaaaatgtctattcaaatctttagcccatttttgaattggatttttttgtatatttaaagtattctttatatgttatatatacaaaactcttttcagatagatggcttgtaaatattttctcctattctctgggttgtcttttcattttcttgatgatgtcctttgaaatactatagcacaatagttttaattttgatgaaatccggtttttttcttttctcatccatacttttggtgtcatatctaaaaaaaaaaagactgcctaaaatactaggcatattaagccattttacattttaacccttagtcttttagacttgcataatttttcctttgctgtattatcaggctgtcttcaccagcacttaaggaccatttctctggtgttagaacatgagagagggaacagttttcaggaagtcctttttttatagaaatcatttagctcctagcagccactagcagtgaacataggaaagagcagataagaac

SEQ ID NO: 40743 - DNA, 1060 bp, Homo sapiens
ggggtgggaggggaggcccctgaggtgctctccagggaagaggggctggggtttaaatagcatgcttggaggaagattttccttcaatttttcctaagtccttgaattcaccagtagatttttgtaaacaaaatgtaagtcgatgttttctctcaattatcctaggagtgacctttatatgtgtggaagattaatggtatatgctccttatgtcactgtttttgagtaaaatccatttcctttctctgtttcagcctatgacaaaattgatgtttacaggcctgctttttgcttataattgacaacatgtgcaaaaataccaaatttgtgtcctgtgcagtatgaagaattcagtgaatattcattaatgtattagcttgttttgctctctgttcatatatggctctattcttagaaatataatttgaatgtgatctttcaatagtctgaatattttacaaattatagctatgtcttgtgaaaataacctcaaaaagaaaaatacgactctgttgtcttacttgatatttcttgccctagtaatgtacttgacatttatgttcctaagcagtgtaagtaccagtagaatttctctgtcaaactcaatgatcatttagtacttttgtcttctcccatgtgcttgaaggaaaaataaagtgtcactaccgtatttcttgttttcatcaaaaaataaaaataatttaaaaaattctgtgttgtctaggttaatttaaggttgggaaatcattaaagttatcaaatgataccagtaactatcatcctgaaagtttaaaaaaaaaaaaaaggcaacagccaccaaaccttccaagatttttcacctgaaaaatggtaaatgggagcccaactgcaactgcatactcatgagcattattttttctacataaccagtgcagtttttggtggtaattgaagcaccatatagtatcacttaaaatactgttttcagtggaaaacttgtctatgcagcatccttgttcattacatttattattaactgtgccttccgagatctaataagcttaagatagacttttggaag

SEQ ID NO: 40744 - DNA, 1328 bp, Homo sapiens
tttttttttttttttttttttgagacggaggacggagtcttgctctgtcgcccaggttggagtgcagtggcgcgatctcggctcactgcaacctccacctcccgggttcaagcgattctcctgcctcagcctcccgagtagctgggactacaggcgcgcgccgccacgcccggctaatttttatatttttagtagagacggggtttcaccatgctggccaggctggtctcgaaccccgatctcgtgatccgccctccttagcctcccaatcctctcttaaaaaagtgatagctcagaaacatttgtaaaagcaaggtttttatttcattttggctctgtcattttcagaggcaaagaagttggcctgtaaaatagagtgctagagctcttacgcccctccccttcttcccaacttcctacttcctagcccttttatcaactcctagaatagttaaagagagacacatctagatgggatgaaaggtgccctaagcaggagaaactgaacaaaaggctagaggcatgggccaggtaaaaattgggcctagagtgaagactgtgctgtcgttaagagctttcgaggaaggagtacttactccccaatgatgatgaatggaaaaatacttttcagggagaattgaaggggttaaagtgttaaatatgttgcctagacaagggttctttaaagaaagacagcgcaactttgaatgctttcttacttgttttgtgacctaatttatgtggaagattgttatttcattaggatttagtaaaatttttttttctgattctaaacttattgtgaaaattgagctgtacagatattcttttgatttcaattgggaacatttggaagaacaacagtcttacttgcctgtacaatatagagacatatgaatagtcataacagttttcaacttgttcttgtttctgttaaactatattcctagaaacatagtttgaacaacttggtctttgttaggcttgtcaaattgccttcatggaaaaataatctacaaaagtatggtttaattgattgtcttacatgataattttccctggtaacaacttagtaagtgatatatcttttttcctaaattgcttaaatactgtgaaattgctctgacaaattggaagtgtaccattggcatatttgtcttcctttttatgcatgatggtaaaataaaagcatgttgttctgctagatttcttatttttcaccttacccataaatgtaatgcttgaatgaagttgttcatattaattaaaaattatggaatcattaaagtcctttaatccattaaagttcttaatggattaaaatcatt

SEQ ID NO: 40745 - DNA, 1071 bp, Homo sapiens
ctctgaaattacaaaaattactgatatttgttacatgaatgaatgaaattagatgtttattcttttccttagacttaatagaccaaaaggagtgtaacatttagtattataagctccttcatggtagagactcttcttcatttctatagccattcctcatatttcctggcagagggcacgtttattaaattagaattcaattttcagattgtggctgtgtcccagtctagataccatggtggataatttaatgtgtccatcaaataagagcaaggactttgaagttgaacaaaactaggctgaaatctagactctgtcactaactgtgtgaccttaggcaggcaagtcatttaacattgttgagttccactttctcatcagtaggattttgatatgcaaacttttctcatacagtttctggaaggagcaaaccaaacgttgtatataaaatacctgccaaggaatgagaactcagtaagtaggtgtttattgtcataacttagaatggttctaggggctgtcaatgagagatacaccctttggaatcagtcttgtgtggactggaacatgcctgggcatttttcaggcaggatctgaagcaattaaggtgagtgataccctacctctcagaaccctgctaaaagtagttgaggtcatgccagtttttgcaatagtttggaaatcaagccttctgtgctcttcaggaggagataaggattgtcgtggcagtattctataatagtaattctaacccctgggtgcatattagcatcacttgggagaacccaaaacacaccaatgcctagttgtactcttagaaattctgatttaattccttctaggatgaagtccagataccccatatgcttttaaaggtacgagatagttccaatgtgcagccagagttagaaccaatgctacgtagtggtgcttcccaaactttgctgcacattagaaccatctggagagctttaagaacttccggccacgtgcggtggctcacggctgtgatcccagcactttgggaggccgagatgggcagatcacgaggtcaggagatcgagaccatcc

SEQ ID NO: 40746 - DNA, 1050 bp, Homo sapiens
cccactttttcatggggttgtttgtttttttcttgtaaatttgtttgagttcattgtagattctggatattagccctttgtcagatgagtaggttgtgaaaattttctcctattttgtaggttgcctgttcactctgatggtagtttctcttgctgtgcagaagctctgtagtttaattagatcccatttgtcaattttggcttttgttgccaatgcttttggtgttttagacatgaagtccttgcccatgcctatgtgctgaatggtaatgcctaggttttcttctagggtttttatggttttatgtctaacatgtaagtctttaatccatcatgaattaatttttgtataaggtgtaaggaagggatcgagtttcagctttctacatatggccagccagttttcccagcaccatttattaaataggaaatcctttccccattgcttgtttttctcaggtttgtcaaagatcagatagttgtagatatgcggcattatttctgagggctctgatctgttccattgatctatatctctgttttggtatcagtaccatgctgttttggttactgtaaccttgtagtatagtttgaagtcaggtagcgtgatgcctccagatttgttcttttggcttaggattgacttggcgatgcgggctcttttttggttccatatgaactttaaagtagttttttccaattctgtgaagaaagtcattggtagcttgatggggatggcattgaatctataaattaccttgggcagtatggccattttcacgatattgattcttcctacccatgagcatagaatgttcttccatttgtttgtatcctcttttatttcattgagcggtggtttgtagttctccttgaagaggtccttcacgtcccttgtaagttggattcctaagtattttattctctttgaagcaattgtgaatgggagttcactcatgatttggctctctgtttgtctgttattggtgtataagaatgcttgtgatttttgtacgttgattttgtatcctgagactttgctgaagttgc

SEQ ID NO: 40747 - DNA, 1035 bp, Homo sapiens
ctgtctctacaaaaacataagaaaattagccaggtgtggtggcacatgcctgtagtcctagctactcaggaggctgaggtgggagggtcacttgagccttggagttgggggctatagtgagccatgattctgccactgcactccagcctgggcggcggagtgaggctgtgtcaaaaacacgtacaactcatcccagcatcccaccgctggcattttcttcacttatttacctcatttatagagtatctcttcctattagaatataagttccaagaacacaggcacgtttgtctgttttgtttgctgttatataccttcgtgcttggagtagtacccggcacatagatacttggtaaattatgaatgatggtttggattgacaggaataaacagaagtaaatgttaggaatttcattgtttaggaatataaactataagagattaagctccctccactgatattctagcatttatgggtttacttttgtttaccttttggaatcatgagagttttgttctagaacagtttttgttctttcatttgagataatttgaataagaaggatcaaaggattgggaaaggaaaagtaaaatatttggcagaataaaaatgttttttttggtaatgaagcctttagaaaactaaagttaaatgaaaaaactgaagtagaactaaactcttacgtcttaggagaacttagatacatatgtgtcagagtctgactgtatttatattctaaacacacatatgatcacacaacatacatacagagactatttgtataactgtaaatagatgtgacgtatgtataacttaaaaatcttttgataggtcacagtcgaactgttattggaattgaagagaaaaaaaaccgaacattatgcttactaatacttgatcctggatgtccttctcgagaaatgcagaaattattaaagcaagacatagaggctagcagtctcaagcaacttcggaaatctatgggaaatttaaaacataagcaataccagatattggcagtagagggtgctctt

SEQ ID NO: 40748 - DNA, 1028 bp, Homo sapiens
atgatgatggctaacctctgaggcttagtttagattctggtggtaaaaaatgtatactgggatatgaggtgtagtgtggtctaatgttgaggaaggttggttatcacttaaaactagaaggggtggagggattggcttgcagtagtgtgatgatcaaagcgataagcaaaggcctccttggcattggctctggctctaaggcattttatggtagagaactggctgaaagacttctcttacatccgccagcattacttatggaagctgtataccattatttcttactgctgcttttggaaatattttctgagtacttaatacttcattttctcttgagctttgccattgaattttttattccaatgattacatcttaatattttcattttcttcatctttctattttttcttagtaactttctgtcctggtttcaaagattcagttccctcctttatttcagtgagcattttgaacatacttattttacagtttattatggattactgtagctccatttcttcacaggtaactttttcagtttgtagatttcttagctgtttttcttggcattgcagcccccagtgagtttagcaattcaaattttagtgttcatctgttatgggagttttatatgatcccttccctgtgaagcagtttcatggttccttcacactggctgttcacagtctctgctttcagaccaggccttacatatacagattgctctatgctttcactctgtgtatatgcacaattctgggtccctcttctatgtcccttatctgctaggtcttggtcttatagaggaacaatttctgtttttggcaagctagacctgtctgcctgcagtgctatgtgatggatgcagctctttaatctcctgctcctgtgtagacagtattaccccaattcccagctttatgctggatgtttaagttcagcaccttaccactctgttgggtgctgagaatttagtcctaaaaacccatatccagactgggccctacttaccactttggttttcctt

SEQ ID NO: 40749 - DNA, 1078 bp, Homo sapiens
agagttgacctgaacagtgctgtcaaccaagttgatcaaattgacatttatagactactccatccagcaacagcagaatacacattcttctcaaccccccatggaatatccaccaagatggcccataaaatacaccttaataaagaagaatatatagtttatgttttcagattacaatgtaatttaactagtaattaacagaaagataggtgaaaattttcaaaatgtttagagataacacaacacacttctaataaccataggtggaagaagtctgagaaactaaaagtattttaaactaaatgaaaatataaatacaacttattgagatttgcgggagcagcacaaaagtggaatttttcttgtctctttctcacaagatccaggtgggattcctgagactacagcaccctggactttttcactctcatgtcagtccacactcagcctccagcaattcatcaaagttaccatttaagtgttcctaccaattttggctctatcaacttgtgctccaggtaagctgactgtggctgtgattttctttatttacccttctttccagattttggggtagcaatttgttctgtgatctcaattttttcaggactccagggaaagtaactgaatttttatttgttcagctttttttcttgttataagcatgggaatgatgactcataggttccttttatgtcagaactgactgatatttgtttttttaataagtaatttactcacatagttcaaaattcaaaagcatgcagtaacagatggttctcttctatttcattcttagttgccatttttcccacctgaagtctactagtgttatttctttctgcttatcttttcaggaatgctctaagcacatatacaagtatctgaggtttttttccccacacaattgatagcatattctatgccctattttgtatttttcttttaaaaattagtacattacagaggcaattccatgtcagttccatgacaaacatccttttaaaagttgtgtaatatttcatcatatttccctattgaaggatatttaggttgtgtccaatgttgaccattccaa

SEQ ID NO: 40750 - DNA, 1043 bp, Homo sapiens
tgggactgggtcagttctctctctgtatataacttgccacattattttagttggtccacatgtgtatttatcaacccagttgatatgaaagcttgtcaagggcataaattatgatctatgatttttaaaaatattatctacaattttttttctcattgtgctggcatagttctgggcccttagatgcttagcaaaattatgttgagttgaataggaaacaaaggcatgtcttgatctttaatctactggctagctgggaaaaccaaaaacacaagggacacatcctgtgcacaattgtaaaacaatgtatcaattgtacaaaaatgaaaacttcagactgaattggtaagtggtcctgatgagttgctctgctatgctaaagctgaagacttacagttaactctgatctttaggcttaccatagtctcagaagttgataccttagcacctaaaataactttactagataatgattgggatgatttgggctagtattcgttggattgaagacagaacacaactcacttactgacatcttctctaatactgttaatgttagtgatccaccacagcacacattgtctctaccacatggtgaaccacctcatagttttgtgttttcataagctttgaagataaaggtgaaacagtaaaaaggtttcttaaagtaagcaaagtaaaatggaagtagcattctgtgttattagaagatacagcttatagtggatttctcttgctaccgaaatatctgacttatactattgattttctgtcagtttagatggatgtcttgtatcttggataatattattctaatgtttgtgtatttatttcaaaggtagtctctctgttgtcattcttgaataacaattattagtcaaaagaaagaaaattaagcatccttaatttcttctattgttttctttataaggcacagttggtggatctgaaatctgaactgacagaaacccaagcagagaaagttgttttggagaaagaagtacatgatcagcttttacagctgcactctattcagctgcagc

SEQ ID NO: 40751 - DNA, 1022 bp, Homo sapiens
ccatagaccttgggacctgctgctttagtaataatcaaaactcttcccagaagaatagccatacacttccactctgctaattctcttagtttctttcatacagctcattacaatttgtagttttatatatatatataaatttatttatttatttattactgtttggggggttggtttttttaagaaatgggggttttgctgtgttgcccagactggcctcaaactctgggctcaagtgatcctcctgccttagcttctctagtagttatgtatgcctggtttactggctttttaatgaccatggtgaagttacctaacctctatgtacttcagttgtcatatctggataaaaagtgcgtctctcagagtatattatgaggattacatttgcttgtctagactgtagaatgttattttttgggggagaactaatggcagatgaacttagtggtcattatggttggatggaaaaaaaatagagtgaacagatacagctttctcacagaactttcatagaccagataactgcttcaagagctgacctgaagtaaggaggagtattatttcctatcttgagggatggcagagattttcaatttgacctttgaatatattttctgtttggtcatagtcttgtgttttagagtaagactcattagatttctgtgattttgaccacctcaggcacatagaagaaagaaaaaatagagggagattttttataataaagtgaatgagttaaatgatattttgaaggtgtacaagaaaaggaatggatcaaaatggctttcattagttacattttcttcttgacttttgtcacaagagaaaaggtcttatgaagaatggttctgcctctgttgtctgtcaggtagcttaggatcttttatgtaagaatctctgttcctagcactttgggaggctgaggcgggcggatcacgaggtcaggagatcgagaccatcctggctaacacagtgaaaccccgtctctactaaaaatacaaaaaattagctgggagtgg

SEQ ID NO: 40752 - DNA, 1027 bp, Homo sapiens
tagttcactctgactatggtatggagaaaattgcagagaatgacatgaatgaatgcagaaaattgtttagaaggtttctgtttatgtgagattatgatagtgtggagtaagataatagaggtaggagaaggtattcagaacaagagaaactggagaggtaaaaataaaaaaaacctagagatggattggaacagagggatgagggagttcaggataaatccaagtgacaatcttgtgcagctggttgcctgaatagatagatgaatgtgttatattattagcaataacaatattgccaactttattgatcagttaccatgggccaacctctcttctgagtcttttacatagactgattcatccaattctcacaacagtcctggaaacaggtttattagtatagttactccaactttacagggattaagtaagaggcctgaggctacggagctagagaaatcagtctctgcacaaacacattatgtctgatgggggatggaggaggtggagagagaagcagacagaaagagtgagtgtggctgaatagatagcaagaagtgagattgtagggtacaagggaggttttgttttcattttgtttttaaataaaaacaaataaaacataagtctgtgagaagcatctacttgagagaaaagccaaatatagaaaaagagtggggtagttaatattagtaagattttgtaataacagctacttagaagagggagagaatgggagcagacagtaggaggttgtggaagtttctgtctgatggcttttttttttctgtaaaataggagcccacgtcagttgctaaaagtaggtgagagtaagagcatgaggctagtagaagaggtttgagatagtaatggaagagtgggagagccaattggccagagaaacaggactgccaggcattgttgaggaatggcttggggttagttatcataaattatggtgcaaccggtctgtactgttgtgtgattttctctagcaatgcatatctgtttaggtacaggcacagta

SEQ ID NO: 40753 - DNA, 1049 bp, Homo sapiens
atggatcaggcagcccccagaatcacagcagatttagagactccagcacagcaacatggtggaagatttatagacaaaaatgggaaatgacatacagaaatcagaagtgaggtacagaatggctggattggttacaggttggcatttgccttatttgaacacagtttgaatactcagcactgtatgaattgttgaagtatggctactgggactggctaagactcagctattgttacaggcacatactcctaagttaggttttcaatattgtctacctattaaactaggttgcagttcgtccacatggcctcatatatagaagtacagagtcccttctcaggccatatttagttcgctttaacaggagaaacttagtttacagttcagctttgaaacaaacacaataacagttttttcccaaaacaaaccttacaattgtttgaaatgcttgttccccggtgctgtaaagaaatagcacttgaacataaatttaatttactcagcaaggccatttttatactttctgtagaaaggatacactcgctagcagttttgccaagacagcacaaggaacaaaggagacagggttatttataacctgacgtgtccaccctaccactctgtccagtttccactggctagaacgggaccttacattctgtatttgtcctgattggctagcaacttagaactttttaaaagaagtaaaggtagatgagaacaaaggaaggaggaagtaacttgtggaatactgagaaaggtaaaaacaccttcaaataaggaagaggaataggctgtgacctaatgcttgcttggaccagtataagcatgctagggcaaatatttaggctaaattgtgggagctaagaacataaagtgtattgatttctttatcatggctagcagatatttaagaatgttagcacaggtctttgaatacattttgcgtctaaccgagaagttactatttattcctaattaaatggggaggaaagtctttgaagaggaacctctatttactttttacaattccccctttttattttata

SEQ ID NO: 40754 - DNA, 1120 bp, Homo sapiens
tttctatcattaatatattaactagtatttgttatttcctctgtattctttcttcatacagatctagatgtttagaaagaatatcacaaaagagctggttatggtggcttgcacctgtaattctcagcactttggatggctgaggcaggcagatcacttgagtccaggaatttgagaccagcctggccaacatggtgaaaccatgtctctactaaaaatacaaaaaattagccgagtatagtggtatgctcctgtaattccagttacttgggaggctggcttgaactcaggaggcagaagttgcagtgagccaagattgtgcctctgcactccaggctgggtgatgaagtaagactctgtctcaaaaaaaaaaaaaagtatattttcctaaacatataggaattccaactacatgcatatcttattatatttttctctgctaaaatgtaatctctatgacagcagggagtttttgtttgttttgttcagatgtcactcccagtgacgacatcagtgcctcacacacagacaatgcttaatagcagttgttgaatgaatgaacacattttacgtaattaccaagcactgcaaggtaattggatcttctcagtaggaactcctgctactaagcagcatttattagtgtatgaaaattaaaatatattaagttatactttatttgcaccataaaaggatcctcactgcctatgtctgactgtgaaccctactttgaaaatcacagatctgaactctacagcctactattgtattttattatttttttcttttattctgacttagaggcattcaggtactactgtattttaaatacttgctgctcaaaatatggcccaggaatcatcagtatctgtaccaccaggagcttgttaggttgattccataacttggctactgtgaatagtggacaagattctgcatttctaagtgtccatcaatggatgaatggatagagaaaatatggtatacatgcataatggaagattatttagccataaaagatgagattctgtcatttgcagcaacatggatagacctggaggacattttgttaagtgaaataagccaggcaaagaaaaacaaataccctatgttctcattc

SEQ ID NO: 40755 - DNA, 1049 bp, Homo sapiens
agcccagccttccctgtgtagtgagctggaaactcctttagattgtattcattggtgtgtatgtatatgtacatatatgtataaatagttaaatacataaacataaaacttaacatcgcattgttgtgatgacaagaagtagtaaggtgctaggtggttacattaaaaagcacagcacagtgtataatcagtcactatgactggtggttttgtaagctgggttcagtttttgaaccacccagaatacctcatgtgtaaatacagtgttcatgacttaattgaaatacagttattgtttaaaaaaaaaaaaaaagaatgtgaagccactggttggcttatgccttctgatctatcattcttgcctctttttttgtaaaggggttttcttcttgttgttctgttttttaatagggtttacagctagaattttgaatgccaaagttctatttattaaattaagaaaaaagttttcaatgttaatggctagtatttttccactggactattgtttgttgatgttggaatttgtatttacagagaaataaattttttataaaaagatttatgtcctctaagagcctaatgttagtataagaatgtatttgtactttcagactctctattctgaattctcaatgacaagaatgtgctgtcttgacttttaggtgaaagctttgtataaatgcacaggagaatctttgactaaaacatggagaattctgccttctatcttataatttctttccaattacaaaaaagctttttctcagggccttctcataaagggtactgagattttctgatggcaggtactgtaacataggaaatcatgcctgtgtccatttcagttaatagcacagtgtctcctttctgactttctagaatccctgtttaaaccaggagtcttctttctagttttccaacagacagaatctgacttcagtattctacgttgctgaaagttttggttggcaagttaaatcttttattttccaccctctaatcaaaggttaagaacgtactaagacatatgcaaataaagcctacag

SEQ ID NO: 40756 - DNA, 1072 bp, Homo sapiens
agataaagggcatagcacatgcctgttttcttatatactagaataaaggctctcctaggaaagatttttcttaaatatttaaaagtgaaaatgtgagacaaggccttcaaggagactacccaggaagatacacagtttaaaatgttggctatacagctctcaatagattattttatagttatagttgaataatcagttataatacactgtaaagaaatcagattttccttctgtttggtgtctgagtccttcctgctcttcttacttctgagaatctgggcactaagaaatcagtaagtacattgtagtgctcctgcatcccagagtccttaacctaaggagggtcttagtcactggtaagaacttggctttctaattatattcacttggtttttaacattagtagcttgacgataatcagggtatagtaaatttccaccaaaaatgtgatgcgaagaattctgccttggtcctttatggtaaaacagataataacgtctaaaatagatcagccacaagtgcagcaaatatttttacactctctttgaatagaatcccaaccaccctcccccatgattttagaaataaaggcttcctaaaataatagaacaaattggcaaacaatcactaattggaccagtaggttcttacttaaatatctctcctagatttttagtgtatgttttgggattttatgggtttatttatttttttttttttaagcagacgttacagtttgttttaatctactatagatacgtttttgttttttggcttagttggggataaaataatttatttgtaagttagctttctaaaacttagagaaagtaatttaattcacgtatcttaaaaataaaattccaaagttaaaaaatttctgacttagtaggaagttaacaaaactactgctgatgcatttcagtttccaaaatctgtaccctccccccataaaaaagggagttaagatgtgctagtttaagtagttagctgaattatagattgatcctcttaaaatctggagtttgtaaaggggcctacataaacagtagatagacttggagggattttg

SEQ ID NO: 40757 - DNA, 1038 bp, Homo sapiens
ggggtaatcgcccccatgattcaattacctcccactgagtccctcaacatatagggattattggaactacaattcaagttgagatttgggtggggacacaaccaaaccgtgtcattccaccccagcacctcccaaatttcatgttctcacattttaaaacacaatcatgccttcccaacagtcccctaaagccttaactcattccagcattaacccgaaagtccaagtcagaagcctcatgtgaaacaaggcatgttgtttttttaaggttttttttttttctctttttcagtattggaagtttctgtcatcatatcccaagttcaggaattgtttcctcagccaggtctactctgctaatgagtccctcaaggacattctttatttctgttagtgttctcaatctttagcatttcttttttattcttttctagaatttttatctctacacttacgttatctgtatgttcttgtatactgtctacattttctatcataatcttactaatcctagttgtcaaaaatccctggtctgataattctgacattcttgccatatctgactctgtgtctgatgctttgtggtctcttcaaactgcgttttttgcctttttgcgtgtcttgtaatttttgttgaaagtagacatgatgtccaaggtttaataagtgtggtaaatagagctttagtaatgcagtggtaaagtgtgcagggaaggggaagtattctatagtcctgtgtttaggtctcagtcttttggtgaatttgttcctctggattgtgaacttcagttttctaagattttttctttccccacccttaggcgggacaggatggcaggagggcgatggagttggtatttccacagggaaggccaaaggagcttgatttgtgtattaaccctcctctatgtggaaggctggagttggctggagttgggttattccctttaccccaactacgttaagctctgataaaaccccagcagtttaggctctggtaaaatagtttctcctgacggcaggcatttttaagaacag

SEQ ID NO: 40758 - DNA, 1029 bp, Homo sapiens
tgtctagtttcttttttttttctttgcatgtggatgtccaattgttcagcaccatttgttgaaagggctgttttttcccctgtattgcatttgctcctttgttaaagatcagttgactatatttatgtgtcctatttctggactctctattttgttgtattgattaattttatattttatcactaataccacattgttttgattactgtagccttattataagtcttgaagttgggtagtgtcagtactccaactttgttcttttcctttagtattgtgatggatattctgggtcttttgcctcttcatataaacttagaatcagttcattgaatctactaagtaataagctaggattttggttgggattgtgttgaatctatagatcaaattggaaagaaccaacatgttcacaatattgagtcttcctatccatgaacatggaatatctattcatttatttagttcttcttagaacatttttagaagagttttatagttgtcttcatatagatcttgaacatatgttgttagatttatacctatcttattttttgattgcttatatagatggtagtgaattttttaatttttatattccacttgttcattgttgacatactgaaaaatgattgacttttgtgtgttaaccttgtatcctgtaaccttgctataattagttccaggaaggtgttttttgtttgttttcactgttccgaagtttaattaaaagcacaatttacaaatatttgatatcttgtgaaagcgtttttaagttaagaatggaaaagtatgtacataatacataatcaaataccaggtggcctcaactcccactaggtccactccgtgtctttttaggttcttcaagatcttctgttaaatctacaaagttgttttccatgacaggggaaggaatggaaatccccattgctttttgaactccatacatgcttacgatatcacctggagttacttgttgtacaagttctttaagattattggtcacctgttcagcaagatgcattt

SEQ ID NO: 40759 - DNA, 1057 bp, Homo sapiens
ttttgaaatgttactttgatggcatactttgtttcttcaaattaactcacatagttacaaggtttataactaccttttacattgcatgttcatgtcaaagttttgtcattaataagttataaattatatgcttaaattaacatgttctagattacttatattggttacagtgatgtagaaacatgatagattactttgaaattctaagtagaacagcatagcaacagtaattttatgatttatcaatatgtgaattttgatacatgtttttctatcaaaacaagtacctcggttttctgggatattgtcaagatgtatattttactagtaatatataactgccatgcaatggtatgcttctcaaagccagttatgactttactgaataaaaattcttgttttctaactacttgggaaaaaatgtgttactaaagggatataggggagaagttatttgaatataaaatcctttcctcttttctatattaggaagcaggattgtcttctgccttaatagaaggcttctttgttctcctagagttctgacagcgcctaagaaccagcttgtaggttgttatcaacttcattcttcatccatgcattcttggtgtagggtatatatgtcatctggccttttctcttatctcatggctagttgcagatgtggagttgcaccaaagtgatgatgagataggaacttacagccacgacagtgcattctgtcatctatagtgcatctttgggacttaaggattctcttctagcagatgaggcctttatttcccttcaatacttcttctaaggtagaaagtgaaataaagtataagtatttcctgtattatattttttgttgatgtctaacatacagtaaagtacataggaatattaatctttaataatagctccattccaatacacacccacatacatctccccttataatcaccactcaggtcaggatacaaaatttctaatgcccagtaggtttagcttgtgactcttctcagtctttatggtgacaccttatatcctacccatctctactgttctgacttac

SEQ ID NO: 40760 - DNA, 2038 bp, Homo sapiens
tgaggaaacgtttcatttactaaattgaggattgtaacataaagaatagggtagaattcaaacagaagtcataaaattgattgtggcatctccattcctggcatttattttattttttcctttctttctaaatccgagagaggaaatggagtaccactggaggataataacttgacaaaactataggcattaataggcagaaatccatttaatcaaatttgtgtgaaaataagatagttaagaatattcgtgtgtcaaaataactttttaaagtatcaaattattctctaacgtcagattttttgtgtttgtgaacattgttttaaaatttctaaacttctttatgatacaatattgaatttaatatcagtaactcaatttattaatagcatggaatttttttagaaatgtttgttaaaagttgactggactttagaggggaaacatcctcaagggcactttaaaagtagcttgtattatatattctgaaactccatttcattattcactgtatgaaattatgataatattggaataggcatgctgataatgtgcatgttgtagtcaaatgactattcatattagttcagatgtaaatagctcagttctgcactgtttctcagcagagcaataaataacaaaattaagtcattgtttttgcatggagaaattaaccactactaccaaatatggtaacataattggaagattttttaattggcagaaattcacatttgaaaagcaaaataaaagtgaaagataaatttaaatgacaaaccagtaaccaggatcaaagatgaatatgacctttttcatttcaaagttgtctcatttttcctgtcactaaatggataagcatttataaatttaagcactttgtcatgtcattttattgcctaagattgaactgatattcataaaattaactcattttaaaagttcagattatagaaattataggaattaagaattatagaaagtaagaattaccaaagtcagcgaaatctgtttcttaccttggcagctgtgatcatcacagtatagagtattgtgttgtatgaagtcttacgggtgtttagctggggagttttctgactctgtcacccagtttatgggaacagttgcagtaggtggaggagaaaaagtgttctagggaggtcttatgatgtcacataggaattctgaagtttcgattggttagccacagtctcagtcttatcacaaccaaactttagaacttcttactttaggtatggaaaagtcattaacactttgtgcttcatcttttgtttttaatttaaaacagtatatggtagataaatgaaaaaaataagtaaacttgaggtggtggaaagcttttgttaaagattcatgcatcttcaggcttagagataattgaatattaatggtgaagatgttgaagagctaaaatagttactgcaggaattttaattatgagaaaaataaacacaggtataagcaaaacaactttcattgaattcttgctgctgttgctttaatacgtgtcttcataatgttagcttttagtgaaagtgaaatatttttacacaataaaattttatacctgttttcttattttgttcttgttcttgtgtgtatgggagaaggagtatgagaaaatcaggctaattgctttttgttttaaaaaattatttttatcttacagttaaagaactaataaatgtatttaattcatttgtgttttcttcaattagcagtttaacaatatatttgtgaatagtaatacttatatttaaactgatacatacaacacccccaaaatagcaatatgctactttaagtatttaagattttttaaaaacaattgcattaaattattacacaatcttaccaaatttttaataaactgatgcagtattaagggcaactttatggcaaaaaagaaataattacagattccaaatcagttacatctcagttaatgaggctttataggtttgatgtgttgaaatttaagttttgtaatgtttttgaaaggatgtgcctcatttaatct

SEQ ID NO: 40761 - DNA, 1035 bp, Homo sapiens
tcccgagtagctgggactacaggtgcccgccaccatgcctaatttttttgtgtttttagtagagacggggtttcaccatgttagccaggatggtctcgatctcccgacctcgtgatccacccgcctcggcctcccaaagtgctgggattgcaggcgtgagccactgcacctggccgagtagtcaccttttatgaagatgtgtagcagaatacagttaagaaaggaataataattagacttggtaattcctatttgaacatatggttttgtgaggtttttgggcttaagtggtcttaaaaggtcagaaattttaaaaattattttgagacaaaacatgggaaaggagggagttggccaggagtttatcatgaagcatatacaggagtcatcccctacgttgacactggtaagttgtacttcagtcacatgaaacatgtcacctttccataaatactccattcccttttgtgattttgttctttgcacatgttgttctatctctgcctggaatgtgttctccaccttttgattgtctgccatgcaagcttcagttgattcttaaggttcagtttaaatatcacttcctagtgaaacctttcattagttattaaggtggaattggttgtcacctctactggtttttaatagggctttagtgttatctatatgaggatatctgtcagattatagcacaatttcaatttacatgtttgtatccccagctagactgatagtttctgaagtaaagaaactgtgtgtttatttagtatcctagtacttagtgcataattggtatgcttcaataaatcactaaagttaaataagggatttttatgactaaaactattagaaaattgttaattaaaaataatgctgtgggcagggcatggtggctcacatctataattccaacactttggaaggcctaggcgggacgaatgtttgagcccaggagttcgagaccagcttgggcaacataatgagaccccatctcatttttaattaattaattgtttttatgaatggatgaatgaa

SEQ ID NO: 40762 - DNA, 1057 bp, Homo sapiens
taatgaataaaattagtaatgtgtttcacttttttcatctgtcaagttttctatgtaatattagcataaaatttctggacattttgaagtgtgctgttacttagcagaagagcagatcttttctgaaaatttattatagtcctactttgccagaagtctcaaaaataatcaaaagataaataatcgctatgtagtagcaatttgttatcttatatacgtctgccctcttgtgtgtctggacttgggcgtcttgattttgttttatttggggaaagtcaccaaaaaaacccctataaaattaaaactataattagagcgttttatcgttagtatcaattgtaagtgtattatagagcagccccactgagttttcaagaacattcattttaatatagtgattctgatttgcattaaacaaatatatattcttaaccaattaaaatataaaaggcaacattaagcattttaaaattgtttttagtgccctgtaaattaagataagaacttattctatagtagaacatatttgagcatttagtatattaaattttaaaaataaattgttttcttatatcttattctttacactttatgatgaagaataattatttaaagagtttattctactttataatttgagttatagtattctgtaatcctcacagaataagattttaatttctatcaaagaatgaagaacaaaaaaattagttatttctgtttactgagaaaaatattgtaacaaacagtgtaatcaaaggaatatgactaatcagttcaaattttccacttgtttttaagactagggatactttctgtattggtaatttactaaaaccagtgaggtgagtgtatcacctgttgtttataagctttctacttgtttttaggaatttccagcttgtagatgaggcgtcacttaagaaatctctgcccttctgttcttcagatatccctgaaccaaacactttccactccccatctctagtatctctcatgggttcagaaaatttaatagtgtctccttcactattgagttagcaacacttgtgtaaga

SEQ ID NO: 40763 - DNA, 1059 bp, Homo sapiens
gcctcagtttcttcatctgtacaatgagaaggtggaactacagtcatttgtaaagttttggtgatacatgatgttatttaggtttataaatcagatgtacttttttttaaaaaaaattatgtgtcaaggcattcattaatcagcttatagaaagtgctttatgatgatatcatatataaagaaaaatagtatacagcccccagttggtctagggaatagcatgtaaatgtgtaaatttcttaatctgggaatgtttctattccaagacaattttctgtagcttgttttaacaaggaaactaattttctgatataagtcctgtcatctgttttttatcatcagaattttctgaaacaaattaattctataaaaaattgcaaattttccctagagtaaaaatgtaaaattggtattcattactactactaataaaaacaaatagaataaatgaacataggctatgaaaggataaggaaatcacttgtccaggaacctcacaaatatgagtatgatctcaaaacatagaaccctaacatactacattcataggagaacccttaacatgtcgcatgtacctttattcttattttagatacagttcttataattttgattatgtatttaaacaacacaatcaaaacagaagaatcattatgattgaattagaaatttgtgatttatccattcaagtgatgaaaaataggaaacctaatttttcaaatactgtcaagttttagttttcaaatgtttgtcattataggaaaacagagatccaggcagttgtttctccagctggtgtctttacacagaattggagctgtccagtggggctgagtatgctattccaaactagagtaggtgtgatagagataattgggcaaatttcaaggagtaaatactgattcatgctttttattctgcttggacaaatctctggtttaaacaaggtgtttttcttagcctcaaagcaatgcagaggagggtagggaggttggggacacactgttgagataaatttgtttttaaatcttctttctagtgcatagtagagagagaagg

SEQ ID NO: 40764 - DNA, 1011 bp, Homo sapiens
ttgacctctttgaaccatacatcaaattgtcctttaaattggcagtaatctggctagagatcagaatgcctgtttttttgttttttgatttttaaaaacagcttttcagccaggcgtggtggctcacacctgtaatcccaacactatgggaagccaaggcaggcagattgcttgagcctaagagttcaagaccagccttggtatcatggtgaaacaatgtctctacaataaatacaaatattagctgggtgttgtggcacatgcctgtagtcccagctacttggggggctgagatgggagtatttctagagcttgggaggttggggctacagtgagccaagatcacaccattgcacaccagcctgggtgacagagtgagactttgtctcaaaaaaactcaaacaaaaaaccagtgttagaaacaagtgctcggtgccgcaaagaagaactagcactcaggcaaaaagttttctcagcaaggcaatttacttctacagaagggtgctgcctgcatcagtcacgctcgcgagagcacaccgaacaaaagagaggatttttatttatttattttttttgagatggagtcttgcccggtcaccaggctggagtgcagtggcgcggtctcggctcatggcaacgtccgcctcctgggttcaagtcattctcctgcctcagcctcctgagtagctgggattacaggcgcccaccaccacgcccagctaatttttgtatttttagtagagacaagtttcaccatgttggctgggatggtctcaatctcctgacctcgtgatccgcccgcctcagcctcccaaagtgctgggattacaggcgtgagccaccgctcccggccaaagggtttttattcctaacacagttcctgtttctgtgtcctttccccattggctagggttggaccaaacaatctaaattaacccaattggctaagacttaaacctttctaaatatggtgaacacgcagtttgctaagagaggaggggagggagagac

SEQ ID NO: 40765 - DNA, 1119 bp, Homo sapiens
ccaagagcacctcagaatgatagaacagattttaagctcgcttgtataatcaccacttcagtgaatgttgtacctcggattcccggccagtgcaccaaaatgatacgactctgatgactggaggggaataccagggtccttttctcacgccagtttaaatacgacgacatggatatacgtggagtggttttaaggagcggagagagtttaataaatcggcaagaaagaaggaaggggctcccccatacagagacagagggagggggctccaagctgagagagggaaccctgagtgcagcagaaaacagccatttatattaggaggctggaggagctggtgtctgatttgcatagagtccaggggattgggttgaccaggtatgtcattcatgtagcccacaaaaatctggtcctcccaccctagccttttaatatgcaaatgcagggcaccatgatgttctacacacgtggggatatgtgggggtggccatgatgctaggcacttgtagtgacaagaagaaggtgggaattgccatattgagtggacccagtttctaatggctggcatttgcatatcaaagcttgctggcccgcccttcaggccatttttctgctatgcaagaaatgtatctggagctgccttaaaagaaaagaaacttgccaaggaccccttgtcttctctatctgcctaaaataatttcttaataactcctataacatagggagattattgactccatatctctccaaacagtgcaggtagattaaggaccagattatcatttattatctgtcctatcataaagtaatagttttatttctaagaaactttgtgttttcaaaacttacatcccatgatagtttgatttgtaaaaatttttgtaggagagaagtaacacttacagctctctacaggtcaactgcctgatgagacttaatcttaagttgaaactagtgtgagatgtccagaaaatagtagagttgaatgaaattttaaaaggcaggcaagaaaaaaattctaattttttttggtaaatgtaaaaagtcactgtttttttttttttctgaccagcttcccgcccgtccccaccccttgaccaaattggaaaatattttatt

SEQ ID NO: 40766 - DNA, 1105 bp, Homo sapiens
gatctcagtccatttgcccttctgtttggagaaaagatctaactgttggataatattaaaatcaaggctccccgcagcgggccaggtttatctgtccccaagatagtaagaaggctatgctcttgtgcaatagaatatgagtcacttttttttcaaagtctcagggttgaaggagtcccagtgctttaaaatacattccagaggagtgcatgctgaagacgatctgttggccatctagaaagagaagtgagaataaaagtgtccttttagtctccttccttttggtgtatgactcagggtggagaagaaaacagtagggggcattcctctaactagtctccctccctggttcctgggtcccggcacccagttaaatgtgccgcctgtggctgtaggtgtgaccctccaagccatggcaccagagaaactagacttttgaggcctagtcacacttacccaagtagtcccagtcctctgcttgttatttccctttgacctcctagacttgtgtgacctgtgtacctccctaaaaaaaaatggatctcagggaaaactgtgtaattggggaaggcccctttaatggaggggttatgctagattgaactctatatcctgctattatggcccatgctaaagcatttacccttagaaaaatggtttcagttaacttccagacttaaaatccccttactaattaagtactgtctctgttggagacagaataggtgacttaaagaaatgtaggaaccaaatggctgttttcctgctgatgggacaatattgagactaaaatttggctatggaagacatttaatttctaactgttgaaagcagaattttcccattcctggaagaggcttagagcctgatttctagcagtgcaaaaggaagctgcagtgttagcattaaaaaaagtgcctcatgtagaggatttctgtttcctctaggtggcactgttggcttagaaatactgtgtgctcctcagacaagcggtagagagacctggaaatgccgtgtgctctccagaccaaggggctgagagagagaggctcactgtcccggaggaaccctctgttcaggagattgcaatggcattcttgagtta

SEQ ID NO: 40767 - DNA, 1025 bp, Homo sapiens
ttccttcaatttccagaatcactcagggttcctgtgctgtaatggcagtctgagtcgctggagccgggggtttaagcctcgggacccgtcagtcctgctggaccatctatgagactggttctgaacccagcgacctctgcctctgggggcagatccatctccagtggtctccgccacaggctggacagggtcaaggtggcttcgtcttgctgcctgggcattccctcttaaaatgccctgacttgccacattgataacagctagcagatgcacctcagggatcctggactttacaagcgtgcaatgctgctactagagcctctgttcttcacttatatttcctttccttttcttgggcctcctcctgatctgtattgtaaatgactgaagtggctattctcaggaggttctctagggtgctatctggtcctatagcttgtttctgtagtttctttccaatatcgggagctgactgtgtaataaacttgtccttcaggattagctgtccctcgactgaatcatgataaagaggtgtgttttattagtgcctctcttagcctttccataaaggctgtgggattctcatctggtctatcatagatagtttagagtaatcgagaggtttggccctggtcttccataggccctctaacatagaccttaagaagtgcttccttttccattcatttcctgcgttattggggttccaatcagggttgtccgctggaactgcttcccttcctagtgggaatggagtttccacttcttccttaccttccttgtctcctctttttctccttggtctgctacaggaggcatgttgcttatatccatatttttctgctgcctgtggaactgctggcttttcagccccagtgagggtctgacttagcagcaacataacatccctctatgtgagatcaaacacctgagttaaattttggaaaatttctatatacttatcggagtcatcagaaaattgggccaagtctctgtttatttgcttaaggtcctgtaatgagaag

SEQ ID NO: 40768 - DNA, 1543 bp, Homo sapiens
ttgcacacttggatcggagaagtatgctcttggccacctggaagataaggaaacatccccaccccccactgggagatgagacttccatgaaggatgggctgatgacgaaatgggctgattggctttgggttgccttgcagtgaaatgcagagtagaagcactgtactgtcttctgtagtatttccctccttttggggatccaggaaccagcataaaatggcacccttaattttggggatctgtctttgccttcagctgcttatttggccccagaaacgcatgctttcctggcgcttttcctccaagggctccaccctgaagccagtaatccacttaagaaactggcaatgaaaaatcttacacgtgcggaatcttctatgtattaatatgtgttgtatgtttatgtataaaagagctctaattgattggcttagaaaaataagcacttaatattttttcagaaaaatggaaactttaatgcctttttgttcacgtgactttagtaatcttttggaaataaagacagttttaaaaattataggtaaaataaaatgtcttgaaaatgtagacatttggtctaaattaaggtcagatattagatttgctaaatgctttaaggtcaaactggttgactttggaaactgttcaatttgcctaccgtaaagccattagattctagataaggcctggggacatgtggagttagccatgccccctagctatgctggagagtcagttcttatctgcagttctgcctggtgtgtcctagtaacacaattaaaattgcttactaaccagggttttcaccaaacgtaaaagttaacatcgtaacatgtaattgagactattgaagaaacagttctatatgcaaggtgtgtaaggaaaataaaatgtacttttggtaaaagattataagaaggcacgggaatgtggatttttttgcctaaagagttaaataattattttaagttagaataaagctaaaagtttgaacagttgtggatggtgtgaaaaaaattgagagagattctgtgtgtgaacatattgactaaagttaaaggggtgttactcagtttttccgtaaattaaacattggaataaaagcacaacaggtttttcttagagcactaatctgctctttcacaaaaaaatgtaaagggttataagaatcttaccttatggtcaaaccgattaagattggatagacatatttgtaaaattttattaagaattgggtttaacattaatagaacattaatataaaggtgaaatttggcttatttggtgtaaaagtcatacaggaagcattatcaaatgtaaaatggtgttttgtttgcattgtactatatttgcataaatgtgttattggaatatgttccaaagttatgggaaactcctataattctaatacgacttaatgtatgttatttataattgttatgtaaaattctgtgtaccacaaaatcaaccaaatttccttatctactgtggctttaataggggctggcctaaaactttttactatccacagacaattgttgtc

SEQ ID NO: 40769 - DNA, 1039 bp, Homo sapiens
cagctaaaggatacagatttaaatcagtgatggaaaaagaagcaaaggacagggtccaggagacaccagacccaaatttatagtcgttctatcactgcgaagtcatgtgcacagtttgtttcttctagcagtgatgtatgagaacatgtggaatattgaaaactgggtaagctcagctgagccctggtgtccagggttttttggtaggtcggtatgtaggtgtggttgactgccctcatggatgacctccgtctgcagccctcaagctgataccatttggtccaaggcccccaccattaatcacattattagcatagactatatggagtggcctaaaacccccaggtaaagaaagactttcttactaggctggacattccaagggcttagaggttacttcctaggagctgggcaagggccaaatctttctcggaacgtgcacggtgtgggaaacccagacttttgctgagttaattaatccttattgcacagtgtgagacatagactgaggtttttttttttcccatttactttttgggtagagttattatgtgtactgttttgtttttcaaattgttttagctcttctagtttcttttcctttctgtataagcttagaatattgaagtctgggtatttggttaaaaaaaggaagaaagagaaaaataagcttagaataatcaagctactgtaagtaaaactcttaaaaattgtgtttgcacaaaaaagaatacaaaaaaagtcttcctaggaatttgataggaattttgttgtttagctatcagattggggagaaataacatcttttcttggtgagttttccagtctatgaacatggtatgttcttcatttatttagattttttattttgctcatcagcgttgtatagtttttaatattttctatgcatatgttgttagatttacacttaatattttatgtttttggagtgattgtaaattatattgtattttcaagttttaagacatagaacacagaaataagtttagaaatacatttataatatagaaatacattt

SEQ ID NO: 40770 - DNA, 1123 bp, Homo sapiens
accggcagaatggaaatcatccttgccctctgccgtgcacccattgaccactagatggggcatgaggactgttggatttattgtggtccctttgccaacgcgtcctatctgttctggggtggcaaggcctgggtcgggggcaccactgatgcttgcatgtcaaggcccaatttacgtgggcctggccataaaactgcccttcaaggaggaatctctgaattagtgacaggaggcttagtaagctcaaaggggatggttgatgtcctctaggccagggctgagagaacaactgctgcactctagccttttgtccccactttccatcaaaggagtaagcccccatcttaaggtggtaccagtatcccgtgtctcaattgactatattttctttcttccaatatccatgattgaatggttgaaaaagcaattcaactgctctaagggccgtacccatacaccacagattatacttgagaggcaccaaaaaaaggaaattcatctggggaacaatgaagaaaatgtcctagggcctctaccatccacatgaaaattacagatctgtcttcaaattgtcctgatgtgggagaccatacacgatggtggggaactggcctttcaaagtggccatcagatggcaacacctgcctaaattccagagggcaccatcaacaaggaacttctgaacaccaccttaaaaacttaagtctcctaaatagggattcttggtcctgtctagtgggaataatcttgcttaccaggtgaggaaagaaatctaaccggcagttatttgaacccaggacgcaggagtcagaagatgtggctgtctcacgcttagtaacccatgctgtgggagcctctggtggggccatggtctcaacctggatatctgggagaccatgacatttgctgagcactcccgggtgtacttcgggaccactacagaaagtgaaagacttaaaactggttccgggcaaaccagtgctcccaactccaaagggtcagggattgtcagagagccctttcccaggctgacactcgtgtttttagtccagtggtcttgctaatcgcctttaactggctgacaggtgcccagtgtttagcctccgaattctaaggaaggatg

SEQ ID NO: 40771 - DNA, 1132 bp, Homo sapiens
gaactcctggcctcaagtgatccacccaccttggcctctcaaactgctgggattacaggcatgagccactgtgcccagaagttttcttctttactgttgagtttgagagttctttatatattttagatactactctgtttgatacattgtttgcaaatattttcttgcactctgtatcttgtctttttatccttttgtaacacccaaggttctgtgcctagccacgccaaagaattggtgtggaggctgactgcggcgagtgacagagacttggactgagagagagagtgagctgtaggttttattgagcagagtgaaagtacaaagcttctacagtgtggaaggggtcccaaatgggttgccactgctagcttgggtgattgccttttaaactctttaaggcgggagatacgtgaggcgggaagaatgttacaggagcaagaaacaaaggcagtaaattattttgtgacatgccttagattttgagaaaatctgaaattgcgacttatgcttactcgttttgtggccttggagctgtacagcaagaaaaagaggatcttatagaacttaacgaactatgttcataaggaattgggaggatagataaggtccgctgatcacagaaaaatgggcagttaatcttttctttaactctggttttggcaggggaggagtggggcatacaggaaaacttacagctaaaattctcgctgtttatagctttcttgggaagaaaacatataagcaaatcctggtgttaggaatattttaagcatatatcctcagtattatttatccagaactgaagtaagtcctgatgcaggaaatgagtgagttttacagctttccaagcccctactcaacccaggaagctcagctggcatcacctctcagtcccccctctaaacaggacaccccaactgctgttgggaactgggcgatgactgctctagctacttcctgctggttaggggcgacgatggggccctgctgttgtattgtcctccagaggggaactttctaggccagttaagagaccagtgggctgatcctggggtcctcggtagaagcttgagttaaattcatttgaggttccatttgtaaggccatttgtagcttgatggcctttatc

SEQ ID NO: 40772 - DNA, 1048 bp, Homo sapiens
acctcagcatctactcccgtctgtctcaggccaagactggggtaagaggagtggggcacttgcctcaggcacagaatttaaggggacacaaaacattcagtaatccagataaatattttggcacaatattttaaaaaatcaaaacaaaaattcatgacagattatcggatttttaaataatagacaagatcagtgttcctgatttctccttttgcctttgggcgctgatgtggcctagcatggcatgtcttctcaggctgcatgagggcggggcttttgcctgctttgctcactgatgtacccccaatgattagtggtgtgtctgggcatagtaagtgtccgataaatatttgttgaatgagacatttaaaatatttgagggaagaattaccattcagctacatttctcatttctcatctctttctttctcccagcttttcccactaatgttgactgaacacaagaggctgttttcacattagagtcagacttgagggggagccatgtgtgacttagggaaaatatctggccaaaataggatgcagttcactataaagggcaattgtgaggtgtgaatgtttaaaaatattttttctttttttattttagagacagggtcttgtcctgtctcccaggctggagtgcagtgtcacaatcatagcttactacagttttgaagtcctgggctcaagtgatcctcccacctcagcctcccaaataggtaggacttgggagactgaagcaagagatgcacgctaccatgtctggctcgtttaaaaaatgtttattgtagagacaggctctcagtatgttgtccaggctagtcttgaactgctagcctcaagcaatcctctcaccttggccttccaaagtgctaggatgacaggcataagccaccatacctggcctaatgataccttcttaattgatttcattgtcagatttaatggatatatgtagtgtgcttcattgtattaactcttgtcagcttatataattatgaagtaagagttttttaaaatgctcaaaaatcaccctgcccccaag

SEQ ID NO: 40773 - DNA, 1029 bp, Homo sapiens
ttatttgtctttgctacaggttacagaatcagagtgtgcaccaatcccaaccacgggtattggaggtagagactactccaggatccttgagaaatggtccaggggaagaatcaaacttcagaacttcatcacagcaggaaatcaactatagcacacatatcttctctcctggaggcagccccgagggaagcccagttctagatcccccaccgcatctggagcctaatagatcaacaagtaggaaacattcagctcagcacaaaaataacagagatgacagtttagattggtttgatttcatggcaactcatcagagtgaacctaaaaacactgttgttgtgtctcctcatcccaaaacatctggagaaaatatggcttcgaagatctctaacagcacatctcagggtaaggagaagagtgagccaggccaaaggagcaaagtggacattgggttgcttccatcaccaggagagacaggtgttccatggagggcagacaatgtggaaagtaacaagaaaaaaaggctagcactagattctgaagcagcagtctctgctgataaaccagactcagtactgactcatcatgtccccaggaacctgcagaagctgtgcaaagagagggcccagaagttgtgcagaaatagcaccagggtgcctgcacagtgcacagtcccttcccatcctcagtccactcctgtacatagcccagacagaatgctggactcacccaaaagaaagagaccgaaatcccttgcgcaagtggaagagcctgcaattgaaaatgttaagcctccaggttcccctgtggccaaactggcaaaatttactttcaagcagaagtcaaaactgatccactcctttgaagatcacagccatgtgtcacctggtgcaactaaaatagcagttcatagtcctaaaatttcccagcgtagaacaagaagagacgcagccttgccggtgaagcgtccaggaaagttaacatctaccccaggaaaccagatctccagtcagccacagggtgagacaa

SEQ ID NO: 40774 - DNA, 1060 bp, Homo sapiens
aaactgcacaactacatggaaactgaacagcctgctcccaaatgactactgggtaaataatgaaattaaggcagaaataaataagttctttgaaaccaatgaaaacaaagacaaaacataccagaatctctgggacacagctaaagcagtgttcagagggaaatttatagcactaaacgccctcaggagaaagagggaaagaactaaaattgacaccctaacatcacaattaaaagaactagagaagcaagaacaaacaaattcaaaagctagcagaagacaagaaataactaagatcagagcagaactgaaggagatagagacacgaaaaacccttcaaaaaatcagtgaatccaggagctggttttttgaaaagattaacaaaatagatagaccgctagccatactaatgaagcagaaaagagagaagaatcaaatagacacaataaaaaaatgataaaggggataccacaactgatcccacagaaatacaaactaccattagagaatactgtaaacaactctatgcagataagttagaaaatctagaagaaatggataaatttctggacacataaaccctcccaagactaaaccaggaagaagttgaatccctgaatataccaataacaagttctgaaagtgaggcagtaattaatagcctaccaaccaaaaaaagtccaggaccagacagattcacagccaaattctaccagaggtacaaagaggagctggtatcattccttctgaaactatttcaaacaatagaaaaagagggactccccactaagtcattttatgaggccagcatcatcctgattccaaaacctggcagagagacaataaaaaaagaaaatttcgggccagtatccctgatgaacattgatgtgaaaatcctcaataaaatactggcaaactgaatacagcagcacatcaaaaagcttatccaccatgttcaagtcagcttcatctctgggatgcaaggctggttcaacatacacaaatcaacaaacgtaatccatcacataaacagaaccagtgacaaaaaccacatgattat

SEQ ID NO: 40775 - DNA, 1023 bp, Homo sapiens
aggcagtgtgaggattataacaataaatcacaatctctcaaggaagaccacatttagtaggacaaaaataggctgggcaaggtggctcacacttgtaatcccagccctttgggaggccaaggcgggaggattcttggggccaggagttcaagaccagcctgggcaacatagcaagattccatctccacaaaaaattttctgaaaatcagctgggcatggtgatgtacacctgtaatgctagctacttgataggcagagacagaaggatcacttgagcccaggagtttgaggttgtagtgagctgtaattgctccactgcactacagcctggggaacagagtgagaccatgtcttttaaaaaaaataagtaaggcaaataagttgatgccgaaaatcccaggcagaatcggcagtctggaagtaaaagcgcattgattttggagcccagcagatctaggtttgaatctcagctctgctcctctcagtgtaaccttggggaagttaatattcctgaacttctagtttccttatttctaagtttgtgataatagcacctacccttcaggttgctgtgattagggatgatctttgtaaacctaatgcagtgcttgcttgatattaaaaatgtagttatttttattaatattgttgaaggtagagttcatatgggatagaaaaatgagttaccttacagtctatgaattcattcatttagtatttagtgagccactactacgcactgtatacttaggattagattgtatgtatgtatttgtgtttgttttctaaagccccatttagtttttttaaaaaatgtttgtatcacaggtctgtacccaccaggtttacatatggtcttccccactttcaaatgcccagagaccaccctgtctgtcctggcactgtcttcatcctccctctttgctacagggatctgcctgacttatctctcataatctcctcttcctctgcccactcccgtattttccttgctcctatttctgctgacttcacctcagacag

SEQ ID NO: 40776 - DNA, 1063 bp, Homo sapiens
gctgtattcaggagacccatctcacgtgcaaatacacacataggctcaaaataaaggaatggagaaatatttaccaagcaaatggaaagcaaaaaaaagcaggggttacaatcctagtctctgactttaaaccaactaagataaaaaaaggcaaagaagggtactacataatggtaaagggatcaatgcaacaagaagacctaactatcctgaatatatatgcaaccaatacaggagcacccagattcataaagcaagttcttagagacctacagaaacacttagactcccacacaataatagtgggagacttgaacaccccactgtcaatattagacagatcaacgagacagaaaattaacaaggatattcaggacttgaactcagctctggaccaagcggacctaatagacatctacagaactctccagcccaaatgaacagaatatacattcttctcagcaccacatagcacttattctaaaattgactacataattaattggaagtaaaacactcctcagcaaatgcaaaagagtgaaaatcataacaaacagtctctcagaccacagtgcaatcaaattagaactcaggattaagaaactcattcaaaactgcacaactacatggaaactgctcctgaatgactactgggtaaataacgaaattaaggcagaaataaataagttctttgaaaccaatgagaacaaagtcacaacgtaccagaatctctgggacacagctaaagcagtgttcagagggaaatttatagcactaaatgcccacatcagaaagtgggaaagatctaaattcagcaccccaacatcacaattgaaagaactagagaagcaattatgtcacaattaaaagaactagagaagcaagagcaaacaaattcaaaagctagcagaagacaagaaataactaagatcagagcaaaactgaaggaggtagagacacgaaaaacccttcaaaaaatcagtgaatcgaggagctcatttttgaaaagatgaataaaatagactgctagccagactaatgaagaagaaaagagagaagaatc

SEQ ID NO: 40777 - DNA, 1032 bp, Homo sapiens
gtgcttcaccattggtctttttgggagggccagggcatcatcatcatctcttggttgaatgaagcccatcctctagcagatgccttaggaggggctcctgattattgtcttgaatttttccatgtttcaaatcatttttcatagcattgacacttgaaaaatgaaagatagcttggctggatataaagaccttggcttatactttctttcctaaagtcttgctttctatgttgctattgacaaatctgatgccattctgatatcacttgctctaaaggtgatttagtttttttgcctgaagtcccagagggttttttcctttatctttaaagtataatatttttactagactatgtctcagttgattattcctggtcagtttttctagatatcagtgagcttttgacatgtattcttttatccctggaaatttttattgaatgattgtttgacactctagttcagttctttgttttgtttttatttttcagaagctgtaattatttatttgttagaatttttcctaggctctgcagcaaccatttttttttcttaaacttcttagctcatctgtattttgttttattctcttggctatttttattcctctccttagcaccctttattatattttcagtcctgtcggtcctttcttagacaccttagattcaaatgttaatttcttttttttttttttttttgaagattcatggggcacatgagcatgtttgttacatgggtatattacataatggtagggcccatcgcccaaatagtgaacacagtccccaggaggtagtttttcaacccttgtccatgtcctttgctccccagttttggagtcctcagtgtttgttgtttccatctttatgaacatgtctacccgttgtttagctcccacttaaaagtgagaacatgcagtgttcgattctctgtttctgccttaattagatgttcatttctgagagtatttcctcttcctccctttacatccatttctttcttcagttttatcatctctggatatacatc

SEQ ID NO: 40778 - DNA, 1023 bp, Homo sapiens
gaagtactatttatttccctcttcttgcctctcataagacagagacaaagagacaactttgttttccttctgtcttttgcattcaaggaattaacaaaagtgggaagaaatacttagctgtcttagtttttaattacctttgccacagatttcaggaaatggctgaaagtcctttctgtattgctaagagacagatttagaagggatttttagaacctttagtcctttaggcagttacctactcattgcataaatacctttttatactatcctgacaagtggacattctactttgacttactttgatgaaaagttcactattttgtaaggcagctcattcctcttcaaacacctcgagtttccaacagttccttgtaaacttctacatgttagtctcagttaatttcttttgaagctgctacaaatttatctaattcctcttccataggagagttttcagaggatataaaaatttcgattccctgtatttttttttttaattaggctaaacagacccaatgttacaaaccattctttaaatggtattatttgcatgtccttcattatttcattgccctttttattctttctttttcttttctttggtgttttttttttgttgttgtttgtttgtttgttttgtgcactctcactctgtcgcccaggctggagtgcagtgcatgagctcggctccacctcccaggttcaagtgattctccttgccttgcctcccaagtggctgggattacagggacccaccaccacgcctggttaatttttgtattattaatagagacagggtttcaccatgttggccaggctggtctcaaactcctgacctcaagtgatccacctacctcagcctcccaaagtgctgggattacaggcattagccactgcaccccgcctagtctttctattagttttttttttttttaatttgatgtcccaacatggacattaaaacactagatcaagaattggcatcctttttctgtaaaaggccacatactagtatttttt

SEQ ID NO: 40779 - DNA, 1045 bp, Homo sapiens
gatttgcttttggcttaaagaacctcctttagtaattcttttaaggcatgtctgctagctactgatgctcccagtttttgtttatctgggaatgtctttatttttccataatttttgaaagatagttttgctggatatcagactccgggttcgatttttttttttctttcagcactttgaatatgtaatcccactgcctctggcctccactgtttctgattagaagtcagctcttaattttattgtggctcccttttaaatgaagagttgttctcttattgatttaaaattttctctttatcttcagttttcagcatttctgctatgatttatgggtgtggattttttaaaacatatatcctacttggattttgttgagcttcttgaatgtatagtctatttttttcatcaaatttggagagttttcagtcatttttttctaactttttttctactccttttagttcccctccttctggtactcccaatatatatatattattctgattaaaggtgtacaacatttctttgacactctgctcattttttatcttgccctttacctctgttctttggattgcataatttcaactgatctctcttaaagtttgctgactttttcttctgcaatttcaggtttactcttgagctatctagtgaattttttgtttcagttattgtacatttcaaatccagaattcttacttggtttttaaaaatcctttttatctcttattgatattctctatttgttgagacattgtcatcatccctttttttttttttttttttgcatctttgagcacatgtaaaatggctactttgaaggctttgcccactacatttgaaatctggatcctctcacaggcagcttctgttgtctgctttttctccctgtgtgtgggccacattttcctgtttctttgcacatcttatacttctttgttaaaaaccggatattttaatttaatgtattataccagttctttatattaattctcctccaggcctcgttttttatccttttttttattgttgtttgctt

SEQ ID NO: 40780 - DNA, 1044 bp, Homo sapiens
tctacaggatgtttttaaacaaattcttcacattgtgttttgactatgtacttacggaatttcagggaaatagttctgtgtatttttaatagcttaatttgtactaaagggatggtaggtggtcacatgcagtccatgtgggattctaacatgacatttagtgagttttctgatgtggaccatccctttgatgctgaaggtaatgcatctgttgaaagaagtgactgtagatttggattactgctctctgcatcttccagtttttctgtgttatcttcccaattaatgtggaatcttgtgaccctgggattagatgccaaaatattcctttgaagctagaggaaaaaggaaacatacaaatggtaaacactaagaaagttaaatcaccatatacaaatagaagcttaataaaatggttcatgttagtactcctaaagggctaagttcatatacaaaggtataattcaagttaagtaccttaaatataactaataagatgtaacgactagggctgtagcaaagaagttattttagattaacagaaacaagatacggagaatctgaggggattcatctggctttttaactatttaactcctatacttctgttttctaaaagaaagaatctcctcatttttgaaaatgaatgcttcagaagatgctttatttaacaagctactatgttgtttagattggtatgttttcaaaggaaaatgaaaaattgtcaaatacaacttattattaatggtttcctacaccttttaaagatggctcattcttagaaacagtcctgtttcttttgtgctatataaggtgcttcagggataacaaattggatcaatggaaggtacaacaagggtgaaaaatagtccggccttattatcagaaagaacatgagaacattctattctattgtcatgtaatttttcttgcatggttcaacttcatttactctgcactctcacaaaatcaccagttaccaaactgttatagttcccagtgaaaaatcagaaaatactaagtatctttaagaatgctgaatcc

SEQ ID NO: 40781 - DNA, 1032 bp, Homo sapiens
aaaatagaataaaatacttatatgacttgtatgcaaggatttaatcatagtagtttgatatttaaaaatagagtaaatcagaaactttataagccaaaaattttttgtttgtttttgtagacatggagtcttgcccaggctggtctcacatttccgggctcaagtgaccctcctgccttggcctcccaaatgctgggattacaagtgtgagccaccgcacctggccccagatattttttaaaatgttaaacataggcctgaacatctggaaatagcacataatttattaatagaatttagattctatgtcacattgagtaatcaattaaggactgtttatgacagttaactttctgaagattttctagttaaatcctttctcaaacgaccctatgtaaaagtacacagtaaaaacactatgtaatattttgttggcattccaaatggacccttttatagaaatttaaaacttcatgtatttgctttttcctaggagaatctcatcttttattggttggggatcctggcacagggaaatctcagttcctcaaatatgcagcaaagattacaccaagatctgtgctgaccacaggaattggatctactagtgcaggtattgtatgtgacaatttcaagtaatttaacattacttcagaagttaacacaatggttttttctaatgaaaaactacctataataggataaatttcaagctaatttttgagttaccactaaaaatggaaggaaatatgcaatgttattttggtagctctaagaaaatatcttgcaagctccaccttcactttgcatcttagttttgaacaatcctattcaattttctcattctctagtgattaccttcatacttttatgcaggaaaaagtccgtatcatctggcattttatcaagactcagcaactggaatgttaaactaaagagggggatatttcactttaccaagtagatagatggtatagagcttaaggcattttcatgctcataaatctgataggcaacagtagctcctactga

SEQ ID NO: 40782 - DNA, 1074 bp, Homo sapiens
catataggactagattttaacctaaatctgtaatatctgtctcagcaatgcagttcttatataagctcagcctgaacatgaaaatatccatcaattgagaataagatcttttcatgcagttcatctaaactgaattctttctgtactggaaataagtcttaagttgtttttctttcaaatgtcattaataatgaaggatggatagaagcaatctatcaacagctattttttcatgtatcattagctataaacctctgtgggaatcaaaagacaaatagtatataatccttgcccttcaggaatttacgatctagttaggaaccccactttggcacatgcagagtaatgaagttggagggtgtgtgctggtaaatgtcagtgccacaggagatccgagagatgggtctgactggcaatggctacagtagtaaagatgccgcagatgatataggggcacagagagactggattgtagaaaagtaagaattttagcttcctgaaaataacattgcttataacattagttttgaaaaatacagaagtttaaggtgaatatctgttgtcttggactatcatgtatacctcacaattgttctggtgattatatgaatctgccattcagtaattatttgagtaaagaaaacacgtatatattgaagggcttttaaaggtattaattactttacaaatgtaaggtaggtttagtataagaagagctaatatttactgagcacttgccgtcttctagatactgcattaagtaatttacgtacattatccgatctaattctcattatagtactgtgatgtaaatataatcattcacattttgtagttcaagaaacaggcttaggaaaggtaggtaatttgcccaaggtcacgtagcctatgggcagtggagctgggatttaaatccaaatctgatgaggtcagtactcttggccatgcttcagtgctctgtattttccacataatcactgcttattgacattagattattacttacgggtcatatatctaaacattaagttcctcatttaactagtttagaaacaacctaaacataatccatta

SEQ ID NO: 40783 - DNA, 1027 bp, Homo sapiens
gtaagacttcattgatacatcacttcatcacattgaaaatctaaagacttctctttcttttcttgcttttttttttttgagacaagagttttgctcttgttgcccagtctggagtacagtggcacgatctcggctcactgcaacctccgcctcccaggttcaagcgattctcttgcctcaccctcccgagtagctgggattacaggcatgcaccaccacacctggctaattatttgtatttttagtagagatggggtttctccatgttggtcaggctggtctcaaactcccaacctcaggtgatccacctgcctcggcctcccaaagtgctgggattacaggcatgagccaccacgtccagccaaaaatccaaagacttttctaaattatgctaggcagtctgtaatctcattgggcattcttcaatcatgcataacgtcagagtaacaccacattttctgtaatgtggttctcctgatcttagtttttcttgttttaatatactgactatataatttaaactgaacaatcaatttgcatctgaagcagaactgagatgaggggactagaaatgggaggcaaaagtgatatttctttagggccaaggaagagagaatgaatatttcagaaacccaaagaatttttgttaaagcaaattttctttacctattttttttctattctcctttttaccttccttcgtagaagtaattgttggtacattctgtttatatttcgagaagcaaattgggttaattatcatatttcccactcgagtatccttctgtatatgtacaatagagagtacttagtgactgtttgcaaacataaaaataaaattatttaaaaaaattattttaataaccatgtgacccagcagttctactccttagctgtatgcccaagataatcgaaaactgttcaaacaagaatttgcatacaaatgtttgtagttgcattattcataatagccaaaaagtggaaacaacctaaatgtccatcaactaataaatgaataaacaaaata

SEQ ID NO: 40784 - DNA, 1034 bp, Homo sapiens
atatttggagcagcatagttagataaagctcccaaaaaatgttttcttctatttaataatctagcactaaaacttatgaattatttatatgttcattttaagaatgaaactgaatactactcatattcctttaaatatattttaccaatattataaaacttgattctacctttttttcatatttctgaagaaaactaaccttctgactctgcttaagactatttcttgttgttttcttattgttcacaatcttctgcttatggtccagaaagagactccagccctggatacccaacagctgttcctggtttaaggcctaacatcttaatggaccttgggttggacatgtattttgttgcctaccaatcgtcagagaagggctttacttctctcagccttctgaccgttctttttggtttggtttggttttttgtttttgttttggagatggggtctcactgcgttgctcaggctggtctcaaactcttgggctcaagcgatcctcctgcttccagctcccgagtggatgggattgcaggtgtatgccactttgcccagctttatgaccgttcttaattaaaattgagtatgacttattttgatatttgttactctcttgggacaaaaagaagagccttgaaatagacatggccaagtcttataaatctttgtaccctagcttcccatggctccaatcatgttttgggtatagtaggtattcagtaaatatttgttcagttgcaaaatttcatcacattccctataagccaccacaaattattctgtgaataaaggaagtcataaagaataaatgattatatatatacatatatatatatattggcttcataggaattatgaatcttatggcagaaatcagtagtagaataaataaaagtgatagttccaaagctgtttttcaaattcagattttattaagtttcacgtcatgcctaatttttattaggactttacccagaaattttcctttcctttcacagctcgtaaaacttctctattaagaacactgaatc

SEQ ID NO: 40785 - DNA, 1033 bp, Homo sapiens
gtaagggaattgtacgtctttcattttttttaaaagaaagtctttttgatacatattgaatgtttaataatatgtcactgccagtatacaattaatataccattgaagtgtgtgtatgtatgtgtgttgcacatgtagtattaggattggctagcaaagaaaagccagcacattcatgcattagcctgtattgtacactaacaggttgagcatattgatttcctaaaatgtgtcctagcaaacactaatccaaaatttttactctatagaaaaaaaatgttccataatctagccacagaaaagttgcatgctttctcttggacggtcagtaacactgaggttctctcttggaaagtcagtaacactgggttcttaatggctctgaagtttatcagctaagaaaatacggatttaacaatgaatatactctttaaccattcatatcttcagctgaagactttggactttagcatgcaaaaagagcataagagcaacatgtatttctgaagtcctttttccttaatgcatctctgtttgcatttaggagaggcagcctgttgtctgagactagaagttcctgctgaaagcaacaggtagcagattggggatcacaggtagaatccaggagcaggctttggagagatgagtgtgtgctgcttcaatccaccagccacccaattttctacatattgtgaacatgagcacaggccttatagattgctgcatctggtagcagcagactcatggaaaattatatttcacacatgaaatcagcaagcatagtaaatgtattgaaactctgttccatataaatagctattaattcccagttcttactgaggaggtgttataattgtattttgtcctcacagcaaatacagtaaagcaactttcgaaagcagcacagctcaccagggaagagccaggattgtaggcaagggttgttccatactccttccacaacagcctgattccgtggactgtgaggcacataggtcaagattagtgatttgaatgacagtggtgactaaga

SEQ ID NO: 40786 - DNA, 1030 bp, Homo sapiens
aagtgaatctaaccaacagataaggtatgccattaagtacaacagaaggaatatgcagtgtcatctgaaaaactgttgtgctgatatttagtaatctatgctaattttgtgactagactggctctctagtaaaatattgaagacctctttttactttatttgatgactatgttataatctagaacacagatgaaatgtttatatcttgaatgatgtaacatgtattcattcactttggaaattgtatataattaactgaattctttttaaaatgttatttgaaaaagcattaaaggagacaactttaacaaagccagaagcttatagcagaaagtaagtagcttaatttaggctgtttacataaattttctatatattataccaaaaaccatttcaaatctggtagaataatagaaagttttgaaagcttgacttcagaataacattttcttaactaaaaataaatcaaacaggttgcatgaacaagatttaaacaagagacttgaaaaagagttggatgtcatgacagcagaccacctcagagagaaaaatatcatgcgggcagattttaataagactaacgagctactcaaggaaataaatgccgctttacaagtgtcgtaagtcatattatataagaaaattcatatgtggataataaatttaggagcactgtgtttaacctcagattagctgttattttgactctaataaaaaggatactttaaaaagaaaattttagtgctgtgttacagatggtaattgcagtgctatatgttctttaattaggatgaggcagttgaatgatgatgttttatcaactaagactgcaccagttctgctagaacagtaatctaaagaatgttccttaggatcatgaactatcatgccatggtgaaaactgaaaatatggctatatataatgttaagtaaaaagaatatatagtgaacaataggaatactatgatcctatatacacactaataatgtatattttaccaaaatatcaaaatatcttaacaaataccaa

SEQ ID NO: 40787 - DNA, 1750 bp, Homo sapiens
gaactcttgaatggataccatgtaccgccagctcccctcaacctcagccaaactgctctttctagaactagcgtccgttcactgtttactgctcagccatcttggactcctgtcttgtacaccagacaactagttcatcagcagtccccactgctctaccttcaaaatagatcctgcttctccctactacctctaccaccatctgattccaggacacttgtagttctttcctgtactgcaactgttaccttgtttctactctttaccacctacagattattttctaaccagccaaagtgatgctcttaaaatattaagttggattatattactatcctgtttcaagatgcctggtgactacctaccacaattagaatacagtccacactcatgccatagcctctagtacgctcatgatctggtctctggctgcattgccaacatcatctcctgtcactctctccctttcttttttacagccatgctggatccttgcagttcttggaacacacacaacaagctgaacccatcttggggactttgcacctaccagtccctccacatggaacccactttctagagatctgcacagcttttcccttcacttaatcagttatctactcaaatcttaactccacaaaaagagctttctttacttactttctctaaaatagcaccatcatcattcactagcctcctatgctttgttctcctttgtattccttcagaacatttacttctacacagtatatattgattctctcacctattcacatgtaagttccacgagacctggacctttgtggtattcactagggtatccccagcacctaaaactgttcctggcacatagtaagcacttggcagttgttgaatagagtgaacagaatgaggcacagagaccaaagacgttttcagatacatgaaatacaaataattctgcccaattaggacctggattaagtttatctcactgcaagtgcaagagaaactgtaaaaggatcaatcatctgctttggtagaagagaagaaaatattaaagttgacttgggtttgagccagacagaaaggaaatcatcatctgagacaaggaagtcaagatgagctatttatttggggtggggtgtgggtgactggggagatgagatggtaagttttctcttagatgtattgattttacaatcatagagtattttagaatttttcatactcagtaggaaagggcaatgactagactaagaaacagcattaaaataaatgctctttatcaagagcagttgaaaagccagtttcagtaaggtttgttgtaaactgctttctgatttttagaccaatgctatccaatatgatagtaagtatcctttctttttgctcttttaaatatggttactgaaaaactttaaattgtacatgtggctcacattcatgtttcagttaaagagcactgatgcagactatctagatcatgaaaatattgactaaatttggcattagagctcagtactcattctgctgttgtttttgttttttttttcccctgagatggagtcttgctgtgtcacccaggctgaagtgcagttgtgcaatctcagcccactgtatcactgcaacctccacctcctgggttgaagtgattctccagcctcagcctcccaagtagctgggactacaagtgcatgtcactgcctggttaattttcgtatttttagtagagacgaggtttcaccatgttggccaggctggtcttgaa

SEQ ID NO: 40788 - DNA, 1114 bp, Homo sapiens
cctggatctcatgcacaaatatgctgtgttcttcatccaccttagggcctgggctgtgttatttcaccacttatggaaatgaaaatgtaccaaaccaactattactgctgcacagtggcctgtctttgggaaggagaaagttttttgaatatgaggaatacaatgtttggtcacagaaccaagcaaaaccaaatgtgctggcgcagcagtgttaattctgactaatcaaacaaataaggcataaactagaggaggaatacagaaagcaatagcatgtaatttcaggttgaatggatttttaacaccaaactctgattgtcaggtgtattctattcttttttttttaatgttgggcatatttttagtataaatttgagaagagattacaaaatgttaaaaaataagtgtttttcacaggctatcgagactcatttgatccgcaagtctagcagcggactaacttatatcgcagagtggaaagggggcctcctggagcacaagatgggccacctgacctgcttcgcggggggcatgttcgcactcggggctgatgcagctcccgaaggcatggcccaacactaccttgaactcggggctgaaattgcccgtacttgtcatgaatcatataatcgaacatgtgagtacatgttattcttcatttatggtctattcccacatgctttgatttaatgcagttttgtcattgctgccctcaaaagactatccgctctgcctatgaagcttgatgatcgtgattaatgtctcaaaggaatgtatattttattttaaaaggcaatgcttttcttcctaaaaatatctacctttagtttaccaagaaacaaaaatccaggccataaagagttaaagccagcctaatttactgacttctgcttttgccaataacattgggcaagggtctctatctccctgcaaagagaaacttagcattttattaaccattattaatcttctccacatcccccatgaaacagatcatgaatcccactcccttcttataaaataggaatttgaaacacaaagtgtaaataactggccttctgttacgaaattacttaggattgtcaaccactaagtttctggctaactcaaatgg

SEQ ID NO: 40789 - DNA, 1084 bp, Homo sapiens
catgaaatcttgtctagtgcagtctttctttcaaaggtagctatccctctggtttctctcagctattttggtgatccccagtgtctcccttatagcatgtcttatttagtggtcatccagggatttcagcagagattatacccagtgttttggtcccacctcttctatggcttacttgtttccaggattccaccctgatctttcagctaccctgccagcctttaactctgtcctgtgccatcttaaaatataactgcaattttttaaaatcagatttttttaaaaagcctttaactcaaattcttactaattgctgttggtgtctttcaatggttaatgctctgttagtttgtgcctgctttttggtcactttctaatgcctttaaatagttgagttttataatatatatatataatgcccagattttataattgctattactggagtatttggtaaccaattttcttcaccattactagaggccagaagtccctccatttttaaaatatcctcaataattttctgtcattaagcattctctgacctttagtagctgcataatatcagatctcctaaataggccataatttttaacctgtctcccgtttttagatatccaaactcttttcagttttataatagtataattagtactataatgtataaaccatttttacttgggaatataagttttattggggataaaattataatttttagggcaaatttctagaaatgaattcagttagtaagtatgaatattaatacatttgatacatttttccaaacatccctgcagaatagttgtgccagttttcagtgccacctatgaaatgtaaggttacttttttttaagtcaaataactttaaacttatgagatttggtggtgtttggtttctgctaaaagaattatttgatttgttttataagcaaaaaaattattcctgattgttttataaactgcataggctatgcttacattaagaaaaatatcacttgtaatatggttatataaccaaaatagtagaatgagtaggagctttagtttatttagtttaattattagacttatttcagtaaat

SEQ ID NO: 40790 - DNA, 1051 bp, Homo sapiens
tctgagtttctgagtctagtgagcaagaaagtgataatttcatatttatgtttgataaagaagtttcaaaaaatggaatttgtggtgtaagcataagcactatatagaataatccttaagaattataaatttgcttttcaagtttttctaaagaagggaaaataggtcccttttcaaactgaagacgttacaaaatacattattgtgttgattctaaaggaaaacagagtaaaagagaagaggcaggagtcaggaaaattatgaatttagaagctataggcagccagataagctaatattagtgccttatgcttctgtaattttctatagcctacaaggatttccaaatatacacacacacacacacacacacacacacacacacacacatatatatgtgtatatatgaaatctcattaatttgatttaatctaatctggtacaagcatgaatatccaattttataatttgaatttccttttgaaatagtttggaactattggaaccgaaagaaataattttatgcttttaaacttcccaatactcagggcaaaggcagggaagataaaattatcttagtattttattggcattgtaggctatcactcattggcattgtaggctatcactctgtctatttgtagtatattgatcattaagtaattccaatgtttttcttttttttttttttttttttgagacagagtctcgctctgtcgtccaggctggagtgcagtggtgtaatcttggctcactgcaagctacacctcccaggttcactccattctcttgcctcagcctcccgagtagctgggactacaggtgcccaccaccacgcccggctaattttttgcattttttagtagagacgaggtttcactgtgttagccaggatggtctcgatctcctgacctcgtgatccgcctgcctcggcctcccaaagtgctggattacaggcgtaagccaccacgcccagcctccagtgttatttttaaaagttttccatgggtcaggttgaattctacgtacctaccagaactatatttcacca

SEQ ID NO: 40791 - DNA, 1093 bp, Homo sapiens
ttcatttttaagctatcagtgctcctgacctgttcaagctggagttgtattttcctctggcagaaaagagatgatggaaccaattggatgtgtggagagaatgtctcaatgtggtttatgtaggatagtggtggctccgtgctcaagcttttattattttttaaattatttgggatccaacctataggatcaaaactaaatttgctccctaaaattatatttattagtgaattatgtactaaaaactagaactgttcagccgattaggttttaaaaggatgcgaggcaatccagagttatgttcttatcctaagtcttacatgctagctagtgcctaattaatgtggtacaaacccagtctatgaaagtgtgtgtgtctgtctgtctgtctgttataaatagccacatagccctgtttcctagttcttggactgttctgctaagggtctgactgttctggttgctttgtatcagtgactctcaactttcccatgcctcagaataactgggattctaatatatatatacacacacatatacacacacacacacacacacacacatacatacacacacacacatacacaaacacacacacacacacacacacacatataattgctgccttcatctttcccttcccccagtctgtttcaattggtttggggataaaattctggcattttttaaaaacctcccaggacattctaatattcagctagggtcaagaatcattgttttaaatccagcatttatatgctgaggttagctttatttctcatctcagttgcatttgaaaacattgggtttaaaacgtttccctattcactgatggtcaatttaattattgaaattttaaaatcctagaaaattactttgaaaatacccagctttaatagaacagtgcttctcaaactttagaatatataacaattgccaggagagatcattaaaacataacattgctggatcataagcagagagcctgattctgtaggtatttactaagaattgataatttgcttttctaaccagattccagctgatggggaagctactgctgctgctgcttgcccaacgaccacactttgag

SEQ ID NO: 40792 - DNA, 1049 bp, Homo sapiens
ataatttaaaatgctcatctgtcagctgaaataaaactatatactctgtacccaaaggcaatttaaaggtatcagtgtataatatatgataaaggaggattatgcagaaataacaaaccacctgcctaatggtattaggtgtgtactggataggtttacatttgcttaaatagaatgaaaaaatgagtagcttacattttacattttttaaaagaaacaaaacctgtatacataggtattcagttgactttgtaaatttgcaaactattactactacataatatggtaattaattgctctttcatacctatagagtttaattgttcaaattcaggcatgtgacacaaaaagggaccatgtcctgaagcttgtgcccttcaccgtaagatagaggaaggacatttgacttatcagatccttgtgcaggtaactgtttacaaaatgagtcagcaactcagaaggagaatgaatacaacagtgagaagtctcattgtaatgaactgatagctagtaactcaaagaagcagtaggactatagaaagcagacatgaaagctcagcagcttttggaccatttagtgtgtggacaaaaggcctagtatccttctattattcctgaggaaaccactatcttatagccaagaataataactattgttgctcttttaaaaaacacttgttcctttaattataaccatcttgtgatttgggaagattattctctattcacttatttagaaactgaggcacagaaaggaggttaagtgagcgttcaagatcgtacagactgttcaagtgataatggaaaactccatcacctagtcccagctctgtatgcatatgatggtgatgctgagtaaaggcaggatcattctacatttcaccgaatcataaaaaaaagataaacatgtctttaaaacttatataaattattaaactataaatattttgatgctcttcagagatgaggttcagttaacaggaaaaaaattcactagtgtagaatgcttcataactaaaatatgtcagggaattatgatatgcagtcat

SEQ ID NO: 40793 - DNA, 1031 bp, Homo sapiens
tttatttaaaatttttattaaactttattaaaatgttcaagtttcctgaagtgtttagacatcaagaaatatttacatacatctctagtttatatttccatcctgttgatttccctattaagaattttaatgaggccaggctcagtggctcatgcctatgatcccagaacttttggaggccaaggcaggaagatcacttgggctcaggagtttgagaccagcctgggtaacaaaacaagaccatgtctcaaaaaaaattaaaaattagctgggtgtattggtgcatgcctgtagtcccagctacttgagaggctgaggtaggaggatcactggagcctaggctttcaaggctacagtgagctatgattgtgtcactgcactttagcctgggtgacagagtgagaccttgtcttaaaaaaaaaaaaaaaatttaaaaaaggcacttaaaagaagtccaaaatgtatctcaggaaagttgtacaaaatgtatctcaggaaagttgtacataaaataagacaggcctcattttacagatgtttctcaattatgttattccaaatctacagtattggcatagctttcactgttgaaaggtgttttcatttcttaaaaatgtttttaacctcctatcaccagtcctatgctaaaacagggtattttacccataaactaccacaaatagataaaaatagctactttacatataaatggccctttaaaactggatactattgtatgccaatttgcaacatagtctgtatgaaaagagaaaacagtaataaatgctgtgttatggaccaataattagattctcaatgtggtgtaaagtactcacacaaggttcattcttggcctcataaatttgaccatatcttttcattctaatgctcttaaatgacttagagacatgacttaacagtaaaataagctcctaaacaacaaccgcaagcacataaaaaacaaaattatgcagtgatggcatgccatttgttcaggaattggctgtcctatttactcttaaatataacag

SEQ ID NO: 40794 - DNA, 1042 bp, Homo sapiens
tgcagttggtgccgcagaaacaacagtgaataagagaaacacagtccccattgacaaatgttaattcaaatattaatttcacaacaaccctataaagtaggagtaggaactgtttttattctcattttatggaggaagaaacagaggcacagagtgttatttgcccaaggacatgcaaagtagcagagctaggcttcaaacttgggcattctggctcccagctactgagtagcagctagacattagagatctcaagcacagaagataagatattgataggcctgaacccatgagtcatcaacaactaaatgataattgaaagaatggacaggagtaagattgtccagggcattatacactgagaaaataggccttaatatttaagtgttgttgagaagaaagagctagaaaaggagactcagaagtcgtggtctgggaagtaggagggaaactagtagaatgtgacatcacagagtccaagagaaaatactattttgaaaacagatgttcagttctgtcaagtgctgctgctagaagttgtatatggactctctttagcatcttacaacatggaggtcatggatgactttatggagggtacttcagtagagtaataggatagaatccaaattgtttttgattgaagaagagaaggtggtaaggaaataaagattagttcaaggtctttaagcagttaggggaaggtggcattcacgaagacagatggcctttggggaggcatcctttgcaatatgagaaagcggaggagaaggtaggaatacaagtaggtaacttattagacttggtggcaaataaatgagatagttattctctggtggatcctgttaaatacaagacaaggatttctgctgagactcaggggaagaggagagatgtttgatgtgaacgtgtacattttaaaattgtcattctaaagggttgagtacagaaacatggtagaggttctggacagtgtctaggctggtagccatgaatttatggtagcctcaatccttataaacgtatgatgctttttccaaca

SEQ ID NO: 40795 - DNA, 1414 bp, Homo sapiens
aaccaccactggtccatgtggccttaaaagttgagtcgttttgatttggcctacaaagcctttgtaattcagcctcagcctaccttttctggtttccttcataacagtcctcatggaccttccactgtataacagaccctttttcttccaaaaaacgcaccaagcccatctgtgtgcttcttaaatctgcattccttctacctagaatgtctttcaccctgctccttccacccaccaagatagatacagcccctccgaggccttccctggctgcacaacactaagacaccccctccccaccttcacttccttttctgcattctctgcatacgatattattatagttcattgtttatggctctgtgagccctctcacctactcactcccttttccccagtaggatttgtacaactcaaaaatgacgtttctgctgttttcatatcctcatgcttaacactgtatgcctggcactagaaaacatttagtaaatgtttagtcatttagtcattgactaaaactcttcaacaggttttctgagacctttactttttaaaactgcaacagaaaattcttccagtgacttttaaagtaaaatctgtacatggataatataaataagcaactagcctggaaggcttggggtaggagatgagaaggagaaaatgtaatgtagtaaggtgatggacaatatgcatgatctctaaccacaaatagcctctgtggctccaccttcaacccccaccccagctagcaaaacatcatcctttttatctgttctgtacatcctgattctctgaaaaagaaagttttgaaaatcagctggagactatttgtagattatatcattactaaatacagtaggtcatttattgtagacctttaaaatagatttaacatagagcattctgaaattataaacctaagaagaaattataagaagtaaatgtgaaagtgattctacaaggtacatatatggtccttaatttgaggaaactaactaaaacttaatgacacatttatgccaatttcctagaaaggaacaattttaattatatttatcaggtgatactgattgttatattaatgtaattatataattatgtaattgttgtatattaatatgtttggccctttgatttcttagaggtttagatttagccttacatatattttaaatgttaatttactatttggcattattgaaatttttataagaaaggaatgtaaaatactgaatagctaatattttcatttaaaagtttaattcagtaaaacagagaattgtaattttgcttattatgtttataattaaatttccatggttaatgagttatagctgttacacattgactattccattatgattggtaaatttaatttgtactttaaaaggaatataggagtgtacagagt

SEQ ID NO: 40796 - DNA, 1050 bp, Homo sapiens
gacccatattcttagcatgttttttcttatagtttccagaatgttgaacagttagattattttcagtatctttttattttgaataatattgctataatcaatgaatatttattctctgaagtggtgttggcaagtgagaagtgattaatactggattgttttaacatcatcacttgcctatttctcccagttacttagaccctgacaattgattttcatttgatgaatgcattcaggggaattggccattaggaatgtgatccggaaaattttttaccccaggtctgttcttgagctatttgtattcatatcaaaatttttttaaatgagcattcatttaatagaacaccaacatagcaaattatgaataagttggttttaaatagttgataaagttttataccacacactttttacatagatcagacaatttactaaggtgtctaggacaatttgtctttctatgtatctcatagagggacttttaaaccaccataatttaacattctgatttcatcactgaggctcaggagtattttaagaacaaatcaccatcagaagtagatagaccccacattgatatcagctcaagattgttaaatttgtatgcaaaagcaggagaagaagtactactgatttgtgatatgtgtttcaggaaagttacagttagaaacactggacaatagttaagaatcccagcagaagtctaagctaccaaaaaaataatagaaacatgaagtacctgtagtaaactttgattacaggcacatattcaaaaatttgaaacctcgtagctcagttaaaatattttgtagcaccataaaaaagtcaagcatcagtattttcaaatgctatataagaagctcaaccacaagaattacaaacagataggatggggataagatgaatattaaataggaagaatcagtattaaaaataaatttaaaaggtagcactgctctattataagctggaagggagctaaaattctcactggagatagtaaatatagcagcatctagaatatgattacccaaaatatgttctaaa

SEQ ID NO: 40797 - DNA, 1001 bp, Homo sapiens
tttttaaaactggctttatcagtcattctgactctttttctaaagaaattgctattgctaaccacgctttcatttcactggggaattaatgctcagtggcacattagaattcatgcaatagcattaaataattactgtttctttatatatctcctgccaacttagaagtacattaaaattggctgtaggagaattcaggacacctcaatctgaagaaaatccccatccatatatatatattctccactcagtagataagaggcaacctcgagtacctggcaacaaacgaattgcacacatagcaacaagaagtcgagtaatacagaaagaggaaagagaagctggtccacattagctcccgtggtggtagtaaacttcagaaaatatcagagctgtagacagcagcttggcatgaggagaggaattcatggttttccataaatctagtgacaggccaggtcgaataggacaacaccatcttgtctgccccagtagcatacagggcaggaggagaaaagttaggtacagagctggagctgagagccgaagtggaggaggaggaaggctgtgagaattgaaggatgtagggcaggcaaggaaaggtggtgctgtgagggtcttcagttgagccagctcccagtcctgattcggcatgtgtcattttggtgccaggcctggccacagcttctcagaccccagatagagctgccttctgtgcatggaggagcaggagggctcagaggcctcagatgactgtctgaggtttgcaagcagcaaaaaagtgagggctctgttcagtgtatagtggagaaaatcagcgtgagagagtttccagccttgctcttctctacactaccttgggcctcagcttcatatgtaaaacagggataataataccccagagagggtgttgtaaggattggatgtgttaaattatatcaaattcccctcacagtgcagtgtggtagctgtttgacaaagttaattcacttcctccttta

SEQ ID NO: 40798 - DNA, 1052 bp, Homo sapiens
ttagaaaatatatttattcaggtggaagtgagtcatcataaatgtcttcattccttgtcttcgtgttgagtaggctgaggaggaggaagaggagaggtgttcatgctgtctcaggcagaggtggaagaaaatccaagtataaacagactcccacagttcaaacccatgttgttcaagggtcagctgtacttggatttggaaacttgctgttactgtgtatgttgaaacacagtgagagttaagataactatgcattacagttgcttatgtggaatttacctatattgtagtagtggtaaattttgcaagtccccaaatgtttttgccactgttatttttatttctgaatattatataaggcttatgtgtttgctctcttcactccgtctcatcccgtaggtatattgaataatttagaatttagggtattcttcaactacttttttctccaccacctctcctatcaattttagctatttgatttgtccatacaagattctgtaggactatctgagactctgttcattcttgtggttacagaatttgtccttttgatgataggtcacttaatcatcaacacttgcatgaccacagggtgcagaagctgttgagactgacatcctggatcatgtaggaaagaacctgggcacattcccataccttccactctgttaacctacttggagaaactgaaaatcacaagacacaaacaaaaataacctgcagttgttcatcattaagattaagcagaacactgatatgttgggcatcaactaagtgctaaaaatacttgataattgattacatgatacaattgctaagtattggttaaaaaaaatatgagattgtgatcatattagaaatacatttgtctcatggtatttaacaaatttgtggcttacatcaatatggcaaaaggaaggtgttaattgcagcgaggatgataaccactgcatcatttttgggtcattgtattacaactttgaatctataggcataaagggaaacacactgactccttatttaaaaggaagaaacaaaacctttttgat

SEQ ID NO: 40799 - DNA, 1023 bp, Homo sapiens
tgagttaatttttgtataaagtataaggaaggggtccagtttcagttttctgcatatggctagccagttttcccagcaccatttattaaatagggaatcctttccccactgcttgtttttgtcaggtttgttaaagaacagatggttgtagatgtgtggtgttatttctgaggcctctgttctgttcaattggtctatatatctgttttggtaccactaccatgttgttttggttactgtagccttgtagtatagtttgaagtcaggtagcgtgatgcctccagctttgttcttttggcttaggattgtcttggcaatgtgggatcttttttggttccgtatgaactttaaagtagttttttccagttctatgaagaaagtcattggtagcttgatgggaatagcattgaatctataaattactttgggcagtatggccattttcatgatattgattcttcctatccatgagcatggaatgtttttccatttgtttgtgtcctctcttatttccttgatcagtggtttgtagttctacttgcagaggtccttcacatcccttgtaaattgtattcctaggtattttattttctttgtagcaattgtgaatggaagttcactcatgatttggctctctgtttgtctgttattggtgtataggaatgcttgtgatttttgcatgttgattttgtatcctgagactttgctgaagttgcttatcagcttaaggagattttgggctgagatggtggggttttctaaatgtacagtatcaccattgatcccacagaaatacaaagtaccatcagagaatattataaacacctctacacaaataaactagaaaatctagaagaaatggataaattcctggacacatacaccctcccaagactaaaccaggaagaaattgaatccctgaatagatcaataataagttcaaaaattatggcagtaattaataccctaccaaccaaaaaaagtccagaaccagaccaattcacagccgaattctacccagag

SEQ ID NO: 40800 - DNA, 1074 bp, Homo sapiens
gtagagttagcatatactactgataacagatcatctttcctgtaagggtgatatgatttcttcttttgctgaagaaaccatcattcaaatatgtgttatttattcaagttagacatatctttctagccttattaccattaactgcccaaacacattctgcgcatttgcctcactaaatttttgctcctgttgttccttctagatggatgcttccctctccatgacatccacatgataatgcccgactcacctgtaaagtttcagctagaatgtaacctctcttattcctaagcaggattctctcttctctgctcctactgcattcactttaaactaccattttgatagttttattatattgtatatggctaaattgttacattaggtgtcaaactcctttgtatcttcaatatgagatttaattatatatatatacacatactatattcacatctatattcaaagaaacgtattatagttctgtaacaattctaaatatctaacaattcacataattagatacatgtgaatatacagatgaccctatatttatttacacataatgatatctaatgcaaacctgggaaaggggtaaaagagacttaagagaattaaaacaaagaaatgagaagaaaatacaagatactattaaacgaaagttaaggtaggtgaaaggaattgatatctattgatcacctcttttaaattaggtattatgttgaggcacttgatataccttgtgtcattcaaccctataactgttctctgaactagacataatcatcatatttaaaatgaggaaattgaggcatagaggaaagaaaacataaattgggaagagattttaaaggaaagcatttgtgaagaaaattatgaacttatgaatgaacataaaaatttatgtgaaaaacatacagctattaatggttaagttgggaagtaataggaaatgagtaagaagtgtgatagtcatggaaatttgcatgaccaaagtgggcatttctttagacttaagcataataatctccaattcgtatagctctctttttcacattgctttattggaccatattt

SEQ ID NO: 40801 - DNA, 1035 bp, Homo sapiens
tcagatgaagctaatatgaggcttagtgaaatgtggcgtgaacagcatcacattctgtttaaagttctgaattttaaattgccaagatcttacaaatcttacattgtaaatgactaatactcaagaagggtgctcctttgattagcctccctccttcacccctacgccttttctccctcttccaacttatccttttatgctagatcattcctattagtgtgaagacatgccttcatatgtcccatcttacaatgaaatacaacaaaccacccaaagaaatatccttgaccttgtgtctccttgcagccactgatctatatagcaaaatatgtctatacaaactgtcctcagttgctcacccgtatttactcaactcactttgatttgacattgactttataattttgtcagaactattcatcctgctcatcgctagatcacttgtaacttccatgctaatgaatctagtgaattcttctcttttctcatcttactataactgtcagtagcatttgatataggggaccatttttttttttttcctgtgtgaaaaattctcttcatttctgtgtatcacacactcttattgctgcggtttctttttctttctttcttttttttttttttcattctctagtcaacctctgaatgttggaatactcaggatttagtcctggacccaggaccaaggatcctaggtttctgtgcactctactcttaatttattacacttaaacatttgcctttaaatatcatttatatgctagtagatgcccccatttatatctctagcccagacctctcttttcagctaccaaacctatatatacacctgccttctgacatctcaatttatacatttctcacttaaacatgttgaaaattgaactcttgggtctcccaaacctccttctacaaaaacaaacaaaatacatctttcatttctgtctcattaagtgacccaaccgtctctttaattgcttaattttgaaagtcatcataacttttttctgtttttttaaacaatagttgatc

SEQ ID NO: 40802 - DNA, 1035 bp, Homo sapiens
ccagggttggaaaccactgatttacatgaggcagatagtctctattgagaaaatctagttactagttacaacattttgatccgttgttcattcttctaatttgtggattttatatttgtttttcaaagtagtttacatttttggcaattttatcagtatttaactgatggtataaggtgctcactagtgccagagtagggtcaaaatcagtgttttccactttggctgaatactggattcacttcggaaacttttacagtcctaatgtaaatctaggccacactcagaccagttaattcagaaactttgagggttaggacccaggcattatactattattcttcttcttcttcttcttcttattatttacagctccccaggtgatttccttgtaaaggcaaatttgagagccacaaatctaaataaattgttgttgacttaattttctttaaatgatatcagttaaatacagtctcattttgtctgtctttttcaggatattattgatagacttataattttgaattctgaagctaagattcgttctttattcaactatgaacaatcacatatctttggtctaaggtaaaatgctacattttacttttgatattatattttatgttccacaaaaaataagcatttgtcctgtatactttaaaaaagtatttaaaattagctaatatttaaaagcatgcttaaaggtaatttgtcttcctgtaacattataaacaaagtaaattaaggcaattagatatgtgtaccatggcctttgtctgaatttggattctatattattatagtgtctcccattccctaatttaatagaggcattttagggactatttcatttagtgtactcaggagtcaacttgaccttccctgggttggtatttggttagattcttgtcacaatataccctcaaaagaggcctagaaaaggatgatttatcctgaggcccaagttttgctctttggtgttaatcattacttttcaactttactttgcctgaagtttaaatctttctagttgag

SEQ ID NO: 40803 - DNA, 1028 bp, Homo sapiens
catcttacatggctgctggagagagagagagtgaaggggaactgccaaacacatttaaaccatgagatctcaggagaactcactatcatgggaacagcatgggggaactgcacccatgatccaatcagctcccaccaggtccttcctttggcatgtagggattacaatttgagatgagatttgggtagggacaaagagctaaaccatatcagaactctaccactgggtaaccaaatagtaggtgaagatagtgcctctttttcatgaattatcccaactaataatttttttaaaatgatggaagtagaacgtcatcatttgcagtctgcgagaattaattgagtcaccttaacatcattaaaacagaaatggctaaacattattaatgtgccctctaatgaaagaataaaccaccacctctagtcttaccaaggtatctaatttgatcaagcctttagattcagctgccagtttgcagaatatggaaactgcatatatccaaaggatggaagaacaggctgaactgctccctgactgtgcacttcctgaaatccagactggtggaaactttacaggtcaaatggcctgagcttgtcaacagatgaaatgaaaagaagggagagggagaagatgaatgcctgtagattaaaagaaactttaaatgacatatcaagtcttgaaaatgggaaagacaaaattatagtgtctagatatgtacacctgagaaataaaaccacaagaaaacctttgaaaatgattattgtaaaggtcaggatactgggtgttatggagggagggcaggcgaggtaattgtaggcacagagaaggctctctggggcaggtggcagagttctagaagaagttcactttaaagataaagataagttggatggaaaaaatatgtacaaagaagcaataaacattagaaaactgacacagccacatttagtgtcagagataaagtaaaggaaaaactatcagattaagagacacattttataatgataatatgaatatggtcaatacgc

SEQ ID NO: 40804 - DNA, 1037 bp, Homo sapiens
tttaatctcagatctcacccttggtaaaatcattaagcttctgagcatcagagtctcaaacttttcatgagaggggtaagtgtagttttcaaaggacagaaggaggaagactacagtttcttgagcttctccgatgtcgtaggtactatattaggaacttcacatgtattgtcctgttgatacttcatggcaaccttggattatggcatcattatttcaattttcaaatgggggaactaaggctccaagaagtcacaggatttttgcaaggatgaacagctaataaactggcatatttggaatttaaactctaatattcttgattttagagcccatatttttttctctcataccagaagaccctttctgatcgaatattgttgttatgaacttacttattttaggattcaatgttgtgtttgacacttttccacatgatttttctacttgattttttaatagactaatttgagaatcaggttttatattcattttcgtttagttgtatagtatgactcgtaagaatttaaagactgggttgaagcaaaagttgtatgaaatgcagaattcttcttagtgtatggaattacaaaaaaaaattagttatattggaataagggagcatacactctttggatgcctacctggcctcctgttacctctttctctcctcccctcacctctgaaaaacacagtctgatttcagactgccttactttgctggctgatttgcaaagcaaagtataaactttattatgtttcagaaaacatgctcagagaagttataggccaaagtgaagaagctgggactcaaaattcagcagtcttccagggaaattgtctctcagaatttagttattacagagttttatgataatgaagtatcataaaagtatattaacaatagcagatataatttctaccaagaagagattattttttatataagatgcaagtatgtgtcttctgtcagagtagaccagattcatcagagggatcatcatatctttccttcataatccaaagaaatattatgc

SEQ ID NO: 40805 - DNA, 1046 bp, Homo sapiens
tgatattgtctgtaataactccagttttatttctaattgagcttatttggatctgcttttttcttggttaatcttgctaatggttatcagttttatcttttcagaaaactagctttttccttcatttatcttttgtatttttttctttcaatttcatttaattctcctctgatcttggttatatcttttcttctgctgggtttgggtttagtttgttcttgtctctctaattccttgaggtgtgacattaggttgtctatttgtgctctttcagactttttgatgtaggcatttaatgctatgaactttccttttaacactgcttttgttgtatcccaggcgttttgacaagttgtgtcactattatcatttatttcaaatgattttttaatatctatgttgattttgttaaactataaatcattcaagaaaagattgtttaatttccatgtatttgtatagttttgagggttccttttggagttgatttccaattttattccactgcagtctgagagagtacttggtataattttgattttcttaaatttgctgagacttgttttgtggcttatcgtgtggtctatcttggggaatgttccatatgctgatgaatagaatgcatattctgcagttgttgggtagaatgttttgtaaatatctgttaagtccatttgttgtagagtatagtttaagtccattttttctttgttgactttctgtcttgatgacctgtctagtgctgtcagtggagtattaaagtctcccaatattcctgtgttgttgtcaatctcatttcttaggtctagtagtaatggttttataaatgtgggagctccagtgttaggtgcatataaatttaagattttaatatcttcctgttgtactaatccattattgtataatgtccttctttgtctttttttttttttttttttttttgctttaaagcctgttttatctgatataagaatagctacttctacttggttttggtttctatttgtgtggaatgtcttttttcacccctttacctcaagtttatg

SEQ ID NO: 40806 - DNA, 1038 bp, Homo sapiens
aagagaaaaagataaaagtataaagttaaagaggttaaataagaaacctaaatcttcataatagaaataaaattatgaacttatttttctcttgttatatttttcccagcactatcactggaatggtagcaactactttactgtgagctgttatctgtattgtctaaacatctttttgttctaagaagagacaggagtggctgattctgggtctgggccaggaagtatggaggatgatcctggggtatcttaccattttagaagctatctaagaccaatgggatagtgtcaaaagtaccccagagccaaccagaaggggcctcctactggcttaagatggacaatttgagaatcagaaaaataatgactgcaatggattgacatacataaagtatataaaaaaaaacatgggtttgaaaaggcactaaaacagaaaacaaacaaaaaatacactttatcggttacctgctgaagtcactaggacaccaacttgttagtatgcaaattgataaaaagaaaatttaagcatttttttccagccttttctttacaaactgtattttagtgtaactaaaatgttactgaggaaaagttcttcacagaagaattctagctaataaatgcaaactaaatgctataatcagaaaaatcgtaatttggtaatccttagtgaaatagtggatgtaggcaatgatcattaatggatgctaaaatcattaggtgaaaggttgatggggaggactacgtactagagaggtcagtgtgataccatctgaccagtgatctttagcaccactaaaattgggacatccagatagtgcttcatgcagtaggaggtagacagcggcaaccaactatgaagttattttaccaaggaaaaaaaaaggaaacgaaacaaaagaagttaaactttaaataattctctagatctgatgatcactttataggatatatggagaactagagaaaaaagttaaatgacaccatggtaaagtagttatccaaataaacatgactgtttttccaacaaatcagtgg

SEQ ID NO: 40807 - DNA, 1033 bp, Homo sapiens
taggtttttttccttattgggtacatggcctttctcctctcattcagagtatgtcctttcaattttcctaatttattttatgctattagtcttcaaatcttaatcagaatttcttgagttcaacaactgttttctggcctctactaaaatcttcaaagctctacaatgctctttttggtgaagaattctgcttgtaaggattttatactactgctgagaaatggcaagacacttatctctttttttggcaacatcactcagagcagtaggattagctacatcccagcctgtacttcagaagttcctccatgtctggctaccctcacttgataagattttaattattatttgttttgtaagcacaaaaagatggagtcataaaatcttaaaaatctctgcagaatttcacttctgtagaagtgaaagggaaagatagctaggatttttaaaagatgaacatagtagcattgattctgcagctgcctagagttaggcctgggacaggtggattatttggaagaggaatgtgtaggggcagatgtgaacttatttttgcttgctggcttgtttgtttggtaaaagtacaaaaatcagccaggtatagtggcgcgtgcctgtagtttcagctactcgggaggctgaggcagaagaatcacttgaactcgggtggtggaggttgcagtgagccaagattgcaccactgcactccaacactccaacctgggcgacagagtgagatgccgtctcaaaaaaaaaaaaaaaaaaattaaggccaggcatggtagttcatccctgtaatcccagcactttgggagagcaaggcaggaggattgcttgagaccagtctgggcaacatagagacaaggtctctacacacacacacacacacacacacacacacacacacacacacacacacacacacacacacacaccaccttagcttggcatggcattgtgtgcctgtattcccagtgatggggagctgaggcaggaggactgctttgttacgggaaaagtggtcttgacccag

SEQ ID NO: 40808 - DNA, 1034 bp, Homo sapiens
taataaatacgtgtatatatgtatatatacacacacactatacatgtatttattatcattttggatatatatgtgtatatatatatatacacataaacatatgtttatttcttgctatagtcatatgaaataggttagctagattgtattttttaatctcattttatagttgaggaaattgaaacttatttatgatgacagagctggctggtaaaatagtcaggatccccattcaagttttctaatttcaaattttataatttattcactatttttacttacatctttatgccttttttgttttaaatatagaaatttcagtggttcaggtcacatatgcctcatttgtaaaataaagagctagactatatttatggttctttctagctctaaaattctattcttagttcttttgaggatttcagtctcatattcatatggatgcttgagagtttgaacttacaaagtagagaaatttgataccagttctttttgagatttttagaccttccgaaagagattttaaatattatccaattcacactcctaatgatttcaggaatctttttcctaacatcctgagagtggatttcccagcctctgtttgaaaggacacgttgatagcttaactcttacataggtcttgggagtatacaagagctctcagttgtggctatgggtgtatataaagtatgggcaagggagaagagaaggaaagaaaataaaggataggggggtggagaaagagataggtataaggtaagaggatgaaggtgatgtataaaatagcctgggttttggtagtataatattaatagttgactttgttgctagcaattggaatccatgccattgaaacctcttgccttaggttcttttaattttactaccttgatccatgtaaccatgaaaaaacctaggaaataacatactttttgaattctctattaatttttattgctgttttgtgaattctgttctaccacttcttctttaagaaaaattgagttcgatttttctccttagcattgtgt

SEQ ID NO: 40809 - DNA, 1051 bp, Homo sapiens
cctcacattttcaaatttcaactgcgtttataaaattttcatttttccattctctatttgtgtcttcttgctcgatcttaccaaaatattttgttttagtgctttttcaataaacaagttctggcttattttacttggtttttgtccactcattttgtttttattcctttcttaaaaaggcacttaagaatagatttcccctctagatatcacttaaactgcatctcataaatctgggcatgtacttttctttttttttaatcattaacatcagtatttccaacattttttgtttggccccaaagtttagcagttcttttccaatttccagaaatgttaaagaagctcaaaatggttcttctggtttctagcttatttgcattgtggttagtctgtttgataccaattcttagaagtttgttgacttactttatgacctactatgctatattgattctcgaaaaatacttcatgtgtgcttgaaatgaaggtttaggctctaagtcttgaacgtgaccttttatatacgttaagtcatagtgaatgtcattttggtatttttccagtcgcagaccattcttctcacatctgaagctctagattcctgattatgccatctgtaatcaaacacatactgacacaacctaaaagaacatttagctgtctgtaattcgcaagcttttatggtcctagttctatctccctaagacaaaaaaaaaaaaaaagctggaagtgggataatgaggggtaccccctacactgtcttcacactgtggtactagtttcccagatagtacaggcagacttcctctggtacacacaagctagattgttttttaaagaaaccacatctttcattcctatgtgtgttctttcctaaaactgatctggctgaaacggtgcctcaggcctcaggacaaggcatccttttttttttttttttttgagacagagtctggctctgtcacccaggctggagtgcagtggcgcgatctcagctcactgcaagcaagctccgtctcccgggttcacgccattctcctgcctcagc

SEQ ID NO: 40810 - DNA, 1005 bp, Homo sapiens
tttccagcaattgtttctcaatttgcaggggtatagagagttaaaaataacttttgtttgctctgaaaaacatctttttaatatattctaacattttaatttggctttatattacagaaacaaattgcaacccaagtctactaagcataattggctacaatacaacaagcactgtcccaaaggaagggcagtcagtccagtggtggcatgctcaaggaattataggactaattctctttttgttgtgtgtattttattccaggtaggaaaaactatggaatttttttctttaaacaagaagtctagctgtttatttatgaatcatttcttttaaaaatgttcttttttttctctcctcctaaactctctttcatacagcatccgtacttcaaacaatagtcaggttaataaactgactctaacaagtgatgaatctacattaatagaagatggtggagctagaagtgatggatcactggaggatggggacgatgttcaccgagctgtagataatgaaagggatggtgtcacttacagttattccttctttcacttcatgcttttcctggcttcactttatatcatgatgacccttaccaactggtacaggtatttatatttcatgaaaactctggatgtgtgaattctgatggcattttatgattctcttgtgaaaccatgatgtgatatgaagtactttttatcctctgatatatttcaaaatgtacagctaaatgaatagtgagatcagcatgagaaatgcagtctttacttccttgctttaacagtaacacaaacattgaaatagttccaaatcttggagagattaaaataaaaattttcatgaaactaatactttttacaaaaatccatgttgatagtggatctaacattttttttttcaattctgtaaagatagtgaagtaaaggatacatccttttttctcttttgtttgaactgtcattaaaagctctgaaaatttttaaatttaagtatgaattcat

SEQ ID NO: 40811 - DNA, 1051 bp, Homo sapiens
ctttcttaactaagcttaatcatttctagcttttgatttaagtgagaaaggggactcttttacttgaacagttagaggccattgcagggttattaactggcctaatttccatatggttgtgtcttgaaataggcccaaggagagggatagagacaaggaaatggctggttggtggagcagtcagaacacacacaatgtttgtcgattatttcaccatcttatatgggtgtgatttgtggtgcccgaaagaaattacaatagtaacataataggtcactgatgagagatcaccataacagatgtaattaataataatgacaaattgtgaaatattacaagaattaccaaaatgtgaaacaaagtgagtacatactgttagaaaaaatggaaccaatagacttgtttaatgcagggttgccacaaaccttcaatttgtaaaaagaacagtatctgtaaaatgctaaaaaaaaaaaaaaaaaaaaataggcaaagcacagtaaaacaaggtatgtctatgtaagaaactgggtgaaattataagaaaggtatctgatttgcatagagcatataattgtcgtatatagaaagaaaaactcttcaaattcctgttgattcaattgtgaacagtataattttttcacattattaaattactcttttagcctgtgactaccttacaattgaatttgataattgggctttgtaatgcatcttattataggctagttatattgcataccatgagaatagaaacatatgttgaaaggagacaaattagaatagacaaaaattattacctattaaaaagaagaaaatgatctcttttcctaaaaaatttatctgatgttatatgaatctcattgagtttacaaactgtaggtattttatcataggtactttataacttggagaccaatttattttttgtttttttgttttgatgtattacacaaagatttcctgtttttttccaggtaggtggttagaaaaaaattattagtagtttgctttagagaaggaaatagccttacctaattggctttaaggtaag

SEQ ID NO: 40812 - DNA, 1006 bp, Homo sapiens
aaataatagctgtgataacctctgatccacagtgttttatattttcatactaaaaaagaggctctattatatttgtgactactaagggaatagctatttctccttctactgttaactttaggtggaccagtccacttacatagaactctcagttccctagacccagagagcagatttttctaggttggttgtattggacaacccagaaagaaacttcagggtttcttttatcaatcttccttcatatagagcactacttctggtacccttatttgactgttttaatatctgctgttgcttatctagttatatgtgctaccaaagacaaaaagtataaacaagtagaatataaatattaatgagaaaatatgtgacgggttgcttttcctttattttgttcctttggtcattgattattttattaaattattagagttttagatggaggcatttatcatgtgtttataaaaactattcatttatacagttcaccttatactttgatacattatcccacttatgtgaaataagcctgtgaaatggaactaacattctcatttttccataatgaattagtgagaaatacatctttctcaaaatggtcttaaaagcagtttatgtaattgttgttttttctgataatcaagtgtattagggttctctagagggacagaactaataggatagatagatatatataaaggggagtttattaagtattatctcacatgatctcaaggtcccacaataggccatctgcaagctgaggagcaaggagagccagtcctagtcccaaaactgaagaacttggagcctgatgttcaagggcagggagcatccagcacaggagaaagatgtaggctgggatgctaggccagtctagtcttttcactttttttttttgcctgctttatattctagccctgctggcagctgattagatggtgcccacccagattaagggtgtgtctgcctttcccagcccactgactgaaatgttaatctt

SEQ ID NO: 40813 - DNA, 1050 bp, Homo sapiens
tataaatatcccaataaaacttgttccgggcagcgggctgcaggaatacgttgcaaacgcaagagcaaaacaggatgcaaacgtgggaaaaatgggaaataagtggagttaggacggacaaagactgagaaagaggaagcaatcccctaaaaagcagagaggttcctcagatgaaggagggcaaaacgtcaaccaccacctcagctctgttctctactaatgcccaaatgcaagtgcatggtaggtaaaggtgggttttgctcacaccgttttcttaatttggcaaactacggtcagatccacattagccgttaagtttccagccagcagtccttgagaaattctccaggaaagaagacagccgtgtcgtctagtgacgcgcatgcgcagtctcagcgctgcgcgctccgtgttttatcctacccaggcctggaaggaagtgacgcgaggctgaggggcgggttgcgctgtgcgtccggaagtgtctcgcagatagtaaataatctcggaaaggcgagaaagaagctgtctccatcttgtctgtatccgctgctcttgtgacgttgtggagatggggagcgtcctggggctgtgctccatggcgagctgggtaaggtgctttttgcggcctctggggtgctagtgtgagagaccaaagagaaggcgatccgagccggggctgggtgagcccggcgggaatgtggtgccccacccaacagggagtgccctctctgtccccgttttcttcccgtctcctctcgtcactcagactcagcttcagagctttgggtcttgcgaagaactgatcactggccgtaaggtttagtggcgatgggaagatgactcaaattgaggaagagaactagaatagggcccctcccccacccctgcttcgtgaacgctgtctcccattctttgaggtcccttttcgtggttttgtttgtatctgcgcaggccatctctacaaaggtctttgcccctttccttcggtggggtacccactctgttgtcatctctttcctggcgacctcagactgccgcactgtcgtt

SEQ ID NO: 40814 - DNA, 1024 bp, Homo sapiens
ttttccaattttctttatgtttaaaacttttcataaaattgttgaaacaatttaaaattgttaaaatgttggaacaaaatcagaactatttgtgagaatgactaaaatgtaatcttatttaaagctcttgttgggtttgcttgaagatgttttagaaagcttctttgtgccccattcaattaaataagcatcaggggaaatttcaattccatattaatctctataatcttaaaatataattctaatgatattaatctaaaattatcaacaacccaattagtaatttacagataaactaaattattcatgaaaaggagagaaaagcacaaactaagtctaattgttttctacagaaattcagatttaatccagagtgaaaactagagaagatggtctctgggagaaatgtggcctgattggttctcatatgaggaataagctccaagtccctcaaaggcattatccattaacaaatatcttcttgctctctttggctctctataggaatttagacatgaaagagtggaatatattctgttttaaaaatattattgcaaattgttgcacctgtgcatctcttccagactactttgaaaagggactttccagctatcagtacactatctcacaattacccttgaaccagaagacaatgaatgatttgctaaacagatggcatagtctatgacatgcatcatatgtgtgagcaatcacagaaggtatgacttttctcatgaaatattttcagacaaatattttaagttaatctaacattcactaaatctacctactgattttaggtagattttctttctccaaatatacatttttaaataaaaattttcattgtattgcattgtattttattggttatcaacagcaccatgttcttagtttttttaaaaaaaatgtttaatgagttgtaatatttgtgtctttaagcaaggggttccctcatttttcctgtcttttctggcttgatttgaagttattcctgggtatcaatattctacacacattgtct

SEQ ID NO: 40815 - DNA, 1034 bp, Homo sapiens
tcccccaaattataatcgttctttgcatagaatttcatttgaatcgctgagttgggcttcctaatctctcataatacaaaaagaaacaaaacatgtaatgcaacttgccccccttttctttttaaggttttggtccaggccatataatgtatttatcaaaaagtaggtgcactaaaaatatggtctgcttgacatggatgcaaaatggttggaagagatgtagttactcatgactcattgggagatggcagaagataccaaaagtggcttcacaggagttcgttctgcatttacttgtttgttttggatgaaataggaagcatgctcagtgactgtacaggtgacatcagctgcagtgtcaagtaatacattgtaagggcgtaggcagaactaaattttataggattggaaaagtgtttcatggaaaaacaaactacagaatttggtgtaaagaaagacccatggatttggtacaagtgccacatggtacatgacagattgtgtgagaagatggcaggagtggacctttatagcagaaccttattttctcacaggacataaatatgactatgatttcttatcagcagtgttttcaaaaatcaaattgaaagcagggcatgtgaatggaaatgcagcacatagacctgcaagaaattccactcatctttaccgactcatgagtcattccctcagcagaaaacagtctaaggatccttaactaatgaacaatatagacattttggagaagacttagaacacaaaagtaaactgcagaaaataagctatataaaaaagggttatacatatctattatttagtctagtgggaaaaaaaaggacagagaaatttgtaattatttaggaagtgggaggtttgacacaaagcataattatcagctattctgcattgcctgtgtggacagaaaaagaggaattaggctttggccatgaaataggaagtatgtggcatgtgagtcttgttaaaccatgaacagtcatacaagcatagaatcactttcaggaggtcttcacaaa

SEQ ID NO: 40816 - DNA, 1033 bp, Homo sapiens
aacaccctcccccaacaaaagttaccactaccctgattttcacagacatcactagaatgtctttaaggtttaatcacttaactattcatttctagatattttagtttaatcatgctcactttttttaaagcttaatgtcttttaaatctcctttaatctacggtctgcccctccatttctttctttttcttataatttacctgttgaatccagaccatttgacctatagagtttcccatagtttcccagttgcacacttgtggtgcaggtcacgttcctctgttctcttattttatacagattggcagctagttccacaggctagatcacactcaggttggaaccttttggcaaaactatgggggcatattgggttcttttgtcatgcaccacataatgactagtttttcttcacgcttatatcccttaatactttggggcttcagaatggtaatattctaatattttatttttgtttttatttattagctgaaataattttgtgcttcactctcatctactctgattacagttcacataggaaaaggggggtaaatatgcttcttcgatagcagaaatggcagggcgttccagcttcatcttgaacatgttccaccctgacctcctgttttgttttttgtttgtttattttaaaatagaaaatggtattccaagaccacataatgagcattatggatggtcattgcacatataataccttgtgagttcatactgatgttttcaattcaaattcagtactacagagtttttacttaaccacttctctattgtggtgcgtatccttttttccacaacaggaatcctggctacgtagtacagagaagatgctagcattagaaagttctataaatactcatttgctttatccctctttacacatgaagcagtctcagaatgacagttgtatataccaccatcattaattctgattactgaaaacaattttaaaaatggttttgcctgtactatccgagttattgtatttttttgaatagttggactatatctacat

SEQ ID NO: 40817 - DNA, 1028 bp, Homo sapiens
tttatccacagatgtaaaatccttgaacacctctgatatttctgtaattgtctcatgacctcctcattgtccttttctatgtctgttgtgttgtagaccacaaaagaggtgctaagcgaagcccatatgaatgattacacttatttatttaaggtatacaactgcctgccttcctcacaagctataaatattgtccagtataggccaatttactctgctgcccctgtgagagttgtttgtaagaatccgaacctatttgtctgttgcagagtggttgttaactgtgataaatgtcaatataattaaagataatggtttaatatttcaggaagctatgaagcagataacccagctcctaccagaggacctcagaaaggagctctatgaactttgggaagtaagtatatatggtacgttactgtttttaatttgtatctgaatttatatggctccctgatgttgtacttgacttagatgatcttaacaagcggtccctaacttattactgtctggtttgtgtctgtttctcacttcccagctgctgcagaaatttctcctgatggatagaaattttgtatctctccaagttccccatttccctcgccaccccaactcctggcacttgactcagcccttgagttcttgctgctttgcccacacccacccatttttggtccttgaaaagaacatggacttggggatagttcagagctgggattgaatcccacctctccactttgaggttctgtgacctcggcacgtttccctcactgagtctgttgctcatctgtaagaccctggagggttgctagggttggatgaggtcaaggtgaagtgccacagagatgcctggcatggaacagggctctaccagtgctcactcccttcccagtgctgctcccttcccagtgctgctgacagtgaagggaggttaggctggaaggaaagggcaggttcagctgttgtttcccattgcttccctcttctactgttgtctttcatttgtgaagggaaaaaaaaattcccct

SEQ ID NO: 40818 - DNA, 1031 bp, Homo sapiens
aaaaatacagtggtccctcagtatctatggggtattggttccaggacccccatagataaccaaatctgcagatgctgaagataaaatggtgtcgtatttgtatatcacctgcacatacccttccatatactttgtcatctctgtattacttatgatacctaatataatgcaaatgctatgtaaatagttgataacactgtattgttttttatttgtatctttttttttaatttttttttttatctatggttggttgaatccgttaatgcaaaacccacagatatggaggaccaactatacttgataaacctggaaggctgattgttttggagaaaagtaggtattaagatgaaagggagaatgagggcatagaagaaacaaatttagaaaggagccaaaagcaatacttgtagtctggcctcattcctaaacatattaacatacacttgatattatgcaggttgataatgcaggttgataaatgatgtctgataaggatcactgtgatctagtgaggtggaacttgaagctggaatataatggtggcaggtcatattcctttgcaaaggggaaaccttattgaaacagagggcagagtcgtggtatgcctgtgtctgggagggttaaagttgctaaagaacttggagattacaaagagaatggaactttatcatagagtaagtatgacaagaaggagaaaatgaaaaacacagcaaacatttatagagtgcttattatgtggcagatttataaagtgcttattatgtgccaataataagcactttatatgtgtattaactgtttaatccctatgatccctttaggtaggtaccaatatttaaccccactgtgtagatgagaaacctgaaggacaaagaggtcaaatgacttgctcagggttccacagctagtattaataaatggcgagccgggtttgaaacccagtctggatctggtcttcagttgactactacactcttcagcctcatcagtgtctgaatgatgaataataccttccagttacttgtcac

SEQ ID NO: 40819 - DNA, 1105 bp, Homo sapiens
acccccctctccctccacactaactttcattagaataatgaaaatagctggaatttaaatgaatttgtaggaattctccatgctaaataagctttttggagagaagttctataaatcacaaatcgaatcattattgtaattattatttagtaaattttaagttactcctttaacttaggggttgaaggtaaagaaaagtcaagtatttgtattagaaagaaatgaataacatcaataatgtattaaattaacatcagtttggactctaaacccaaagcccagggcaaacgaggaagatatgtttgaagcagaagctggaaaatgaaggaagccttttttgaatgctgagtggttggttttcaattcaagagttattgctagctacttttattagaggcctaagagattggtcctaaattgctgagtagtaggagtctttattgagatggtttaacagggcaagtgtgtttaaatgtctattctcagagctggggagactggagcttgtgggggaaaagaaagagacatcagactgttactgtgtctttgtagaaaaggaagacataagaaactccattttgatctgtacacctgtagactaacgggctcagtagccagcaggatttttgcccttcaaaggtaagaagagccacaaggaacgagagtcccagtttaagagttccaacctacccaaaagtgtaggcacaaggggaatagtataaggaatgtgttcttcctgccaaagtttaggtccaagatacaggctgaccaagacaggaaaaggggaggagtctaaggaaatgtttctctatatgaatctgcactgccatgaataaagaactgttctgttgactggcagaattaatataaaaagaaaccaattagttcgagattcttagttgcagaaaggaattagcagctgaaccagaggatggtgagtaatgaagtataacacagagggaaaggaagggaaaaaaattcctcaattacacagctcattgtaggatagttttattcaagggtaaatctggacattgtggacgagaaatcatattctaaagtaccagtgagtcattgaagaccttaaggtgaagagaaggcaagg

SEQ ID NO: 40820 - DNA, 1057 bp, Homo sapiens
tctcttgtagatgtgtttgaggcaatttcacacaattttttaaaacatacagacacactctatctataaaagaattgtggagtacatatgttcaaagtatctatcaagagacacagagatgttaagtaacttcctaagatctagagatgaatcttcctctcctctttgtaccatgtttcttttgcctttgctgtattttacaatgtgtggatatgtagccagtctagtggccatcctaggatttcaagcccagcagtctggcttctgagtgtatgcacttcacatcaaagctgtacactcttccaattcaattatttatatttccatccttcatcacagaatttactagaagtaccttgctttaataatcaacattacaaaaaggctgtttttttgcaacttttccactaaaaacttcctattttagtaaaatttggtaatttctttttagaatgttcttgaatacatttgttcaagacctgaaacttaagagttaactcatcaagaagtagtaactcactgaacagtccttcctggtatcatcaacacttgactttgtatcacctgtcaaaggtgtaactctttccccagttatgagtagtctttcttataacattgtttcatccagacagtagtaacaagaaatatatccacatttgattaatctcatctcctttgccccaggatgtcagaggaaattttaaacattgccaatgattatgctattaaacagttagaagacacttatcattcttttacttgtcaaaataagcaagtttaatatggttttataaattgagtctgtcattagtcttcaaaattataagagctaagtcttccattactctacgtagattatcccttgcaataattatattactaggtaactgcatctaaactctagaaagaattagtgtataatcctgtagggtctatcaggaaactattttgggatatatcttgttgttaatataataatgtccttcttaaattaggtttttcagcattttaaattttatatttaaactttcatttttaggttaaaagagtcctgtaa

SEQ ID NO: 40821 - DNA, 1032 bp, Homo sapiens
atcacaagatcaggagtttgagaccagcctggccagtatggtgaaaccctgtctctactaaaaatgtataaaaatttagccgggtgtgatggcgcacgtgtagttgcagctactctggaggctgaggcaggagagtcacttgaacctgggaggcggaggttgcaatgagccaagatcgtgccactgcactccagcctgggcaatggagtaataagaccctgtctaaaaaaaaacagacacacacacacaaaagtagtcatatctatcaatctttttaaaagttgcatctggatttcaagtggtagtttaaaagcctttccatatatcaaggttatagaaaagttcatgcgtgtttcttctagtacttgaatggttttgtgttttacatttatatatctaatccattttgagcttattttcatgtatgctgtgagtaatggatcttatttcatcttttttccaaatggcaatttgtcccaacactatttgttttagaaagccttctgccttctgtgttccagtgatttgaggtaacacctgatcgtgtactagatttccacttgcagttaggtctgttgtttccaatttttctctaaaatgattaatgctgtgataattaccttatgcaaaaggctttatccacatttcagattatttcctgaaaaaatcatgtaagtagcacaaatacttaatgaaaggatatgcagtgttcaaggcttttggtaatagccacgttatcttctaggaaagattctactaatttatattaccaccagcagaaaataagtgtctatttgagagcatcctttcttacaatgagtataatcttttaagatatcttttataattttgataatcaaaaattaaatttgcctttttagagatttttggtgatgcataaattttcatatgttggttgatttatatgtgtatgaattctctgcattttcttttcccatttctcctttgggatattgagctgtttatacaccaaatgaaaagcacatttttattcctccctagtgaaataaa

SEQ ID NO: 40822 - DNA, 1122 bp, Homo sapiens
tttacaaaattattggtctgcaatcgattagaaagtttctttaaaaatgaagaagaaattgatccttgaccagagaaatttgacaagcactgtcctaggctactcagcccttttaaaacccgcataccaaaagcaactatagttcttaaatgttagaggctaatagagaggattgcatactgaatgaactacattactagccccagtttccaggaagtgataaatcagtacaagttcctctagctgattttttccacttaattttatcagtacctcatcagttactttctatgacagattattttaattatttcctaagaatgtctgcttgttctaaaaaaacaccgaaagctttcatagcgtttgctaaaaagataagttccttctttatatgtgttggcccttttcgcttgtttaactttcttaccttggagaattgcctggaattcactcaactgacattttcatccatgccaatggaagtacttcagcagatggagatacacttaatatgaatatataaaagaaatgaactcatgtagcattctaacactgtccccttcccgcaaaaccctgtgagcaccagctggtaatagatgtaatgtatacgtatgtcggaaacactcagttctactttgcatagatagaccctcacttgagtcatacttttcatgtaaaatattccaagagaaaatggcttttaaaaaacatttttaaaagtaaaagactaacatgaattaaaaattggtatttttcaatggtcagaatctagtcaagcattatgtttccattttagtgacaaaattaatgtgaggaaatgaaaagctagaaatgtggtaatatagcctctcattttttaatccaccttgacaaattaaagatatttagaatgaaatataaattaagaaaatgctaatacatgtagttttctattgctgctataacaaactaccacaaattctgtggcttaaaacaacacgttattatctcacagatgtataggtctgaagtctagctgggctcagctggtttttctaaaccttgtctcatgagaccaaaatctaagtgtcagttgcagtgggctctgaagactctaggggaggattcattcccaggctcacc

SEQ ID NO: 40823 - DNA, 1050 bp, Homo sapiens
taataatccttgaatttctgcagtatcagttataatgtctcctttttcatgtctggttttatttatttggaatttctctttttttttttctttgttagtctggctagagatttttcaattttgtttaacttttcaaaaaaaacaactttttgtttcattgctcttttgtattattttctttctgtcttttttttttttttctgagacagagtatcactctgtcacccaggctggagtgcagtaggctggagtgcagtggtgtaatctcagctcactgcaacctcctccacctcctaggttcaagtgattctcctgcctcagcctcctgagtagctgggattacaggtgcatgccaccatgcccagctaatttttgtatttttagtagagatgggctttcaccatgttggtcaggctggtctcaaactcctgacctcgtgatctgcccgccttggtctcccaaagtgttgggattacaggcgtgagccaccatgcccagtcaatatttttttaatttagatttcatttatttctgctctgatctttagtatttcttctactaattttgagtttggcttgctcttgcttttctagttctttaagatgcattattaggttatttgaaatttttcttgttttttgatgtaggcacttatagctataaactccctgttagtactgcttttgctgtatcccataggttttggtatgttgtacttcattatcatttgttctaagagaattttcagtttccttcttaattttttaattgacccattggccattcaggagcatattgtctaatttccatgtatttgtgtagtttccaaaattcctcttgttattgatttgtagtttccattgtgatcacagaagatgtttattattttaattttttgaatattttaagatttgtcttttgaccaaacatatggtctacttttaagaatgatccatgtgctgaggaaaagaatgtgtattctccagctcttggaggaaatattgcatgaatatctattaggtacatttgtttctatagtgcagattaagt

SEQ ID NO: 40824 - DNA, 1044 bp, Homo sapiens
taaatttatgtaatattctaaatcctttgttgtcatttcaacagtgttcacagcatcttcaccaaaattaaattccatcttaagaaaccacatattttgttcatccataagaagccattcctcatctagtcaggttttatcatgagattgtagcaatttggttacatcttcaggttctacttctaattccaattgtcttgctacttccatcacatctgcagttacttcctccattgaagtcttgaactccttaaatcttcctgagggttgaaagccaaccatgaggattgaaaacaactttttttttttaatttttaactttcatgagtacatagtagatgtatatatttatggggtacatgagatgttttgctacaggcatgcaatatgtaataatcacattatggaaaatggggtttccatcccctcaagcatttaccctttgtgttacaaaaaatccaattatactcttttagttgtttttaaatgtataattaggttattattatattattaactatagtcaccctgttctgtacaatagaccttattcattctttctatttttttgtacccattaactatccccatccccctgccaactccacactacctttcccagactctggtaattatctttttactctctatctccatgaattcagttgttgatatggtttggctctgtgtcaccacccaaatctcatgttgaattgtaatcctcaattttggaggaagggtctggtgggaggtgattgaatcatgggggcagacttcccccttgctcttctcatgataagtgcgtaagttctcacaagaactggtggtttaaaagtgtgtagcacttctcctttcgctctttctctcctgctctgtcatgtgaagatatgcctgcttccgcttcgccttctgccatgattgtaaatttctggaggcctccccagccatgcttcccatacaatctgtggaactatgagtcaattaaacctcttttcttcataaattacccagtatcaagtagttcttaatagcagtgtgagaaag

SEQ ID NO: 40825 - DNA, 1050 bp, Homo sapiens
caattactttagacctgcacctttgcattgtaggtcagaacctacaaaaattccatcttggaaaacattttagatttaccttgtattcacacacccctgcaaagtgggtctttgcaaacaggaaaggtaaaagatttatttttactgcaaaatcatgcctttatataggattagtctgtggattatttcaggcaacaatgagtagatttttgaaggaaacttcataacacagttttggagccctatcttctgtaacacatttccaacctttggaaatagccttgattttccaacttttaacctgataccaacaaaaatggacaaagataatatcacatggaattattctgaagagccagctgctgagaagttccaggagctgtaaattagacaaaagcatccatttatttgggagtaagttacaatatggctatagcttaaaaatatataatgattcagggaggtattttaatgaacttatgtggcatttattgtgaactattgtatgtttagtattacactgtttttcttctcatgatgtaaaggttcaagcttctgctatcctttgatgtgtgtttgtttttatgaagacagtgcaataattttgtttccactgcattttaagattttttaaaaaataacatttgtaaatgaatattgaaattaaaaatagtaacatcagttttttcttcaatatacagacttcctttaataagtgttgcgctggttcaaggttgggcattgggtggaggagcagaatttactacagcatgtgatttcaggtaggatgaaaatttcattaatttcttgcacaaatataattaacttgctcaaattcatttttgccttaatatcaatattttatatattcttaaataggataaacctattttcttttctgaatgttttctttttgtcagtcattaaagtagataattttaatctaataaaatttcatgatcacttcattactatgcattttcaaaaaattaacaaaacacatggttttgagattttgaatagagcaaatccatattagcaaaactcctg

SEQ ID NO: 40826 - DNA, 1052 bp, Homo sapiens
agtacttggtaactaactgagtgtgggagaattgtgaaacgggaaagtcaaacatagtaccaaaaatctgagccttattgaccgctagctcagaactcttacactaactttttccactaacacagaacacttatgcaatcttttatagagtttctaggtatattttcatctttctaaacatcctttaagtcaaatagtgcaattttttttaatttctcatttcttatgaatgaggaaactgaattacgtagtcatgacttgctcaatttcatgttgttattaagtggcagcactaggattcaaagtcagttcttttactttcagttggttttgccgtgctgagtttgaggtgctatcagaatgtgaaaatgtctagtagattttagcactttatatggaagtagatgagacttccaaaaaaaagaaattataaataaagaacagagaaaatcatggattagaattttgaaactgcatggatttaggggattagctggataagaagagccaaggaagaagactggaaaagaacaaacaaagaaataagagaaccaggtgtgtaaatgttgctagaaagtgagagcaaatatgagaatgaagaaactgattaaagaaagatactacgtgttatggagagagaaaaggtgaataaggaaaagtcatttaatttgacaagtaggagattattaaaagcttttgaggagagattttgggataaggcagagggccagattacactggattgaagaaagtatgtgagctaaaaaaaagacaaggcaatgagtttggactactcttaggaaatttgtttgtgaaaattataagttgtggcaataccaagataaagccttagaaatatttttttaaaaatcaaagcttaacataacttttcccttctttcccttcttctcttatatgtttatcatcttaaggataacagatgggtatatcttatgcctttcccctgtcattaccctgagtagaactccatagtgatctagggtatgtgatctgtctcttatccctacatctttgctaatacctcatgcaaa

SEQ ID NO: 40827 - DNA, 1045 bp, Homo sapiens
agggtagatgaattctttattatcctttaatgaaatctctgaagtcatagtataagaaatatatagcataaaagtaagcactttgaatatggataattttaagaattgtaacaatacatataaagtatggaatgtgtttatcacattatgattttaaaattaacaagaactagaaatagtttatgtaaagttcccgatatttccatgtttcctataaactatattcctatatacttgagaaggaactataaatctgtgtaaagctgaaacttaaaatggcctcaggacttttgaggcttatacatgtattatatatgagttacagctgcaacatataaatgcatctacccctcatggctgaaacattctgaaacttatcatggctttaagttataaacagtttgtctgttagtgaggctcttctttatccaaatacttactctttgttgttacagatgcatcactagcatctacttacttgctgaatttgctttctgaggatgatgagataactgaaatatatgacaattttagcaattagattatattcccttctaatagtgataaaatgcttggaagtgattaagtggcttttttatcataaaaatataattattttgatgtttttactactgtattttttcagttttaaaaagctttttattaatgtaaactacaaaatacaggtaaaagcagagactaatacagtgaaaccctcatgtacccataagagcatcaaccctatcaatattttattatatttcttatctattattccactttttttttcttttaagtgtaactgatcccataagaagttgatcgcgtcttggtatgctttggttattgtgcaggaaaagagctccaactgtccctattaggcagttaattcttggttcagatggtagaggccaggagatccactaggataacacaaacattaaccctgctgaaaagttatgtattggaaagacaaaggaataaaatagaaaaaaatatatttaaatattaagacttggatttgatgccacagatgtcctgtagg

SEQ ID NO: 40828 - DNA, 1172 bp, Homo sapiens
ataaatatataaatatatataactggcttattttcttttaatgtgcaatgatggctggatcatttaaagttctttttagaaaataacataagccaaagactcaagtgtaaatatgtctatatggagaaagcacattatatttattggttacttacattccttttttgatggctaaaatactaccaccacacaatcatcttttttttcctgaagaaagctttttctttagctaaaatcaattgtaaacgatttttgtagattattttttgtatgttttagtgtaagtagaagataaactttttattcataaaccaggaagcaatgttctttatagtgattctcttgtgtacatgcttgtgaattaaatttgtgtaaaatcccttggcaattgggtcttttaatataggaccaaattaaaacattttgctgaatatgtatagtttttcacaatttcattaggtaaataatggtttggtgatcatacatgagaaatgtacacattaaaaggccttgctgacaacttgcacaatgttgaacatagcctttaagcatcatttaaattttaaaggaatggagtttttcagcctgtggcccagcactggtcaagaaaacaagatggcaacatatatgctttcagggtcaaatttgagcaaactgtaaactgtcagggtgataaaatgtttctcttgatgtttacatgcacaagctttgcgttctgactataaaaagtgtgaacaaatcaatgccagattcctgttttgcgcattgtcatgggattcttaagtgaacctttctaaatgtggtcttgttcacatgctccacgtagctgtaacttcacatcatcagcttgcagtttgtaattgactaaagcattccagtgtcctctttctagattgccagctcatgacatggtgcttataaagatttaattaaagtaagaatgaaataaagtttttataattataacagttattgtttgcacatcattttttcctcttaatgtttatgcattcaccactaaatgagtagcttattcctatactcgttgatacaagtaggccacaaaaactctatttaaagagtaaaactgatttccaacctctagtttcttttatttttattttcttaatttaatgccaaaatgtccagtaggtggagatggaaaaggccag

SEQ ID NO: 40829 - DNA, 1034 bp, Homo sapiens
gacttccaccctttctacaggtgtcctcaaactccctacaccacctcatttccctgggttgttgcagctgtctacacaagattacattggttttgattggggtgctggctatggagatgagaaaggggggatgaatcggagggatttttgagggagaactctcagatcgtcttagcaactaaatgaatagtggttatgtctctaaactttgcgatttgaagatttcttgatgtaaactctgcctccatttttcaggtcaagtcttaaaatcatcagtgggatcatttctgacttcagaattcaacttttaccttcaaatttaactgatttcccaccttttttaattaaaaaaaaaatctatggttaaactgtgccattctgggaccttccaaaaagttactattttcctttacattcatgtcccgtgaatcctgaacaccccaccctctgatttgtgtttaatcagtgttgatgattagtttagtgagctgtggagttgagctgaggagtttggtgaggagatttagagtgaaggcaatattgctggagactgcttaaagagacataactatttctaggcacattttggttccttgaatgcactcgccacagtggtaggtgaatttgaatcataactacttggtgaatagtgttggaatgataaagacctcttaaggaaagttttattaccctagtttattgctggagacacctcgaacttctattccaaaataatatgcattttagactgttctccagcctgaattttacccacttgaatgaactgagttgggaatttttaaatgaattgcatattataagtaatagtttatgatatggtctctgaatttttctaaattcttattatggagcaagtccatagatgggcttagaggaaaggcagttttaactcaaaaattttattgccaatatgttgtcttaaacatataaaggcagcagaaatacattttcaggtataagtaggctcaaaatttaaggatcactaaccattcttgaaaaatttgcttaaatac

SEQ ID NO: 40830 - DNA, 1069 bp, Homo sapiens
gagtctgggttcagtggcagctcacacctataatcctagcactttgggatgccaaggcaggcagatcttgaggtcagcagttcaagaccagcctggccaacatggcaaaacctcatctctacaaaaaatataaaaaatagccgggtgtggtggtgcatgcctgtagtcccagctactcaggaggttgagatgggaggattgcttgaccctggaagtttgcttaaccctggaaggctgtggtgagccaagatattgccactgcactccaacctgggcaacagagtaagaccctgtctcaaaaataataatagtaataataataataaatgaagtttgtagtacatgttatttcaaaatagccctaaatgttttcactgcccttaaaacacccctgaaggtgggtgaaaataaaatcaagggcagagaccaaattctttgattgttgatccagtgctctttccaacatgccatagcttatcttcaaatatggcaagcccagatgttactacaaatgataccgtttcccagtgtgatgaagggtcattatcataatggactgcccgattgcattttctttggttaaggcaatgcattttgcaggtagcagtgttgtttagcgtaccttttccttttaagaagaggagccctgaacaatgtgtgtcttgtttctttgtcacttctcaggcttcattagctttaactacaaggtctatcagcctgtcatagtagcaaatgccattgcctcgcacaaatccttcactttctacttggccttctaaattcctgatggatctgtgttatactgttaaatgggtcacactgtcttttaacctgggttctcttttctttttagactctgaattcagtcacccctcgactacaagctgaagactgcagtatagcgtgcctgccaaggaaccatgacaagaaccgtttcatggacatgctgccacctgacagatgtctgccttttttaattacaattgatggggagagcagtaactacatcaatgctgctcttatggacgtaagagactgccctctttgttagtgtagagtgttgtggaaa

SEQ ID NO: 40831 - DNA, 1061 bp, Homo sapiens
taaaatatttattaataatttagactttatactaaattatcttggaaaagctagagctcaactaaaatcattttttaaatctggttcatctgtttaatattaaggcagtctctaatttagtaaataaacacctctaaaaattgtagtgcaacctctattaacgtgatttaaaccatgttgtgtattctcctgagatatgccagattaaggaattatcgaagccttggtggaaaatgacctactcaaaatgaaaatggaattcataactaaaagcatcccaaaaaacagctagtcttaacccttcatttcgtaaataagcagagtgggaataggtttaaaatgtcgaccatctttactattttagatcacatcacgttcttataatttgagcactagtaaaggttttatttgttttctatttctttctctaatattcaaatgtgattttgttcctgtttgtgctttgaatggcatgtttggatgactgtcccagatctggcattctgagattgtaccactaaaaatgtcaagtgcatttgccttttaattacatacagtacctggattttaatattttagatttttccctgaagaagagacttttctggtcctgtagtttgtgggagggaaaaaaatatcactgacattatcatgaagctttttcccccaacgtctccatatatccacatttatcatttcagaacaatttcattttgggtcaggtttagttgttctgtagcttactttgctataaacactatgtttaaatatataattccgcactgtttgtttgtacttctttctcttatttcccattaatgttcagctcagcttgttttactcttaataggccattactacttggatgtcacatatgtaataatcagtatgtggaaggtatagtttcttgtgatttacactcctttccttcctttacctttggcataaatgtgaaccagctcattactttccagggtatttctttttttacttccccaaattaaattttaatttcatcctattgttattctctgatttttattatttcaggtgggcaaaaa

SEQ ID NO: 40832 - DNA, 1043 bp, Homo sapiens
tgtctgagccagagacttcgttatatgaattcatacaaactaatgaaggaatacaaaacttggcctcacagggagagagtggagtgtcttatgcaaatctttgttgtcagccacattcctacatgcagaatgcaaaaaccatgtttcagtttgttgaggatttggaaatagcttgagataatcttaatttaaaaggactggcaaattctttcagctttgtagaatttattccacatatgtcaaagacaaacttgttgtactgcaaaataaactagtactgtgtgatcttagttgaaaaggtaaatattacaatttacattctattctctcatattcattcttttggtacatgttaataaattgcaaaactatattgctgaaaaatctaatgatcctgaaaaatctaatgataaattctagcaattatcagtgattacaatataggcctggtttgttgttgttgttgtttttgtttttgaaaaggaatcttgctctgttactcaggctggagtgcagtgccacgatctcggctcactgcaacctctgcctcccaggaggttgcaattctcctgtctcagcctcccaggtagctgggattataggtgcctgccaccatgcccagctaattttttgtatttttagtagagatggggtttcaccatgttggccaggctggtcttgaactcctgacctcaagtgatctgcctgcctcagcctctcaaagtgctgggattacaggcgtgagccaccatgcctggccataggtctcattttgtacactaagaaaatgtcaaattactaattttcatacttagtgctaaatttacatttatcataaatgtaaacatgtaatagagaaccagtaattttttattttccttaaaaatgatcctggtaaataagagaattgattcataagatcatggtttgttgatgccatagcaacataatcttatattgagaacatcatctgttacaatgcaagtagttgtggccatgtgcctagaatagacttagttattaaagtacattgtgatatgata

SEQ ID NO: 40833 - DNA, 1055 bp, Homo sapiens
ttggttttgactcttatttaaaaaaaataaaataaataaaactgctttgtattatgcagctattatttttctgacaagttcagccactgtggagacagtttgaagtaaatgtggctcattgttggtggtctaagaatgtctaaagactagagcaaataagaaaatgttaatagagagaaggaaaacagaggataaaaattgaagttcctaagaagtatgtagctaaaatttcgccttatctaattcaggcattttctcttggctttcccagcacagtacttcttagcgatgataacaacagcaaccactttattaatttgctttttttaaatttagaattcacatcatcatggtaacaacaaccatcccttgaatatgtctttgttagttgcttaatttgctacacctaactcttccaccaggcgctaaatattgggactattggccatccattcagaaagtattatgtgcttcctgtctgtaatgcactaaatcagacattgtgctccaaagaagagggttgtaggagggaaggcatcacacctgtatgcagttactatgcagagcaggcttgggataaaaatagacattggccacatctgtgttaaatcatgagctgtgacccttctcatgacagttccccagctctgctaagacacgttctttggaagaagttgcttcacttttcatttgggtagaatatttacagtccaagtaatagatttcctataatttagaatttactaatacttcctttaaacaagtatatgattatccaaaatgtatataggcttttttgattccagttttataaaacaaatcactaatccaatgttgtgttttaaatagaaactttgctgtatgtaatttcagttggcattcgttatatatttacttaatgtgggcatttcttttcagacttatttatgaacatagaccctatctgtatttctacgtctacctgagtatagaaaaatacactgttttttaaattgttatcctaaaatagtggtctgaagcttgcatttttgaacttaaaatagtgtcttggactt

SEQ ID NO: 40834 - DNA, 1034 bp, Homo sapiens
ttaatttctccaggatggaattgggacagcacatgtgaaatgctgtctatcaagaaagcttattagagactcggttcctaaggtttttagtgggaactggtcacatggaccccttcttgctatcatctgccaagattcccttctcccagaaggaaactagacttttagcataaagcacattatttgcacaatttaggcacaatgaaccactcttctcagggaatgatgggaaacctcccaaatccgagttcccggacatcagtccaaggtcaactttgcaagccgccctttccaagaatttcagtcttagtcctgctacgttaactcttttctgtacaatatctatatcaagtgtctcaagggctagttaaaagaatatttgaagaaattagagaaaattccaaaaattatacatacaattaaggaagtagaaaattggatgtagaaaaataattagaaaattaatcattattgacactaagagagaaatctgagggataatttaaggacttcctttagataatgagttatgacataagataaagtcacccatagcctgtatctcccccaaatccttccctaagtagagaatatgggcctactttatttgaaacacttctgaaaagtatttcttgaaaacactctttagaaccttctaagaaatgacagctcatttagtcatttgccattcagattgtataccagcttatataataccttgattcattaattatttgctgaacaatcctaaaaattatgtttatccattacccattcatacttttactatctttctacacccaatatgtatgcagttcaggttttcaaactcttacttgagtaaaaagggagaacaggtatttaaaagcatatttctagccaggcgccgtggctcacacctgtaatcccagcactttgggaggccgaggcaggtgtatcacaaggtcaggacttcgagaccagcctggccaacatagcgaaaccccatctctactaaaaatacaaaaaattagctgggtgtggtggcgggcacc

SEQ ID NO: 40835 - DNA, 1026 bp, Homo sapiens
attttctctgcattctttaaagctttttgatatgaattttctcttccaattgttaatatatctgcactgtggtttaatcaaagtacagaatagcaacaatatatttcacagttatcttggcaaagagttttaaagttgatgtgacttctacaagtagagattggtaatgccattagaaagttaaacagcaattgcttttaagaaatgaaaatcctttggggcctttatgggaatgtgaaataatctcttgcaggttaccatgaaggtctcaggccacaagtaatagaagtgcaacattttatttttaattactaattcccccctcactgctttattttaatttaaaaataaaaaaataaaaaatgcttaagtggaaattgtaaactcttttataaattatcaacatatagaactactcaagatagagttataaatgcatcttgcaaacagatcgcctctggtttgttcactggctttgataccttttctcacctcttgtgtattcagggatgtacgctgactcaattaagtcctagaggaggaagagtggggccaaaagtagctggcagggacatgtgtctcctactgccacctgacagcgttaaaaataatcatattttttcttgtcctttcctactgcttctactttgtatacccgctctgtctagcaagaggaggaaaattatgtatgctgagaaacatttaactcctaatagctaaattaaaagaaagaaagaacagataaattacaccataactatgatgtaatgttttgatgatctttctaactgctatcatttagctttttagtcatgctaggatccagatgaaagtatgtaatgttcagctttggtctcagtctacagttctcagatgaaaattaaatttatatttggaactgtttttattagctttgcaagtacatttttctgatagtttacgaagcactatacatgaaaatagaatgctatactacttgtcacaaactaacctgtttcattgcaaggtaaaaacaaatatttacat

SEQ ID NO: 40836 - DNA, 1050 bp, Homo sapiens
ggtgcatcagagaattgaattatagttttccttagaaaatgtatacaaacaatgtgttctcaaagcatgtaaaagaagaaaaggaaaaggtgaaactgtcatactgtaattgctgagtaccacattttcatgattttcttaaggccttccatttatgctataaatttcttctaaaaacaaacaatttatatacttatatattatataatactatatgagataaacatgtactagcaagttatgagtagcatcagttgttgaagtataattacatggattgcttaattttggttatttatcagaatgtattagtaaatgtctagctatgttgtcttgtatttaagacaaatcattctaatttcagaacaatccaaaaattagccaagtggatatttctttaaacccagttttgaagaatttatagtaaagtacctctgttaggccctcagatcatttatacttaccaaattcttttttatttacctttacaaaaaaatactaaaatattccaagaaagaattaaagtatattggaatgttataaatagctacagtttgatcatgacatttgggtgctagaaatgtgcttgagctctcatttatattgaagataaataaacgactaaactttttaaacaattctccccatagttttacattcaaaagaattattgaaatattcagtactaatgttaaatgatatattgagaatttcacttgtagataaaaagacagtttgcattcatgtatgaaaatgagtgggtaggcccaagggatttggtttagaggaaaagctttgtgtttagcagcattgtctattcttttgtgtagttttctatatgtcacacttctattagattttagtgcttttttttttcaagttagttgtttttcctagcgctttacacacacattttttcaagcacctgaaaatgggcaaagtaatccagaaatcatgcttttttcccaaaattatttagcttgacattttgaaaatcaaaactcaatgcttttattttctacagagggagtagaagatggataaacagcc

SEQ ID NO: 40837 - DNA, 1059 bp, Homo sapiens
ctatctaattccaaagctgtctaatgcatgttagcaacattacattgtgactgcaatataacaactattcaaaagttaaaatatttttaagtcagacaaatctaaaacaccattttagtacatttcaggtttaatatatttattctgttttagaattatcaatattattattatttcattaaccatgatatgccatattttctttattattattattattatactttaagttctagggtacatgtgcacaatgtgcaggtttgttacatatgtatacatgtgccatgttggtgtgctgtacctgttaactggtcatttacattagggctatccctcccccctccccccaccccacgacaggcccccgtgtgtgatgttccccaccctgtgtccaagtatttccgtaaagattttcttattcaatggcagtctacaccattatatcaagcagactgatttggttcatggttctctttgattaaaatgtatcagtcatttatgtaagatatcgtcaatgaattccccttgaaatcatggaaacaggtaattaaattctgtcattttcccaaactttggctttgttcttttcctggaaaggcataatatgatcctagaataaaccaagtctcattcccccaaggctaattaacatgcaaataaattttctatacactagtgtttttactaagtaaatcattgtagctggacatatcatttttaagcagaaattttttttatttttgtattttgataactctaaaatgttttaaaagtttgcaaaggtaagaaatgaaaggctaatgtattctttttgtgcaatcagccagtccttggtttctgctcggattggtatattgaagaaatgctaatagtatatctgtaacctgttaaggaatatcaagtctcttcaggaaaggaataataaaatgctaatgatcagcattaactgtctgaattggaagggattatagaggaacatttctgtccttttcctgtcaaaagaggatcaccttctacaataatcccaacccagccattacttataccttccaaattcat

SEQ ID NO: 40838 - DNA, 1100 bp, Homo sapiens
catgctggagaatggtgaacatgattaaatagattaaattacttttcttatactatgcattaatagctttctcaaccatgtcccagcggctgcagcacattgtgctataccttactgaggaaatcgcctgatttttttttttaatcagtcttcactatcttgccattttttaccattatcattctaacttagtgaaatcctggttttctcaagtgtctagtctttctttgattttgatttcacatatcatacacatcagttatttatattttatcttgttaatcaactaatttcttcacatattttatttttcttcccaaacacatttttgttcaacttgaaggcaaaaagtatccttggttctggatcattttcctcatggttctcagttgtagagaggtggaagacacatgacaaattctagtttaactggattctgtaatttaaaaaaagaggtgttacagagtcagtcctgcagatgtttgagttccagacccttccaggcaggtcaccaggtactgcctctagacttagatgatgtcccctgataattctgtcactcttcttccgcaagttgctccccctttgtgagtcacatcatataaatgatattattttaatactttctctgtcacgatctgtccactctaagcagaccttatttatttttaatcacccttttgccacgtgggtctgctttttctcattccttttcactttatcaccgtcttaggggacttaactagccaaatggataacccatttccttgtttttctgtttccatgagcacccacacactgctcagaccctttgatttctagcattaaacttatcaattcaacctcttcctcctcactacattgattttttttttttcctacccagcctcattgcaaaacccaattcctcagtctctctaagtttttctcctttccctaccctgtcaggatctgttcttggactatttcaccagtgtactcactccagctagggtgcctctcccctgatatccctcgttttgtcagacttcattgaataaatcccacaatcaatgtgacctgaagtcctgtcactgtgctcattggttctagtagacatc

SEQ ID NO: 40839 - DNA, 2061 bp, Homo sapiens
agcaaaatctgtatcaattactacagtatttattatttataatatagcagctaatgcttaccagccactcataacattctaaaaactttgtccagcatttgatacgattatcttatttaattattgcaatgaccctgaggagtcctgatgttgttatattttacatttgcagaaacagaatctcaaagaagttaagtgcctttcctgagatcacacagctattagctggttgagctgggaagtctgagtccaaaatctatgctcttattcacagaataaacatttttaaggggataaaatattaataaatcagaaaagcataccttgtcttaattctaaagataagaaaaaaaaattttctgttgggattatgcttggttcaaggataaagtggagcctatctaggggaatgtccgtaatgcataaccttcaggcaatccttgtgaatatctctttgctctttgttgttaccaaattattttgtcttaaggctatgagaaaattgactttctaaaagctgtgtctccgatgaacagttaatactaaagccaaggggaagacgtactggtcagaattatagtaactttatccttacatatatctagaagaaatactcttgtaactgagagctaaatctagaaattcttctgtcatgcagaattttgataaatgtccaatgctatttttagttttaaatgttttttacgtatatgttttatttttgtatcatctttcacttaactattgaactacagttgttctgtgatataaactcttacaaacaatatagatttggctttagtttcattaatttttcataaatgcttgagtattcatagtaccttatgaatttatgataaatttattacagatttattcaggcagagacatatttgaaaatttgtaatgaggaaaaaaaatcatcttatgaacagctccataattttactttcctaattgtgtgtaccttttgggtctattttatatttatttaagtttatattggtatttatatattcatataaatacttattacatatttatataggaataatgcgaagccatggttaacttcataatccagggatgcaggcttaccaaaagactgagacctcatcataggatagaatgattttccttctcacaatataaaaagtaaagaaaaataaattaaccaaaacctctctcatgcaaaaagaaaacattattaacttttggtgaaattcagacatctcttcctgtgtgcatactgtatgtaaagaggaaaaaggggaagaattaatggttggataaaataaatgtacacaatatactttatatgtattacttcctaataaaaattatttcttttttatataacaaaattggaaactaaggtaaaactgaaataattactgttgattagggaaaactttcccatcacatgtgtttctgtcatttcttttgtttctcccttgatttaggttttttttaatgcggtaggccaaagtcttaggtgatttgatattagttttagcataatttgcacacatagaattcacagaagatataatttcatgcaaacatgtaaactttcaactgtaaaatttgtatgaaggactgttatgtttgctatgatatggggagaccatttagtcaatgaggtctttgtacttccattgtgataatttagatagcttttattttctgaaatgtgtttgaaaatgtggaaaatattttaatatttccctggtttttttggctttcatgctaatatatacatacattctaatgtatattatattccatataatgtatattttctgccatttttcaagtgttcttttcccctggcctttcttctaccctccaataatttattaaatgtttttaatctccccccccagcctgtaatttagttttgtgcattttaaagcagtattggttatatgcacttcagcaaaccagtttatgccagctaaagattgaaaaggagaaattaatttaagatttagttctgtgttttttaaaacctttttaaagatgaagatattgatcttgtattactagtattgaagcaaa

SEQ ID NO: 40840 - DNA, 1031 bp, Homo sapiens
tctccttggccagaatatggaccgataccccattttaaaaacatgtcactgttaatggaaagaagactcaggttaacctagtgttaatggcccagtgtgtctccacgtgtaatatcttgatgcagattttgatacaatatatctaaagtgatctcttgactcttcatttgtaacaatctgccagttgatgctgatgctactggtctgtagaccacatggcaaggtgtttggttaatagcctggctggtgaaaatagatgttggagaatcaacctttattaccactatattccaccaggaatgaaacttgtcaaatgaatactgcatgcactgtgcatgatgaagctgacttagtatagtagaggagaggagtgataacattgaggattatagtgacttgcccagggttacttggtaagtgacaagttttatccagcaacttgtattggagacaaaataaatacagaagcctgagatggattggagggcgggatggaaagcaggtaaaaaaagtagtgctaggttataatcccttggatcatatatttgtgtgattcatttttcagtacttctcagaggtgggtatacatttgcaatggagaaatcatatataaaaactcaaagcagaataaagagcctataaaaggaaaagttatttttgacttctagaatttaaatgttttcaattgttacctttagctctaatgaatcgttggaagccaagtaaagaaagcaatgtctaatatagattatattagcccattggaacgatgccttgattaaacctcaatactaaataatcaatttgttggataggaactgtaaccaaaatgaacataacagctttggtttagtttagaggaaagtctgctgtattttaggtcatcaaacctagttttgaattttagtcctgctaacaggctatgtgcatcacatttctaatctttctgaactttaattggatatgactgtatcagaaaagttcataagagagagaagccacagaaccagtaacagctcacataatataag

SEQ ID NO: 40841 - DNA, 1066 bp, Homo sapiens
tataaagccttggtgtctgtctgtacctattttttctagatatgcaaataattgtttctaattaatcttaccagaatatgtatcacagtaggtcactctgagatactgtcatcaggtatgtggtattttctttcattatgtagtttataaactttttttttattttagaaaattttttgttgttgttgttgtttttgcttttttttttttttgagatggagtctcactctgtcaccccagctggagtgtagtggcgcgatctccgctcactgcaagctccgcctcccgggttcacgccattctcctgcctcagcctcccgagtagctggaactacaggcgcccaccaccatgcccagctaaatttttttttttttttttttgtatttttagtagagatggggtttcaccatgttcaccaggatggtctcgatctcctgtcctcgtgatcaacctgcctcggcctcccaaagtgttgggattacaggcgtgagccaccgcacccagaagttttttaaaaaactatgatttgtagtactttatctgtacccttgatcctgtagagacttctgttttctctgtttgatctttgcctgtcatcattgatcactttcaaatatttttattctccttattctaaacattaaaaattacccctttttcactcattattcaggaatcatctgttgactttactgtagttactcataatttcttttttttccctctctatttctttctttctttttttttttaattagactttaagttctggggtacatgtgcaaaacatacaggtttgttacataggtatacacgtgccatggtggtttgctgcactcatcaacccatcacctacattaggtatttctcctaatgttctctctcccctagccccctatcccctgacaggccccagtgtgtgatgttcccctccctatgtccatgtgttctcattgtttgtctcccacttatgagtgagaactcataatttctagtaattaataatgatatttctttaatttctaattttccttaattgtcatttcatttctgagttttgttgtt

SEQ ID NO: 40842 - DNA, 1034 bp, Homo sapiens
aaaagtggtgccacttaacatagcatgcttactgtgtggcaggagatgtgctaaatgttttatgtgcattatctcatttaatcttccctataaactttcctttatagaagaagaaattgaagttttcattttacataagttaaagttacagttaaagggtacgaactaggccaggtgtggtggctcatgcctgtaatcccagcagtttgggaggctgaggcaggcagatcacttgaggctaggagttcgagaccagcctagccaacatgttaaaaccccgtctctacaaaaatacaaaaattagccaggcgtggtggcatgtgcctataattccaactactggggaggctgaagcacgagaattgtttgaacctgggaggcagaggttagggtgagcccagatcatgccactgcactccagcctgtgtgacagaccaagaatctgtctcattaaaaaaaagaaaaagaatatgagttaaatatatatctgactttggagcctgggctcttaacactatgatatattgaaagaatattaaggggaaatttttttcagatttttctagtatctgtaatatcttgtattacatattgcatatattaattaatcatttcacatataccattcagtcttcacaagaaacccgtgatgtacggaaaggcagtattgtcaagatgagactacagagacccgagttaaatattaataacttgcttgggttacacgtgatagtagatcccaggcttccaaacacccagttcagctttccattataggagacacttcctgtggattcattcagtttgctagaggaaaaagttgtccttgttctctagggtttcccatctcccccaagtttaattcaactttatttcacttatttagttaataatccaggactgttgctggagtagcaaaaatttgattagaatcatcaccttcagtgtttcaggtaatggagtggagtaaaaatggcttagaaagcagagcctgttcattctgctcccaggctggcctcctggaaggtttaaag

SEQ ID NO: 40843 - DNA, 1050 bp, Homo sapiens
tactctgtgatatcagttttatgtaacatattttgatctttttaacatagtcaaatggatgttgtaacacttgcttgatttaacattatattttggtctttattatagaaattttaaggaatttcacataatcactattttcttatagaagaatatagggacaagcagaatggtgattttcttaaaggccttatttcttaaagagaataaaatttagtttatgtataaagaaaatgattttattctcagacactttcctccctgtgtgtatcccctcaaattatcacatttaaataattctcagtggtcctaattgatttctgaataaaatatattctggccatttttctttctcccaggatttattatgagccatgacaataaagtttaggtctatttacaaatcagagaaccttcatatttttgagaactggaactttgaactagattagttgagtatatcatgttggtttttttggtgacacgcagtatagagaaaattaaaaatgaatttccatcacacctatctttgaaaactgaatttagcttaaattgaaaggggtgaaaagttggcattttattacatcatttcacttatcttataaatcttagagtgaagacaatgtttatgacattattttaagtctgaaattaaatttaagtgaagcctttctgagacttatttattttaaacacttgttattgcattttggattaaaaaattacatacacaaatttgttttcctgaatatataatgtgtttgatctctccataaatatgtatgttaatatagcactaaaatctaaatctttccacattattgtacacgtaggtatgcaataaatatttcttgattggttgactaatatccaagcatatttaggcatactattacatgtttaggtctttctgatgagattccagttcttgaatctggttgttgctaccacactgacctttttaaggtgcaaatcacattatccctcatgtagaaccctttaaaggcattacaacaccttcaaaaataaaataaaataaaatgaaaaaag

SEQ ID NO: 40844 - DNA, 1048 bp, Homo sapiens
gcactgagcttggaatataaaataaataaagacaacatggaatttaaatttggatgggtaaaatagaaaatgaagtttagaggcttgatagattgacagatcaagaggggtaaaacagaaactattgctatataagctcaggatgaaatactaagtagagacctcagcctatacataaaaagagatggaaaaactaagaaaatgcatgtttgttttgcaatttaaatttttattttcagatcttagaggacaactatatcattaaatgttaagcttgctaaagcagtattttttaggtgtctttaaagtaacttactacaacttcctatatttttgcagcatcttctaatgtacatgaaagttcagtgaatgtacatgaaagttcagggaccacatgcttaaatactggagttgaacggagaactaagcttgttttgaaataatttttgttgtccctgcttccaaatttgttgtggtagtggttatatgagtcttttatttattaggagattaggaaactgctttcataaatggacattatacaagcatcttcaagaaacatgtttcgcttctccagctccaattagaaaagcggtaatctccatcccagccttctggatggctggcctctcttcctaactttcttacccgaatacctctttataggaggcttactacatgccatttgctatgctagatattgtgggtagcaatgataaaggccatcttctctattttatttttgggcatcctcagggttaatgccgtcatcttttccttcaacaactgcagtggtctccttaacattgtctctgcttctggatcttggtctcccacaaaccacttctcacagtcatcaaaacaaacttcttcagatcataattcagattatgtcactcctctgctataagcctgttctgttacatttagaatgaaatccaatcttttaaaaaatagaataaaaaaaaatatattttaggaagccatgtcatcagaagtgtaatccagagaataatatactctataggtctaaaaaaagattttctaa

SEQ ID NO: 40845 - DNA, 1029 bp, Homo sapiens
tcttttctttaagaatgttgaatattggcccccactctcttctggcttgtagagtttctgccaagagatccgctgttagtctgatgggcttccctttgtggataacccaacctttctctatggctgcccttaacattttttccttcatttcaactttggtgaatctgacaattatgtgtcttggagttgctcttctcgaggagtatctttgtggcattctctgtgtttcctgaatctgaatgttggcctgccttgctaggttggaattgagtagtctgagtgggcttcattgagttgatttttgagcaaagatgtgaagaagacgagggtatattctgaataggtatctactagaagagccagggtaaaggccctgtggtggaagcatgcctgtccatgggttgcaaggagtcactgtggctagatggcagtgagcaagaaggggagaggagaaagaggagaaggaggttaagacagggagggaattgagtcaggtcactttagaaacttgttttgcttcgaaggacttgcccttgactcagaggccatggagagtcattggaagcttttgagtagagaaacttgctaggaacttgatttcagtgatgttaatcgttttttatgttctttagagcacactctgtaaggatgtaagtctaaacttttcttttttagccttttcaacagtaagctatacataaaagttacagtgtagcctactggccatgaatagaagtgctatgtgactttatggtgtcctgaagtttaaggtatattagctctgcatatgtcctgtttccagaatcttaaaaatttaattttggagaatcaagctttgtttaaaataatcaccttaatatgtagatgtggaaaactaacttgcttaagtttattgaaccggatttaccagagctagaattagggtttaggtctcctgactataaatgagaatgagaagcaagaaccaaaaagtatcaactgtgatcagatttgtattcggcactttacttattttgtaccaagctaggc

SEQ ID NO: 40846 - DNA, 1109 bp, Homo sapiens
agcgttaaaaaaatcatttcctttctacagattctccctgaattctactttttcacttctaatttatttttatcaccatttcctggtattcttttgccatgcttttgaagtccattcctttgttatgctataggcaactgctagcagacctatttctgaaaaactctatttgacaatttaaaataaaagtcttatagtcagaacttggaaacagaacgagaagttggggctagagctaggggaatcactaagttgatgtgagagaaaaagcagtaactggaaaggaccaaaataatggacacatataggtcaactaggcaaatgtcatttcatgcagttgtgtgcctcggaggtcctaatctctaaccagtttttcttgtactaaaatgccattgaatttatagcttaagcagagtaattaaaaagctgagaaattggtgatgaagaatgaaatctggaatggcttctctctctctctctttttttttttttttgagacaaggtcttactctgtcaccagggctggggtgcagtggcacgatctcggatcactgcagcctcgacctcccaggtttaagcaatcttcctgcctccccttcccccagtagctggaactacaggtgtgcatcatggtgcctggctgcatttggccttgctttcttgagattattgcatttatttgtttttcagaaaagataaagatggtgattggttgggtgagttagtagttagggttctttcagtatcttagagttgactccacaaccacagttggaaggaaggaggctctttaaccaaagtatgaactactgttgaaatatgctgatgaagtgtgagaatgacagcagcagattgtaatggattttgaagtgttccaggttttaatagtaactaatagtagaactatagttcaaatctgtaatgacaacattgaaactgtagtcaaaatactaaatctagattgcattaaacctttttatgagaatacgtaaaattatcatatgctaacaagctatcaatctgagttagaaatgcttggcaataaaagtgttgtttcatttgattgatattgaagtagccgtttgttttatactaacttcacattatgg

SEQ ID NO: 40847 - DNA, 1046 bp, Homo sapiens
cttattccaccttaaatatgttcagaacatttacattagcctacagttgggcaaagtcatctgacacaaggcctatttataataaagtgttgaatatctcatgcaatgtattgaatactgtattgaaagtgaaaaacaggatggctgtatgggtactctaaggacagttaatactgaatgtatatgacctttgcaccattgttaagtagaaaaattgcaagtcaatccatcataggttggggaccccatcggtactttagtcaggataggtcattgaaattcattctgagtattcatttgtttgtaggttagttaacttgttgatgtaatttgtacttgctgttagtttgtctggaatgactatttaccacagatcttcacattgacatatttcttccagtcatcctagttcctcctcagggaggtatcccctctagcactctgtatgacgttcctagatctaactgccattgcttgtggaacgtagactccatgaacatctcgttgtctttactgatctcagtatgcttagaacagtgtctacatttaatatatatttactgaacagttgaaagaatagataacgataggctttagaccttagtagtctactaatgatgtgcatctttagattgctataattgctttctcctaagctggagtacgatgcttagcgatggaagtcctactataattctgagcagctaattcttcagttgaagaatggactcggtcttatcgctgagtgagtaactccattgaattcttaggaagcagatttgtcatttcacagtgtccacagattctcatatgatttctcatttcactgtacatggaaaggatgatgccaaactttttttttcttttttttcgagacggagtctctctctgtcaccaggctggagtgcagtggcgtgatctcggctcactgcaatctccgcctcccgggttcaagtgattcccctgcctcagcctcccaagtagctgggaccacaggcacccaccaccatgcccggctaattttttgtgttttttagtagagacga

SEQ ID NO: 40848 - DNA, 1030 bp, Homo sapiens
gcatctgaggtgcacaacagctctttgattcaatccccaaatcaaaagaggtaagatgaaggcagatgaagagagctagaagtagttagttggacagaagtagagagatgaatgctgactggctcttctccatttcctgcctgtggcaagcagccagctgtttccttaattcaaaattctgtgtgccctggcagtgatagagtagattcttcttacagaattccctgctggcgattgccatttcaaagaagaaacttacagtagaattattatggtttagagtgttactgtgtgtataagagtaggtagaatgaagagccaagggttggcatccattcaaaagtggcacgcagaattttcatttattcctttactccttagcagaggtagagatgtcagtggaggtcacctacaggcaagactctctttgagaaacgtctgtgatgttaggtggtttgactgagcgaatcagccccaatgtatgcacagccgacccttgaacaacacgggcttgaactgcgtggggccgtttatatacccggatattttttcatccaaatggtgattgaaattacagtatcccgggatgggaaacccgtatatggggagaagcaacttttcggatgttcaggttcttcagggctgactgtgggactttagtatgcacggatttgggtataagctgggatcttgaaactgatctctcccgcctatgcgagggatgactgtgtcctgttaaccctgcccttctgggaatcgcgacagcttctggccgaaggtgggagctgtttcaattccacatattcacactcctcatagcccatttgctatgctatacctcggtacaccccctcatcagccctgcctatactgctattttgggtctgccttcattatttctctgcctgctactcatttagttttgtctcattctattctttctagcaagaacatctttattctacactctcctcctgccttgggtcagcttaattaccgcctaaataatcgctaaggctttggagtcgac

SEQ ID NO: 40849 - DNA, 1037 bp, Homo sapiens
gcatagcaaactgaaatcattacattcctgtacaaatatgtattttcttcctccaaccttccctgctggctttgactcagttagtgattaatatcagaaacctgggagtcataattccttctctgtctctgcctcaccttcaagtattaagctgtatttagtttaataacagatctttctactttattgcatttcaccccaacctcaccgttttagtctctgccacttggatgactatacttgctccctaatctagtgttccctcaaatccaggctccagacaacttgtacctttggattataatatgataattttacttttcttttcccactttgttcctcctcctctttcccctttcctctcttctttcctcctctatttttctagtctccgcatcccttattccctcctacttttcttcttctcaattcacttcctcacccctcttccctcatctccttcttacgtctccctcctccaggtacctggcagatagaatcataaagacttgtgtgtttcagtaatctgtgatgtggtgcttattactgatttagactgagcatatttaaagacggtgtactgataaccatgtgaaattccaagaaaattctgtttttcagaatgacctcagtgttcctgtctgctaccattttaaataattaatcttattgtttttggttttttttttgtgaagtgtactatgttatcatgttattttaacttgatttgtcagctttattttaagatggtaaccaattactaaagttctgaactttacagttctgatgaaagtacacatatgtttgcgcttcaccaatgctatacaaattcaaattccttttacaataaatcttagtttttcttctcaattagtcattaagtttcctgattattctttaactgatactgtattaatgtactggctatgttaattagagccatgaagatgcaggggtccatcggtgaatgaattagactttttcccttaaccctttatatgcctctatcctcagttgttctgctcaggatatagtag

SEQ ID NO: 40850 - DNA, 1041 bp, Homo sapiens
caaaatatttgataattaaaaccttataaagagaatgtaatgcatccctaaaagcccatttggaagggaagacacagtcaacaaccagcaacttattaactggggaaaaagtaccaaatgcacttgtgtatattttaagtgaaaagaagagaggactcggatgaccatgcttagttaagggggagggtgaccttttatatgcaagttgggaaatacagagaaagtgaaaggggaccaaaatgaaaacacatgaaataagataagcagagatgaaaggtggcactagaactgtaagaagcatttgaacaggcagaacagtgctggagactttaggagagggctcaagctgccatgtggccggtcctcaaatagttctagaatgactagcatatctttttacaaaactataagcaacttgagggcaaaaataaagtatatttatcttgcatcctgaagaataaacatggtgcttggcatttggtaggttttctttatgtgtatatatgaaaagcatattttcattttattagaagattgtggtaaaaattctattgaaaaccatgctataatgtagatagctagacttagttcggtggtttccaaactttttggttcaagtacccatttatgctcctaaaattgttactgacagtctaaaataacttaggtttatgtggattatgtctatcaatatttaccatataagaaattaaaactgagagattagaaaaccaataattaaaaacccattacatgttagcataaaacgtatttttgcaggaaataaaacccctacatttccaaaataaacaacaaacaaaaaaaatttaccgaggctttttttttaacatattttgcaaatcttcagtttctagcttattagaagactaaatttttgtacctcttctgcattcaatctcatattttgttttgtttgaatgtattaaaaaaactcaccccacacaaatatgtggttggaaaaaggaggtgtgttttatagacttttcaaataattgtgtatatccttcttttatactatgc

SEQ ID NO: 40851 - DNA, 1052 bp, Homo sapiens
taggaaagcagggaggaggaagtgaggaatgactgctagtaggcactaggtttcttttaggagagagaaaggtaaaatcagagagtggtgattgttgcacaactctgactacgttaaaagcctctgaattgtacgttttaaaagggtgaattttgtggtatgtgaattatatcttaacagcagttaaaacaaatttaccttatcctttattaaaatcaactttgctagaatttaagtgtgtgtttttgttaacgtcaattgtggccaggtgctttcatcttaaaaaatgaaaaaaaaacaggtcaatgtgtgctggaacttttgtaagcagttaattcctttttaaaattggtgtgtgtgcaaaatttattttaatgcagtttttcccccaaggggacttgttaggcaaatgtatttaagtgtccttttaatgcattttatagcttcagtttattcctttataccacagtgatgttccaacatctgatgaattctggcttttcattaggacatctggatttcacacacacacacacacacacacacacggaataacaaaagataaaacatttttcacaaggtggttatacatatctatactacaaatgtataaatatgttttttcctaacaaatcttgacaatacagaggttgatgtgctgaagagaaacacttcgattaaattggtccattataagaaatgaaaaaagatgaatgtaaaggagtattttaaaaaataatttctttccagcttcatttttttcttttactattcttccttaaagatgactgtaaactggaatatcttaggttaatattatttttatatttacacctctaagtgttcattattttatatctgtccttcattttgacatggctaattttaaccttcaaaataaatatataaataaaccaatgtaaaactaatatcaactttgatcagcttgaccttaactaagcaaatagtggagaaatgaaagtttcttacagaagtttaatgtcttaaaatggggagaagcattttgctttcatctgctccatcagctacac

SEQ ID NO: 40852 - DNA, 1244 bp, Homo sapiens
tggcctaatccaaaatataatcataaaaatatatattttacattttatgtatcagtgtggcataaccttataattcagtatatatcctgaagactttgagttatgcacattgtcatacttagacatagttctcaacctttagaggatcagacagttatctggacagaggagcattgatgccactgttctccagcattcccttagcctcatcttgctaaaagcagaagaggatattgggatgcaaataaagtagaggaagggctctttgccaagtgctgtttattgaactgagtaaacgtctcccccatgggttggagggagctggttcgtttaagtgggcaagaaaagccagtattcttccaagtaatgaggtttcttaaataaatattccaaatgtagattctctgggctgcatcaacaaggggcaagcctgaaaagtcccctcagtatccaggagcccaggttgagaagggttctgttttgaaactggaaactgtccgtagtttggatgggagaatgcttggaatggaagctaggctgtgatttgtctttttaacattcttgacagaaaaagggtgttaaggaagcaggatgactacagtttcaggggatttatttacagctcctaagaaaattaattgtttttttgcttttgtttttgtttttttttacaactcagacaaacattatgctaatagaaaagtatctaaatctactcatgagaaaaattctttaaggatgcatattagtcaacctgttcttaaaactacttattgttaaaaatacttcgtaatatacacaacatattcttttaaaatgttctacagttcagattttaaagtgattcgtagtcatctcaccccacctccagttaatgagattttactgtttatttgttagctacatctaatagaaaggaaaaaaaaaaacaacctttttgataggtgataattacttaaaaatttggatccaaattaagagaacagagctcatcaaaatatggatgtattaacactggaatgtataataatgggaaagaaggtataagaatgacagagtgagaaattttaaaagaggggaaataggatgaattcaatcaaaacaaggaagccaaggtgtttaaatgggtgaccctctcactttgatgtttatctgattgaaatttgacattttctatttactcatttcaaaccaagataaaaatctcaagtatttaaagcaacctattttctgtctagtttgtg

SEQ ID NO: 40853 - DNA, 1061 bp, Homo sapiens
gattgcttgagcccaggaggcggaggttgtagtgagctgagattatgccactgcacttagcccgggcaacagagtatagatttcataataaagattcctcagactgtgcaaaacaaaatgtagatttttaactcttctcagttagtactctttctccttgaggaaaccaagtgggagaagacatagagacaaataatattcagaattaataaaggtgtagcactaagtcgattgtttcctgtacttaaatggttatataataggaaaaagacatatgttcatataaactctcagggatttatttttaaagagcaatctcttctgtgtgacctgtgatcagtagacgttaaactcaatctcttacctttatgcctataatactttaacaattaattgatattcagagtgatggctgaattagctaagcataatcaaaaatgtaattatgctgggtaaattgtaattcataaggctggaaagcttaccagtagtggccacagtgattgaaatgagactcccccccccaaattttcagttaatcacatgattgtattaactaggatgacccatttttagagcatctgtttctgacaacttctaatttgtattactctctatttcaacattctgtttattcagcagggcctgataaagatttttagttcatgtctcactatatttagccactccttcactgcagcctgatgacataatgacaacaatacatgagcatcaggattttacctgcctctgcatcagaaactgaagccattggtgtatgtttctctgggccatttacatgtcttgcctgagtatttcagaggtaaacattgtatcccttttgagtgttttgagtccaccaacctatagggacataactttaaaaattattttcaataactaacattttagtgtttactggtcctagcattgagctaagtatcagctcattattttcaaattgtatgtaaccacccatttggtgggtaccgaattcaattcagtaggtagcaaccagcttaaggaagaaaaccagaccaaccatgaaatagaatataaca

SEQ ID NO: 40854 - DNA, 1073 bp, Homo sapiens
acattttctagttctgtcaatgtaaaaatttccctctgtgtattcttctcagtctttacactttgatcatatgtatctggtctgtgttccttcttcaaatggtgtttctttttgcctaaaaaggttgtaattgcttttgaacatgacttgtttttttaatcaaaactcatgctgtttgtcatagtactgaaaaaaaaaagtacaagacatcaattcatgataggtcttaaaacagtatttgataacaaagtaagtgaataatacattaatcaggctattttttatttcaattgaagcaaaaagcaaacttgcatatccatgaactaatcttttaatgtcacagaacatttatttgttgctgtttctgaagtctttaagttcccttttataaatggggatagacaatttcagaaccacattgcttgatattttgagataagtgagataagttacatacaactatgccttggaaaactgaaaaaatgttatgatgtttgatatcagtgtgaactctgaatagtttgtaaacttcacactccacattagtgcaaatgtgttttgtgaaaatactcctaaagaaacgtagtttcacataaaaggtttttaaagtttcatgaagattctgttgtgggaagtatgtttattttccttttgtattcttgtgggaattcttttgatctgtatttaatattttaataatgaaaactaagtgtatgtaattttaaaacttagtttcgtgaggttttttttagattgttgaggttctgggaaaacactgggcctgggatctaaggatcacattgatcctctcgtggaacattgccatttccccacttaactctggttgaaatttttggcattctccttcgtgtgttgataatccataaaaattacaagtggcttattttgtcacttacagttgttttaggatcaaattaagttgtcctaaatggaataatccgtgtttccacttgatatgattattgagctctgataatgaaaatgatgaacagggcagtgctggctgaatcctccaacaggtgtcattctaggaattgttttaataaggggaa

SEQ ID NO: 40855 - DNA, 1015 bp, Homo sapiens
ttggagacagtgtctgcctctgtcacccaggctgaagtgcagtggcgcaatctcagctcactgcaacctccacctcctgagctcaagccatcctcccacctcagccccctgagtagctgggactacaggtgcaagccaccatgcctagctaatttttgtattttttgtagagatggggtttcattatgttgcccaggctggcctcaaactcctgatctcaaccaatctgcccacctcggcctcccaaagtagaataagtattttgaagtccaagacttaagagttaaataattaagcttaagtttaaaattgcataccaatctacctgctgtattaaactgacacaacatctattttaacaggggaacgctgccttgatgatgacacttacatgaaggatttatatcagcttaacccaaatgctgagtgggttataaagtcaaagccattgtagaagacttaacaagctgcagataaccatgtggacttctgtcataattcttgctgagtcaagagtgtaaataaaagaaatggcaggactcatattattcagttgtacccaagtatttaaaaatgactctcttaagccttaaaaagtcatagatttgtgctgctgccagaattatattaattattattaatgttattattagaaaaaaaatttctggagtgagagtaaagaggcttaattagtttgtgggcagttttcatatgctctgtgaaatgtgtccagatgtgacatagtttttttttttaatatgtggaaatgtcttctcttcccattcttttctcctaaaatcatatatactgtaatatatgctctctcacctctattacctcctcacatctaccctttcccagttaggtttgctttttgaccaaaaagataacaaataccaggtatggcaagttgtgaagacagcacattaaaacatacctaatttcacagtattcctgtcacgacagaatgttagtattcatctctttgaatcatttgctcaaataataacattcc

SEQ ID NO: 40856 - DNA, 1046 bp, Homo sapiens
cctggccaacatggtgaaaccccatctctactaaaaatataaaaaattagctgggtatggtggcaggctcctgttatgccagctactcaggaggctgaggcaggagaatcgcttgaacccaggaggtggaggttgcagtgagccgagatcacaccatagcactccagcctgggcaacaagagtgaaaccctgtgtcaaaaaaaaaaaaaaagagtagctgctgtagaaattttggggacaggtatatagggaagatgacttgggacgtatttagtttaggttagtaaaatgtttacgtggtttgcagttatttctttatatagttaagcagtagttagctgtcgtggtgtaggaatggcttccagaaatactcctaccacccaccgtgccaactctcatgcagtcgcgactcaaaggtgcgaggacaaaaggtcatatcaccatataaacatgtcctgtgcacttgacttcagaagattgtgagaagtacaggagaaataaggtttgaaatgaatggacccaatagttgctctggaaattgtttttgtaaatgtaaaatgataagcagtagatttgattctcattgatgtccagtgaaaatgaaagctgtccgctgcagtgaatacaattataaacacagtatgtactttcgtgtgagtcatgtataatgcaattggtcagagcgcctgtgtttgaggacaagaactgtagcagtagtactactacgatgagtgtacctttgtgtggtgttgcatgttttatgtgtccaaactattggattgcacgttagcatgtacaatggaccttgtcctcacaaaatatggtggttctggacaaaataacaagaagaatttctacctagtagtgcaggggcctgaagaaaaaaatgttccagcaacaaagctatatgtatttatgaaagttgaatgtatgcaatataaaagtaatttaataacataattacatagttctatacaacataatggaaagttaaaaataaatgtaattcctcttatgaatgccttcattccaaattaattttgtat

SEQ ID NO: 40857 - DNA, 1069 bp, Homo sapiens
cagatcatgaggtcaggagatcgagaccatcctggctaacacgatgaaaccccgtctctactaaaaatagaaaaaaaattagccgggcgcagtggcaggcgcctgtagtcgcagctattcgggaggctgaggcaggagaatggtgtgaacccgggaggcggagcttgcagtgagccgagatcgcgccactgcactccagcctgggcgacagagcgagactccgtctcaaaaaaataaaaataaaaataaaaataaaatttggcagtaagatgtgatgttttctcataatccttattattgccataataaattaacattttacagtatttaattttgcatgctgatattatggaatgaaaggagttttaacaaactgattttgaatgtgtttcaagatgactgtagcagtttttgcttttcccaatctttctgtgaattagagtgtatttcatatgtgttgccttcccttgggcatcatctacattttctcttgaacagttgccctgctttattgtaggcagatctttgtagatcagatactcaaagtatttgatcatttgtctgtagctacgtttggctcccatcagagcttgtccttgtctttgacttttcccagtgtggactgcacaaaccaacatgtagtaaatggcttggatcattccaatctccttccctctgaagacacacacaaacacaatgtagaactgcacccctgtgcctcctctccctttcctattcccattccagtcaacacgttgaaaagcttctctgcccttccctggaaccagatacctgctcccactcctgctccacgctagccctccagccattcactctcccgccttgacaaacacttctgctactgcccagattggagtctggttccatgttttatttctctattgtcccaacacaggtcactcacaagagtttgttccctggtggaaatttaagcaccctcaaatgtcttccaagtttctgtgcaaaaaattttctgtatgaaaatgatgtcttttttttttttttggtagctttacctttttttaaacgaaacgaggcttagggtttc

SEQ ID NO: 40858 - DNA, 1022 bp, Homo sapiens
attagaaaagtttcttttttttctttcttcttttttttttttttgagatgcactcttgcacattcgcccgggctggagtgcaatggcatgatcttggctcactgcaacctccatctcctgggttcaagcaactttcctgtttagctgggattacaggtgcctgctaccaagtctggctaatttttttgtgtttttagttgagacggggtttcactatgttgaccagactggtcttgactcctgaccacgtgatttgcccttcttggtctcccaaagtgctaggattacaggcgtgagccaccacacccggctggtgattagaaaattttctaattggtacttggaaagtttcagacactaggaagtaaatgttaagaaggtgaaatacaatgttgtgttaggaggggattaggaagaccgttttgtcattgtggtcaggaggagatgacatttgagttgaaaccttaatgataaccaggtggacatgtgaaaatgtatccacgtgtaaggacgagccacaacacaggaactgaaagaccaaatgacaggggcttggtgagcaagggggagcacgaaggaaggaaaattcaaagaggttagaccctaggtcatgtcacgatcttaaaggccatgctaacagtttggaattgtacaataagaatgatgggaaagcattggagagtttgaaggtgagtagtggcagaatcccacctgtttctgacagaagtccccctggcactggatgaggaatagattataggggctgtgaatgagaacagagattattaataaggaaacagtgattcccttccacaaagtagattctgttaattggtagagagtattcatcagaacacgtagcagggttgggaaaggaggcaaaataagtagaaataaggagtttatggtctagttgagatgaaatattttcagaacattgcaaatgagaaagataatgtcatgaagctaaaccaagtgacatatttatatactttaaaggttagcctgaaaccaaagccaat

SEQ ID NO: 40859 - DNA, 1578 bp, Homo sapiens
tcctttcaagtggcttaggcaggactgtatctactagaagttctcaaagtgacaagtgggaaaaaaaagtttagtcaaatgaatcaagtttttatccagtactcttgaagttgttctacaagtaaacctattctctcctaaagggttaactctagggcatcaacctgaggtaacacaatctcatccttaatatgtattaactagaacagagatttgtttattgatctggcattaaatcatgtgactcttgatcttgatctgtgcccactttttttgttttttttggttaaaatccatgattgggaatgtggtccactttcagtattctgtttgagaatatgctaattaaagaaattattttaattagaaagaacaagcaaaagtgagagagaaggaaaggagaaaaagaaagcccaatcacccaattatgaatgtaaagtgtaaaatatgttccccgtgtcacgtgagaacatttttttttcccttcttattttacagtagtatgtggcaatgtattcaatggagaactgcagctctcagtaatctgactaatctgtttggttgcttttggcagcttggtaactgatggaaatgtatttttgcttaacttactaaaatgctgtacagtgtaataagtaacattgctttgaaccaatgcaagaaatgtgcctgatctcaagccacagtcatttttccatgccatgcaaagatttttagattttcatgagtttttgcaaatggctatagaagctcatagatgagctactatgcttgtgcatgaatatggaatatctaattttattggttgcatgacctgttccttaaagtgggatgaaagctataatccacaggtggccctatgatttttgaaatataaataaatatttaaaatttggttaaaacaaatactatttatgagagccagtcgaaaaaaattccacaaataccatttatcagggcctgctcccatgaaaatggacctggtagtttttcttgtatatttgtctgtataaggacgatctggcagttgcggaggctagaccccacttttgtgcttggcaagtacatgagaccagtctgtggtttatttattctataaagaggctaaacagaagcagcctctggaagcagtaatttttattccttaagaattaaaagccatcactggaatttcctgaaaacaaacaaacaaacaaaaaaccttggcttttccagctgggggttgatcctggtctggctttttcttccagccagtgtgcttctgagtctctaccttcctctattttgtacttgatttcctatattcacagaatgcaattttaggagtagtcctaatcagaaaggtaaatttgctggaacaaagtcatagtctgagtttcaaatccaggtactggaaggaagtgttattagccattttgatgatcagttccatgtcatctttctgataatgtaaataattattcctttaaaaatcctaaatagagaagaaatcagaaccctttaaaatgtaaatcattgaagaagtacgcattgactttattttcaaattttgatgaattcatgaacttactcatagat

SEQ ID NO: 40860 - DNA, 1061 bp, Homo sapiens
cagttccatgatctgagtttatccttccaatacctgtggtttgagaccctggtgtagctcagtgcattaaaattcagaatactttcagaatttggtaaacgtttaaaaattagtttattttatatggtgggtattttcagagctcaagcaatgtctctgttcctgttcactatttatatgctgcctgtttatctcctgtaagggggaaattttccataaagtttatgattcatatgtcctaaaataatccaaaattgtcactctttactagctccgattggtgtcatggaccaaagtcttatgaaggattttcctggcgctgctggggagatttcagcctatggacctggacttgtcagcattgccgtggtacaagatggggacggcaggagggaagtgagaagcccaactaaagccccacatttgcagctcattgaaggaaaggtatggtaaattagcacagtatgtggttttaaacatttacttaacctagagggtatctgttgtattttctgtttcagaaatcaagtatttaaaattagttgttctatgttctctgctggtcatttatgttttcaaatatgcatagtggtctctaacctttgattgttgttcaaagcagaatatttcaatgtaagttattttaatgcaagtaagtaatttactggcctttttgactgtcctcataatcaccttatctaattgaatcctcaaagtagaaaagctatgatgatttgaaatttatttttggtttggtccaagtaaaatttaaaatgtagcttcttgattattttaattattgacttgaatttttttacatcaccaaagataatctttatgaacaaatgtattcattaatgatctataattaatgaaattctcaagaaaaggtaattgttttgtgaatagagagtgagaacatggtgtgttgcttttggctttatcttgtgcgtacaccatggtgaaatggagaagtaacccatattgtgttctcaaatgtgtcactgttatcttttgttaccttgggcagtaacatcacttgaatattgatttgagaagcc

SEQ ID NO: 40861 - DNA, 1878 bp, Homo sapiens
gtcattgttagtgttaaagcttttttaatgtctattgagagtgcttatataaactttactatggaaaatgttgttaaaaatacgtggaatcaggcaacatgttattcaatatggaattccaagtccatatagttcttgtattcatgtctaaatgaaaccatcgttaagggttttggactctctttaaagggaaaaatattgtcttgaatttttgatgttaatagtttggcatttggcccaaaatgacattataacgtcattttgctgcaagctatattgaaaaaggagcttgttagaaatgtagttgatattcacggctaactttatgaaaattagttgaagcagtcatctaatagaccattttgttccagaaactagaactaaaaactcaaatattaaactgtttgcatatataaactattctttaataaagttctacattcaatctagttaaactttataatcccacattctcccagatgtgtagtgaatgtttcactgtgatacagtgcctgtaacttttctcctaacaccagcattatggtagagttctcttaaacccaatttaggcaaaggtatattaaaggggatctgtttcagcactataaattcctgtgagaaaatgcagattctagacaaaactacttttaacatttagtcatacactgtgaattgggttgaatttgttaatttctcttacctggccaaattagagatcacctaaagcaagtgaggaaggcatggcgaggcatttgagaaacttcgaactctggggtcttagggtctaacttaaaggagaattaaatgaatgagatagatttttttggggggaaaggaactgttaaagaaaaacttattctaacacttgttaaaatggtaaggcagactttattcaggactgttgtaataggtataaggacctttgcagtggggttttgcagtaggcaagagagattgggctcagctccagatacgacaaggagaagtggaaatttatagtcaaggagcagggtgggggttagtagatgggaaactaataagaggaaacatcaggggtgcacttaggggaattctggttaaaccaagctaacaggattcttgttgaaggcaggtgagggtgatctgatatcacttgggggatggtggaggatgaggaaccccatcagatatcaagggtaattagttatcaaggatgggggtttcccactaaaccaacttattaacaggattcttgctaaagttggatggtgtgtagatggacacagaagtctaaaacctgaagcctaattgggaagaggattcagaggagcctgactaaagtttggtcaagaaaagactctttgtcttaactagaagatggattttatgactgtattttgggttgttatccaggtcaagcatggttaggaccctgctgtggacaactgcacacccagactactaatgccagttgatgactgtggttgcatatctcttctcaggtgaaagtggttagcaagtagaataaaaagacctggaattctttggtacagctgcttattgtgatggggaggagttcaaaggaacacttagatatgggaatgtggaaactgtgccctgccagggctttctgcaggaagctgtcaaaaattagaaggtttactcagtgaaggctgacaagccagtaggacttgaaaaatgtctctctatattgagctttcaggaaaagaaagaaatttctacataaaaagaactctagggctatcctactcaaagagtggtccaaggaccagcagcgttggctccacgcagaagcttcttagaaatgaagaactctagcgctcaccctagacctgctgaaatagactttattttggctagatgttcaggtgattcata

SEQ ID NO: 40862 - DNA, 1086 bp, Homo sapiens
ttgtaaagtagagggacaattcagtatgttgtacaatatgtagaataacatgttctcttagtaggcataggatatactacattaagaaatctgggctaagcgtggtggttcatgcctgtaatcccagcactttgggaggccgaggcgggcggatcacttgaggtcaggagttcaagaccagcctggccaacatggtgaaaccccgtctttactaaaaatacaaaaattagccgggcatggtggtgggcacctgtaatctcagctactcgggaggctgaggcaggagaatcacttgaacccaggaggcaaaggttgcagtgagccaagatcacgccactgcactccagcctggatgacagagtgagactctgtctcaaaaaaaaaaaaaaaagaaaagaaatctgatatttttgaaatactagttttgcataagaaaaggtagtatttagtagtatttatttagatagtaggatatactgtttttttattttgacaactctcaatttatgtcaattcagctttcactgaatctcagactcatattcttaattgcctactggatgtaggagttggcaattccctctgtctgtcatctacacatttagtacacaccttgtttgttactctttctccccattattctatgaattcctcgagggtagaggccatgacttacttatctgtatagcctccgtatatgtagacattaactgctatttattacgtgtgtgttatatcacacctataaggatctccactctcatgaaaatagaaaatagcaagtgttggcaaggatgtggagagactggagatgctgtgtactatgggtaggaaggtaaactgatacaaccactctggaaaacagtgtggaagttccacagaaaattaaaaatagaactagtggccgggcatggtggctcacacctgtaatcccagcactttgggaggctgaggcgggcagatcatgaggtcaggagctcgagatcagcctggccaacatggtgaaaccccgtctctactattaaaaatacaaaaattagtcgggcatggtggcatgcgcctgtagtcccagctacttgggatgct

SEQ ID NO: 40863 - DNA, 1031 bp, Homo sapiens
agtttttattttaaggtcttttggctggtactcattttgctaggtattagatgaagattctatgatgaggtgaagatgctgggattaggggtcattccctgcattcttactgagtttctttttaaaaaaatactttttataatggaggtgtatgcaaacatagagtagaataatgaatccccacgtacccgccttccaactaattactcccatatggccagttttcatctgtggaccttccaaacccatgttccccattccatgctggattgtcttaaagcacagtttatcacttcattcactctttttaaaataggtctgtgatgagtaagcattaaacaaaatgaaaaccacaatactgttgttacatctaaaaaacttactttcttaaattatcaaatattcaatgtgtgttcatatttatccagttgtttcataaatgcttctatagttaaagttagaatccagataagatctatattatgtttggtttatatgtctcttgaacacagtatcttaatatgtactttgtttctcttctttttctttcagtttatttgttgaaactgtgttgttttttctatattcaattgatttgttgaaactctattgtttgctctatagagtttcccacattctggaatttgttgattgcatccctgcctgtggtgctgtttagtatgtttctcccttctgaatttcctataaattggtagtagatctggggcttactcagattcaagattaattgggagttaggagtatagaatccttcctagttatcagtgtatatttcttactgcttcctatcaagtgatacaatataggattagttttctttttggcatgaagattgatcagtgagctcaggtgtttctagctggactgatccatccatcagtctgatgggaaaagcttgatttcccattaagcttttttgcctaatggtttttaacagccatcggtgattattgcctagatacattatttccttacattaactttttcccatatgttttttcctgaagtaa

SEQ ID NO: 40864 - DNA, 1039 bp, Homo sapiens
ctgaaggcagtcatgcccaaagcacagtgtttcttgtgattaggtacatctgaagcctgttagtaacaatatgaacctgtgatcaattaagcagctgaccaatccttacctccttctccctgctcttgttacccaataaatatgaagggctgtggaagctcaggggctgcctttgctcactagaagcagggagctcttttcttcttcccctggcccttcctttaaaacagttccttttgtttttttgttatttccatgtttgtcccttccttcagtctcgtaatgacggtctcaagtagtaacagtagtaactgttgtagtgaaggtctcaagtagtaactgtggcaatgtgccacaagtggcgcccgaacagggactatcagtgacaaacagagacctgaagagacctgaagggacctgaggaggcctacagggacacatagagataagtagggataaatagagatagagacagatagggaaagatagggacttgcaccaacttggaggaactaacagggaccgtagagacagacagggacagacagggatagataaagactagcaaatactagcagagactagcaaagactagcagagaccagcagaagctagcagaaacttgcagggacagacagggacagatagagacagggtcctatagggacttgaatgaggaagttctgctggaacagaaaaaactaaaaccaaccagacaaatgagaaaccccgttacaagtctgcttgacaacataaggagatgaacaaactgtgtgggtgccctcaaggtgtgtgcgaccatggaatggaagactggagagatccatggattctagctacaggccttgttcccctaatacgagccatgagccagttgaatctgaatgcgaagatggaatgaggaccgaccggagtcacactgacatcaaccctcatgacatggggatagatcaagaaaaccacacaggaagctgagacactgttagtgtcagggtcaggcaaagacccctgactccatgtttgtggccatgctggccat

SEQ ID NO: 40865 - DNA, 1052 bp, Homo sapiens
ctatacgctagattgctaaatggattgaatcaagattacatgtatttcaaactttaatatatttgtcagattactttataaaattcacacactagctgtatgtgaatattttctcatcccttcttgagcactggatattttagtcttttaaatttattgcctgttaatggatgaaaactaatatttctgattgctttggcttgctttccttagactactagtgaggcttatgctctttttatgctctcttctgtcagtttgctgttcaaccctttaccgatttctttttaaaacattcttttattgaattgcctagataaaagtgcacaaacagtataaaactcattgaattttcataaggtgaactgactcatgaaaccagaatcaagatcaagaatagagtatcaactcagaagcgtcctttgcgtcccctcccaggtactgtctgtccccagaggtcaccagtttgctgacttaaatcactctttactaattttgcctgttgtgaattttttgtaggtagacagaaacgctagtgctcttctgtgtctggctttttttgccgaacgggatgtgcaagttggccatgttgtttgtagaaaataatgtgttcattttcatctttgaatttcattttctgaacataccagaattttttattcatttttattggttagctatttctgtgaaccaaaccaacccaaagttcaacaactttaaataagctttaaatgaagaagcacatgttatagtttacaagtcagcttggtggttcttctgtttgtagctgggctacaaacaggtatgtaaccagcttgggttgggtatgcagctttctaatagtgcctgggctctctcttcttgttgggagtcagctggttgtaagcaggtctaggaggcctcagctgaacaagtgggctctcctttatagtatcttgttctctagaagtctagactgggcttgttcaaatggtgatggcacagttccaaaagagagagtagaaactgtaaggccacttgaggcttggtttgggattagcacgccattgctc

SEQ ID NO: 40866 - DNA, 1027 bp, Homo sapiens
tctagatgttgatagcacaatgggattaagaggtgtggtaacattaaattatgaatgacttttacttacatgcaaggaagtatgtaggtaaaatactttcttgtttttttgatactttaaatacattatttcactaggttttcacagcctcccacaaagtaagttgaataaccaccactttccatatgaacacactgagacacagcaagcttatgtagcttgctcaacattacacaaattaggtgaagtagagccaagacttgaatgcagatcttctgagcaatactaatggggctttttccatacaattttgctagccttctacttctaaatatctatccaggccttattatttttttcaagatgcataagttacaatgaaaaataatttgcgtggaagaagtctgatagcttatatccagccatgagttctttaagtaaacttgtcagaacctgagctactttttattttttgacagctttgttgaggtataacagatatacaaagaactgcacagttatagtgtgtaccatttgatgagcttggaaatatgcagacacttatagtgacatcaccaaccaaggtaatagacatattcatcacctcccttgtttccttgagtctctttggttttttttttttgttttttattgtggtaagaacatttgacatgagatctacactcaacaaatttggaagtgcaaaatactatattctgctggactacttttgagtcctacggaattaatgcatagacacaggacacaggactgtgtgagcagaccccaccagaatcttccagagacatcagtccagagatcctggaaagtgacttagatctagtcacatatgagtacacagagactgggtgatttcacccttggggattacaaatgctcattaacaatggatgacacatacgaagtttcatttgtgatttaggaagtctttaaagtaagattagagtaagatgattaggctaaagattatggctgcaaaaaggcttcatgttaaatcttggagatg

SEQ ID NO: 40867 - DNA, 1050 bp, Homo sapiens
atcttttattcctttttttctgcaagtttttattatgaattttatgttgaattttgtcaaatgctttttctgccttaatttacataatgccatttttcttctttagcccattcatgtggtagatacattgattgatttttgaatgttgagccattgttacatccctgagataaactccacttggtcgtggtgtatctttgtatatatagcttaattcttttggctaatattttgttaaggatttttgcatctgttttaatgcgacatactggttggtggtatcagggtaatactagcttcaaaatgaactggaaagtattcctttctcttctgttttctaaagcggattgtatagaattggtgtcagcgctttttaaaacatttgatagaactttccaatgaaatcatctgggcctggagattttgggggagggagttctttttattgtaatttccacttttacaatagttatatggctgtttaatttatctatttcatattgagttgtgacagtttgtatttttagatgaattagtccatttcatctaagctctcagatttatatgtagagtttttggttgtattttttgttagacttttgatgtctgatattccaaaactccttcatttatcatttcctttctgtttagagcactcctttagccttattattattattgtagttccattggcaacaaattctctcagttttctttcatctgaaaatgtcttgattttcccttgatatctgaagaatatttacattagacatagacttgtaggtttatagttcttttctttcagcacttgaaaattgttctgccacttccagccaagaggggtggctcacgcctgtaagcccagcactttgggaagccaaggcgggcagatcacttgaggtcaggagtttgagaccagcctggctaacatggcgaaaccccgcctctactaaaaatacaaaaattagccggcatggtggtgcacatctgtaatcccagccatttgggaagctgaggcaggagaatcacttgaacccgtaggcggagatt

SEQ ID NO: 40868 - DNA, 1026 bp, Homo sapiens
tagtatagatgtaccacagtttgtttaactgttcacctgctgagagacattgggccagtttttggctactataaataaagttgctataaacatttgtgtacaagtttttgtgtgaacataatctagttttctgggtcaaatgcccagcagttatatagtagttgggtcatatagtagttgaatgtttagtttttaagaaattgccaaacttataccaagtagctgtactattttatatacccaccagtggtgtatgagtgatctagttgcttcatgtccttttcagcatttggtggtgtctcttttttattttagtcattctgataagtgtatagtgacagctcattgcagttttgatttaccattttcccttcgctaatggcaatgatgttgagcatctttgtttcatatgcttatttgccacctgtatctcttctttagtgacatgtttcttcatgtcttttctaattggattttttttctgttgagttttgagggcttttaaataatgtgtgtgtgtgcctctgtgtgtgtgtgtgtgtatttttttctagatactagtcctttgttggatgtgtgatttgcaaatatttcctcccagtcagtagcatgtcttttcatttctcttttctgggcctttcacagagcagaagtgtttaattttgatgaagtccactctatccatttttctttttatggatcatgcttctggtatcaagaactttgcctctctccttagatcccccaaattttctcttttatgttgttttctaaaagtattatagtttacgttttacttttaagtctatattccattttcagttaattttgtataaaatgtgagacttaggtctgggttcattttttttgttgttgcctatggatattcaattactccaacatgatatttgtcgaaaaggctcttttttgtccattgaattgtttttgcacctctgtcaaaaatcagttgagcaaaaatgagttaatgagaaatcagttgggcacattcgtgtgggtctatatctg

SEQ ID NO: 40869 - DNA, 1030 bp, Homo sapiens
ggcaggagaatctcttgaacctggtaggtagagattgcagtgagccaagattgtgccactgcactccagcctgggtgacagagcaagactccatctcaaaaaaaaaagaaaagaaatatatgtgaagaaaagttgccaatttgtacttactgatatcttcagagaactcatttttaagaaaaactttaataaaaggtaaagaatgtttaagctcgtaagctgttctttatttttattcataggtaacctcagtctcttgtttaagtcagtaacttatttagtggtgtcttctttcttaaggtcagccacacccttagaaaaattaccaatgaaagttgaaaaattgctcccttaattgtagcattagttcaagaatttttttgaaagaatagtgccatatgtattaaagagatttttgaggaacaaaaaaacacagtcaaaaatttgagggcaatatactactactgattttactctagaaatgaaccaaattatttttagttgctgtagaggtactccactaaatctgtaaacatgtttttttgttttgttttgttttttgcgtctgcagcgcaaatccagaaaaaccctgtgcatcatcattcttatccttgtcattggagttgcgattatcagtctcatcatatggggattgaaccactgaagttataaaggagcacactgtcgcactacattgtctaaattatgtaggaagattcctgtaatcatgtttttttaattattattttaaagctattgtataaaggatggttcccatactttgttatttttattgggggggttggggtggttcctttggattaaatctgatattttctaatactgaaagattttctaaatgtcactgctgacataactcccttggtcttcaatttaatagttgttaagtttttgcccacattgcatatgcctttcatttataatttatttaccctgcttgacttagttttgggaattcgtaaatttaaaggtgtgtgtattctgtttgcatctccctgtcactgtgaca

SEQ ID NO: 40870 - DNA, 1028 bp, Homo sapiens
ggcacatagtagctgactcctccctcccaattacgggctataactatcttttgtcaattgatatttatcatctctacaattcttataattatatcatagattattaagtattagcactcaagtatggttcacattagatagtcaagaaatgtaaataagaagctgaacacttaaaaaaaactgagaactccctcataagacagttttaaaatacatggagcaaacactgacaaaactgcaaggaaaatagacaaagccacaattatggctttcggtacccttctctgaataattgataaaacaagtagatacaaaatcaggatacagaagattcaaagtactaatcaccttgatggtgacagccacttatagaacagtctattcaacaacagcagaacacacgtttttctcaagtgcacccagaacatttattaagatagactctattcctgtcattaatcaagagtttcaacaaactttaaaagattcaagtcatacaagataatattccttgactacagtgaaattaaattagaactcagtaacagaaagatccctggaaaatcccctaatgtttgaaaaccaaacacatttcaaataagctatggatcaaagagaaagccaaaaagaggaattggaaaatattctgaactgaacgtaaatgaaagcatcacatatcagaatttgttggatggtattaactcagtacttaagggagcactaaacacctgtattagaaaagaagacaggtctcaaatcatgacgtcagttttcaccctaagaaatttagaaaaaacaaccgaaattgcaaagtcagcagaacaaaggaaatacaaatcatagtggaaatcgaagggagaaaaaaaatcaatgaaaccaaaagctatttctttgagatcaatagaactgataaacatctaaccagactgaacatgaaaaaaatagaagaaacaaattactaatatcaggaatgagagagatgatatattataaattctacatattttatatgtaaaaatctatacata

SEQ ID NO: 40871 - DNA, 1050 bp, Homo sapiens
gggaggctgaggcaggagaatggcgtgaacctgggaggcggagcttgtagtgagctgagatcacaccactgcactctagcctgtgtgacagagcgagactccatctccaaaaaaaaaaaaaaagaaaaaaaaatacaacacccaataacctgttgcttcacacttcacctacaaggacatgcatagaatgaaaatcaagagatgcaaaaaaaaaaaaaaaaaaattccatgcaaatggaaacccaaaaagagcaggagtagctatacttagacacaatagatttcaatataaaaactataaaaagagacaaggtcattatataatgataaagggtttaattcagtaagaagatataacatttgtaaatatatacgcccctaacatcagggcttccagatatttaaaatattattagaactaaagagaaaagtagactcccaatacaataatagctgaagacttcaacatcccactttcagcttggacagatcatcaagacagaaaatcaacaaagaaataatgaacttaatctgcactgtagaccaaatgggcctaatggatatttagagaacatttcatgcaagagctggagaatacacattctactcctcagcacatggattgttctcaagaacaggccatatgttaggtttcaaaacaagtcttcaaaatatttctttaaatgagattatgtcaaatatcttctctgaccacaatggaataaaactagaaattagtaacgaggaattttggaaactatacaaacacatggaaattaagcaatatgctcctgaatgagcagtgggttaatgaagaaattaagaaagtaattaaaaaaattttttgaaaccaatgctaatggaaacacaacattccaaaacctataggatacatcaaaatcagtgctaagagaaaagtttatagctataagcacctacatcaaaaaaaatctcttctgatggaaaaaaaatagaaacccttcaaataaacaacctaatgattcattctaaagactaagaaagcaagagcaaaccaaatccaaaattagt

SEQ ID NO: 40872 - DNA, 1040 bp, Homo sapiens
aggaacaatgtgcaattgatatgtttttagatgagagagaaaaattaaagctaaaattagctgcaaagaagtattaataatcacctctgcaaaaattctaagttgccaactggcaaagaaagtctaatgttaaaaacaactttgcctttgaaacgttaataaatggatttactttgctaagatttatggcaagtgtcaaaaatagtatctgaagatactgaatcatcatgaaatgaactctacttctggccaaagcacaatgtatttgcagttttctcttttgattcaattatactgcacatgttttaaggaaaagtaacttaattgggtttttcaggcagttgatatttgacctaagctttttttttttttttttttccagttaatgctaagaaaagatttggggaaggttataataaaagtattttgtggtgaccataagaatgtccctccccaaacaagtaaacttgtgaaagtttaatttggaattagtggaagctgttcctttgaaagccaagatattatttaagttgtaaagccagctaataaaatgccttagtttgagcataatacaaactgtgttttgttctttagacatttatgagattctctgccactaacagtaaatatgatttaggggttttgtgggatctttttcacctaagagtttcctagctctgtcacatgaattcttttttatcctaatggcagatccaatttcatctcattcatttttttaaccataacttgcttttcccattctcacttttagaattatacctatgatggccctttctttatcttgcttaccttatagattataagtcccctgtgagtaagtaagagtcatgtttttctttaaagtttcaacaacaaaccccaaggtttatttatttaacaacaggtattcgttgaggtgccttctgggtgcaaggagctttagagtagattttgacctcagctgaacctggaactctgatctgatagactgtttatgataagcttttttttttattagcagcgtgatttgtatatcgatg

SEQ ID NO: 40873 - DNA, 1057 bp, Homo sapiens
ttgctgcaaaacacactatctctacccttgtatggctgagtagtattccatggtgtacatatacgttttctctatccactcattggttgatgggcacttaggttggttccacattcttgcaactgtaaattgtgctgtgataaacatgcattcaagtatctttttgatataatgacttattttcctttgggtagatacccagtagtgagactgctggatcaactggtagatctacttttcgttctttgagaaatctctgttctgttttcctcagaggctataccaatccacattcctaccagcagtgcacaagtgttcccttcttcatcgcatacagggcaacatctattgttttttgactttttaataatggccattctggctggagtaaggtggtatcccattgtggctttgatttgtacttcctcgatgattaatgatgttgagcattttttcatatgtttcttggccatttgtatgtcttcttttgagaagtgtctgctcatgtcacttgcccatttcctgatggaattgtttgcttttttttcttgctgatttgagtcttttgtagattctggatactagtcctgtcagatgcatagtttgcaaatattttcttccattctgtggattgtctgtttactatgttcaggatttctttgctgtgcactagctctttagcttaattaggtcttatctatttatttttatttccgttgaatctgctttgggggtcttagtcataaattcttacctaggccaatgtccagaagaacctctcccaggttttcctccagaatttccatggtttcagttcctagatccaagtccctcttgagttaactcttgcatgtagtgagagataggaatccagttttcgttcttccatatgtagctatccagcaccatccattttcccagcaccatccattgaatagggtgtcctttccccaatttatgtttttgcatgccttgtcaaagattagttggttgttaagtatttggctttgtttctgggttctctattctgttgcattggtctatgaatctaccttta

SEQ ID NO: 40874 - DNA, 1021 bp, Homo sapiens
cctttatatatctgagttcctcactagattgtaatcttttaagagtggtagttaactttttaatttctatgtcattttctttttgacatcagtccctagtatatgttgtagtttttaataaatcaagtgtttgttgaattaatgaattaaagctccactgtcaaaaatgtttatgaactgtagtcatttagagatatctcccctcggggtagtatttgagtaaaaaagatcataagtctatcatgttggaaggatgagttgaagtaaaactatattttagtactaattcatctccagtaatatatttggtgccaattttacaaaatatctccttcataccattgattttgataggatggattatatggccaagactgtgggcttgattttgaatttcagttatttttcaacattattttcttcttatcttcatttttggtacagtttttctcatgggatcttccacggttgtatttgtgtggtttgagtctagctacttatcatttccaccttaacagactttagctacttagcagagattatttctggtctggagcataaaggattatgaagaaacagtttctctgcccttctgtcattgtaggacatcaatagagttggtttcaaatacttttttcctatctgccttctgtagagtatcttctgaagaaaatggtcatagtttccacacacctcaaaaaggaccgcccattgaagatgccattgcttcttccgatgttcttgagactgcttctaaatctgctaatccaccccacacgattcaagcatcagaagagcagagttcaaccccagcaccggtgaaaaagtctggcaagctgaggcagcaaatagatgtgaaggcggaactggagaagcggcaaggagggaagcagctactcaacttagtggtcattggtaatgctctttgtccctctggatcgtcagccagccatgccttagcctgcccactgtctggaggcagcatggaaactctgagtttctccatgggtggaatggacag

SEQ ID NO: 40875 - DNA, 1050 bp, Homo sapiens
attctttcacataaccatttataaaaatagacacatacatatagggatttttgattatgcttttgtaaataaaaggcctattatatttttcattttccttttttccccataatacactgtcaagctagatcaaactacaatagttatacatctacatagcagtccctaaacaatattaatttccttttcctttattaattgctttaaaattcattatatttgttactatggagttatttctggatattggtgccattactaagtcttcttaagccatcttgctcacacatgaattcaaaatggtgtttggaaataatgtattatatctggagatatacaatgatcttattgtatgtcttttttaaaactagaatttttttaaggattattcaaatggagtaacctctccctgtctttaaggtcatgtttctgaaaatcccaaaggtaaaatgtattaaagaagttgaagactaggttgaaataaggattacgccgaatctatgaaggcctgtgtatgtgtattctattgtcactaaaaacagtgtgtggcacctaaatatacagaatattaataaattttgatgccttttaaatttgattaatacagtttaattttcatttatcatctctgattctagaacccttgaagttttcagtaaggtccttataaacctttttttccttatttcagctcatgcatactatgaaatttttatttctcctgaactttttcttgtctccaagtgtgcactatttttctgatttttatgaccagagttgattctcactgctagtttccacattaatttagaagagcactggtacttgtgttagactgcttggatttagatttcaactgaaccaactactagctgtgtggcctttagcaaattacttaacactatgccacagtttcctcatttgcaaaagtagggttatagttcttattttttctggtggttgcaatgctgaatgagccattatagcatatattaagtcattatagcatttcttggtgcgtggttggtacttactcaatttagattattc

SEQ ID NO: 40876 - DNA, 1046 bp, Homo sapiens
ctgtctgtgagccagaaagcgggtgttcaccacacacagactgccttgatcttggacttcctagcctctgaactgtcagaaatttctgtttataagctacctagtttatggcattttgttatagcagcctgaatggactaatacatcctccttgtcttaattaccctctagtccgctgggctgtcttataaactgtacctgctttcatcctatttttagcctctgcagaccaaatatgccccttctgacttttataatttctttttctttgtaaaggcatagatatgctagaagttgtctttatcatatctactctgtcatccttttcctgttaactggttattctgaaatgcatctagctctttatgtacaggcctgctcttctggtcaagtacttttctcatttagcttaatcatggcttttcctctcatcttttaatgtttcactgttatcagtctatattctgttaggagataaaaattgcaccagttattttatcagagaacatttaacatcaaaagttgttaatgaggtattatagaacaaataatgcaaaaagtgcaaccaggatatcaagaaggtagtaagttcaggaagcactttactgtccctagttcttaggggaacaaaaggcaaggttgaaaccaccttttagaagctgatggaggctccttgcagctgtgacttagaccttgaggagagggttctttgctgctttgcctctgaagttcacaagagggactgtggggccaggactcagacctctgggcagggaggcactgcatggctgatgctggtgcctcagaaggtccctgaatcttagagctgggattcagccttttaaagaggggattccgccttttaaagaggggattccaacctactggctggtcgtgttgtctggggagtgaagaggcaaattgaagctggttctgggagttttggaaaaactgaaaacggatattaattgcagttactggaagaaactgcttctggaaggtgaagtgagtattgctggggtgatactggaacaagaagcaaaagg

SEQ ID NO: 40877 - DNA, 1028 bp, Homo sapiens
gaaaaatgtaataacctaattatataaaagtaggcatagccatagactaaatgaaagaatgctatttaataaaattatctgtatccttccgaatcactaaccctgaatatcatccatgaggactttttttcccattcaatgaagaatttcatatactctgattgcctgctcttcatttctggaagttacttatggtttggagtttttagtgtctatatttggggattttatttctttcttgcttacattaacctgtcaatgcaggagcaggccttaaacaattgctaatgatacaaaaagatgctaacaatgtttgagaggcaaactagaagataggaaattagtattttggtcttttttagttgtgtttgtatgtgtttgtgttttacacaatgtcctttattacctgtgctgttgcctgagcacactaagatttggttgtagtcagaagacattattcaagtttatttagtacattttgtgtatttttctttccagtaaagaattgaagaaaagttaagagctgccgaaatgcacagaggtgaaaatgacaaaccaaatggaatttctcttcagagttcagaattttcagatactaaggaggaagaaaggatccactacttcttgttcttatgaatgactctagaaaaatcagaatcaagttgtgggtggaaaaatcaacgtggcctttgagttcagttgttataaaccattgtgactattgttggtcaaagtattggtacttatattgttagtaattgcatcataattacattaccagtgttggaaaactaatgaagaaaacactgtaattgctactcagcaaatgtgaataaaaggtgtttgcgttattaggatgtctgttaagtaatcatttaatattattatattggtaatggttgtatgtgtgatgctatgcccagaatatgaagtatctgtttttgaaattcactttatttaaaagataagcagctgactgggcacggtgcctcatgcctgtaatcctagcaccttgggaggctgaggca

SEQ ID NO: 40878 - DNA, 1044 bp, Homo sapiens
aagatagtgccaaatcttgctgaagaatgatcttgcagaaatctgattgtgaagaaggaaatctaaaaaggccaaacaagcttcagtagagataacaccaggaaagcagttactcaaacaagactgaaagagaaggttgtattccttttctttcatttcattttgtttttatgttttctggattactgaaataattaggaacatatggtatatctgtttcatttgtatattattgaacttaaacatagtaacaatttatattttctttgtgagtgttaaacgaatcctttccataacgtgattatctctaaaaaaaattgcaattcgttttatagcaacattaggttgatttatagattatatatcatatcaaactcaatttcccacagtatactttaatatgaagttaatgtttcagattctaaaggaagtatccgatgctcagggtaaaatttggtacccttgaaagtgcttattgtttttctcacgaaggtgccattaataaaacaagatatactgaacacattttgtagatttaaagagctttcaaattcaaactcttgcatacagatcaatgtgtattactatgaaaatatagagtatactataaagaatatgaaggaaagatgcaggctaaaagatatatttagagcttaagtaatataccacattgtattgggagattaatttaaactgattcacaactgattttttttttttttttttggtcacatacctgaaagctgactttacttataaatgagtgtttgaactctctggagaactacttccttggtttttcatgggagcaaatatattgtcctgatagacaatatatgttcaggacaggcatagatattcctgttcagaacaggcatattctctccccattcaggaagttggtgggttttcagcatgtgaatattgactgtgttgtcttttctcattttttacttactacttgtttttcctcttcttccacagcaatcaatcaataagaacaagtcccaggacttcagactaggctcagaatctatgacacag

SEQ ID NO: 40879 - DNA, 1050 bp, Homo sapiens
ggggtttcaccatgttggccaggctggtctcaaactcttggcctcaagggatctgcccacctcggcctcccaaagtgttggcatgagccaccgcgccctgcccccaaattagtttttctgcgtacctctgactggtaaaatcctacctagtcttcagagtctgatacacctaccacttcttccattaagcattttccatccccacatcagagtttgtctttgtaattatttcactttcaaataatgtcacatttattttatggttacttgtaaacatgtctttctctgaccagactgtaagctccttgctaatgaagactatcttttgatgatctccatatgttctccaacagttcctagcagatatcctggcatttagcaggtccctggtaaatgtgtattgagataaaataaaataagcatctgtctgaccagataataagtgaaaatgacaccttctgcatttctgaaatccagatgattaaaattttccaatcatagttcttttgataactaatgagtaaaattgcaaattgccgtaacaagtaagttttaggtatcttattggtacaccaaggaattgaatatcgatttctttaatttcatatttgcccctaccatcgttgtttttcccccatggagcagtgctcctcaatttgattacatgaattcctttttccaatttcagcactgtatcaagaactgcctcctgagataaaggagcgatcccctcctttaagccctgaggaaaaaactaaaatagaaaaatctccagctcctcaaaaggtaaatgtttttgagcatacgtattacatatgtactttgattttcactctctctggataaaatattactttattttttatgcttattatccttcattgttcacattattttttatgtcttggtacaaacatcattatgaaatacataaggcaaacgttatagccattttccagataaggaaactgaggaggcccagagaggttaaagtagactccaagtcacagcctaagtgatgggacaaggacccaaagtagaacttgtggc

SEQ ID NO: 40880 - DNA, 1081 bp, Homo sapiens
agctgctgaatattatttaattacaggagatagccagatattaaggacaagaacatatttcaagcttgagaagtaaaactagttcaagaatcaaagggagcacccaaggaaggatcccagttaggtcaaggagatcaggaacaaggaaacctgatgaatgttgcctcccacagcttgtttgtgtcttagtcaattttctttctttttttttttttgttttttttgttttttgttttatttatgtatgtatttgtttattgcatattgtgactcttccctgaaatcaatgcagaagttcagttatgccaggacaataggcatgaactgggactatctcgggcaaccctaaatatatgatcaccttattcatcagttctgtaagtcatgatagccaaagtgatctataagtcagaatgggataacctcctgctttacaccctcagtaacttctccttatgtttaggataaaacccaaaccctttcctagggcctatagggctttgcatgatctgctgtctgtctgtctcttcagcatcatcctatggtactctctgttctgagtttcttgaacacaaccaacctttctcccactcacccaaagaccttcgaacatttgatctctctgcccctgaatatacacaaccttttgcataataggccttttcttgagatcccaggtaaatgttaacttttcaaaagaccttccttcacccccattagtctttattattacactttcttttttttccttagcagttatcccaatttggaattttttatttattttcttatctggtcttccttaactggatgtaagttccataacagcatggactatgtccatcttactcaccactacttataggccttcagtagatactgcttaaatgaataaatgtatatatgatgaaactgtaagaataagtaagaacagagagccggcctagatgtatgttcatattttgaaagctggaagaagagccctcaaagaagacaaatggtagaaagggaggcaggagatcagggataatgtagcatctcggaaaccaatgcaagtatggaaatggagtgtgtttttatg

SEQ ID NO: 40881 - DNA, 1053 bp, Homo sapiens
tttgccatcaaaaataagtccaggactagatggattcacagctgaattctatcagacattcaaagaagaattgttaccaatcctcctgacactattccaaaagatagagaacaagggaatctttcctaaatcattctatgaatcccgtatcaccgtaataccaaagccaggaaaggacgtaacaaaaaaaaaagaaaactgcagaccaatatccctgattaacataaatgcaaaaatcctcaacaaaatactagctaaccaaatccagtagcatatcaaaaagataatgtaccatgatcaagcagggatggtttaacatatgcaagtcaataagtgtgatacacaacttaaacagaattaaaaataaaagtcatgtggtcatctcaagagaaaaagcatttgacaaaatccagcgtcctttatgattaaaaccctcagcaaaattgatgtagaagggacataccttaaggtaataagagccatctgtgacaaacccacagccaacattatactgaacagggaaaagttgaaagaactccccctgagaactggaacaagacaaggatgcccactttcaccacttctgttcaacataatactggaagtcctagccatagcaatcacacaagggaaagaaataaaggacattcaaatcagtaaagaagtcaaactgtcactgtttgccaatgatatgattgtatacctagaaaacgctaaagactcatccaaaaagctcctagatctgataaattaattcagtagagtttctggatgcaaaatcaatgtacacaaatcagtagcactgctaaatagcaacagtgaccaagctgagaatcaaaccaagaactgaaccccctttacagtagctgcaaaacataaaataaaatacttaggaatgtacctaaccaaggaggtgaaagatctctacaaggaaaagtaaaaaacagtgctgaaagaaatcacagatgacaccaaaaaaagatggaaacacatcccatgctcatggatgggtaaaaccaatattgtgaaaatgaccgtactgccaaaagcaat

SEQ ID NO: 40882 - DNA, 1032 bp, Homo sapiens
atttccatttctcttaaatggaaatcctaaaaaataaatgaattatagtctagacctgaagattataacagataaaatgaaaattcattagatggacctaacaacagataacagcagataacaacagataggacaccttaaaagaaaggaccactgaactggagggcaaaacaataaaaattatacagattattcaaattgaaacaaagatgaagaggaggcatgggaagaagaaagagtcatatctgtgtgtccctgtgaaatggattaaacatgcaactggaattgcagaaggaaaacagaaaatatgggtgaagaaatatttgaagaaataatgggctagtagttttcctctaattaaagacaacctatagacataaaaagcttagcaaggagaagcagtcatcagcatttaaagcttgtttccataactgtgttgatgctgtctcaaaatggcagataggaggcaggactaacttgcagctcccacttggacggacagagcagtgcacagagaatcacactgtgaacttttgctccaagaactactaccagaaaagccaagagaatccacagacctgttagagggggcagcttgctgctacatgctctgtgagacagctgaaaaacttagtgcccaaagagtgagagagggaatgtccacccctgaacacacatcctcactggggaacctgaaggtccagatcaccagaaaaggatttgaccttacctggagctgagacaaatttagagagccgagtgaaatataggggtagaggaagcagtgggaagagccctgtgggcactcttggtcctcagggaagccattcctgcattcctgactgtcttgcaggagtccttggggagggctgccagtggaattgaagaaagacaacaaggagaaggaaacttctagctgaagtctgtaacaatttcaactgaaggcaaagtttcctggacagaatccaaaggagggagcaaatgaggagtgcagatatgagcacagaatccacagcaggtgggaaggtgcaa

SEQ ID NO: 40883 - DNA, 1050 bp, Homo sapiens
aggtggtacaataggtaaaaggcattaattcactattgtagattaataggtaatctacaaaattaactgatttctataggcagatgcccttaaatgtcttttatggtactaaaaagaatcaaaaatgtttttattatgcagtttttaacgacaagaatttgttttccagacagtcactttgctgaattcaacacatgtatattatggtggaaaaagcactagactcagggtcagccagccagaagaactgagccgacctgggatcccaccacttcctaactgttttgttaggtagttcactttctctcttcggataaatgtctccacatttcctacttcatagaattgtcagaatcaacacaatacatttaatactttgaaactcataaaatattgggagaataaacagtatgaggttatgggaggcttttttgatttttttttttagtttgaaattatacagtttgttttattgccaaaagagtggaagatattttaagatacaacttaataaaatttgttaagtgatgattataggaaaaggaacatgtcaaagagacaaataatggatatagtatttttagaagcatgccaaaaaaggcattaagatgaagtaatttcaagaagaaagttgtcaagcatcttaaacttgagtaatccactagaacacttaactttccaaactttagctttctacacgagtaccacccttaagccgtctttggcatgtaatgagataacattgagattttaagatgattaaaatcaaagtattctctcatctgtgtaatctggccaaaatctacagggcatgggttcggttgggggacaatcctttattccacagacattaaaatagaacaaaagcaacaacagaactccatttgctagcctctgtttctcttagaatttgaccatctctaagaacataatccccagaggtatcaaaaaatcttgagatacttcatataattccattttgcaacctgtagtttttcctctcttaagaaaatgcttttcaacaaggtgctgtgtctcatgcctgtaatc

SEQ ID NO: 40884 - DNA, 1085 bp, Homo sapiens
ccataagagggatatttatatccctgcacatactatctcagaagcatgaccattaagccatttggttactaatatgtctaacctcattttaaggcgtatctttcttagaaatgtcattgagatatcactgaacagaaaaatttcaaaagcataatatgtggtccatctcaaaatggccaaattaatctcttttattaagaagccagtgtttatgaaaaaaaatcctgccttaggaaccaggtgagctagttttcagacctaactctatttctaaacatggaatcttgagcagtttcttcaggccagagttttctcatccctccaaataaatgagggctctggctatggtgagtttctgctttaaaaattctgtgattctattcagtgttcaaatcagtttgtaaagtggataaataattaagtgttgattgtacgaataatctattagaatctgaaatacatgactacaaaaacaaatcatgtaaatagaatgtttaaaaataaaaatctcactgaaaacctatctgaaatatacaagtcacatctgtcgatatttgcctttggacagtataaaagaaagctatttacacagagctagtaagtatgagcccattagcgctcatgctaggagacttaagagtaggggttgattttatatatatgtaagtgggtttacatgctagagtgctagactctgcagtgggtttatgttctgttgtaacttttattgatctttttcaaggtgagttctaggtaacggagactgctagaaaagtaagcatttctctcttctttgatttgtattcctcacaatttctagaatgcttcatttattcattctaaaatcattttaagtgaccaccttgtttaaggccatctatttagcatgtggagtaaatgttacagtctctgccttcaggaacctctagtctggctagggagacaaataagtatgcaccaaattaagtcagaatgtgacaaattctgaaatcacagtgtaaacaaagtgtcaccagaataaagaggaataggagagctaaaatattctcaaactttatgtgttccaatggaactcttgggttttt

SEQ ID NO: 40885 - DNA, 1075 bp, Homo sapiens
tagtaatccaggaaattacactgtagtttctgatttgttttcctaatacaggtcaacaaaaatctctcatttacttcaccaccagcagtttcctcacaacagtctaagttaaagcagtcaaacatgctgaccgctcaagagattctacatcagtttggtttcactcagaccggtgagcccctttcttactttgacaattcttttaaatgttcagatgcttgttgtgttgatgaatatcacttatttctttagaaataaagctcataatggtcggtttttacacttgacaaattatattctagcatctcttttgtccttaaaatcaccaaggttatttcaaaagtaagtttggaattggtaacagtagatacactgaacctatgtgctattaacagataataatttaaaactagcaaaacacgtgagttttaaacctgcatgatgttaaatctgattcagtttcccaattagataaagaacccatcatagatggataatcccatgttataattcatttcaaggaaagccaaggtaaaatacattttggcagaaataggatgtaacctgtagtgatatcacatcccattaaagggcaaattaacaaaatatgcaaaaaagcttgttacataactatactgaatcactgaagtgaactatacaattgttttggcaaatattttaaatgagtttcaataaggtttttaaaggatgtcaaaggaaaaacatctaagtgagaaatgtttttgtggtattgaaagatgactttttctgttcattagctatatgtttttgacagtattttttctattactgaattcttttagaaaggtaagaaagctgaaaataacaattatcttttacaaaaattatatgaaaaagaaaatttgcgtatgagaagatcagcataatttacttagaaatttgaggacaatatataccacttttttaccttgaaagtatttggaacttacatatacaagttattttaatattgctgtataggttacatgttatagtgagaaaatgcttggattcacaactcttatgctcaaccctggctgtgccttttataacc

SEQ ID NO: 40886 - DNA, 1081 bp, Homo sapiens
accctagaagtaaagacataaggataggtgggagaggtccattctttcataagtttggaaatgagaagttcaggggttcaagaccaaattttctctgtgaagcaaggcagtgaactaagagagaaaaggaggtaaaggttttgagaaaaccaagatgcattgaggtaaattgctttaccctaaagaatattgctggataattggtttgagccaggactagatcttaattttgaaattgacatgaaagtgtcatatcagtaatctgtgaaccaccagtccttggtacctatcagagggtcaaaaatcacgattaaatataaccaaaaaactttatagtgactgattcaaatttgaatactggttttagctaatgtagtagtaatgaactggtttgggggtaagatttttctggtatcttattgctgtagaaatttttctttaacagttacagtgttgtcttccaaatccttcacttctctgtcctggcttgtaaagaaaacatctgaggactgaggggtcatatttgaattgctctttataataccatagactactcattgcttagactttactaagctagaaatcacaagagcataagctactcttaaaatttatattatgagaatgtaaaagatacctgacttcaaatatcttgaacctcactttggctcaagttttctgtttaactttttctttaatactgatattttaatttttacaacagatacatgatttgcaaaaaaaaaaaaaaaaaaaaaacatcctgggtattattggtttctttttttctaatgccaccagaactgccatcagattaaaatattatctgcattattattcatattagtggaaaaatatgacagctgtctgggagagagatgaatttgtgaacttttaagtatacagacagcattaacattctttcggttataatttaaaaccaacttgagatatgatatcatcacagcttgaaacttcataaacaattcttcaggtgaatgtagcgtgttatctaaaattagctaaaagggtagacttgtaagtatacatggaaatgagtactatatatctcccaaaggtt

SEQ ID NO: 40887 - DNA, 1029 bp, Homo sapiens
tgcaatacgatgtacatacgatacatctacaaatgtagaaatacatttgttttctacgttctatatggcattcatttgtaatacttatgaatagttcaaaagcacattcagataacataattctcatacttatacaagattatgtcattaaaatatacctaatagtagggcagaattttaaatatttatttttagcctggtaggagaaattaaaagatagaaatgccacattttaagacatgccaaaactacctgtttcttggttatatgctgaagtacctattttaatattattcacataataggtactttgatatgaaagtttatatcattcaagaactcaagacatatggaaaacttaacttgatagttttgagcataaaccagagccctgacttcctctttaagacattttttttaatgtttacagtggtgtttttaattgcactaatgcatgaatgatatgatgtaaaatagacaacaacaaagactggagtaagagagcgctggcattctagacaaaatactaccactctgtatttgaccctgatcaaataatttacctttctgcacttgttttgttctgcttgtaaaattagaatagcatatattctattttatatcaatatttttatcaaaggataaaatgaaactataaaatgaggcatgaagcataaatacaggcatacctcgttttactggtgtttgctttattgtgcttcatagatattgcgttttctacaaattgaaggtttgtggcaattctatgttaagccagtctgtgggcgccatttttccaacattgtgtgctcacttggtgtctctctgtcacattttcgtagctctcaaaatatttcaaaccttttcattattatgtctgttatggtgatctgcggtgagtgctttttgatgttacattgtaattgctttggggcaccacaaactgtacccatataagatggcgaacttaattgataaatgttttcagtgttctgactgccccacccaccagccgttctcccatttctc

SEQ ID NO: 40888 - DNA, 1048 bp, Homo sapiens
gggcgcagtggcttatgcctgtaatcccagcactttgggaagccgaggtgggcagatcactggaggtcaggagttcgagatcagcctggccaacatggcgaaaccctgtctctattaaaaatacaaaaataagccgggtgtggtggtctgcatctgtagtcccagctacttcagaggctgaggcaagagaatcacttgaactgggaggtggaggttgcagtgagccgagattgcgccattgcactccagcctgggtgacagattgagactctgcctcaaaaagaaaaaagaaatatgctcaaattgccttatcttaaaaacatcattttcagttcttcctgccttctagactagcccattatttttctttttctacaccatcaggagtattctacacatactgtctttacttcagcccagttattctggctttctttcccaccatgctacataaacttctttcttcagaggttggcagtttcttgctatttttaaatccatttggacagtttaactcctgctctgcttgccttcactgtagtaattgattattgaccagtcttgaaatattttgaattcatagttttcattgacaacctcttctcttctctttttattactctgaccagttctatccattgtctttctctgatttattttcctctgccgatcgtctatatgttttatccccaggatcctttagctgatcatctcctggttttatatgcttatcctagtttctcttacctttcccagctttgactcttgctgatatgctaatgacttctagcgcacaccttttttatgaatttgacttcctattacacgtttccatttgaatggcccattgccacctcaaatccaaaaccaaacttacccacctccttaaattttgttttcctcttttaattctcttacatatattttaatggcatccttatccaccatctcccaagctgaaaactcagagtggtgttcatctcttctttctttcccatcatttctttcacatctaactagcactaaagtctgccaattctccctccta

SEQ ID NO: 40889 - DNA, 1004 bp, Homo sapiens
tggattatcaacctagaactgtgaccagaattggtagatgaccccagatgaaaagttgctcttggtccttagtgtaaattgaccacaccctccagggcttcacctttgcctattttgttttggtccccttcccctggcagatcatggtctgctagcaccacaagcctgggagatttcactacctctctagcttctctgtagcatcagaattcagttttgtgagaagaattggtcatgtgtttgaggcttctcaaatctccagttttatcattttagtcctgtggaatcactaaaagttttgcttatttctcattctcctggcagtgactttctgcctaagccaaactctcatcttcagctcacaccctgaatcagcaaatgtccccagagacaaaaacagctgccagtccatcagctgacctctgactgattctccctttctggaattttaatctgtctactatatcttctttctgtacttttctgatgcctttaaaatttaaaataagatatttgtaatttatttggctctttccagttgttacccaaagtgtttacctgctgcatcctactgcatcccacccagaattagaaattctagttgtcatatatattctacttagaaaatacctggataaagttacttttctgactttgactctcttttttttctttttgtgtttctcctacttattaggaaaaatataaacaaggatttttcaccttatttgtaatgtattagcaaatgtagtattttactttcacactatggtttgctgttgtctggctttttctttctttccccctgaagttcctttgaacacagtgagatcatcacagatcttaaagattaggttatatgtaaatactactatgggaacaactaattataacattgatttttttttccatgcgtgtagttgcagataataatgaagatgttgatggtgatggtgttcatgaaataacaagccgagatagcccggtttatcccaaatgtttgc

SEQ ID NO: 40890 - DNA, 1050 bp, Homo sapiens
agattactggtgtggtaaggcttgataaatgctttataaactccctcaaacctttctttactgtttttttgttttgtcttgtttttgtttttgtttttgtttttgtttttgtttttgtttttcccttgtctcccctgggaaaatgggaaattttacagttggtaaatctaagccaaaattattttgaaataaaggaattctggatgtccagtttagtcctcgttttcttacgttaatctgggaccttatcacccataatatggtgattacttctctttctaaaaacatagtagctagtaaataagtaaaaagaattgtcttttcattcactttaagtaagatgtggtataattcttaccatgtgccatcctgtcagttttaacaaagcattttcacagaaatttgtgtactaagacaaactgacacattttgactcatacaaatggcaaattagtccttaaaaattctgtgagagaaataactctgtgtgtacatacatatgcatgtaaagtgttgtgtaagatcattggtagcttaattatactggataattgtaatgttatatacaaatttcttatataaaagtatgctgcattattaacatttgtttaacttttcttatttttctttttctgggtttcaactggaatcccattggtggggatgtaccttaagtttccttgtggaataatagactttcacatccagaaagagaagttcagaggcctttctcaatttacagagttgaagaggaaaggcaaatggaggaataaacttcattgtcattgggattaatttggctagactcaatctcttgagccttaaaatgagaaagtaatatccattacatgtttagagttctcaaatagttgatactattattaaatgtttcaaattttattggggtagatactaaaaattagtacactgtcctaatgaagtttaaatgaacaagttttacatttcttaggattcaggaatatatggaatctagttgtatttaattgacttgagagccacagagattgtgttgatttatgagctggactc

SEQ ID NO: 40891 - DNA, 1683 bp, Homo sapiens
aaatagaaaccccatttctactgaacatcctagttttaaacagaagaaaaactgtaatcctggggttggtatgtaggaggtctatcctgcagaataagttgatacattagtacctgatttcatatcttacatatttatttgagctgaacattagtttgtagtgtaactattagtaaaaatagagaaacacagcatactgttcattaatagtattttaaaaaaattgtttttcaaatgtcaccaataaaagttttggcaggaagcttgttgcggcattgatctaacctttttcccccccatttcagttgcagtttttgtagaatggctttttctttttcctcttaagagttctattcttcaggtagataatttttcaaatgtgaattatcttttgtgtctatattgatagctcttaaaggagtgaaaatctaaaatagtaaatttcaatgttaagtgtctgctttatgggcatatataaaagtagacacatttcatttgttaatttagttgtgtgtgtgtgttaaaaggagctaatgcttattctgttaatgtaaacttttgaagatcttaagtgtattgctctttcatcttaaacactttcgaggatttgcagtgcgtctagcacctagattacagccaggaacattggttaagaactgttggaaacaaaactaaaagcaaactcaacatatgtgatgtttatggccctcagatccttagtattgtgtgattttcccccgttaacatgtctttctaaaattgtctattaaagcagaggaaatacctgccaaaggaagtatgtattgcattaatcagggcataactaatattctcctgttcagaataatacttatttacgtgtgaaagcaacatggatgtgattcccaacacagaattttcatgacccttttattgtatacaaataaataccataacagttacttggttagacatcaaatctgtgtgcatgactatgtgcttatccacttaagacaataggtaaaaggggatctgagaaattatgtaatagggagtgggaataaaactacttaattcctgtgggcaggttatattttaagttcaaatgcattgctttaacctttggttacttttattctgttaaacagaattgaagaaagagtattataccagagtgtagtaggctagggtgattgtaagaactctgtaatagaatgtcattgtggatgttacctttttcagatccaagcatataaaaagcctgtatattttttaaaaacacatcttaactccacgctttacgatattataaaagttgaatggttcctcttggtaaggatatttgcttacaagtgctaggaaataactcactgatacctgcgttaacatactttgttttgcctagagaggggcaataaaaatgaaccaaaggatatttccagaaaggattaagaaagctgtttaagaaggccatgactctttaggtgtgtatgtgtacctttcagcatcctaggaatttttatactaaaagcaaaatgttttttccagttagtcttcttcaaggaattactattgttccttttgtcacaggtaaaatcagtgttgggaattataatttgagaaaaatattacccagtaacattgaatgtagatggctaaacgattcttactcagtgtgatgtataatgatgcaacagggaccct

SEQ ID NO: 40892 - DNA, 1049 bp, Homo sapiens
ctgtcttcatttagaaatgccattttgaggtctagaagcatctgtataaactaggtacttttcttgacttcgagatcaataactgtacctagtccttaaagaccaagagtcaaggaaagttactgatttgtaataacatttctttaatcacttagtttttgaaaaggtaccttaacgccttaataaaacccctgtatgttcatctctgtattacagttacattcattttgcctgctttcttcaaatccttgcttatatgggtatcaatcatagaaatcatataaatatttcacatagcatatacattatccccatgtttctgtaagtcgttataattattaatataatgacttccatggtagtgcatcttcttgcctgtttaatttcaagattcacactcctaccttgagcgagtatctagttgggttttggtggagttcatttattagataatttgggaaagagaagagctttgcttgtatggtgataggtatggctgaatacttggggcttctatgataattcaaagaaattagacaacttttgactagtaaaaaggaaaaacaacttgattatttaaaaatattagttcagtccatgaaagtacagtattctaacacttaggttgatcatttcttaacctactcaacttttagttggcagaaattttttgcctatgatataaaatggccatccttttcatcctcaatggccatgagatttagataggaaattagggcatatgttttttgttactgcagtaaaattagaatttgcatgtaactaaataccttttgattgcatcactaaacaactttgttaatgttaatcagtttcgaattagaggcagaggaagagccagaggagtttttgctgggacaaatactggtccaaacaactcaaatactacttttcaaaagagaccgaaggaagaggaatgggatccagaatataccccaaagagcaagaagtacttcttggtgggtgttagacatctgtgtttatttggtttgcattaattttcgaagcatactaggtgaataaatttg

SEQ ID NO: 40893 - DNA, 2507 bp, Homo sapiens
ggaagagagagtttttaaagaagaaaatcaaaaggtatgtttttgaatgtaattttttttcgtgttaagttcagcttagttaatgatattgtaccaaatatagtttctcaaggcaaaatgtctatagatatcttctacttttaattcataactatattatggtagtgtacatactgtttcttcctggaagaaattaaggtgacactatactaagtgtcttaaatttaaaccaagagtgttttttcaaaacactaatgaaaggaaaaaaaatagtcctaagaaaagtgtaaagaatcagtgggtagacaaagggaaattataaaatcaaagatacaaattagaattttgagatgagattcattagccagagtaaatatttctcgatttgtgtgtctaaattaatatctctaggttcttcacagataacaagaagtaatccccatgctactgagcatttttgatgtggattaagaaataagcattctaagaactggtttacaaatgaacgtttggaacaaagacttgtcactcttggaatgtttggggattgggggaatgtcttttaaacatgagagaggagcctgtgaaagatattgaggggtcttggtgagaatggaattcagtggttaaggggtctccaatatactcttgacaattcaaaatgacctttgccaggtagactaatctatatcaggccataaaatgtctagtagtagaaatgtggggaaaggcagaaagggagcaactgttttgaagagattaggggacttggaagtactgcttggttccaattctggctgtcactaagtactatctacatgatatttggaaaataacctcttgaaccttgcttttctaattagaaaaatgagaatgcatctgttttgcagagttgttgaataattgggttattttgaaaataggcacgtttgttactagaagctgttatggacagtggtagtatacaagtttaatagggcatgctattaacttactagatgtggaatctagagcttacaaacaaggtttttttttgttctgttattttttttgtttttgttttgcatggggcgtattgatgttgaaagaacagattctgagtagtgaatactttttttggtttttaacttaaataatatcttgggttcaaagttgttaatttagttttcccaacagtttagtctgtcctcgtgctctgacagtgagtatcttctctcctcattacatagaccagattttgatccagaggagaaaaagtagagataattgatgaatagacaagaggatatgccattggtttttatcctcctgtctggatgaataacatgttaatatgtaattatgtatatatcgtttgtaatttacaaagtagtttcatttacattatcttgttacttgtggacttggtaatacctaggtgaataggaaggtttttttgctcttgattagatttttttctttgtgactctgggagcaaataggtgagtagttgatatcatttggagatacgtactttcagttttatgaatgcttatgaatattatagccagacttcccagagtaaatactacttattgttgaatactagcaaggatgtccacattgcttagcatcttactgatgtataatttctcttcattcctagatgcctctttccatcttcctaaattatatagtatttgaaaaagcaatggaacaagaaggaggtgaattgtgacccagttaaactaatgtccgttgcaatacctgaattgagaaagggcagtatatggcccaagatactgagtacaggattgcgaatatctttctggctttgtttctacccttgttcaaccaattggtttcattaataatattttacgtgcatgttatggaaattatagaattcttacttctgaagtttttttttttattgggttggtcagattatttgggaagagcttgatcataatgaggcttaagtaatgagaaccattatgttaggatctcttttatttaggtagaaggctacattacaactacagattataacatctgtcattgttcaactattgaaaacagcatttggaaggatgagggataataaggatgtgctgagtggaaaaaatatttgtatcatttactgtacaaaaatttattatagattgttttggataaaaacctgcaaaattctcaagataattagcttttaataatttccccagtcccactgcactttgtatacacaaatgtttagtaaaaatagtcaagtacattttttaacaaaaactaagtgatagtatcttatatgattcattattttctgatactaaaatgccagtttagaagctggcataaaatttaactctataatatgtgtatatatattttttctatttctcccctgaaatctgtattttatatctgtcttttatagggagataaaaaattaaggtgtgactctgctgaccttcggcatgacattgatcgccgtagaaaagaaagaagtaaagaacggggagattcca

SEQ ID NO: 40894 - DNA, 1048 bp, Homo sapiens
caaagattttcaagtatgtcttttgggcagttaggttaagttttgtttttgttgttttgtttctgtgtttaaaaagcaacttactatgagacatattctttctcaggaacttcaaagactgttggcctttaaaattaatcccctccccgcttttaaaaaatctgtcgtttgacatgagaacagctcaatgtaatagatgaaacttgcctctagcagttctttatgcagttgatacatcagaacagtgaatagttagatgaatttcttttgggctgtaattatttaaacacggtaacaagacagttttgctatttggctctgagtaggtttgtgaaccagtttatgaccatattactgtggtacataaaatatgaaacattcttttttttttaattttttaatcttttttggcctagctccacattttacaatttattactgaattttgagatcaggttttgataaattttttcctttttcttttttctttttttttttttaaaagaactgtagtaatgtttcataattggtattgtgcaaccgatctgaacagctcttactttatatagagctgaaaatgcccagtgatgttttctttttcattgtaactaggtcctggaatatgttttgaaatggcaaaatccatgtttcaaagtaaaatagctgttgaaagatacaggcaaagttgaatcttctgtcttcctggcaaaaatggcataaaaactgagttgctagctcaaattcctgggtttcatggaattatgattgaggcactacccttgtagtggccgtttcaagttttaatgattggttatgagacatgtgctggatattgggcggtaagttgacaacagatgtatgttgacctgttaagcagatagcttgcttcataatgtgacatttcatagctcatgactttatacgtctttctattttacatttacaacatatcttgaactggttttaaaaataatcagtattgatattactagtttgaaaattgtttaaagagagacaaaacagcaatatcaaatttgctgttgggttt

SEQ ID NO: 40895 - DNA, 1054 bp, Homo sapiens
gattgggcaacacatttaaatatggaagcgatctacagtgaatgcaatccagagttactatcctcttctttgcttattcgcaggttcacagatgaagagtctagagtattcctgcttgataggggtaataccagggataaagaggcttcaaaagagaaaggatcagagaaagggagggcagagggagaatgggaagatcaggaagctctagattacttcagtgataaagagtctggaaaacaaaagtttaatgattcagaaggggatgacacagaggagacagaggattatagacagttcaggaagtcagtcctcgcagatcagggtaaaagttttgctactgcatctcaccggaatactgaggaggaaggactcaagtacaagtccaaagtttcactgaaaggcaatagagaaagtgatggatttagagaagaaaaaaattataaacttaaagagactggatatgtagtggaaaggcctagcactacaaaagataagcacaaagaagaagacaaaaattctgaaagaataacagtaaagaaagaaactcagtcacctgagcaggtaaagtctgaaaagctcaaagacctctttgattacagtccccctctacacaagaatctggatgcacgagaaaagtctaccttcagagaggaaagcccacttaggatcaaaatgatagcgagtgattctcaccgtcctgaagtcaaactcaaaatggcacctgttcctcttgatgattctaacaggtaattccatattgatgcccagtaaataatctgtgggcagtcagtattccagttaattatcttaaactttctgaacataccatttttatatttaaaccaatggtatattttgtgtgtgtgtgtgttatcaatatgttccagacctgcttccttgactaaagacaggctgcttgctagtacacttgtccattctgtcaagaaggagcaagaattccgatccatctttgaccacattaagttgccacaggccagcaaaagcacttcagagtcatttattcaacacattgtgtccttggttcatcatg

SEQ ID NO: 40896 - DNA, 1023 bp, Homo sapiens
caatcttgcttggctttttgactttgctacttttttagtgtttcccttaataggttccgattcctccttcctaggctgaacctcaaatctctccccagttggagggccatggatattttaggagacgctattcttgattcaccagtttaatgttaccatttcttctttgtatttccagtctcgttttatttttaaaattggatcttggtaagagttacagatttccatttaaacttgttcatgaattctttgagtgctgatgtatattaatcttgtattccttagtttctgttcgcctggtgcttttgactatcctttgcacatacttgatgtgaatatacataaagctaaacttttcagtattggtaacttgaatattttgtgcaaagtttatttacagattaatgataaattattttaggaagaatattgactttcagtagataaaagtttcattgctgactgttcttttatttgaatgtagacgtatcaagatgcttttaggcacagaatttaaagttactatgatggctgttaacgtggatttaaaaatcagtttcacatgaaactaaattgtgtgaaaggaagtaccaaaagagaataagtagcagagcattaaactcatattttagatgttataaagtagagcattatgaaaattaactacagattaccttttttttttttttttttttttttttgagatggggtcgtgctgtgttgccaaggctagagtgtgttgccaaggctagtcacaggtgtgatcacagtgcattgcagtgtcaaactcctgggctcaagtgatccttctgcatcagcctcccaagtagctgggactacaggcttgtgctaccttgccccgctaccaagatggcattatgttagctacgttggaattttctgatggaacgacatatcatatgttttttaaggctcaaattactaaaattagaattcaagtagttaaaaagatgctgtcagtttcatgatacgctactgcattgtggtttacaaaaaagttga

SEQ ID NO: 40897 - DNA, 1047 bp, Homo sapiens
cgcctggctgatttttgtatttttagtagagacggggtttcaccatgttggccaggctggtctcaaactcctaacctcaggatccgctcacctcggcctcccaaagtgctgggattacaggcgtgagccaccattcctggcctgataaattgttttctagctggtttctgatcacttatgttctagctggtcattatgtattatttcatgaaagataggctctgtttagatatttaagaaccttatttttaaaaataaaacctgctttattttatcctgtgttcctcattggttggtctgtcaattggctaaagatacatatggcaatttattccttatttctgtatacaagtgggaatctattaacaaatgatcttggttgtaataaagggaagattaatttggcattttcagttttgtatttgggttttggaaacatcaagcaccttttagggtattgaagagagagcaccggatttggagtcaggagatttcagtcaaattttggattaaccatttacactccgactgtgggcacgaaaaacggcaaacacatcttttgttttctcccccaaacttgtcctcccagatgcttgaatctaaaacctagaatttaagggcactagtgatttttcatttttcctcactctctgtacttcacacccctaacaatccattaacaagtcattttgacaaaccacatcttggatttgcctctttttttcattgctgtttattttttatatagcagccatcttaaaatgtaaatcagatgagtgactcacccaagcaaaaaccctgcaagggtttctcaaccgagtaaaatcctgatcccttttgatgatctactagatgctatttcatctggtccattcctcctcctgctgccctatttcataccctcaactccttgatcacgttgtctcaaccttcttattggtctttctgtcctgaatttgctaagtttgtgtcctctgcctagtatggtcttccctctgtgaatctttgcagtgttccctgtctttaggcccaaatgttacctcctta

SEQ ID NO: 40898 - DNA, 1561 bp, Homo sapiens
aggggcggcggtgaggtctagggggtctactcagaacgaggcagagacaccagcgaaaagcgccgtatggcgaagctaactcaggcctgacaaaacacccaccctactctaccgcctctccggccaaggctgacgctacgggccagagggcggagccgtcacatcttcccgcgagaccagccacgcgacttcccagaaggccgcaggcaacatcttaatagcagccaggaagccggaccggagcggaagggtgggcggggcttgcccgcatatttagcggcacccgaggccacgccccagatcggaagtgacggagacgtgctagcgcgtcgaaggtagctctatggttttcctcgcgttcttgagtcgggaaatggccgctgtgtggttgcaacggagataaattcccggaaccgcgattcggcgtgtcaggtaggcctcgcaatgtattcaagttactccaggggcagtgaagaccgaggacaggccatatttttgactcttttgtgggtggtgtcgggttggcggcgaaaggagaaccaaggagacgttgcgccgttatttatgcgttttttcgttagcttctctcaggttttcgaggcactacgggccgaaaaggccgggcgggggcgctgagcagtgctaacggcgggcgcgcgcgtgtttgcgaacctgcctggagacccacagcccgcgcggcctcccgtgcgcgtgcgcatatcttcctcttccacccttcccccatttcttcagcccgtacctctgcgcgcgcccgactgaacgctccgcgcacgcgcgctcgttcatttttctctcccccgcctatggcgccgacggccgctggaggtgcaacttgtgtccgcctctcattggctgggactgccacctttcttcgtggcctgtggggttttgagaaaataactgtgacccgcagcaaagtgcgttgagtaggtctaccccttttcgcgtggtctttaaaactgccctccggcttcagaccacccgtcagttaatgcctcgtttttgtgatgctactaggttttagtgctctgttctgcctctcgctgctgaccctggttctctggagttaatttcggtacccgcggcaacctgctgttttgaagcgagcgcgcgctgttgactggtgctggttgcctagttacggttccctagcgagaggattgggtcttagctggtggttctgagcgtggccctgccccatccggctgaaagtgcggttcttcatgagtactagcgaagccgagtcttttcaagtgattcagcccatttagtcgtgtcagaaatgttgcagccacgattggtggacagctggtgtgagaaatgggtgggagtggcgaattggactttgccttcattttaaattcatgagttggcttgattcgcttttaagatttatttcttcagaatcaagctgaagtaccagcagctactttgctacctcagacttttttaaaaagcattttagaactggaaacaaattaagactgaagttgaaagcaagtgtggctaacactgacgaaaaagatgagctacttcagac

SEQ ID NO: 40899 - DNA, 1177 bp, Homo sapiens
ttccatcttgagtaaaactgtaaaggttcttcacggttcaaccttacatttggcagatctaacatatttctgttctattcaacattttaaatagatatagctaatctccccatatgctctaatgctgcttcttatgaactatcaaatgccttggcttttgggaaaacccggaagcatgcatttggtttgcctataaataaataagacatgtacagaatattttcctggaaaagtattacttatcctcgtgacaagtcttaacacctggtaagacttgttcacttaacattttttaagtttggttgcttttttcccctgctggctgttgaatttgaatcctgaaacagttgtagtatatcttgcttgcctgcttgcacgcttcctctctttccaccttttgttccatcttaaagctaatttaggaaaagtctggttataaactagtctttatataaaaattatcttttatcactaatgtagttttttttccagaaccatcagctaataggaatataagaccattgctctccataattactggattacttctacatctttcattagtatttaaagagccaaagagctaacaatatattccagattttttacgtggacatgccttccttttggactcatcataaattcataggactgtaaggacagttgagtatgatggttctgggcacctttaggtaataacatcttcttcctacttttctctctatctctgctttgctccttttcctgaacctgcttttggctttcttcaactgctcctctggcactcttgtgtgtaaaaccaatcacctgcaccctagttatccccatttgtcctcgttcagcatcttgcagccccatcatcatgccctacaaagctgcacactctagaaattcgatggatcgaccaaaactctttgtaacaccacctgagggctcttctcgcaggaggatcattcatggcacagcggtgagtagctgttgggagcagctgggcaagtctgggagccagtgctgttcctgtgcagactgtacatgaccctgagctgtggtgtgggcgtaagagggggagaccgtgacatccaccatcccatctttcccattgatcatgaatctggctagctgggcagtagtgtcccctcacttcctcttcacttggggattttgctctccctaaaca

SEQ ID NO: 40900 - DNA, 1165 bp, Homo sapiens
agcagtagctggtgggatacatattaaatctgttatacagatcatttacatatgagattttgttgatgggatattttttatatacctttcatacagtaaacctggcagggtatatatttttataatcatatatttgttttacctgacttcctgctttacatgtatatggcagatatacactgttagatcatcagacatttttgaggagatggtaagctgcctagcttaattttttgcctccacactcaaagcttaatatatgacatttatttctgccactcagaacaagagaaaccagtgttgcattcgcaagctgttgggtaaaattcattttaatacgggttgtgaattataataaattgttcctatactggaacagagaagtttgccagaaaataaatgggatttgccaagttctcaaagaccagaaaatgatttgctatgatcttgagaacagcaaccaggtcttattcattttgaataccctttacttgacaacaatacctgatgtatgatgggtactctatcatggtttgctgaccaacaaacacatcatagaaactgtctacattaaaattcctgtcttggccagctgctggccatcgactagcactggtctgtaaaacttgatacgatcagcagggtgcggtggctcacacctgtaatcccagcactttgggaggctgaggcgggtggattacctgaggtcaggagttcgagaccagcctggtcaacatggagaaatcatatctctactaaaaatacaaaaactagccggctatggtggcacatgcctgtaatcccagctattcaggaggttgaggcaggagaattgcttgagcccaggagatggaggttgcagtgagctgagattgtgccactgcactccagcctggctggcagaatgagactctgtctcaaaaataaaacaaaaacttgatacattaaaaacttattcttttgtgtgttttgttcggtgagaaaaagaaatgaataacaactgtcttatatattaagtaataaacaaattcatggtgtgcctccataattttaacaatttatggcagatttagatgctttactactaatgatactttttaggatacaaggatccactgtaactcattttttccacttactctgaagcagaattaaatgtttttaa

SEQ ID NO: 40901 - DNA, 1022 bp, Homo sapiens
cactgtcagggcacttaactgacttctctgttaaaataatgctgccattgaacttatagacaggtgctaccaggctgctgccaggaaaagcatgtgctgaggtgtctgatttttctcttattacccaaggcccttgtgacgttagcaactgcaatatttgtcatataatcactggaacctggatcacaggactatcttagcagaagctgagactagagcacttagagattgtacagtcattgtcttctaaaacattgggcaaggaagcaggtgccaacccctcctttactttgatgtccatttatgtaaacttgctaaaacaggatactctcttgaaatatacctgaatgatgtaccttggaaaagattaaatgcctggtcagcatgtgcgtgtacagagtgcctgggtattctgaaactagactgacagggtatcaaaattttcccaggagatgacctgtaacttcttaaagttgttctgcattttgtaagagttaatgtttcaactggggactctgcccctatatctcatccctttattattcttattccaaagcccaaatttgtgaaatgtagtggaagctggttttcaaaagtcttttgctattgtttacattctttcaactcagacttgtttctgtcccttgccataatggccatatgaggtcatttcttttgcttctgaggttttttaggcatagatttcatttgcttactggaagtgaacatgctctgctgtttttctgtgcctagagtttcctccctggcctgatgggttccctgcaggcaggtaggttcttggggagcaggctgtctgtggtcaccagggctctcccttcctcctgtgaatatgctcattgctccctactaaggttgctttgacaagcaaaccagaactgagagaggatgaaggcagagctgctgaaactggaagatgagtaaaaataagaaactgactactgttttagggtggctgttatttacactctgttttcaagtccatgcgtatgtccttttccccc

SEQ ID NO: 40902 - DNA, 1033 bp, Homo sapiens
gttcatcctacctgagagcaccaggaggtataactgtggctgagctgaaaacctctggaaacagcggctgacccagaccttcctgccactttagtcacttgcccccaggaccccgtcaccaagttaacataggtttgctttctctcaaatccctgaggaactagaagcccagtttcctgaagagagctaaaaatactttctaccatttatcgtgccttgctgtgggccaggcaatgaactacctttctgtacgttatctcgtttaatttttacagctctgaaagtagatgttttccccatttacagatggggaaattaagacttagagatgttaagtgacatgctgaggattcagctggtaaatggcagaaccaggtttgctgactccaaaacacactcaaacctgcatgggtgctatgggtatgggatgcccaggactccacagaaaagcatagaagctgggagaaagggccttgaatacttgttaaacaccttctatgtgccaagtcttatggtagatttttaacatgtgtcttctcagttaatctttcaacaattctgtgagttaggcagtattattaccccatgtgacctacttagagaggccaaataactttctcgccactcaactggttatgtaccaagtctcacttttgaacccaggtctgtctgtgtcttttgctgttacaatgttcaccaaagaagtttttgaagaaatacagactcttaaaccattgaagaagaaaaagactgatatgaaagcagagagatggcctgaaaactttagaaatacatccaacctaagagttaggaattagcaatatataatcttagaccaaacagcctgacaattttcaaaaaattatttttattttacgaaatttaacctattactaatccaaatggcttaatggaaaataaaataacataaaataaaattaacctatcaattttatatgagcacagaaaaatttaaaatggattgtatatttgtctcatggtgaatatgactcagaaggtcttctgggatgga

SEQ ID NO: 40903 - DNA, 1052 bp, Homo sapiens
atgtaatagacatttctttcttaaagccagccacagtgactcacacttgtaatcccagccactgaggaggctgaggtgggaggattacttgaggccagaagtttgagaccagcctgagcaacatagtgagaccctatctcttaaataaataaataaaaacacttcctttctaagataaaaagaataaatgggctacctgggtcacagaattatgggctttttagatgttattttcatattctttctgtagtatggaaaatctaataaataaaagtaaaattaggctaaatcaatagataaatttactttctttttataagcaaatgtgcagttgatacctatctagtattaaaggtttatttgtagaacagttgagagagaaggtaatttaacccttctgtaaccaacctgtgagttgcacttcatataggaccttagaatactaagtatttgagaagaattgtggctcaggaattatcaggagctatatgaggttagtgggtttgatcggggaacctttcacattctttttagaattccactggctgctaaggcgtttgaattcctatggaactgatttctattacaaatgttattaaaacttgatgtggcatctctcactcattttttctcctgatattgcttctcccactattttcaaatctaaagctgctctgctttaatataacgaaccaggacctgctttgctttctgacttttggaacagattaggctacataggattcatgatggatcaaataaaagagttactgaataagaaataagacatttggaaggctaagatgcatggactttattctgtagccagtaggatctctgtatcagtttagggattttttttttaatttatgagtacagaatttcttaatgattttaacaaattggggattttcttttctctaacctatcgggaacatagaagtgaagagttgctgatactagaccagcaacttaaagatgtcagggcctgagtctctgttgttccctcagcctttccctcctgatagcctcctggtttccagatagatgct

SEQ ID NO: 40904 - DNA, 1035 bp, Homo sapiens
cagttataatagtattttggtaacgtctttaggcttctccaaatatgaggtcatatcatctgcaaacaagaataatttgacttcttcctttccaatttggatgcactttatttctttctcttgtctgattactctagctaggatttccagtactatgttgaatgacagtggtgaaagtggacattcttgtctttttccagatcttaaaggaaaggctttcagtttttcctcattcaatatgatactagctgtgagtctgtcatatatggcttttattatgttaaggtatgtttcttctattcccagttttttaggatttttatcatgaaaggatgttgacctttatcaaatgctttttcagcatcacttgaaataattatgtggttttttattttgttgatatgatgtatcacgttgagtttgcgatgttgaaccatcctttcattcctgggataaatcccactgggtcgtgatgaatgatctttttaatgtgttattgaatttggtttgctagtattatgttgaggattttggtatcagtgctcatcagggatcttggcctgtagtttgttttctttcttttcttttcttttttctttttctttctttctttcttcatttccttctttttcttttctttctttcttttttttttttttttgatgtgtctgtttgattttggtatcatgcctcttagaatgactttggaagtactccctcctccacttttttttctggaaaaaatttgagtaggattagcattagttcttctttaaatatttagtaaaattcagcagtaaagccatggagtcctttgcttttctttgctgggaaactttttattattactttgatctcattacttgttattggtctgttcaggttttggatttcctcatggttcaactttggtagatttgtgtgtctaggaatttatccatttcttctaggtatattattggtatatagttgctcatagtagcctctaatgatcctttgaatttctgcaatattggttgtaatgcctcctttttc

SEQ ID NO: 40905 - DNA, 1720 bp, Homo sapiens
ttggcttcaggctgttactgtcatcagctgtgtaactaggcaccgttacctaacctctgagtcttgtttttctcaaaccctgtaaaatggtgataacagtacttaccttggggttatcgcatgaagccccatattagttaggattgtgaacaataaatgaaactattggcacttgtaaatcatgtgttcagaggaggtgggtgggttctttttctccttggaagtgaaaaagtcacagagcctcagggctgctagcccaaagaggaggccagagctaagaaatctcaggccggacaggatggcttatgcctgtaatcccagcactttgggaggccaaggcaggcggatcacctgaggtcaggagttcaagaccagcctggccaacatggtgaaaccccatgtctactaataatacaaaaattagcagggcgtagtggtgcgtacttgtaatcccagctacctgggggttacctggggggcagaggcacgagaatctcttgaacctggaaggcagaggttgcagtgagctgaaatcatgccactgcactccagtctgggtgacagagtgaaactatgtctcaacaaaacccaaaaaatctcagcgaaatggagctagtatcctaatgacttcctgaactttcagatcaaactgaagccttttctacttttgggcctgtcagttgtgaatgcctataaatttctttattatttaagtcaacttcgttgggttttccacacacacacacacacacacacattgccatataggtacaattgcccaagccacctgtgaccgaatggcttgtgggatctcttggttcacacagtctttcatctcctccatcttccatttttccaaactcttaggtgatgtttgggactctacctttcatctccctctaaccaccaaacattctcaatccatttcctctgcacagataagcatgttcccttagacacaggtgcatgtgaacacctgagtctcaactcacagagacttctggttttcatttcattttagaaccagcgtctgcactgtcttgtccaaagtcagttggaaagaaaagtacataaatttgtgactgtttctcctttcatctcccttcctatccatgaatcgggcaggtcctggtgttcccagtgtcctcagttacttgtgctactctatgtacgggccctattccctctactcctatcctatcatcatgctgatgatgaacatcacagtttttaagtgttcctctaaaaggcagatgggtttaactttacagtgtgcaaatctaaatataggattctttctttgtatctgaagagggatccctaaaacttttggggtccacaaattatcaagtatatgtgtatgtcctaatgtgcatttttctggggaaaaggtgtagctttcatcatcttctcaaaaggacacatgacctaagaaaaggataaagtctctcacctttgtcagttgagaaaaataacaagtctccatcattttaggaggtttatttgtcaaagttaaggatatgtggtcaggagtcaggtctaatgcctttctccaaagatgattttgagggctccaaatttaaaggggaaagggtggtatattgagaagtacacaattttcatgtaagagaggggctagggaaaaacagtcattcatgcctttgtctggctcagtgaatctgctttcttttttttttttttttttttttgtgacagagtc

SEQ ID NO: 40906 - DNA, 1034 bp, Homo sapiens
gaatcacaaagaaaggaatgtagtatacttatctggccagggaataattctgtgtgggatgtctatgtgtgtataccactttaggaaattatgtagcatgtgtatgcgtttgtgtgtgcacacacagagcacttcctaagagattcttcatttgctgctccttggtacaaaagccatgagctggatctattgttgcaaatggatgaattacacttttaaaatggcttttggtagattccttgacaagccctggtgtatttaattttaaagtcaaaattggacccctgctacataaaaaatctataaatctaacttggctgttggtgaaaaatgcacaaaaaggcatctcagcattttctagttcttggtttggaatctagtggcaaatactactacctctgtgaatgccaggctctggtccatgaagccatggctgcctgtggccctctgaattcacaggaggaatctttccttattctgcagcctcacacccagactgtgatcctcccttcctactccagatgttccagtgagtagaggagaagagaaaatttgtgatgggaacttaatggcttcatctggagccttatctgagagctgcatgtgagcaaaccatggtggatctgtctattctctctgttctggaaggatgagtgcgatgaaagttgtcatgctgtggtctgatcattgcgtaacttaagtttgacatgtgcaatatataaaaaaagccatctgggcataaaaattggataaataactagggtaaaataaatgataaataagattaatgagacaggagtggaagggaaaatctgaaaaaatttccatttccagcattataatatttagttagtaagagaaatgacaaccaccatcatgagtggagcacttaccatgtggaagccatgagggtgttctcttaagggaggtatttaccccattttacacaaggtaatacctaaaccccagggtgaagtaactagcaagaaatatacacagctagcaaatggtggagcagctttcaggcccctctg

SEQ ID NO: 40907 - DNA, 1043 bp, Homo sapiens
gtttcatgttgaaatatgacatccaatgttagaggcagacctagtgggatatgtctgggccatgggagccgatcttatgaatggcttggtactcctcttatggtaatgagtgagttctcattctgttcgttcatgtgagagctggttgtttaaaagagcccgatatctctcttgctccattgccatgtgacacacctgtttccctttctccttctgtaaacgtcctgagccctcaacagaagcaaataccagcactgtgctccttgtacagtctgcagaactctaagccaaaacaaaactttgtaaattatccagtctcaggtatttatagcaacacaaaacggactaacacagatgggattgaggaaaagtcttaaaacattctgaaatgaatgttcttcacctgtccgatgctttgctgtcctaaagacttaatgctgtcactatccttaaaatgcccaaaaagtcatacactgaattggtttgctgttctttagtatcgctcttcatttagatttcatctctcaagtcacatagctatagggatccacctataacaaattggctcattgaggggaaaactctcttattcatctttatcagtaggttttttgttgttgttttagatggcgtttcactcttgttgcccaggctggagtgcaatggcccaatctcggctgactgcaacctctgcctcctgggttcaagcgattctcctgcctcagcctcccgagtagctgagattacaggcatgcgccaccatgcccggctaattttgtatttttagtagagatggggtttctccatgttggtcaggctggtcccgaactcccgacctcaggtgatccacccgccttggcctcccaaagtgctgggattacaggcatgtatatcagtaggttttcattacattgtgggtgagagaatgtgggaagtctggaagccgcaggtgcggagatcagagtagtgtggccctcttctaacccaaacacctggagaaggttcagttgtttctgtgatttagcatttaaggctaaaacctc

SEQ ID NO: 40908 - DNA, 1046 bp, Homo sapiens
aaaaaaataaacttttaaaaatgggtaagtgggatataaaattagatggaggaaagggagaaaaagatgcaggtgtgaaaaagagcaaagttttggtcatattgacacatgtgtaaagctcaaagaaagtcctaggtcagttaggaatgattgttcatcgaagtcaaattgtggaagggctgaaggccaaactgagaggctagtacatttttctggggtagggtagtgggggaagtgttgaggattcttgagaataaaggatattgattaaagcaggaataatcaggtagttctgtgcccatgaatcttgaaatattgattgcaagttctaacaagagctcagctgtgcctttagctaatgaaagcaaagttcctccctctgggaaagtcattctcttccattgatttttttttttttttcttttactgctttgggaagggtgcacctggagggatgagaatgcatgaggaatatctgcctagccagattagccaaatctctggagatcaatgaagggctaggtctactcagctggtcctcatttcaaagtagcaacgtggacttgaggatggactgaagaagagttcagcgacatacacaccaactttgagattcctgcagaaatccaggcagtcattagcatggcaataggaagagacgattaatttaaggttctgcaggggcatgtgtcaaaggattgcaggtaaaaaggtgacatatgagacttttccaagtttgagtttggctcattgacttattggaaaatattcatgaggaggacctgttttgttctttaccccaaagagatggggggcgggtcttgctatgttgcctgggctggacttgaactcctgggctcaagtgatcctcccggcttagctgttcgagtagctgggactacaggcatgcaccactgtgtccagcagaatcaggttttggtgggagaaacaggaaaaaaacctctctgctttagacatgaaaatgtgtggtacaagagagatctgtaagtggaaatgttcaaaaggcaactggaagtataggacta

SEQ ID NO: 40909 - DNA, 1042 bp, Homo sapiens
agggatgatgctggagtggggagcaggctcagatcccaaagggctccttatgaaatgttaaggaatcagcaaggagggttggggagccggggaaaatttttatctgaaataatattatagaccagcactggacctatgattctacagtaagagaaatgtcatttatctgccctgtccaatacattagccactagtcatatgtggctattagacactaaacatggctaccatggctgaggcactgaatttttattatttaaatgtcagtgttaataaccatatgtgggtagtagtgaccatattggacagtgaagctattgatggatcattccgatggctgtgtgaggatggtttatttagtaagatttattccataacatttttaaccctctgctatgcacttggcactagaatgtaggcacaaggcactaggaatatagctatgcctcagttggtcccagatcctgcctgcatggatctcttgcaatgcttgttaaaaattaaaatgcctggcccttctcagaatctggaggtgcaagctggaattctgtacttttaagtaaacccagatgattcttgtcatcactgcagtgtgagaaccactattctatgtttggccagttggagactggaggcaggatggccagttaggagactctgtgttgtggccagactgttcctaaactgtctaggagaaggagaaccataaagatccctagtgatcatgaatagctgttaggatctgaggccaccctcacagcaatggaagggatttagaaaatccccgttttcccaaagcaggaatgtatctaattccttaaaggtcgcactgtctcccttccatagatgggagctcccagcaatctggagtccatagggttgccagtcacccctcctgactccagcctactcctggcctcttggtaaagctatctcttaggggatatggggctcacaccccttcccatcagcccctgaaataaggcaatgagaatcatctccttagagacacacctttgacatgtcctatcctcagagaggt

SEQ ID NO: 40910 - DNA, 1045 bp, Homo sapiens
tcaagacctaatcacctcccaaaggcctcacctcctaataactgcaccttggggtatgatttcaacataggaatttggggaggatacaaatattcagtccatagcaccaagccatactgaaaattatatttttaatgttaaagtgaaaatgaagaatctatagctcaccagtctaattggcatacttatttattagatcactttgataatgtcatctcataaactaaaatttttatagaaacactgaattagtaaggtaacagttgagaaaaaaatttaatataataaattgtttgttttttgagaccggctcttgctgtgttacccgggctggaggtggagtgcagtggcacaatcacagctcattgtagcctcttgacctcctgggctcaagcaatcctcccacttcagccagagcatgccaccacacctggctaacttttttttttttttttttttttttttggtggagacgggatctcactttgttgcccaggttggtcttgaactcctgggctcaagcagttctccctcttcggcctcccaaagtgctgggattatagggataagcaccatgcctggcctataatagctagttgttaactctgcccgtagttaagttctatgattatctagcaattgtatagctttgatatttgtagttaagcctaagcctctttcattaaagatgtaaaaagatgacaggcctaatttggaaaaaaagatttcctgtgcattagcttgctgtctatagaagtaatagatactacttcttatttatgtatgttttatattttacaattttttatttcttattcaagtgattgttaggaattagctttcttgactcctacttcagggctcgtttgattataccttgttatctttgtttctgtgttaaattttgcatcacttgatacatagcaacttgccaaggtaaaacttaaagaaattgaaaatgaaacaattctatcaatcatatagaattatgaaggggatgactggaaaattcatgaagtattcttcaatgttacaaatttctggc

SEQ ID NO: 40911 - DNA, 1049 bp, Homo sapiens
tggttccttttgataagtggtggagtgtacttcctaagcaatgcaaagactgtctcttggcttagcttcatgccagcccgatgtatgcttttccttaatactgcagtcacgttgacacagtcttcagtattatctcccgtattgtggtgaaaagtatcaggcttacctgcattgttatcccatccccaccacccattacccaggtgggtcagagttagatgtaatatccccaatcactatttacaatgttttagaccatgggaaatgacttgcagtttctggtctgcagctcatttttgctggtctctagtggacttcagacatatagatttaaatgtataatacacacacacacacacacacacacacacactttaaaaaaatttattgctcttctcagatggtgccatgcccctctggatggttcttaatatcgtccagcatccaattcaagaattactggcaactccctgtatgtacaaatttctttccacatcaaagtgatgccataaatctctctgagctctctaatctctatcttccatacttagaggcggtgacagttctcaattctttttgtgaaatcttgttttctagttcttgttgataggatcatctacttcacttaattaaatccattgctgacatgagcatgctttactcttgcttccagatgaagccttgagctcagcagggtccttaagcgaaagcctttctaactgaaacacttcactttattttctagcctagataatgtgtagcctaggaaaatacttaccttagaatgagctggcagcttgcctgtagctggtgctctcagtagcagtaaatgtagtgaaagaagagaacatagaattcaggtatttaattgactattgacttgattgactagaaaactggctatgaaaggaaaccattcaaattcgtcactttgagcccgtttagattagtatcatatgaatttgtctgtcatactataaatataagtgaatataaaaaatatttgacagaatttgtctgtcataaatataaataagtgaatgtaaaaa

SEQ ID NO: 40912 - DNA, 1065 bp, Homo sapiens
tgctttgggttttgtgtgtgtgtgtgtgtgtgtggctagcttattttgctaagcataaggccctcaaatcttcctctgcattgtagcatatgtctgaattttcttcctttgtaaggttgaataataattgtgttgtatgtatataccacattttgtttatccattcatctcttgatggacatttaaatcgtttccaacttttttggctattgtaaatgatgctactttaaacattggtgtataaatatctctttaaggttctacttttaattattttaagtatatacccagaagaaaattgtggttttgaaaaatgtttaatagtaacatgcgtcatgatatttcatcaattaaacagcagatcataaaaatagggtgattctctttttttggaaaaaaaatatgtgcgtggtaaaaggactggaaaaacacagttagaacttggggttcttttatttttgttcctgagttttctattataacaagatatgtacacaaataagtagtctgaattggagggttatacccccaccagcagatcacagcagcagggtgattcagcattagtttcttcacatgctgtcctgctttgtttctgagttattttatgagtgttaatttcagaaatatccctagagataaaaaaaaacatgaaattctaattaaattacctttgtgtctcatagaaagaatcacaactgttatatcacaaacaaggaaaaatagcaagaacttgacttgagctcagtgtcttctttgttggaaagtacatattccagctagaaatgatcagtccaagaatatttcctttatttttgatttctgttgaatgtctcagtgcggatgcaaaaagtgaaaagtctttttttgtgaagacttcatcactctatatcaaagacttaactgcttttaagctagtttgcaatcaggtgacaaatacagtactaatcataaggcaattctggaacaaaaacctattgctttgaaagctcaaaagagaagtttacatcttttaaatgaaataatgaattaaatagtgcaaattatttgcccccttttggctgg

SEQ ID NO: 40913 - DNA, 1118 bp, Homo sapiens
aaagcagcctatatccacacacagatacacacacatatgtgtgtatgtatatgtgtctatagtatgtttccatggcagcattcatgccatcctttccaatatgctgttcccttttcccttttctaaatcgtgattccccaacctcagtgaagccttgatatgacagggttttctagatcgtctctccagtgtctgtaatcatgataaggtataggaataacaatactgatagctagcttatattgagagctagctagctcaatatagtataattacatatacactgatatatagatatctttatctattttctacttgaagagattgatgtaagttcctaagtattgtattctgcctctgagaccacactacagaattcctaccctccacacagaattaaacaaatgtgaaaacatgagaaaagtaaattttaaactttaaaaatgctgcgtgaagaagaattataatataaagtggaaacagccttgttaggccaatggttgtggccaatggttgtacatttatttcagaaagtaagccagtatttaaaaaccttaaagaatgtacctctgcaactcggagtgaagataatatacaatatattataaaagcctgcacaagatttgatttaagacgacaaaattaacaatacaattgctaatttctccttaaatcagaaattttaagcctttttttatagtagtgattatacaactctgaagtaattttgaaacttatgcttaagatttaaccagggcagaggcatatttcagcataaataatgttgccattataaactcttatccttcctatctcaacaggaaatgagcaattattgcttcatgcttcaatgcactgttttaaaatactgtttaatttgttaaaggtgtgaaactgtttaatttatctcacacgtttttttaaacaaatactgattggacatgcgctgcacgccaggctttgggcttggtacctcagggttctcacaggggaggctggaagtggaaacaagcacatgtgtaactgttgtgtagacagtctaattggtagaaaatcagcgaacaaagaagcagacaaattagaaaatgaacgtaaggtgatgtgctaaaaagagggta

SEQ ID NO: 40914 - DNA, 1058 bp, Homo sapiens
tctgtcacccaggctggagtggagtgctatgatctcagctcactgcaacttccacttcccgggttcaagtgattcttcagcctcagcctccctagtggctgggactacaagcgcccgccactgtgcctggctagtttttgtatttttggtagagacggtatttcaccatgttggtcaggctggtctcgaactcctgacctcgagtgatttgcctgcctcagcctcccaaagtgctgggattacagacgtgagccactgcgcctggtacttctctccttcttacctttaaagtatcccttttcccccatggttgacttttctcctctgtcatagaacccaacccatctgtctcatctgaaaatacagagatcgcctccattaattagcactccctttaaaatctttctctttttttcttctttcagcttgacttcaaaaatgcgtacaatctccacttgttctaataatgttcaagtacaccattctaacactaaaagcttttagatctttctgtcccattaaagtattgtctgatctcttgctttccttactgattgtaaaggtgcctaccatggaccttggaaaacgtttatcaccttttgttctttgccagtctttggagaatcctttgggctcattccctccatttcctcatcttgtattcagcaccttttgttctgttgtacttaccttcgttatcatgcagcttctttataatccttgtggtaagctaaaatttgtccctcacctcccctgccaccctaatatctatgtcagaactggaacatgtgcatggtaccttatttggaaaacgagtctttgcagatatgatgaagtgaaggatcttgagataagataatcctggatcatctgggtgtgtcctaaatgccatcacaagtgtccttgtaaaagaggcagagggcgatttgacaccacatgcatacacatcacaagccaaggagtgccgaaaacttagaatcttgaaggggcaaggaactgattatcttctagagcactgcctacaccttgattttggacttctggcctctagaactgtg

SEQ ID NO: 40915 - DNA, 1042 bp, Homo sapiens
tttatttgctactaaggactaaatatattatatttttgagggttgtcaaccattaaattgtttatcatttgcctggatatagtttcattatttcttacatttagttaagaggctcacattgctactgtcatggtctatatcgacaaccaagacagtcttattgatggaaaagcaagtgcatatattataatgaaatgtggtgagaactattgggaattcaacatgaagaagtaaatagtctctccaggagtgaaaaaaattcaccatcttaatgtgaccctcattttcaaaacaagtaaaaaatctagctctcgtacagagcagtaggatccaattaaatggtagaaaattgcccctttgtaatttagcactcaagctccttctcagaagtctggtttatttatgatgacaggcacaaagggaagattcagagcagtttaagaaaataacttatgtagcactttttctaaaagtaagctaacataaaaactcactcgagaatccaaggaaaaatgtcatctggttaatggtgggattatggatggtggaatttcaggtaacatttcttctttttttaaatctttctttttttttattgtctcagtcttgctcttaaataaatcacacggaggtagaaagagctggggagaagtctttcagatatgacgacctggtttaagccagtttccaaagagtatttgggacttttagtccaggactcaggggacacgtggtctgcattataaaaccagctctggcttgttgatgtctaaaagaaacttgacgtgacatgaatattttcagtaagaaatcataagtaaacagcagaaattcaagaagacaaagatcagcccttggaggaagatgtagattccaaaaaaggaaaaccaagattaaaggtgaaagagggggaaggtaaaaagaagggaaaaacacttcacctcccccgtccccagccccgctgtgcacactcccacacaaacaagaaatgaccaaagaaaagacgaaaaattgcagcaagatgaaatgcaatttactgtga

SEQ ID NO: 40916 - DNA, 1089 bp, Homo sapiens
atttgtgcagagaaatctgcattagagcaaaagaatgctactcggggatgaagtggtgaaaaagtggggaaaaaaacaactcactggggttataagtcatgagaaaatttgacctcagaagggtcccaaaagagaggaacgtattctctggttagtcattctgatgagctgagttgaaaagttatttcagaaaaaatttctgaagaaactcagaacttttgacatcccgaaatactaagtaggaatatttgtggaaatttttgcattttgtagttgatccttaggagcaggagacaattgtgtaaacacactgcaggactaggactcaggatgactttctttagaaggaggaagaagatgaaatgtgtgagaatgacaggattttcacaagtttaagacctttctccaattgaaacgaaagataaattaggggaaaaggctgaagtttttcatctagattcagaaatgctttcaaaaagcaacacattctaaatctatctaaagatgccacatgatcttgtcgaaacggtaatttgacaaattatttttaacaacaaaaatactcaagtgctacatgaacaattcaccccttcatcgttgaagagaactgctggttctcagcagtcctgcaaaacacctcactggcatgagaagaggtatttatggtcttttagagatctgcaggaaatgtttttgaactaatctgtattaactactgaaaaactggcaggacaaggctgggtgcggtggctcacgcttgtaatcccagcactttgggaggccgaggcaggcagatcacttgaggccaggagttcgagaccagcctggccaagatggcgaaaccctgtgtctactaaaaatacaaaaattagccaggcgtgctcgtgcacgcctgtaatcccagctattcaagaggctggagcaggagaattgctcgaacctaggaggcggaggttacaatgagccgagatcatgccactgcactccagcctgggtgacagaacgagactccatcttaaaaaaataacaaaactggaaggacagaaggccaatggggtgtggagagaggatgaccacaccttgtctcta

SEQ ID NO: 40917 - DNA, 1069 bp, Homo sapiens
tgtggtggcacgcgcctgtaatcccagctactcgggaggctgaagtaggagaatcgcttgaacccaggaggtggaggttgcagtgagccaagatcacgccattgcactccagcctggaagacagagcgagactccatcttaaaaacaaacaaacaaaaaaacccagctgaaatggcagatatgacccaccttcccacccagctcccaaccttcctcctcaggaagagctgggctctctgactgtgttgtttcctcggcaccatccctgtttctaatacagcccttattgatttgaaaggtaggtggtgtgcttaaaagtctcctcccccactaactgtaagtccctaagaacagggactatgacttgatcatctctgtagtgccagggcctagaaccttgcctgggacagggtagatgctaactcattgtggagtgcatgaatgaatgagggagagagggaacgggagaaggagggatggaagtaggaatgaagggaggcagagaaccaatgtaaaaattttttttgaactctgaagcacactgagaaaaaggctctagaatgaaaagtaaattaagatgacttaaaaaataataccagagatgtttctataaatttaactagaatccaactgattactgtggtcactgggattctatcaagccataaatcaaactgaaagttcacctatgtctcaagggtggcaaccttccgaaagtaggagtggcttggcttcgttcttttaagttcatgtgttttcgatattttacatgtttggtggcttcgattacaagaatgcaagcctaaatctactttctgtataaccacatccctttagcagcctgcattagcaaatcatactctgggccagaaaaagagaagcataccaatatgctttcttcctcttaagcagtcttcacagtttttctaggctgaggtcacatctttaaacttcataaaacattactgcctgattgttgagtgggatgggaagggagcgtttaattcagcacctgcaagctgcaactgccagcagatttctgcattcagaggcattttggtgtttgtgt

SEQ ID NO: 40918 - DNA, 1025 bp, Homo sapiens
tactgtcttatacatttgattgggggaatctaatgatgacttcctaatttttgttaggatactgtataaaaagttctccattgccgcacattggtggctacatgatagaagagcatgatcctgaaaacacacatggtaatactgatccccaaagcagatacatgttcagagagctgagaattgaccccgcagagtcacttgtcccagcttctgagatgcagtgagacaaacacatcaattagggccaggaagtgtgccttgagtttcagttctgcctcttacataatctctctgccatgagaaagctgatgtcttagcatagttttgagcattaactgagaaaatatatattaaagaagcaggcctatagtgggtgctttgctaaaatttatatattcacagtgtggacttgtgattttgagaggtctgcgtttcatttttctgttgcggcataaccacaaaaaagtgtagtggcttcaaacaacaacctgttattatctctcacaatttagtgggttgagtgggttcagctgtgtgactcttctgtttcacataaacttggttgggtctgaagccatctgggggtttgacaaagctggaacatccaataaggttcattcccatgactggaaggtggtgtgggctgttgggcctcagttcttttccatgtggcctctccacatgacccggttggacttctctcatggtatctgtgttctgagagggagcattctatgagtgaatgttccaagaagaaggacatggaagctatcagtctgttaggttttgatctcgaaattctcagaacattatttttgtctgcatcctattggtaaaagcagttacagcaccaactcagtctcaagggaaggggggtaactgaatgggagaaggggcatatgcatgcacaggggtaaggacttgatgggggccatctttggaaacatctaccatggtctgaacattcttgcatatgtcatctgggtgtgcacatgtacaggtggctggctgatcagcagggcagt

SEQ ID NO: 40919 - DNA, 1023 bp, Homo sapiens
atttgtttgaggggagccatgaaatatacaggtttactgtaaagcattctgtttttaagttagtttttcctcaactttttttttaaagaacacttaaattgtaaacataaagcagggtttctcaaccttggcactgctggcatttggggctatattattttttgttgtggaggctgtctgatgcattgtaggatatttagcagcacccttggtctctgccctctagatgccagcagtacctcccccacacacttcttctccaggttgtgagagccaaaaatgtctacagacattgattgcctaatgtctcctggcaacaaaatcacttcccacagagaaccactgcaataaaggaaaaaataatcagaaaaggaaaataataatggtgatagcatttaattgtccattagtgcctattatttacctaaaaaactcttaatccatgttctgctttgaaaatatatgtgttaaataattgtaaattaaggcaatataccagtttggtcttgaatattggaatttttgtttggggaaaatatagattttcccttcagcagtaagcaaatatcttagggatatgaaagtaacacctcatgacagatcaggaaatctgaagtatttagcagtgtggccaagaaagaacccaaatttattaatgtttgacctagggagtatttttcttatttaagcagtctgcttgatataaatataaatcatcatcattatcatccaaggcactttggaaaaatagaaacttctgtccctctcacaatttttgaggatgattataagttatgtttggaagccactgttcctatccacatggacattcatttatttgttttagttatataagtaaatcatgtttaatagagtgttccagggaggtgagattgaataaccataaatttggggtcacatcgctaactgtgtacattcatgtttatctgtaaagaagtgaagggagaaaggagaagtgtgtgtgttcagttttccaaggggtgttggataacaaccttttac

SEQ ID NO: 40920 - DNA, 1028 bp, Homo sapiens
tatgtatggtaacattgtctccctcacgggatggatgtgatgagtatctgaggtaatgcattaaaaaggtaagcacactgtgtgtcttgtagtaaatacttaatatgttagggattattcaataatgtgcattattattttaacaaatatatctttaaatattaaattcccttagtcatatgtgagaaattgtgttggcttttaaaaaaacaaacttaaccagatcagtatgagaaacttaaaacaggctcagcagctaactcattcttccatctcttccaacagacaaaaaagtttggttttttagtagactggaaaggcctgcattgttttttcatttcctcaactgtttttcaattcagaatgagttagtccaaaagagaattagtgttgagaaatgacttctctcagggactagattggtctggtccagtcagaactaatgccagaccaaacccaactagatgaaattggataaataggagtaagaataaagccctggatttcaagtcagaaaagtggctgagcagatatttattggataagccccaacttggtggtggtgcgagggaaaaatataggggaggttagttacttacaagttcactgcaggccactatgtgttatgcctggctctttaaaaagaaaaatttcaattagaagatttcaatgaacacttgaaacatcacctgcaagaattatcaaaatgtctgtactcagcttaaacctgggggatgcggctccttgctacggtgaaagttggaaagcattaagaaaaatagtcattttatcaccactggaagccattcgggagggagattgtaatcaaatatgttctgacaaaaatacaaaggccttgatttggtacttttcatttattcagtgtggatttcttatgctggttctgtttgctgtgcagatgaaacctttgtgacagtccccattcctgtccctgtatctttaacatggggaaggtgttagatcttctctgagagttgttcttaaggaaaagatccagatgctttaat

SEQ ID NO: 40921 - DNA, 1025 bp, Homo sapiens
tgattgtaaatgatccccctaccttcaagattctctgattgatagaattttttctttaattaaaaaattttaaatattccttgagttggaagcactgatcaataagtggattgcttagggaggttggaacgaatagattcagtcccaacttcctcttttaaattccctcttcctcactcttcctgcaacacttatttttacagttgagttttaaaaataagtaatatataaaataatttctgtagtgtggtttcagatttaaaaattcctgcagacaggctgggcttgcaaccccatcagtcgatggtcagagccctttgctttttgagaccatttttaggtgagcttggcttgcctggatacagtgtgcagtgcattcttcctgaattttgcaattctggtatctgggtgtattttctaggtgtgtcagggtgagtgtaatccacctagggtgtggaaaaagccaagaaagggaaattaaaagaggttcctatccagtcatgttaatgatcttccacttgtactatcctgtgcttcgttgttaacctcgaaaacatactttgttggctgcaaaaataaacaaagggaaactcagaagtgtgtgagcatgcgtgtgtgtatttagagatagttctctggtgaagaaatggaatcctgctgatttaaatggcacaagattgtcttcgtgataatgagtcatcatataatcataatagatggttgtgtaatggggtgacccagccagtttttccagtgcaaagactcaaggtaattaacctgctattatcaactgcttttgattaagttactttcaagaggaaatacttagatttgaaacataaactctgaatttcatcaataaaagtaaattgccaagtgagactttgaaagcaagttccatgtggataccctctgtttccctattctatcctttctatcgagttgaaatgcttcagtgaaaatttgcatttccaaatgccaccccacccaatttccaaagtcaagcaacacctcaatgcttaatc

SEQ ID NO: 40922 - DNA, 1088 bp, Homo sapiens
agtatatataatgcttatgtaatatagaatggatctccaatgatttttttgtgtgtttttcacatatttggcatatgtgtgtgatgctgctcagtgccaggcatctcttacacacagtagtcaagaatcttttttggcctctgcctaaccagattcctcctgcctccaggtagattttatacttatttcaaggcagaaacttggtggaaggaggtaatctgtcgctaatgtgtatttattccttcatgcatgtatgcattcataccctgggatttttttcttccctttagctgtgttccagatcatctccctggtaatttaccccgtgaagtacacccagaccttcacccttcatgccaaccctgctgtcacttacatctataactgggcctacggctttgggtgggcagccacgattatcctgattggctgtgccttcttcttctgctgcctccccaactacgaagatgaccttctgggcaatgccaagcccaggtacttctacacatctgcctaacttgggaatgaatgtgggagaaaatcgctgctgctgagatggactccagaagaagaaactgtttctccaggcgactttgaacccattttttggcagtgttcatattattaaactagtcaaaaatgctaaaataatttgggagaaaatattttttaagtagtgttatagtttcatgtttatcttttattatgttttgtgaagttgtgtcttttcactaattacctatactatgccaatatttccttatatctatccataacatttatactacatttgtaagagaatatgcacgtgaaacttaacactttataaggtaaaaatgaggtttccaagatttaataatctgatcaagttcttgttatttccaaatagaatggactcggtctgttaagggctaaggagaagaggaagataaggttaaaagttgttaatgaccaaacattctaaaagaaatgcaaaaaaaaagtttattttcaagccttcgaactatttaaggaaagcaaaatcatttcctaaatgcatatcatttgtgagaatttctcattaatatcctgaatcattcattttagct

SEQ ID NO: 40923 - DNA, 1050 bp, Homo sapiens
ggggaagggcgtattctacagccctttaattaggtctcctgttttggcaagcctctgctcctgggctgtaagcttcacaggtgcttctcattatttccttcccactttaggtgggacaggatgtcgagaggggctagaggggctagagcaagtagttcccctctccatgtggaaggctagtgggagctgaagctgggaatttcccttcccccaggtcagttaggctctggtaaaataaattctcctgagggcaggctgtgttaagaacagaacgttctggtgcatttcaaaatggttgcttcctcccatccctgccagaagcacaaggggattttctctgattttcactctaagaacctaatagggctcctggagataatactcacaaaagcgcgggggccctccgtgaatggcacccctagagtttttaattctcagagcttccagcaattcatcaattacagttcaggttttctgcccccagctggttcctggaggtttctgctcaggtaagttgtgattctctgtgtctgtctgtctgtctctccaactttggggacagtggtttgtcctgtgacctcagttctttaatggacttaagaagagttgatttttctgtttgttcagctttttactattaggatgactcccaagttctttacaagtcagggtggaaagcagacttcatttcctttttataaaatgataaagatattttctggtccactgttgcatttagtgaaatgtccacattctattcactaattctatttcccattcttaactttttcttgctaaagttattttttcccaaactactttttagtggttaacggtttaattcctctatttgcgaattttcttcaactccactttttcttggagtgctaacaaccagattacttgtgtttgccagttgtgtcaacatttaaacaaggatgtactgtttacactgttgttacctatgttctgcctgcaaatcctgctttgtgagttgaattggctgcagctgcatgtttggttaatggcgtcaggaaacaatttacagag

SEQ ID NO: 40924 - DNA, 1028 bp, Homo sapiens
cattggggacagtggctcaatgtgatacgttctggtaggcgctgctcttcctggcaaggagcgcagtgtggcagtcataagacagagtatattagcaagagtcggattaaagtgactgacagtgcagtcaggaggaggaatgctatgttctgtggacttaggatgcacagactagctccatgggactctcttcctaaagatgttttagtttattctaatttttttcattttacagaaaaaccacagttatacagagcaatttctttggctgcttaagtgtttctataaaagagtacggccctttaagcgggagcaaaagaatgacttatgcttgttaatataccactagtgccatctactggcatcagaaatcgttgggtttaaaaacaaacaaaaagggtaaaattttcaaagtaatggcctgaactgttacactttttatatgtggtcacctttaagagtaaatatgatttagcactgaagttttacttactgcatcacttttctgattggaaacagctgactactcccacacagtgtcatcgtaaaagctgatgactgtatatgtgcaactacgttaagccgtaatgctgtataaaccttttgcttccttctagacttctctaccacggtatttccaggtaactctaatgaatgtccttatgctgccaaggccttattttgccctgaatgaagatcctttctttttttttaacctcctgaaacaaagcatcctgtagaatcatttgattctgtgtgtgaatgatcttatgtcagcactgctttcccaattcttggactctccctgaaaagactattgcataagatgaaaaacatagtgctgtacctacctgaaactcttcatgcaacacattaacatctaacttggtgtggggggaacgaagccggtgaattaatgttcttgtcaagaattacgctctttacgtcgctcctctagtgttggtataatagatcctaaagactgccccttttaacatggactggtttcttcagtctcattagaagtg

SEQ ID NO: 40925 - DNA, 1037 bp, Homo sapiens
tattgcaatacagcaagtcacacgaattttttggtttccagtgcctataaaagttatgtttacactgtgctgtggtctactaagtttgcaatagcattatgttaaaaaaaaatgtacagtgtaaaaatacctgattgctaaaaaatacaaaggatcatctgagcctacagacagttgtcatctttttgctggtgaagggtcttacctcaaatttgatggctgctgactgatcagggtggtggttgctgaaggtaggaatgactgtggcagtttcctaaaataagacaacagtgacatttgccacactgacagatccttcctttcttgaaagatttctctgtagcacgtaatactgtttattaacattttaccgacagtagaactactttaaaaatttgagtcaatctctcaaaccctgctgctgctttatcaactaagttcatataatattctgaatcctttgttgtcattttaacaatgttcacagcatcttcactagtagagtccatctcaagaaagcattttcattgctcatctgtaagaagcaatgcctcgttgttcaagtttgatcatgaaattgcagcaattcagccacatcttcaggctccacttctaactctagttccttgctgtttctaccacatctggagtcacttccttcacttcagtcttgatcctctcaaaagttatctacgagagctggaatcagtttcttccagactcttactaatgttgatattttgaccttctcccatgaattaaaattgttcttactgtgctagagtagtgaatccttttcaggtttccaacttactttgctcagatctatcagaggaatcactatctgtggcagctttggccttacaaaatgcattacaaaattaagacttgaaagtcaaaattactctttaagccatgggctgcagaatgaatgttgtgttaacaggcatgaaaactttgtacatcttcatcagagctctggggtgactaggtgcattgtattttttttttttttttttgtgtgtgtgtgtgtgtgt

SEQ ID NO: 40926 - DNA, 1082 bp, Homo sapiens
gagattatattatcactctttgttcatggttaagtctttcttgggtaaatccaagaaagtaatatttcaaaacttctataaataacagttcaatgatatagtaaggtatacaagtaatatacagcaatcaataactttcatatctacaaagtcaaattagaagatacaacaggaaaaatctatttaaaatagctattgcaaagtacagatacatttaataagaaaaggacaagatctatatgaaagaaactttaaaaaatactatatggtcaggcgtgggactcatgcctgtaataccagcactttgggaggcaaagttgggtggatcacctgaggtcaggagttcaagaccagcctggccaacatggcgaaaccccatctctactaaaaatacaaaaatcagctgggcatggtggtgtgtgcctgtaatcccagctactcggcaggctgaggaaggagaacccaggaggtggaggttgctgtgagccgagagtgtgccactgcactccagcctgggtgacagagcaagactcttttctcaaaaacaaaaacaaactatagaacacaaataagatttgaataactgaaaagacatatcacatcctcagaggcgttaatatcagaaagctcaccattctgcccaagttaatttataagattaacacaataccaataaaaacgtgagtagattttttctgggtttttttttttgtttttttttttttgagacagattttcacgtactctgttgccaggctggagtgcagtggtgtgaacttggctcactgcaacctctacctcccaggttcaagcgattctcctggctcagcctcccgagtagctgggactacaggcacatgccaccacacccagctaatttttgtatttgtagtagagactgggtttcaccatgtggccaggatggtctcgatctcctgaccttgtgatctgccctccttggcctcccaaagtgctgggattacaggtgtgagccaccacgcccagcctaatttttgtacttttagtagagatggggtttcaccattttggccaggctggtctcgaacccccggacctcaagt

SEQ ID NO: 40927 - DNA, 1047 bp, Homo sapiens
gtcacctaaaacacaggagagagatcagagtcaaagccggggaacaagtagtgagaatgtggagtgatgagattggggatggagagggccagtggtgaggaggggggcggttgaggcttggaagctttactttagggcactgggagggagaagtctgcaaaagagcacaactggggaagaagaaagtttagccaggatgaggcagtcatcatggcgctcacaggtggggagagagtcattgtaagaaaaggctattgaatcggttgttaggtggtgattggtgacctttgaaagggcagtttcaaggaagtctttagattaagaagccagatttcctgagataagaaggatttttataagcagaaaaacaataaaagtaattgttttaaagaaataaaggtgagtgaatgatgccaacagaacagagagggaagggatagtattttgaggtggtggcacggtacagctgatattattacatgttttaaaaactagagcttatgaaaacagggccgtagacaaaaggagtcagcaggaggggaaaggattacagatatggaaagagaatgggaggatgttctctgaagaagcaggaaggaggcagtcaactcagggcaaagcggagggtcggaggttgcggcctctgtctcctagagggaattggggaagcgtgttatgagacggagccagagatcgaggctgttcattacatggtgtgggagccttgcttgcaatgtggcccccgccatattgttagttctttggtgaaaaggatgactttatttggtgctctctcgctcaggtcttgtgaatttaattaggttgacttttcaaagacaaatgatattattaaaggcttaaaaaaaatatgtgtggtatttcatttggctctattggaatttttgtcctgagggaaagttgcccagccgggtgaaaccacggattaaatgccctattgagaaaaagaaaagagcagacaaaaatatgggattaacagaatgggaattatatacaaaaaggggctatttaacttctcctattgaattt

SEQ ID NO: 40928 - DNA, 1028 bp, Homo sapiens
ctacaaaatatggattggaatatggcccgcttagctcagaggaggaatgtaagaagcataaatgaaaagaaaagtctggcattcgttcacaggctcttgtgtgaggctttctaatcactaatgactttggcttagccagtagaagtatgtggcaagtcacttaacttcccgaggtcccagctctttcatctcaactacacagatggtaattccctaactcataagagcttcatgaactttaaatggggcaatgcatgcatagcttgcctggaacctggctagacccaggaactgttaactactatttttctttctgtcatgtgtgtgtgttcaatgctacacagcctctgaaaatctaactggtatttgtcacgctggagcctcaaagaggatcttttcactttgggttttcagtctcctaagtggattggtaaggggcgtagtatgtacccacttctttccactgttcatatgtaaatgctttcaacaaatgcctggacactggtaatccggctgctctctgacttgccatttatcttgagctataaattcagccgctattcatggatgcaaatgaggggatttgttttcatggtgctgcaagcctcataagccttattactcttttgtcacttcagattaaaaaaagaagagaaacttttttttaaattttttggggcagggggcacttttgccctccttcttttagattcccagactgcagtttgtgagcaaactcagagcgatcctctaaatgtctgtatgatttttggtgtttcatagtggttttttttttcccttctgtacttaatcttagtttcccaaatatgtaaccatgaaagaaatcctcatctgcacaaaatccaatgcagcctcccagcgctggtcttgacctcatatgtcaataggataaagaggaggagactgaagagcgacggctcggatttgtgtgctgcctacacagctggctcagtttgctttcttgtttaaacgccccaaagcaaagacaaagacgctaatgttagaca

SEQ ID NO: 40929 - DNA, 1030 bp, Homo sapiens
aacagtgtgccttttcatgttttattctcagacatacagttgtaaacacaagggctttttaaaattattttattattttttttttggagatagagtctcactctgttgcccaggctggaatacagtggcacgatcccagctcactgcaacctccgcctcccaggttcaagcaattctcctgcctcagcttccggagtagctgggattacaggtgtacgacaccacacctggctcattttatatttttagtagagatggggtttcgccatgttggccaggctggtcttaaactccttacctcaggtgatcagcctgccttgtcctcctaaagtgctgggattataggcatgagccactgtgcccggcccacaagggatttttttttaatatgataactttatatttgacattaagaaaaaccccttttgttgtcattgctcgaggttaatgctgtgaagttttcagatagtgatacctataatttcagcaatttaatagaggttggtatgtgtgctgtttagaagtgctataacattttgctgcagtaagtacaagggtatggaaaaaataggttttaagcctatgtaaacataaattgaagacgatttaaaagaaaaacaaatcatgcccatctcacgtaattattaccttgctaaatgtataagttccctagagtcactgtaacaaattaccccaagcgtggtggcttaaaataaccagtttattctctccctatttaggaaacccgagttctaaaatcaaggtggtaacagagtcctgctcccaccagaggcagtatgggagaattctgtcctgcctcttccagcttctgctggttccaggtgttccttatctgtgacagcatccctccagtctgtgcctccatcttttatgaccttcactgtgtctctgtatccttttctgtctctctctctttttttgagacagaggtttgctcttgttgcccaggttggagttcaatggcgcaatcttggctcactgcaacctccgcctcccaggttcaagcaat

SEQ ID NO: 40930 - DNA, 1035 bp, Homo sapiens
ctgaagccatagagataattggtatagactggatttgaatccacttctcgtgacttagtcccacactcttcatgacacttcaacaactctgctcaatcaaagagtacaatttaacctcgttttaatgccctggtgtcactgtgactagtcattggacctggtgatgccctgatggccgctgaatattgtagagatctttgctttggcatgaaatggatctctgcagtgttctttaacttccagtgactgttttgtatttcacttttgctggaagcctttctctttcgacagtgtacttgcacctgtctctggtagtccccaccactctttggcttggtgttgctcctgtgttaccttgtgtgggggggtctgggtaacccagtgtattgcaacagtattgactggaagatgcatgagatcccgagccacaatcctgtgggcagtgctgtctggtgggaggccattttgatttcttctttgccatattttgagtggttgaatttgtcagcaaaatgatccgttgataagtggatgttactctaatatgtaactatgttttttacatgtttatcttctgttggcttttcgttttggtacggtggaataaagtacatgtttgtgttaacatcatggaccggtgactgtatttggccatcccagtgttttctgtaaacattacattttaatcactcctgtaaaaatcactccgagttttcaaggaggattatcatctactgctttgtttcacttactaagcaagtatgcttttaaaccttgatttcaccattaaccactttctctaattacttgttgattgtcactctcttttctccatctgatatgtagacaccaagtttatttactcatttttcatttggttgaaattgcatcccccagatttctatttcatgttcttgtttgtatcctctatatttaaaaagtcaagaaatagtgaaggtaagacgtatttcaattatttaaaaccacttctactctactaaacatttttggccaaatactttaaacgatatttga

SEQ ID NO: 40931 - DNA, 1063 bp, Homo sapiens
cctctctttaaaatcctctttgaagttggactgaattaacaaatggaaggcttggcaaagcagtttactaattcataactctatccctcagctttctttgtgttgctaaatactataatctttgacccgaaaggaagaatactgctaacaagtaaatatttaaaaggtcccatgaaatataatgtgcatgagtttgtgcctggggagaccgtctactggaagaaagaaatgactcacttttcatctcctaatgaaagtgagtttgttgttttacagtaggttgaaaggaagtattttgagtgctaagggctagatttccttttatttttaagtttagttagccgttggcctcactgatttgagaattgcatgttaagtcataattcctaagtgcgtcagcactctctctctgtatgagtgaattagcatgattgtgaatgaatgaactctgtgctaccaaagcccagcatttggaacagtgagaggaaacggaaacgtgactcactgatgtacttgaagactatgaacggggaatcacgaacttcagagccagacctgaagcatgggagagtgggcagagcctggactggggcaaggacaacgggattctagtcctagcagtgctcctgactgcctccgtgtcagtgctggaatcacagaacccgtctacctcctgtgattaataggacatgtgaattatttgtcactcggatcctttacagtttcaggattcaataagtctttgaattctactgattctctggtttgtgtggaagtgggtgtgtatgttttaatggctttcagatgggattcatccaggctccattaaatcaactttatttttaattttgaagtgaactgccatgacagagtttggctaggaaagtccataacagaaaatgaggaagcaagtaaactgatttataaggctgtgggcaactgacttcctgtggctgtggcatttggtatatagaatgatatatatgtgatgcttttggagaaaggttaattattgtctacaggcaaaatttttgctccatcacaattgcttttaaaaagctga

SEQ ID NO: 40932 - DNA, 1048 bp, Homo sapiens
gaaggcctgcagaggcctacaccctgtgatgtatattgtacagtaggcttggcttcagcatagtgggaatctctggttttgaatttctaaagtgacttgcaaaggtccaagacatatagtgaaatgttgagttgcaaattagggtcatgtgctggatggggcttgtgctggggaacagggtctgggctcacgtgtgaaccagcagccagctaaccacagcaggcggcccctgaacgattttgtggtgcactccttgttttaagcactttgctcctttcaaagtacatttttctttctttgtgaaaatcatctagaaaagaaaaagtccacttttgagtgagtgatacagagaaatctgtaaacttggggtctcattaaaatcttgctatgtagccctttccttgtcagtgtcaacgtgctcaatttaaagtacacaccctctcaattatttgtctgttgtctagctcttcctaggaagcagaagagtggttttcagctctcggtgctgcttattggggatcgtattgtattttgtagatttggcaatgggcccatacatctgtggagtgaaaagctccctaggtgattctgatgtacagccatggtcaaaaaacattgaaatagacaagtgcatgaagatcaaagagttgagggaaaacactcaacgatgtcacgtcagtccccaagaacaggtacaggggctgtttttgcttagagccggggaggagttgcagaagccccgcgaaattggcagtcctattggcagtaaattaagctctcaaggattgagttctacgtagcttcattctcccaaatgactgaatagatactcccaccttgtcctgaaatagttgtgaatgagagtctaactgttctttgctactgaataccaaaaatactagtactttagccaaaccctttctctgttgcttagaagctgctgaatcagtgtagtgcatttctcctattttatccacatcccccaaccacataattaatgtgatcaaaataaactgacccccaccacatccctggaaatttacagcaa

SEQ ID NO: 40933 - DNA, 1053 bp, Homo sapiens
cacctttatcattatatggtgaccttctttgtctcttatagtttttgtcttgaaatctgttttgtctgatgtaagtatagctactcctgctctttttgtttgtttttgttggcatggaatatctttttctatccatttatttttggtctatgtgtgtctttgtaggtgaattgtgtttcttggaggcaaccgattattgagtcttgttttttatccattcaactgctctctgtcttttgattggagagtttagtccatttacatttcaaagttattgataaataaggacttactcttgccattttgttgttttctggttgttttatggtcttctccttctttctttccttcctgtcttcctttcagtgaaggtgattttctctggcgatatgattagtttcttgctttttattttttgtgtatcttttatgtttttggtttgagtttaccataaagcatgtaaatattataacccattattttgagcagataacttaacactttgcataaacaagcaaaaatgaaactaataaaaactctatgtcttaactttatccccctgctttttaactgtttgttgtttctatttatatcttattatactttgtgtcttgaatagttgtagttattttttgtttggctcattgtttagttttgctacttagaataagagtagtttacacaccacagttacagtgtcagaatattctgtgtttttctgtgtgcttactattaccagtgagttttgtacctttaggtgatttcttattgctcattaacttccttttccttctgattgaagttttccctttagcatttcttgtagaatagttctggtattgaaatccgtcagcttttgtctggggacgacaaatttctttctcctttatgtttgaagaatatttcaccaggtatactattctagggtaaaagttttttccttcagcactttaagtatgtcatgccactctctcctggtctgcaaggtttccactgaaaagtccactgccagatgtattggagctccattgtatgctgtttctttttccttgc

SEQ ID NO: 40934 - DNA, 1033 bp, Homo sapiens
ctcttcaaagtcttttcctgactcatccaggttttggtatttttttgcatgtgtgtataaaattgcaaattaattagagaatgtatacagcctgaagtgctcattttaatctaacacttgaggagaaatataaattaaaaattttaatttttaatttttgtgggtagagaaatacaaattcttgtagaattaggtattctataacagagtctggccaagtattgacaactcaaaaatttaagtgatttgattctctaaactcttatttttaaaaattgattttttttgcatgaatttgggaacataatatgggttataagagaaagtttaatgagatgtcacctgaatttttaaaaagaattcatttgtaataaatgtaacatgataccttaaattttttctttttatagtctgaaatgatatgttagagaacatggaaatttgttacttcagaaaactttttatgtgagggaagcattgaaatatttatagaaatcgaagaaaatataggagacaggaggtggggactgagagtgagggaatatcttttcaggcaggagtagaaaggggcttcatgtcttcacaggccagaggaattcagcaaagaatgagggacacttgatcatttaagggaggaagaaaggttgggtgcagtattcctgggaaggtagtgatggctttggatagggcatactgaaagcagaggagttccccactgccatgattttttttttttttttttttttttgagacggagtctcactctgtcacccaggctggagtgcggtggcacgatctcagctcactgcaacctctgccttccgggttcaagcgattctcctgcatcagcctcctgaatattttttctttattcagtttgactttccatgatttctaaaccatttagtggagacacacaccaaccaacactgtacgtttcacatgcattccttgaagcttttttgcccgtgccattctttcctcttacatggttcttcatcttctctgccttaagtcaacattttataagggt

SEQ ID NO: 40935 - DNA, 1061 bp, Homo sapiens
ctctttgctggggctccagcctgctggcctgctttgcagatttcagattagccagctccgacaattgcatgagccaattttaaaaataaatctttctttttctaggctgatcagtagataaagatagagctacagattggtctgtatgtttgcctatatctttctgttgatttgtgtcatattcgttctgtttctccggaagaccttgactaatacagattttcacatagctagagtcaacattgtgttttctatttattgagcttgttctttagcatttagctccatccttgattccttgagtcctttgacagacaattcctctctttccaggcagttatctgattttccttttgcccagtagtgctctgtgtgtacctctcttaggccattatgttattgtaattcttggcatatgtgttttttccctaaaactaatctgtgaacttcttgcacactagaagctcctactagcttgtgtggcttgggtacccagcctacttggcgcgtaagaatttgtcactgtgtgtttgttgagtgaaagattagctctgatctaactcttaagtatgacactaggaaagaaatgaaaaggagaaacattaaaatgtaaagtaaatgtgaccaaaaagccaggagaggttggcaagcacatggtgaatatcttctggatcttcccctggaacgcaggtgtgaaatttattgtggtgatctctggaacaccacagtgaccattatctaatccgcatttgtttgtttttcaaattgtcaatctttatccagacttgactttgcccagtgatggctagataaagccagactttaaaatatttcagagacatttcaggaaaacacagaagtatcaagaaggacaaataaatgcttgtaacctcattatctgtggttaactatgaacatgttttgtgtagattttcctagaatgattttttttctttgagatagagtcttgctctgtcacccaggctggagtgcagtggcacaatctcggctcactgcaacctccgcctcccagattcaagcaattttcctgctttgacctc

SEQ ID NO: 40936 - DNA, 1065 bp, Homo sapiens
ttttatacacacaatttctgggttatcctgttgctcttcttcattcatatatataatccaaagtattattttcctcattgttctgtatgtcttttagctggtttcttttttgtgagatctcagttacatttcgttgttgttagggaagtcttttgatttgggaaaaaagattaattaacattggaataaattgttaactcttaatttttttattgcttgatttttaggaatagtttatgagcttcccaagagatgattaagcctttcctatattaagaaaggtaaagggggctgggcacggtggctcatgcctgccatcccaacactttgggaggctgaggcaggcagatcactgtgactcaagagttcaagaccagcctgggcaacatggtgaaagcccgtctctacattaaatacaaaaattaaccaggcgtggtggctcgcgcctgtggtcccagctgattgggaggctgaggctggagggtcgcttgaacctgggaagcagaggttgcagtgagctaagatcacaccactgcactccagcctgggtgacagagtgagaacctgctttaaaaaaaataaaataaaagaggaaaagggaggagaggcttctgttaaatgtctgcaacaacatagttgggtttatttaaaagtaggcattttctgccttttaatctagatatccacatgctaaatgtgaattgctttctgacttaggagtatgtttgtatctagaactgtgtttgaattttagtgtggaatgttttactctgagatggtgacttcatttgctaagtaaatgcaattggtcatgagtcctgtttggtgtatttgatttcactgggttggttttaacaacctgactgcggtgtactaggtggtgctgcgacagtgcagagtgacactgacagacatttgaatagagcagccgtggtcagtggagttatttttctctagtggttagccagtttaagaccaaagatttgtgctgaattactacagaaatgactaaaaagagcattattcataagtatagactcagacacataatcattgaattacgta

SEQ ID NO: 40937 - DNA, 1051 bp, Homo sapiens
aagttatccaaaataattttttgtcatgccttggggagaatgcatgttattattctgttcattgaagactcctactttctttccctgacacccccaggttgaggggctgttcccatggcattggttcacctcgatcaccacatttaccaaggggacttctgcacccctctgccagacagcaggacctttgaggtccaggatggccgagtctttgtttttctagagcttagaacaatgcctggatgtgatagctcaatagatgtttgaattgaattaatacttagtgacttagtgcttactgtcaggaagaataactataaaaaccttagggaggaaggaggatggatcttttgaggcaggtggatcagttgaggccaggagctcaagactagcctggccaatatgttgaaaccccgtccctactaaaaatacagtactaaatacaatactaagtacaagtacaaaaatacaatactaaaaatacaatactgctaccaatgtaagtgatcgagacaattactttacaaaaataaaaatgtaaactttctgcctttaatgtttagtgcttaaccaccaatctctgctcctgtctgtaaaagtcagacttcattaattttgctgacacagtaagttctcatggaaaatagtgacaacagccagcaatgtgaatagttacatcttggctctgtaaatatcaaaacagactttgctaagcagaaatcaatagacactcgatcaaatagtctgtttctatttttttatttttattttaatttttttgagatggagccttactctgtcgcccaggatggagtgcagtggcgtgatctcagctcactgcaacctctgcctcccgggttcaagcaattccctgcctcatcctcctgagtagctgggattacagatgcccaccaccatgcctggctaatttttgtatttttagtagagatggggtttcaccatcttgaccaggctggtcttgaactcctgacctcgtgatccacccgcctcggcctcccaaagtgctgagattacaggcgtgagccactgt

SEQ ID NO: 40938 - DNA, 1057 bp, Homo sapiens
ctcacacctgtaattccaacactttgggaggctgaggcagttggatcacctgaggtcacagcagcctggccaacatggtgaaaccccatctccactaaaaatataaaaattagccgggcatggtggcgggcacctgtaatcccagctacttggaaggctgagacaggagaatcgcttgaacccgggaggtggaggttgcaataagccgagatcgtgccactgcattctagcctgagcaacaaagcaagactctgtctcaaaaaaaaaaaaaaaaaaaaaaaaaaagacttcataggagggaaggatgaacatgtactgaggaagttgaaagtagatggagccttgaaagcatatgttgaccacagcaccctccccaccaccgtgtccccataatctaacatcttgcactggccagcattaaaggacacatcaaagatgtcaagaacacaggaacacaatgaggccatcattctggaggaacaaaggcatcaacacactctttctcttgtgctgagtcatcttccctctcataaagttccctgcagagctttaagagggtttgttttctctttggactgtgactttactgtctaagccccaagcttatgagaaaagatgccctgactttgctctgagcctaaagggaagacatacttgtggtttctaccttgtctagcccagctcacagagtagatgaatatctggcagaaactttggtcctaggactaataaatgtgcctttccctggaaagggctctgtgtcatatctctctagagacttttatgctatgccaagacagtatagcaatggtaaatgactaagggcttggggtttgaagtcagcagacctgttacatgtctccgagatggttgcagtcagtatagctgtgagagttgagagagccccagaggccttcaacagagctaatagcagaatttggaaaaattccagattattgttctactgccctagaataagttagcagaccttggtgctcaggatacctgggatctgagactttctgtgttgctacgtggttcacacatgttcatgtga

SEQ ID NO: 40939 - DNA, 1022 bp, Homo sapiens
cccagctactcaggaggctgaggcgggagaatcccttgagcctgagaggcagaggttgtggtgagccgagctcaggccactgcattccagtctgggtgaaagagtgagaccttgtctcacaaaaaaaaataaaaataaaaaaatatatatatattcttacatggtggagaggagaaaagtaccattttgaaatatgcccagaatattttgttcttaacaaaggcctgacctcaagggaaacttgtactagaacctaaccaactgggactttaccagtgcctaatcaacctgggagaagggaaatacccaactccagccacctctaaccttacgtctcatgttagaggtggggaaaaaaaaacaaaaaaaaacaaaaaaaaaacaaaaaaaaactgagaagcacttgtgaaggtcacagtccagaagtaacagactcaaaattgatcatagaactatagaatgtttctcctctgacatcttaactaccacagcagtagggctctggtataataatgggattacagctaaaataactgtaaggctcagaccctatttaagaaggggtctctaaggaaacccaaagatgatagggagagaaaaggacactggagaaaactgtagcctctgatgccaagctgcaacaaacagttaatatgacctaactcccagccaggtaaacataaaacttcacactgaagacctgtttagttccttttacctgacacatcgtgtctgctattcaacaaaaagttataagcggtgctggctgggcatggtggctcactcctttaatcctagcactttgagaagccaaggtgggcagatcacctaaggtcaggagttcgagaccagcctagccaatgtggtgaatcccatctctactaaaaatacaaaaattagccagacgtggtggcacgtgcctgtaatcccagctacctagaagcctgaggcaggagaattgctggaacccaggaggcagaggctgcagtgagcctagattgcaccactgcactccagcctgg

SEQ ID NO: 40940 - DNA, 1026 bp, Homo sapiens
ccaccccaccctcccactccccaattccccctccccaccaggggtggctaagtgaagcaaactaaatgttttaatagagcataattgttttccttccagaagcatcaagcaaccctcaggaagttactccaatgaagagtccatatatttatgcttgttcaggtctcttatttttcttcaccatttttgtttaatttttaaattgtcggaacataaagtgttacaaaacgcttaagtgacatcaatccctgctattggcttttatttagtgtacctctttcccctctacttttccacatagcacagcctcacccctgtcttcactcaggtcacccaagttatcaacctagtacgtatccttccactgttttatacttgctcaggtacacacacacacacacacacaatctatgtacaggaaaggttattgccattatcttacaaaaatgctaagattttccctactcttttcttgcttttctcaatcagcaatggaaatcacttcaagttaatggataggacttttattccttctttttaatgactagtacttcatggtgtgggtgcaccatcatttattcaactcttctgctattgatgggtgttctcctttgatggacatttgctttgtttagaggcttgggtcccctcctttttttccctccctctctctcttacttcatttttttttttctgtattgccactgtgaatgttgcaacaaacgatttcttacatagaaacaaagtcctaatatttgttcttctgtcagatacaattcctgagagtaggacggattggtcaaaggctacacaatagtccccccttatttatggtttccctttcttcagataaacctttacataactgttaccactttatgtcattataattgttctattttattaaatattgttaatctcttatggtacctaatttttaaactaaactttatcataagtatgtatgtatatcaaaaaacgtgatgttatagggatcagtactctgaggtttcagccatctactgg

SEQ ID NO: 40941 - DNA, 1043 bp, Homo sapiens
aattatagaaaactttttagtactttgtagtggtatatctttaatgctctctagaggagtacattcatactaaggataagtgtgacaagtttttgagtaaattgccatttgtatttcttgtccttttttttttcttttttttttgagacagaggttcgctcttgtcacccaggctgaagtgcaatggagccatctcagcttactacaacctccgactcccgggtacaagtgattcttctcctgcctcagcgtcgcaagtagcagggactacaggcgtgtgccaccatgcctggctaattttgtatttttagtagagacggggtttctccatgttggtgaggctggtctcaaactcctgacctcaggtaatctgccacctcagcctcccaaagtgctgggattacaggcgtgagtcatcatgcccagccctcttatccatattttaaatcaataattgtttcatgaaaatgttaaaaatggtaaatcaccaacaaattaaaatatctttctagactgatcacttaagaaacactttcattctgcttttttcattagatcataaaacaaagctttacacaatgtgcttgctctgtcttaggtttcatcacatcaaattactctaaataatattatccatgaaatacagctaccaaaagaagtagttcaaaattttggactcaaaatgtacttatacattctacataagtgagcacaagtgataaagtttaaaagttggaaagatcctatgggtcatcttagtttatctcatcatccatgacagttattctgtttcttactggatattttggaacagaaaatacatgttgtctgtctttgctggggagaattggcacccctgaagttttcaagttcggtctcacttctccatactgcttttgattgcatttcgaagtactgacagccataggaacttatcatcctctatttctgtagcacaaatccatttatattttggaccctgaagaataaatgcattcttgacatctgtaaaagcatttgaggtatactaattaatctttgca

SEQ ID NO: 40942 - DNA, 1029 bp, Homo sapiens
tggaacctacagatacagaaccacagatttggagggccacattgtatatgtactattttgtgacttattttgaatatttctgcatcattaagtattcattattttttctagactataacttgctttgtctactgtgtaaatatgccatgatttatttgtagttaattttttacagttaataacactaggatgaactgttagcctattagccaatctttgactatctctggcttgaaacagcatatcacttatatttgtttggagtagatagagcaaaaagtaaagaaatgattattattaaataggacatatcccatttatcagcagatggttacagtagttcagactcttttacttctgacccagaacagatcgggagcaatgtaactcgtcaaaggtcagtatttctgtcaatgaaaagcatgttaaactatcttgctgcgttttaatgtttaaaactatttagaaccaagcacaaatgattttgttctctgaaagctgttaggttactttttgatttatgtaaaagacaagtaattttgatcctttccaacttgaatagaaaaacaaaaagaaccctgactttctaaatggtatgttgtggaagctctaaaaagaggtgataacttcttgacgatagaagttttataagtcctttttgtacctaaacaacgagaatctgtcaagtaatacatgtatagccttatggtaagtaccaaaagaattctgtgttttaaaacaccatccaaaagcacagcccagtggtgggccacctccccaccctgaagttctgcgttacatataacctttcaggcacaaacaagaagggtgtgggatagggtggaggaggctagagatttgtctgcaagggctttaccatccactaaaagctgtgtgcaggacagaagcatctttctctcctcactttttgcacgtgttgagtatcattttgctgtgtgcccagtggatgtagcgaggatgcagaatctccaagcagcttagagtcagaaggctgcttgtcttcctttc

SEQ ID NO: 40943 - DNA, 1048 bp, Homo sapiens
acagattgacataagctctacatatattaattccagaattctttgcattttatctcaattatattttattaaatatctatacatatgtgtaaaatatgtgcacgtacataatagaatcatctttcaggggtcgcactggcaagtcgcactgacttgctttgttttgaacaaaactttgattcattaggatcacaaaatcagtacattaacatttgaatgttcaaagaagaatttgatgttattctttctttctttagtcaaggcatgcctctttagcatttttacttggtggacatttatatcacttagactttgctcctgtattgtgttttattttaactctgtaaggctttaaatctcttccatagagattgcaataaatcattactatacttttgattgtgaactcctcaccttacattacaagtgacccagaataaatataaaatgttgacggaaaaatagaaattactgaattttgttaaacctatgaaacacaacttgcagtgcaacctctgaattactttgctaaatcttctccagtgatcttttactccatctttctcatcatgctgacttgtctctcctctgtctgttcagcagtgggagacatttagtgaacgctcttcaagctcacaaactctgacccaatttgattctaacattgcaccagctgatcctgtaagtcaatcacttagcttgcttgtttgagattaattttattaacccaaatttccattcattatcgtttttagctgatatgcatgattcagtggagtgcttagagggaagtggcggcaggctttttggtttttgtgtgcttaatggtgggaaagacattttttgccattccttttttctagttattttgttgagagaaaactacgtttttaaaatctggtacatgtgtctagagaagcattttttgtgacaatctattttgttaaccttatcatttgctaattaagtgtatattttatatacatactgtttatttcagtgtagtgactctttatgtattatctgtatgcttacacatcatgtaata

SEQ ID NO: 40944 - DNA, 1050 bp, Homo sapiens
gcatgtaggaaatgctaaaaatacaaaagtttgttcactttcaggaagaaattttaagcttctgtcctttccatgccttttaaagccagaaaaatgctggattaaagagcatgctagatattaataattttggacagttggaaaacagaactaactggtggttttatactatttcctgctttatgacataattgcagccaggatacttgtgtctgagacattataacatcacaccatccatcctactattggatgcaaaaccattaatacaagtgtttttctagatgaagggattacaccttgaaagaatttgctaatagagagggtttatggaaagtaaggtaattgttgagacactactatttttgctgcatctattcatcttgtgtcttttttaaaaaccagtattacattaaaagaatatttgtattccattgatatcagtttgtaaataaaaacattctttctaaagcatctcaaatctaaagcccatgttcattctaaataaaatcgtatgtgatcattagagacagaaatggaagtcccttctaaattcaggtagtagtacttgcattttccctacttaaatattcccataaagttttatttatagtatttggtaatgaggtcatgaatgtcataattttttttcgatatgtgaaaaatcaaaatgttaataaatcattgattttgagacatctaatgatatttctaaaaatatctagttaggatatggaatttagattacattttaattgtcttccagaaagcactagtaatctttcaacatagatttatttagcacctgtggttacggataagacagtataggagatgaccctaataatctctaacctttatggagcacttttgatatgtcagttctgtttaaaaaacaatacaaaaacaaactctttatatatattaactcctttagtcctctgaacaatcttatgaggtagataatatgttacagatggagaaactgaagcacagagaagttatacaacttgcccaagtttgcacagcgtaactgggattccagtagtc

SEQ ID NO: 40945 - DNA, 1032 bp, Homo sapiens
aaatgcccgcgcgatacccaagtccgaattattatagattatcagctgttctttcaggaaaaatggtgttccacgaaaaaagtggcttgttcagcttacaactgaatcacacaagtacttttctctgagacaaccattgtacttacatatgcagcagaaatgctgtgtgtatgtatttcccattttgacacacagaggaagatgtgtttttagggctgagatttaataaaattaatttgtactgcttcatgaacattcataagtgagatcagcatgcatatttatttatatttaatgcttatgtatgtgggggggggtaaggaatacaataactgtaagtgaagaatacaataactatattttgtcgccactgccttgattcagtgcaaatgtcaacatgggaaaagcattattacaagaatagttttcacctttcaggtctcttttaaaagagtcttggggactcttaggggtctgtggtccacagtttgaggtctacaactctaggaaaataactctattgaaatagcggtaaagtataattatttgggtgactagcatttcactttgcagcctcaagcagctagacccacttcagctttgtaccagtgaaccagaaatattcccagaatctgtcccaaatcataactgccctgaggtgggggtgtggtacagcttggccctaaatttgtcagtagaagaaatcatgagaactgtggtcttgaaaacccaaccaggacttgcagattgccctaagattgatgtttaaaaataaagtaatagagtcttgctttaaataaattctttcgaaaattagtcatcttgtagttaatactgttttaattctgtttattttcttcagtactcacctgctttggggaatcccttgaagatacttctttattattctcctggtagactttcactttcagtatattgtcaaatttatagctactgtttccctttccctttgttatcactggggataaagtttcataatttttttttcccaatgaaaactatccaatgagg

SEQ ID NO: 40946 - DNA, 1060 bp, Homo sapiens
taagaggccttccttattctctggactctcattcttttgggagacatacaataaataacagtagagtgctcaaggaaggcctctgaaagcatgacatttaaggtgaaacctgaatgacaggagaggtctgaggggaaaacatactgaagatacagcaagtgtgaagcagtcttgacttactgaagaaagaagggaagaggtattttagaattcttgtattatttattctattggaatatgtatttaagggctgtactgacatactggtgaaggatgagataatgtattttttagtaattaatttcccttggttactactcagttgtcttaataccttgagtcattttgccagataacaagatcttatataaagctattatattttatatatataaaaaatatgtaataattcattgatggccttagaataatttttttttctgggcatccagtgtcttaggcagctgaaactctctaggaccattgtatcattgggaagggaggttaatatataataatgcctgtatgtaagattatctttcatgaaacttggttttacccttctttcccaccctgcccttaacctacttgctaaaggacacaaagggacattattgcagtcttgccatttattttattgccatttttccagtattgtgaatacctttgggacagaagatgcaagtaggtggtccaagtgttgtgtttggtctgcatattttaaaaaattattttgactccacactagcacttgaaaatgggaatatattatagaaaattccgtgtatccaactttagaaaaatctcttcatggtgtcattaggcaagtattcttcaatagcagcagtcagctagagttgaatagcagctgcttcctttacacctgcactccttagttcactactttcctcaccttgccagttttgctaattcatattaattgcttgctcccataaggcatggttttcagtggctgctttaagggaggtgtagtacacagtgatgggatcaaaaccaagaattccttctatcactgtcctttatttttactctgtaataa

SEQ ID NO: 40947 - DNA, 1028 bp, Homo sapiens
ctgtcccaaaaaattaataaataatattagctaaatgtgatggcacccgcatatcattgaagctattcttggaaggctgaggaaagaggatagcttaagcccaggtgtttgaggctgcagtgagctgtgttcacgccagtacactccagcctgggtgacagagcaagacctcatctgtaataacaacatgctaactgtcaaaccaaatacaaaagagtacatattgtgtggttacatttatatggactgtctacaaaaagcaaatctatagagatatagcagattagtggttgcatcaggccagagcaagagaaatggtatggaggaaaatacttgggtgatagaaaaattctaaaattagattgtagtgatagtgctctatacactgtataattttcttaaaactcaatgaattgtacacatatgatggttgaattttatggtgtataaattatacctcaaagctatgaattaaaaattacaaaatagtcatcttggggaatgtaaaggttgaatgtggtggagaatgaaggactgtgtactgcttacatagtttaattacaaaacttcagcataatgtaatctggcattttgataaaggatttaaattttgaaagatgatgtactgatagatttttatgtgtagaggagattgccatatctcatcttccaagattcattagaactgagtatatttacattacattacattagcatcaagctaacatttattcactgttctgtgtgacagggaccgctctgcgtgctttatatgtgttattttacaagtacattatttattgaccttagaaggggctaaaaataatatgatttagaatgaagaccagtttccatctattgacctttggtggtatgatgaatttttgtacacttaactcagatatcttaatattatgggaaattatagaaatataatacctcaaagaataatgcaagtttgaagtagtcatgactgacaagtaataattttaatgaaatagtagtttcagtctacaggactattttgg

SEQ ID NO: 40948 - DNA, 1028 bp, Homo sapiens
cagttatgtatactaaatagcagtctagatatcttgaaggcaatttacttaaaaattggtctaagacatagaaatatgagacaaaaggagaatatgtgcttaattcccttaagggagtttgggattgtctgaaaacacagtcctccattgctttctaagtgggaaacatttggggcagctcatatctaatgcttagttctctacttaacactgggctaggcattgcaggcatcagaagaggagtaagaagctcttgaggatcttgtcaattataggagtgctcatgtataacataaggtataatgtatgccataggagaggtgccaagtgttatgaaatgctaaggaggtatgaccaagaaaggctttttgacttaattcagatggactttaaattagggtggagtgaggggaatggaattatgagggcttccaggcagagaaaagtgatcagaagtggaaagtgtaggagccttttcaaggactagtgttttcgggataacagaatataaaattagaaagaggccatattgggaaagactctgaagaagggcagcagataacgatatttcagcaagcaatggagacccattgaaaagtttttgactttgagtggcagaaagggtaaggaatgacactctttcagtggtctggattgggtgctaggtcatggacatccaaccagggtgacagcagtagaatagaaagggagagactggatatgttattgaaggactgctgggtagccactatatgaggtgctttgtggaataatgtttaattgaggccagattatcaaggttggatggagagctttgaactaattgtgtaggtaacagggagtggtagatttaagagaaatgactcataaagcagtgctttaggagtcgtttgtcagggccacaggaattagaggaataaaactgtagacttaacttgggggctgattttgtatggcagatacgaagtgagaaactgggccagtggtactcaaacatgggaatgaaggtgacaatggggaagaggcat

SEQ ID NO: 40949 - DNA, 1044 bp, Homo sapiens
agcagaaatactattcagatctcttctcctactgcgacattgagagcaccaagaaggtggtggtcaacgggcgggtgctggagctgttccgggccgcgcagctgccgaacgacgtggtcctacaggtaacgtcgcgtcccggggccggcgggcggcttaggcctgcagtcactggcctccaggagtgggagtgggcgccgattccttggggcccggcggggggctggttcctcggggggtccccgcagcgggcaggggccgcaggtgcccgggaggcctggactcgcgccgcggccaagggggagggggttgcccttagaggacggaactcctgtggtgggggtctgaagagcctcagccggtatcccccacgaccctgagaatctgtgctctgtactgcaagagctatctcacttgaaggatcttaggttgttaatgtgtgtgaatcctagaacctggcatatagagagcttttcggatcctgcagagtagtaaagttatcagtatgggcaaaatggtttttttaattcttggattaaccgagaagacgtgataaagtgagttctatagatttaggaatcgaagaagcagtttttttaaaggaagcaaaattcttagggaaattttttaaaatgtgaactacttagtagttttacaagtaggcatacaagaagttgtaattatctgtagaacgtgtgtatgtgatgagactgaacaatgtttttcaacaggcattcgaaagcatttgtggaacttgtggatttgggttgggagatgagtattgaacagctggtaggcagaagtgcgttatttgccctaatctgaagccctggaggagcaaaccctgtaggtttaaagcctttttttatcatatctgcttttgaaacagaggacttcctagaagttcttatctaatgtatgtggtgagcattaatgctactctgtttaatgattcatagctgctagtaggagtctgtctaaacagtatgttaggaacaggttttaagctttcatcttttatattgatccaagctagttatccac

SEQ ID NO: 40950 - DNA, 1029 bp, Homo sapiens
ttctttgagaagatcattacaatttataacatcccagtcagatgaatcaggaaaaaatagacgactcaaattatccatggcaagaataagagaagtggcatcactacagattctacaaatagtaaaaagttaaaagcagacgatcctgaacaattttatgtcaataaatataaaaatgtgaattaaatgagcaaatttcttaatagaaacaaccattaaagcaatttcaataagaaatagatattctgaatatttaatatctactaatttaatttgtagtttaacatgctcaatacaacacccagtatttgacagttttacaagcaaattcaatcagttattgaaagaaaaataataccaattctaattaaattcttcgggaaatttgaagaggaggaaatacttctagccatattctggtgctaaaagcaagaagtcatattacaagaaaagaaaactacagaccaatatccgccatgaacatagatgtaaatattctaaaggctagcaaattaaactcaacaataatataaaggataatacattgtgatcaagtggagaagagttggtataatagtcaaaaagcaatcattaattccacatattaacaaattattataaaaacaaaacacatgacaatctcaaaaaagaagaaaaagcatgttacaagatctaatatcagctcttgtgaaaactctcaggaaattagagaaagaataggaatccctcatcctgataaagagcagtcatgaacaatgattgtaaatgactgaatgctcttaccctaagatcagaaacagaaaaacatgtctgatttcactgtttcttttcaagattgaacttaaagttttagccagtacaataagacaagacaaaaaaataaaattcatccagattttaagagaagaaataatccttatttgctgactacatgtttacctatgtgtgtatatatgtatgtatatatacacacatatatgtacacacacatatacacacacacatatacatatatacatatatatatat

SEQ ID NO: 40951 - DNA, 1072 bp, Homo sapiens
aagaaatccagtaaaaattagctttatgttaggaggtaaaaatcactatgactcaaagtctaacatattccacaataaatatttttaaatggcattaaagttcctgaaggaagaattttaaaattctggtatctacagatctatttgattatactgttttttgctcctctgagctaatacagcacttttactttaccccgcctatattaacaacgaaaatgtaattgaactatctttacaatttcagattctcacctaagtgctgaaacgacctcatagcacaaaggggagacagaaattttaaaaggtaattatgaaacataaaacagatgctaaaatgaatagatgggcatagacctgtgggactgcaaagcaaaacaaattattaagggtttgatggtcagtgttatctaaacattgtgtaaacttttaaatgtttatgaatcccatctcagaggtgtaactaatatttgtttgtgtgtgtgtgtgtgtgtgtgatacactgagcaactgtataccacctagcaagtggcattcttgcttagcgacttacactggcctgtttactcaccctgctgtaaagatcttcattgtcctttccgaaggatgtatttcttccttactctacccatggtcagtatataaccttctggtagttcaagctgtctgcagcaaaatcctctaaggaaagatggctgtctaactcttttcttcagtctttgaggtattacacagctctcagctctctgtgggccctttatccggaaggcagtcttggctccaaagcaggcaacattcttgtatctgtgcactgcaattctagtctgcccctgtaagtaaaaacacatttatactctttttcttatatggataattcttctccaaaagtatataacaccccaattgttctttggttcacttttatttctgctcaatgagcacaggagagtaacttaagatcacagtctcatttgtaaccaaagaaaggacctctcgtctcacaaggtcatggtaaagaaagaacaagacgattaaatggaacttattgtaaaattatattatagtccaaaag

SEQ ID NO: 40952 - DNA, 1103 bp, Homo sapiens
taaagcattcttgacaggtgccctggagatatccaggatattgctcagcaggtcggtacattgaggtgaaggagaaactgtacctcattatgtagtaagttcagagcctaaaagcacatcacaatggagtaaaattaacttctcattgtcatgtaaagcatggtataataacagtcaagtaaaactcttaatgcaaagagtgtattatatcaggttggcttggattgtataaaaatctaatttcagtttcagagtctggacaggaaaacaaatgcaattagaaattaatgttaatctgctggtaatattcctatagggaaactgatatagaaagacatgtccaagacttgaaaattgtataataatcatgtatgtatttgaatccagagaggtttgatcctgggaagtctttttgcctaacagctttgactttctgaaggtcagaggtttggcctgacatcatgtatcatgtcctggattctatatggtgtcatatactagttgttgaaatgagatatgagaatgcctggccaacaagtggggagaggagagatatgtgaagaagaggagcgttagcacacgaacagtccccagggagaaactagaaacatggagtggtatttttagatacattacatgttaacgttacattaatttgttgtgaagccaccctcaaggactttattatacagagaagaataattttccttcatctttcagtgaaagtgttgttctaatctgagaactaatgttgaccagctgacaaggtattagaacctatattctcgtcctctattcttttcaatcattcttctctgttatttttttctctcctcttctgtattattttttagtgtgatgttaggcaatttacttaattcttcttcagctgttctctttgtaacctaattttcttttatactattaagcacatccacgttctattatgcatgaaatatatggaaaaatcaataaatgaattaaatatgttattcttgtttataaaaatttcatattcaaaaaaagaaaaaaatacagatttggaagcatcataagagggtcttccaacaaaaaatgctgagcagaaaccaatttatgtccaa

SEQ ID NO: 40953 - DNA, 1058 bp, Homo sapiens
cctgatatgtggggattacaattctaggtgggatttgtgtggggacacaaagccaaaccatattagtgttcataataacactgtgatagcaagagagtttatactatatcttatgttttaatataggatagcccaccttttctttcctacacatattctattatgccagcatataattttaatatttgctattgaatcctctcacttgtagtctaacagtttactatatttcacaatgtttgtcatggtccatgatatacctaactagtgtaccaagtggctggctggtgtggcattgttggatactttgttttatcacagagtacaccatattttgtctttgagggtaagatgttagttactattcaatgaaaataaacaaaacaaaacagagctgaatcattggtgttcttccatatgtaaaagtaaagttctattcactaaacatgtctttcagactcctagatgaggcaacttagacctattttgatgcaactataaatactactacttcattgaaaaatgaaaactccacaataagttataagctgggactatgctgggcaaactggaacatatgattgccctaatctgatccagcttattatgtgtcgaacattgttcaaagcatttttcatttaatttctaagtgttttaagtttcttaaaactttccacttaattttcataacaaccctgcaaggtaggcactattatttactctatttgagtatgagaaaattgaggaaattgagaaattgagacatggagaatgggtgtctaagtccatttgccctgctatatcaaaatatctgagactgagaaatgtataacaggtgtattttcttactgttctgaaggctggcaagtccaagatcaaggctctgatgggattagagtgtggtgaaggctactctgtgcttccaagatggcaggcagcactttgctgcatcctccagaagggagaatcactttgtcctcacctcctaaaataaaataaaataataataataataaaaacagaagggacaaaaagagtcaaactccctctgtcaagtc

SEQ ID NO: 40954 - DNA, 1030 bp, Homo sapiens
gtaagactttgtgaagtaatgtttcatgccctatgaataaagcacttgggcagcaacggtgtcattgcctgaaggcaactacctcatttcaaatccagggagcaggagtgtgaagatttcctccatctaacctgcccatgcttatcaccatgttttattgttacaattctcatgatgatttattgagacttgctatggaccaggaactatcttaattgctctctgccattatctaacataatcacagcaacaatctgagttgttgtgcagatgaggaaattgaaaatttagacacattaagtacaacgatataaactccaagatagcagagcttttgtctactttattcggggctaaattcccattgctactttgtaggtgcctgtcatgggcttaattgcatccctgcaaaattcatatgttgaagccctttccctcagcacctcagaatgccactgtacaggttgagcatctctaatctgaagctctgaaacccaaaatgctccaaaatccaaaactttttgaaggctgacatgatgccacaagtggaaaactctacacctcacctcatgtgatgggtttcagtaaaatgcagtcaaaactgtgttttctatgctaaattatgtaaaatattgtataaaattacctttaggttatgtttatatggtgtttatgaaacatacatgaatttcatatttagtatggtctcatcccttaagatatctcattttgtgtataaaaatattccaaaatctgaaatcagaaatctgcaacacttctagtcccaagcatttcaatctgtattgggagatagggtctttaaaggggtgattaggatagaatgaggccattagggtgggccttaacccaatttgatgatgttcttaaaagaagagaaaatttggacacacagaaagacacacacgtgtgtgtgtgcgcacagagagacaacaggatgtgcacacacagaccaaagactatgtgagggcatagagagatggcagccaaggagagcggctctcagtagaaa

SEQ ID NO: 40955 - DNA, 1661 bp, Homo sapiens
tggtgaaatcccatctctactaaaaatgcaaaaattagtcaggcgtattggtggacgcctgtagtcccagctacttgggaagttgaggcaggagaatcgcttgaaccccggagcgggaggttgcagtgagccgagaccaggccactgcactccagcctgggagacaaagcgagactctgtctcaaaaaaaaaaaaacaacactacaattacatataatattatgtgtttttctgtgtacctagtattaacagtgagttttgtactttcacaggtgaatatttactgctcatcaatgttattttctttcttattgaaagaatatttttagcattccttgtaggataagcttggcattgatgaaattcctcagcttttgtttgtctagggaagttattatttgtcctgaatgttggaataatattgtctccatatataatattctagggtaaaagttatttttcttcagcactttaaatatatcataccactctctcctggcctgtaagatttccactgaaaattctacttccaaacatactgaagctccattatatgtatttgtttcttttctcttgctgtttttccaatcctttctttatccttgacctctgggagtttgattattaaatgcctcaaggtggtcttttttagggttaaatctgcttgatgttctacagccttcttgtactcgcatattgacatatttctctaggtttgagacgttctctgttattaatccctttgagtaaacttactactcctatctcgttctctacttcctctttaagagcattaactcttagcccttttaaggctattttctgaatctcatatgtgtgcttcattgttttctattcttttgtctcttctgactgtgtattttcaaatagcctgtcttgaagctcactaattatttcttctgcttgatcaagtctgctattaaaggactttgatgcattatttagtatgccaattgcattttcagctccagaattttgcttgattctttttaattatttcaagatctttgttaaaattatctgatagaatcctgaattccttctatgttaccttgaattatttgagttccctcaacattgctattttaaattccgtctgaaaggacacacatctctgttctccaagattggtctctggttccttattttgtccattggtgaggtaatgttttcttgaattgggttgatgctaatagatgttcttcagtttctggacataaaggagttaggtacttattgtagtttttgtggtctgagcttatttgtagccatctttcttggggaggctttccagatatttgaaaagacttggatgttctgatctaagctgtgtcttctttaggaggcaccacaacccagtcatcctgtggttcttgcagactcttagaaatactgccttgatggtcttgaaccagatcggggagaattctctggattaccaggcagaaactcttgttctctttcttactttatcccatacatacagcgtttccctcactgttctgagccacctaaaactaggagtggagtaacacaatcacccctgtaatcaccacttactatgacctgaatccaacacagtgctgggtctcaccaaggcctgctgtaaccactccctggctactgcctatgttcaccca

SEQ ID NO: 40956 - DNA, 1030 bp, Homo sapiens
gagtccttcccactcttccctctcctctcctcaagttaaacaaaggggtcccttttggagccaggagctgtgcaacctggggttaggggaggggtcaagccagcactcccttagctggctcaactgatgtctcagtaggtagttggccctactcacccagtcccctggctctgagcccagttcagcactaggactcacctaggaattgcagtctgtgtggcttaggctgcctttcaagattatttagaaccccggagcactttagcctgcagtggcgaggcttgtggaaactggagttcagactactgggatggaagactcccctctggctagggctggctaaaatgctacctctgtgggtgagtgtcagctgagtttgctctgggtttcctttctgctctaacaggacagcactgattgctgtgctctgtctctccctagtgcacagaaacgcgccccttgcaccatactgtggctgacaggggatggggaatggggggatgatcataattcaagacttttttctgcctcttcagtgcttctttcagcgatatgaagttaaaaccagctcacctgattgagtgctcacctgattttggtttttatgaaggtgctttgtgtgtgtgtgtgcgcgcgcatgtgtgtatgtgtgtgtagatagttgttacgttgttgtccttgcccagggggttgttgtggggaacgactggtggagccttctattctgccgtcttgctccactaataaagtagagcttttaacttgtttattgaccattggatatccccaccaacaatgtttctgttcaactcccttgacatttttccatttgcttggataattttgtcttagttgaaatttattgtaaaagcaggatatgaatatattttcccattatgtaccttgttttgcattttgagattcttaatttatgtattattagttaaaagagaaatcaatgttttaattttttctttattactaattctttctttgtcctgtttatgtggcaatgcacttatcctgtttg

SEQ ID NO: 40957 - DNA, 1036 bp, Homo sapiens
agcctgtgatctaacaattgcttcatcactcacttgcagaatagtaatgtgaaaagatatctttctctcccatcaatactaatattagaatacagttttctataatcaacaattaaatatttatagaaagtatgtaagatgaagattaaaaatgtatataaatatgtaaaacagtaaaaacatcttttataagggaagtattatactacgatttttctgatttctgatgtcttgtcacaaacacaaaagaaatacatagaagttgacagattatacttaagttacaaagacagagtatccccagcttgtattgaaaatgatggttcatgtatgccaactgtctacatgtatcaaaataacattgaatgtaccaattaataaaagaaaaaagaaagacgaaactgggagaatataaagacaaaatttccatataaaatctagtgctgggttacaaagatatttttatttaaactatacatgcatttttacatatatatacacacacagaaagatttatatatgtaatgtataaggatgacattattttatttctaagaggtgttcatgcgaatttaagatcttgattccctagggacaccgaatcccagatgagcaaaatacaggagatatttattataaaaattactttttggggctagatgaattccccttccaattagcactaggtcataagctatattttaaaatgtagagttcattgtttatttgcatttgatttctctctctaataaaaaaggagaaatagatacaagtaagaccaacttcttttacggtatccacaaatctttacaacaattatatataatatttgtaagaataaaaaataatattttctactaggacaatgtgcatttcagagtcttccccatcatttcctaccatgaaaaattttaaatgcttacaaacgtggagagaataatatgataaaacatggccatgtactgataacttagcattaacaattgccaaatttgggctaattttattttatttatatccctcccacactccctca

SEQ ID NO: 40958 - DNA, 1026 bp, Homo sapiens
aaaaaattagccagacctggtggtgggcaccagtaattctagctactcgggaggctgaggcaggagaatctcttgaacccaggaggtggaggtttcagtgagctgagatcacgccattgcactggagcctgggtgacagagcaagattctgcctcaaaaaaaaaaaaaaaaggaaatctggagacagacccacacaccgggacaaaaccacaggaagataaagacagcgattgtggtgatggttctacatgacaaggaaggtaaaaatggccagcaaaccaccagaaactagatgagaagcatagaatacattctcattcacaaacctcaaaggagacaacattgctaacaacttgatcttgaactttctagcctccagaactgcaaggctataaatttctgttgttacagtttgtgttacgttgttatggcagctctagcaaagtaatatagggcatagccttggttatctcatagtcattctggtatgacagtggttttgacagctctctttgaactctttccttgacctcattcagctgttctgttccagtaattgccagttgattgctctatagttttcagcaatattctgaatcataaattgatccatagacaaagccaatcaagttcaggctccttggaaaggataatttgtgagaacactgtttgagattttattttttctcatcccaagtgggctcctcccacttatttctttttctggttctctcaaagtatctggcataaagttttgtctatgtcaaatgaatccagtcatctcttcccaatttcctttcactacaacctctcttgcttttgagagcactcttagacttgaatttctccacattctattgcatgtaaagagaattactttgagagaagattaagagctatgtgttctatgacatgcttctccccagcctccaggcaaaatctctgagccacatctctggagtttgatatggagacagtggtgttcttcactctgagtgacaccttgctttagtaactgagtgtccc

SEQ ID NO: 40959 - DNA, 1057 bp, Homo sapiens
gtccataaacattggattttttaaattcatttaagtatttaattttttgaataatgctttataattttcagagtatagctgttcttcttttgttaacatatatctgataaggaattaatatccaaaatatattaggaagtcacataactccatagcaagaaaataagtaattttaaaatgggcatgtgatttttcttttcttgtgagctctttatctaattttggtgtcagggtaatagtgaactcatcgaatgagctgggaagtattcccttctattcaactttttagaagagcctgcgaagatttggtattaattcttttttaaatgtgtggtgtaattcagcagtgtagtcaactaggcctgagctttctttgtgggtagcgttttgattattaattaaaagccttcacttaatgtaggttaattcagattatctatttcttcttgagtgttttaagcaatttattttaaaatcaatttagcaaagacagaagaaatatgcattcatactgtcttttataattatgtaattgcctttactagggttctttgtttttttgtgtgagtatatggatctaaattcctgtctgggctaacagcctgagaaaagtttttttagtgatttttgtaaggtgtctattttaaaaacaaattttctcagtttgtgattatcgggtaatatttctatttcactttcatttttgaaatacagcttcagacttttggttgaccgtgtctatgaccactttgtatatgatatgctattgcactgccttaggcttcccttgtttctaatgagaagtcagttgataattttattggagttctcttgtaagggatgagttttgattttgggcttttcttttcttctcttggtactttcaagagcttggccaggtgcggtgactcatgcttgtaatcccagcactttcggaggcctaggtgggtggatcacctgaggttaggagttcaagaccagcctgacaaacatggagaaaccctgtctcttctaaaattacaaaattagccaggtgtggtggcacattcctataatg

SEQ ID NO: 40960 - DNA, 1035 bp, Homo sapiens
aatcataaaatattagcttcaaactattacactatttttaaaagattgtttttattgtgtttaatatcgttttccaatttaattctaattttcgtttgatgtttttatgtaatatgaacaaacatatgacttgaattaacaacatcaatactttaaatctcagatttgctacttgtttttgtgtgacagtgtatacgtcagtttagcttgcatgattctcattttattcatgtgtaaatttaagaatataccatttctttcaccaaatgttagttgctgaataaatgcatagatgtgtgtgtgtgcacacacatgcatgtgcacagaggtggggggagagagaaaagaaagggagagattgttattttgttttggatcaaaatatttctcccacaggatgttctttgcacaaaggcaaatccctatatgtaaatggtagaacacttgaataagatactgtggttttatgggagaattttaatcaaataatttaatttgataatatgtgcctattgcacgtatatagaattagactaatccctcctccacatgacccctctgattgaagtcaattccaaattctagctgatacctacaaaatgtaactcaatggatttgaaaaaactcattttaaaagaaatcaattaattttttttcaaaaatatatctagagagccaaattatcagtttgatcctcccatcaattcaccagttgactggttgtggttgtcagttatgcaggcctagacttaattgaagctgaatatagtgtttttctgaaagcggaggaagccatcctggatcccagaagctattatagtttcattacatgtagttttgtgaggcaagtacccagactaatgaagtctaatttcctgcagattaaaaaagagaagtgataagatatcactgatgttaggtaaagaaattctgaatatagcacatttattctgttaaattactcatgaacacatgaaaacgtggttgcaagctaacgggagggccactagtattttcttcctttgagagctgtgg

SEQ ID NO: 40961 - DNA, 1383 bp, Homo sapiens
atcctttgagtggggtggtctttctcaaacttgaagagataaccaagccagatttgattagataatttaaaagtttatccatgtgcccagctctctgcacaaacaccctaaagaaagtaaattctttgggagaggcaactgtataatttttaaagcttaggctaaatatgatgtagtgccaaaactacagattttttgagaagtttagatgtctatctaaaaagcattttaaagtaggtttgaaaaaaattcaggattattttaagaatggacatctctatgagaagggttaagaggaacattgaaaacattgccctgcaaggttatccaaggcatgtatcaatgtctcagtgaacagtcacttgcttagaagcctttggtagtgaggatttgcatattaaattactggacacctaccggaaagcaggagaagcatccaagatatgcatattgattctggaaacgctgaaatagcaagttgaagagagaaggggactatcactgggaacatcatatcagaattcatcagagaaaatgccaacaggagctgtcttttacttaatatagtgagaaaagtgtgagcttccaatgacaacaggaccaggcacagctcctgtggagagcacgcagaagataggagcaaatctttaggccatcctcttctcctgttccaatggatggttacacaaggatgggagttgggtggggtaaaaaatgcaatgggaaatattatcctactttgggaggtgaaggataatcagataatgattttcaaaactgaagggagacagaggcaagtagaaaataaggcaaagagaattacctagaatgtttactcttatgtatagcttggttttatgacctggctggttgtgattcccatatattaataagtgggttcatggtcaggacttacagggccagggccagggtgaagacttttaacatgaaaattatttgatttaacctcagaatttaatgttacagaaattctcaaagattgtatcaaggtacattgctcagtgtcatagtacacctactactagataggattctttcagggacatatgtctggtgtgtaaactaacattctttctctgtttgctagttgctctgaggttactacagcagcccctgatttatctatgtggacaatatccacagaatttaagcattatggtcctgttgccttgtgataatgaaaaagcatctaactctacattactagatgtcaattttgctacaaaacttggattttgacaatcacacttccaccttatacacacttgggcaagaaagtttctattagagcccggagaaataccacctacagacaagatccttagatttcagagattaaagatgttgtaaagcagggactcc

SEQ ID NO: 40962 - DNA, 1031 bp, Homo sapiens
aaatgcaagccaattttgtgtgcctgtatatatttgttttgtggaaatggcccagatttatttttatttttctgattttagttttcttgctaacttcacattaaacaaataaattagttaagtgcgaagtaatattattagaggaacggtttcaagaatgtctgtgaaattgcattttaatacccattagacatggttcttcttctctataaacttctctccaacattgaaaatgcaattctgcagcattaagcaaaaggcatatttgaaataaagcttgattttcaatcactgagctaaacctatttcaaataaacaccagaattcaattaaataggagtaaactcttcagcttgacccactaccatttcaatgcttcgtattctgaaagttttaatagggaacacaagacttgagttgaatctgatttggagaatccgaatgatctggctgaccggaaaaatgataagagatggggagaatgattgctctttgggagataaaagtttttgagaaacaagttagtagagaaacgctttcgaaacgctgatgctgacaaatgtgaagcaggttcccggtgcgctgattaccaatttgtctgagtccagtgaaacagaacactcacatacagcacaagttataggaagcagatttatcacttacagataggcaatgagggacaacagaagcctaggatgcaccacaagccagtctcccatggctcaggaaagctacccagggtggatcaagtctctgctgtgcatgcccaattacaccacagtggagggaccctcaatggcagcctgccccaagtcatacacctcagggtcacattaaccactggactaaattgttgaagaataccctgttctgggaagatgagggagctgcaaaagagcctatagtattccagccacttcctccttacctcaggattttacattcccagaacatcctagttattcttgaaacctacaagcaaaacggggaactgggttggtccaaggccacccaaagaacagtcttgtaac

SEQ ID NO: 40963 - DNA, 1025 bp, Homo sapiens
ggattgataactcaaaaattctcaattggaaaaattctactataatacttggttcttggaaatgtggccattcaattaattaagcactggaagaattgctttttgcaaattattactaagtgattcatttttgcttcacttgcctgcataccaggaacatactacattctggggtattcagtttttcttatactgaaagtttcctctcttttgattctactttaaggtctcagttctattcctaataagatggtagtgactacctctgtatgtttactcatataccatattgtatctaatctatagcataccatataactgatgttattatgaggagtggagccacatcaagtgatgctttagaaatgtatatggattttttggttgtaaaagtgtattgggagtaaccgcacacatttcactgggggatggctggggtaccagatgtcctgcagtgcataagttcatcatataacatgaagaaaaacttttcagcccctgcaagaccttttgacctcttttgaactcctgtcagttattcatgcaaagtcgagtgaggagactctgtattatttggaccaagaaccaaattatcttttacttataaacaaaataatttgtactgttttaatttaaattttccagaaaacaactataaggtaaatttaaaaaagagcatactttgttgtttgaaatttcaccaaaataaaattgcatcatcaataagaatgtcactttagtgtttgagggaataattccaaactgtacttttctgtatttgtagttactaggtttgtatttattttatgtatcactgtgatcttctgaccactcaactgtacctcatatacttttatgctttttaaatctgtaaacgtatcaagagattttaaaaactgaaaatgcagatggaaacctgcattttatttctattctccttgttgggaatgttttctcataatagttcctaaaaataactactatggcgttaatcatttataaaataagataatgatcattttata

SEQ ID NO: 40964 - DNA, 1050 bp, Homo sapiens
aaattatattgttctgtttttcaaagattgcttttttgcttcttcattaaaaaatgagattataaaaatgtctgtcagaccattcacctttcagtttcttgacataaatgtgtttaagaactatattttgaagactattttttttcactcggtacttcagtttttttacttacatttacaatgtgcaaaatttcaggaatggcaggtaagagagataagtgactaaaataagatggatttgatcaccctttccacattaagaaagacattgaaattgcttcatttgggcatgtaaacagacaaaaaagcaaacagggaaacaactttttttcattgtcatccctggactcctttctgtttcggcacaatacatttttttcttctttaatgtttttgaggagaagaatcattataatcttaatagttcagtaaatacttgtttacttcctcagttgctagactcttaggagaaaaagtgattttgacaatgcttaggaataaaataaccgaatactacttaagtgtttctgcggtgctttatgggctggcaaatggtcagttacacacacaatgccacagctttcttctgacataagcttttcattattctcccttgctgtgtgttgtgtctcttctttgtttctttcttttttttttgagacggagtctcgctctgtcacccagactggagtgcagtggctcgatctcggctcactgcaagctccgcctcttgggttcacgccattctcctgcctcagcctcctgagtaggtgggactaaaggcgcccgccaccacgcctggctaattttttgtatttttagtagagacaggttgtcaccgtgttagccaggatggtctcgatctcctgacctcgtgatccgcccgcctcggcctcccaaagtgctgggattacaggcgtgagccaccgcgcccggccttgctgtgtgtctcatctagcatcgttggcggggctcacaatagcgcatctgattttatgcatagcttactatctttcaacatgctgaagcagcaggagttgaaaaaaaaag

SEQ ID NO: 40965 - DNA, 1027 bp, Homo sapiens
ctgattgagtttagcattgtcttccaactgtcactgtaactgagtcctcaggaagccaattctatctttctattaagccagtgacttctcaggtatgtgcaaatacaagtaaactatatgagcataagccaattgcttcacttctttttctataaaataaatttcttgataagaagcaattttatgcagtatataatgatggtagataggtagtccataagtcaactggatggcagagctggcagaagcattactgggagataaagcaaatctgcgtctgtatgcagaataagtgcataccccagagaggcagaatctctgctccctttgtgaagaagaagttcaatgtaatcaacctgccatcaggtgcctgatggtactcctggggtatggtgtcataactgggtctcagcactggttactactagagacattttaggtacttagcattagtagtagcaaggtcagctttggtaagaggaaaaacatatttttaaactcattagtagtcttactcctgacagtatagacactttgtttatagtcccattgagcaaatactgtggttgcctgagaaagaagtttactgatattcacagtgtcattgtgtccacttgattactgagagccttctcaacaatggatgttccttagtgtttattcatatgagatataaatatcttcaaatctgggctcattctgaaagctctatcctcttccctagatttccaattttccaatattattctttccaagtctctgacctttcagccaaactcttaacaactgcctgtgaatcagagcacatttttttcctggccaaatagagtggccaatgaaagtaaaataaaattgtaccgttcaagattctgcacactggaaggattttcctttatgactctgcttcagaatcacccctggggagggttgtaatttctcagccatctacttctggatgggatcatatcatgtagatccatcttttaactaggctcaagttttaatttctcattcaactaattgtaaa

SEQ ID NO: 40966 - DNA, 1050 bp, Homo sapiens
tccagttgagcaccttaggaatattatactgtattacaaataaactcattaactaaagaagaaatcataataaaatttagaaaatattgagaattgaatcaaataaaaatactaggtaaaaatgtatagaatgcagaaaagctcagaattagtgagctaagcaacaacatgaagagtttagaggccaggcaaggtggctcactcttgtaatcccagcacattgggaggccgaggtgggtggatcatgaggtcaggagttcgcaaccagcctggccaacacagtgaaagtccatctctactaaaaatacaaaaattagctgggcgtggtggtaggcgcctgtaatcccagctactcgggagactgaggcaggagaatcacttgaaccctggaggtggaggttgcagtgagctgagattgtgccactgcactccagcctgggcaacagagctagatgccatctcaaaaaaaaaaaaaaagaaagaaaaagaatttagaataactcaaagtagaatgtgattaagataagagcaaataacataatagaaaactacattaatcataatataaaactataacatattaatcataatagaacaaatttaccaaaatctaatcaaaaagaaatacaaaactgaatagttctataatcatttaaacagtgcgattggttattgaaaatatttctagatataagtgtcagtcccagaaagtttcttagagaacttctttcaaacctggaaggaaataaaaattataattttacacaaattctcccaggaaagagaagagaagggacacctttcaattcattttattggacaaacagaatggtaatattagacaaagacagtaaaggaaaaatattgatcaatcacttttatgagtatagatgcaataccataaacaaattaacaagctaattcatcaatgcattaaaaacaatgcatttcgatcaaattgagttcataaaaggaattccaggttggtttaacatcagtgaaaaaacattaatttattacataaaatcattaaagtaggaaataatatta

SEQ ID NO: 40967 - DNA, 2271 bp, Homo sapiens
ttgcattaatcagttgataaaaatattgtaaccagaggcttgagggaccataacctgtatttcccataggaacaatggttcaatattgactgattctgtgtttgcagcaaatttatagaatgtatcagccactaataataaaaatcagttgtatataatttatatttctcaattctctgccaacttgccaatataacaactccaactagtgctatagtatttttttacattgacctaatcttgcacttcccaactcattttaagattgagttaatgtctgacttccaaacccttctaggacaatttgtaatggcttgttgaaatcctgtttttctatagtgtagttgtaaatcatgacagattttaagttcactaaatatttgacttcagcagcatccaaatatgtttctactatttgataaagaggaacatgttctaattctcatcactgaggtacatggaacaaagttaatatactctgttaaaacatgcctttcactaaactggaaatttagaaactgaaaatgttaaggaaatagaatggtgggaaagtagatttcatgaattgactcaagcataagaaaacttttcactgtcctgtgttttagatgcaggccgctccccatcttctggccatgttaacacctttggacctatggctgtttatctccattagattacataaaatggtataaagcacactatactacagtgttctatacaaattacatgcttttggaatgcttttttcttattaactattaatatacaaatgtattttacagtttgatccttggaattttttttctggcttatttattttattcagatgtattcatttaaagcattaggaaagattttcaagagatggatacagaggtgaacagcacaacttaaatagccaaaatatttactcatgtgaaattatgaattgttaattaacagaagcaactgtcaaaatcatgaaacactatttctaccatttatttttattgctagagtacaggaaaaactcatgtctgttaatcattcagctttagacaataaccaagctttcatatactgtgtttgatgatgaatctactaatgccaacttcctttttttcttacaaacttcctaaaagaagcaaagcagtttagatagcaagtcgattaaatcaattaaattaaaaattgatatttttattttatttaaacgtaaacttttttgtgaactataaaatgaaatatatttaatagtaaaaaggaggcattaaatggttttggctattgttaaatgactcgtaggttaaatttctatcagaattttagataacttacattttaatctcagaatttactttggcttttatgattttatgagtcaaagtgcagatgcccagtttatttattggaatatttgctgcatttgtaatatgaaaggtcattaggaatgactcaacaccacaaagcacagttaagattctaaaactgggaaatgacaacttattatttttacaccagcattaaagccaattctctttttatttcataatagaagtaaaatccaataatgaagtcaatagaaacaatggtagtcagggttgatatttatatttttattctaatgtgtgttttatcaattaataactttttctctttcaaacaagaactcaaaaaataaattcctagcctaaagaagttcaaagatttctgattttaatatcatatattttatttgactcatcaatgtccatgtaacctcagacaagaagaatgtggacagcataataattgtaaaccatttgctactgcatgatcagaaacagacacataaacaaattctggccaaacgcattaacggaagtgagagggtttctctaaaatcatctcttcatatctaaataagaaccatagcaaaattaagctcttcacatcctctgaatcagttttgcattttatggactagctgaaatggctgtagccaaattgccaccatcttttaagaaaagccaatgtcaaggctggagcaggagagaaggggacctgctgttaatgacaatgctgagccattgactccacccatgctgaagactgctcaaaggctagaagttgtgctattatatatgcaagattcttattgtctaggtatttaggtaagtgtttgtaagtttaatcaaaatcattccaatagtttttgtttgtttgtttgtttgtttgtttttgagacagagtctcattgtgttgctcaggctggaatccagtggcatgatctcggctcagtgcaacctc

SEQ ID NO: 40968 - DNA, 1063 bp, Homo sapiens
tgagttcatatggcatattaattttggcttttcttcagctttgaattcccactatttagtaactttgaaatttcatttcctttttggacatttctcagcaccaccatgagtctaatatagtaaaattgggctaccatccaagtgacacaagccccatgcactggggaaacgtagggatggtggattctgctccaagactgagatagaatagctctttattttgcagacctttcctttatttttacttaactttcctatatttgacatgagagcaacacaatctcatgagaggtgtgaaactaaaggaacagggccaaagaggcccatgcagtctcttttgagccaaagtcctgtagatttacaaggtcttcctgatctatacttgatctaatccagtggttctcaaaatatagttcctgagtatcactgtcacccggctagtacaaattttcaagccctaggctagacctgcgaagagggcgtcacagtctgtgttttaataaggccttcggatgaaatctgatgcatgctaaagtttaaaaacctgagttttcaaatcaccttggctaagctctacataggggtttaagtctatgcaagtagagcaatacgtagagtgatttttgtttttctgcattgttgctgaaccgtaaataatctatttgtaaatctttgttagtagtaatgagtttgaatttaaaaatttggaggttaaaaattatgatcttttttttttctgcctctcttgtatgtacaggttaatcctcattacttacaaattccctacttgtgaagttgtctacttggtaaaactttttgtaatacaaaaatcaattttgtggatataaacagataagtccggtgtagtaaaaaatgtgaattgtccaacaagcacatttccagctgagttcaaagtgatgtcttgccttcttttttcagctcacaaacaataaacaagtgtccttttgtgatctatttagtgccatactttaggcatttttttttttgcttcttcttggtgatttcactgcttaaaatgtcccccaaggatattgctaaactg

SEQ ID NO: 40969 - DNA, 1035 bp, Homo sapiens
ttttcatgccaactattggtacttataagttctcaggtgagtttgctacacaactacctctttaaattgactttgttggcatgatattaacttccaatgacatagctatatgatcagttcacattgaaggcaaaaccctgtaatagacaaaattaccttgtcagattgactctggtgacaaaaaaaggcctttattttcttcaaactattatgaaattatttatattctattagaggaagaggatttaggtaatttagcaggccaagtgttttgcaggtgcacggtcacagttacagtgatttgtaatttggggaccctaatagcactagaagctgaactgctccctgaatactctgcagtgcaataaatggtgcctataacagtgctgtgaaaaatcaacatacccaaacttacagagaaaattagcaagttcacttgggggaaagatacatggcctgagcagatttttttcctctctcttcaagagaaatcatttaatccattattttgggaatcaagactgatagttatctgaaactggatatttggaaaaaaaaacaaggaaaaaagaaatattaaccaatttatgacaaaataaaatagaaatatactaatagatattgagtagtatttatacactaggtaattttctaatccctgcaaagtaggatctatcacccacaatttgcagatgaagagaatgagatagaaacatgtaaataaactggtctgagataaccataaagtaaaagtcaggagtggtttttaaatgcatgcagtctgactcaggttctctgctattaatctgatagaagtctcttaggaaatttgtcatcctggtcagatagaaaaaacagcccaagtaaaataaccagaataagcagctcaaacccagagcttgagattcccatgtcccatcagaaatatgttttgtctattcctcaagctccatagtttgtctttagaagtacatgctagacacttctacagtaaaagtagtgaacaaacgccactgatgtaagctacaaaagaca

SEQ ID NO: 40970 - DNA, 1034 bp, Homo sapiens
ataactcagtactttaacaaaaataagaagtagacactgggaaataggataattcaattttgctaatttcctttagggaaaaatcaagctattacacttttgttttacactttaataattatagaaatgttgttttcatttgtattcctaaagtgttaagatagctattaataaaactaaattttacgtcaaagatagtgttaaaaaggagacaacaatgtacaaaaataataccttaaaaagagaaagagaaatgaattatttgaaatataccaatatgcaacagatgcacattagttaggatgtgtggttaaacttaaggctgtagattaggttaaaaccaaagtccaacaatatgtttcttaaaagaaatgtgcaactaatttaaaaagagatttaataatgaaaaaaacaaactaagataaattagggtaaagataaagtaaaataaatgatggcaatttatttctgtaaaattaaattttgagacatcaatctctttgataaaaggaacaactaatggaacaattcatagtcacaaacttctatgccatttgttaacaaagtaccaaatatataaaacaaaatctgttcaagtgtatagagaatttgtgaggggtacaatttttccatgttttaacattcataattgattatgcaagtgaaataaattgttcaaaatataataatgaagttgatgtaaaaatatgtatttattcattctgaaaacatttagtgagggcttactgtgtgtcagacattctttcagatgccagaggatgctatagaaaaatgcgtgccctcttgtaatactttgttcaagttctgatcagaaggatgaatgatggagcccaagaagccaggtacaaattcaagcttcttccattcataagctaggcagtccttactcaaatttcttatcgtatctattctttagtttcctcatctgaaatgtaggtgaggctaattgtatatgccaacttgactggtttcaagacgcttacatatttggttagacattatttccgagtgtg

SEQ ID NO: 40971 - DNA, 1054 bp, Homo sapiens
tactttaaaagttaaaatgcttgtgcaaaaaaagaaaaatattaaaatatgagttacaaggtgggataggatatttgcaatgtatgcaactctcaacagatggtatagattatatcaggaatacttcaaaatcattaagaaaactgtccactgtataaatggcaagataaacaagtaatatggagaaaatttatagaagtaaagcctcaatagtcaaaaaataagaaatagaatttcactaataatcagaaaaacccaaattacaataaccatgaagtaatttttgtgtccatgaaattaacaatatgtaattgtaccaaaaaggctgtgttataccatgagaatgttaattgctacaatcaggtggaaagacaaatttagaaactctctagtgcatttgaggatggtaatatccccgccattcttgctggatagcttgtagatctcttgtatattgagatgtagaaaatgttcaaagcagcaatgtttgtaaaacaagaaattttaaaagttttaaatgttgactcaagaaaaaatatattttaaatccacaaatattatataacagataagtgaattaactagagtgacctgtatcaacatggatacacctcaaaaacacatctgagagaaaaaggtggccgagatcgcgccactgcactccagcctgggcgacagagcgagactccgtctcaaaaaaaaaaaaaaaaatacattggtttcattcagaaagacgggacaatttaaatattttctgattgataattggttgagtttatctgaagacctgggatcaaaggaaatgttcaggttaagataaaggattgtggagaccaagttttattgtgcagaggaatctctcagatagctgacttcagagagagagcaggttgtaaattgtttcttatcagacctaaaagggtgcctggctcttagttgattatcttctggatctagaaagagaggaaggaaaacaagggggaaaggggattttctatacaatgtggatttttcccacaagagactttgcaggtcaatttcaaggtaaggcaag

SEQ ID NO: 40972 - DNA, 1068 bp, Homo sapiens
tcttcatgtaaatctgggatttgaatttatacaatatatgttcctaggaatttctaaaacagtaaattattattattattattattattattatttttgaaacagagtttcgcttttgttgcccaggctggagtgcaatggtacgaactcagctcaccacaacctccgcctcccggattcaagcgattctcctgcctcagcctcccgagtagctaggattacaggcatgtgccaccacgcttggctaattttgtagttttagtagagatggggtttctccatgttggtcaggctggtctcgactctggacctcaggtgatccacctgcttcggcctcccaaagtgatgggattacaggcatgagccaccgcgcctggccagcagtaaataaaattttaaaacttccacatttagataaatcattgtaaaacttcaaaactcacaaagacaaaaacaacatttaaatacagccagaaaagtactcttcccttaaattttttagactgatagcatgcttctaaaacaacaataatatccagaaatgtaaaattatatcctgaaagtgattacacagaaatatctgtcaacatagaattcttataataatgtagaaaataatttaagaaggtagacaaaacaaagaccttttctggtcagaaaaacaaaaccagagatttattactaaaaaacccttatgtagggacttccaaagtatgtactttggatggaggaaattaaatccagaaggaaggtagaaagactgagatgtaacagagtcaattaactgaaaaaggagtaagtaaacacattggtaaaactaaacaaaatttgactaaataaaataagaatcaaaactctcaattttgtaggtgaaaatagggtaggactaaaacactggcttgtaatagtatgcaggttgcataagagtaagttgaagatttctaatggtttggtattgttcaagagaaaagacatagaaatatggaaactgtaaaatgctaaaatactaaagatttgatgttgggctgggcgcggtggctcacacctgtaatcccaccactttgggag

SEQ ID NO: 40973 - DNA, 1657 bp, Homo sapiens
acatttgctgaggagtgctttacttccaactatgtggtcaattttggaataagtgtgacgtggtgctgagaagaatgtatattctgttgatttggggtggagagttctgtggatgtctattaggaccgcttggtgcagagctgagttcaattcctggatatccttgttaacttctgtctcattgatctgtctaatgttgacagtggggtgttaaagtctaccattattattgtgtgggagtctgaatctctttgtaagtctctaaggacttgctttatgaatctgggtgctcctgtattgggtgcatatatatttaggatagttatgcttgttacctgtgtgacaaaatagtatgtaaaccaaacttctgtgctatgcaatttatctctagacccaatctccgcacgtacccctgaaaataaaataaaacctaaaaaaagtctagctgttattcctgatcttcatcatctactctctctcctctacataggtagcaatatcagtttatgacttagacttttatttaaaaaaataagaatataaaaatgaatttgtaaccactcaccatttatgtagataaataacaccaaacagtatacattttctttgcttgttttttcagattattttgtatcctgaagatttgatagtagtttacgtagtttttccttatttcatggtagagctgtgtattcttccattatgtaaatgagccacactttattcagccagtgcctactagtggatttttgggttgtctccagttttgtcagtttagcttctaccctaagggattgaccacagtgtaggtttattcctgaaaggaaatttcattttggttaatatcaattcatagggcccagacatctcagtaacatgaggtttacttccattcactcacatttccttcttgcacacaaatgcaatgtaaatctagcaaatctcatttcagctgattcttaaattgtgtttctaaatcatctgttgactgtcttagagtgatttatgggttttagctttcaaggcacaagaaaccactttaacttccccttatgttttcttgcaaagaaaatgataccacaaaggtcttggtgatggttttcttttttttccctgcctatttcttcatatatatctattgttgttgtctgtgaacattttggttttattattgtagttgcttagtgttttgtgggagaatctgtagaaactaaaaactatcactatctctccagaattctatattctattatattataatatgataattattttattatcatataacatatcttctgtgataagatatattatgtcatataattattatatcatcaaagattttatatatacaaaataagtattttatacagaaaatacataattttgaccacatcttaaggttaaatatgatttaaaacatattcttcatgttagtgttttgcctagtttcatcttatgattaaggtcagctaactttagtgtcttctttcttctctataaaatgagccataaaaatgacaaatatatgttttcaatgacaaaaatatgttttctaattatctgcttttcattcaaaagttgccataaccaagtgggattatgatacataattaaataaggctactcagtatatatgggaaaattgaagaacttc

SEQ ID NO: 40974 - DNA, 1127 bp, Homo sapiens
gctattttcattttctacctaacttcagccattttatattaatttctctttcatcttttgttaaaaaatctaggttcttgatggctttacataacgacttggtttatctgttatatacagtaatttacctgcatccatgggggattggttctgggacccctgaggataccaaaatcccaagatgctcaagtctctcatataaaaccaagtggtacaattggccctcctcatctgcaggttttgatccacagttggttgcatttgtgaaagccaaacctatgaacatggaaggctggttgtagacataatagtttctgaataacaatacaaacagtattaccaaaaatttgttttctgaacatagctgtagaatatttttgcagttatttttgctcttaccttatgtatccctactaggtattacaatttattatgttttttggtcacttggaataatgtctttctgtctctttaagccataaacttgatgcaaatttttcacttgctttcatatattctcatgctgatttaaatttgttttgtacttgtgtaaaatatgtacctgtctgtagtatgaaatctaaaaaataagatcaaatgaagaaagtctagctgttaaaaacaaccccattaaaaagagggcaaaagacatgaacagacacttttcaaaagaagacatatatgcagccaacaagcatatgaaaaaatgctcaacaccagtaatcattagaaaaatgaagtcaaaaccacaatgagataccacttcatactagtcagaatgactattactagaaagtcaacaaataacatgctgatgaggctccagagtaaagggaacacttatacactgctgatgggaatataaattcattcaatcactgtggaaagcagtttggcaatttctcaaaaaacttgaacaacagttcaacccagcaatcccaataatgggtatatatatatttttttctttttttttaattatactttaagttctagggtacatgtgcacaacgtgcaggtttgttacatatgtatacatgtgccatgttggtgtgctgcacccattaactcatcatttacattaggtattactcctaatgctttccctcccccctccccccacccca

SEQ ID NO: 40975 - DNA, 1042 bp, Homo sapiens
gtaattgtattcatcatgttaatagatgaatgaaggtaaaccgaatgctaatcttaataggtgcagaaaatatttgacaaaatttgatatccattcataatagaaactattaatcaagaaaagaaaatgatattaagctaataaaattttcaaaaagcctatagctagcataatacttaatgttaacataatgaatgtcccccaccccaagtttgagaacaaagcaatgttttcctttcttaccattcctataaacattttactggaagtcctagaaaatgcaataaggcaagaaaaaataaaatacacttttctatgttacaatgtcaatataaatgtctattatattctcatatattagcaatgaataatcaaattttcaaataaagaatacctttttagtataacaccaaaatagaaaagttatcagtttaacaaaaaatacagtatctgtgttaactatgaaacactagttaacaaaattaaacaggcaaacaaattaagagatgtaaattgttcattagttagaggattgaaaatgtggtgatgtcaattctccttaattttacttatggatttaattctattccaattaacatcctagtaataaaattgtgaatataacaacatgacactaacatttatgttagttataatatgtttatattaaggcagagccaaaacagtattaaaaaagaaaaataaaattggaggtttgtcatctctgatcttaagacttcctataaagctacagtaatcaagacagtttggtacatatcagcacaaggatagacacattcattattagaaagaacatagagtccagaaatagacttacacagataaaaatgtacttgtttttgataaagttctaaaggtaattcagtgaagaacaacaaaaaccttaaaaaccttatgtcacatcttgtacaatattaatttcaaatgaaacataggtctaaatgtaaacctacaaacattttagaagataacatagggggaatctttatgtccttgagttcagcaaagacattttagatat

SEQ ID NO: 40976 - DNA, 1044 bp, Homo sapiens
ttgacaatgacatcacaaagataggggagggtgattgaaaaaatttagtgtaagttctttaacccatacataaaatagtgcaatgttatagaaacatagaatcagattaatttaaaatgcatattagaaaccctaataaatttactaaatctgatttaaagtactgtaagccaacagagcaaagcaagctagaatttcttaatgctcagttaatctgtaaaaatgagaaaagaagaaaaaactaacaatgaacaaaaggaacaaataaaaattacctaccagattagtatattttaatccaactatatcaaatttactttaaatacaaatgttctaaacacaccagtttaaattaaaacattgtcaaatgggataaaaatgtgagacgcaagtatatgctctcagcaggaaaaccatattaagtataaatgcgtaaaaatatgaaaagcaaatggattagaaaaggtacataatgcacaaaataataaaaaatagaattatagccgggtgtagtggcttatgcctgtaatctcagcactttaggatgctgagacaggaggatcacttgggcccaggagttcaagaccaacctgggcaacatagtgagacccaatctctacaaaaatttttttaaaaaatagctagatgtggtggcacatgtttgtagttccagctatttaggaagctgagatgggaggatagcttgagcctgggaagtaggggctgcagtgatccatgatcacactactgcaggccctgtctcaaaaaaaaaaaagaagaaggagaagaagaaaattagagtgtctatgttaatatcaaacaaacatcaaaacaataaacattatcagaggtaacaaggaagattactttatgataaaaaggtcaattctccaacgagacataacaatcttaaatttttaaagagttttaaaaatatgagacaagaatggaacttaaagatgaaatagagaaattcaaaattataggtagaaaatgcaatatgtctatctcagtatttaataaagaagtaggctgaaaattagg

SEQ ID NO: 40977 - DNA, 1414 bp, Homo sapiens
cactgaggtggagcctcgggaagttcacgccctttgcagcatggcctgcctggcccctcctcttccttccctggaaaccagggattccaacagcaagtgggaaattctctagcaggggactctggccttgctgaggatccctgtttcccccactcttttttccccttttcgcccaataaaaccctgctttgctcaccctttaaaccgtctgcgagcctaaattttcatggctgtggaatggagaagaaacctgtctttagccgaactaaggaaagtcctgcaacagtttcatgagtgttttcttcttgtcatttagatcaaactcatcaattcctagaagaatcttgttcattccctagttcaagctgcttctcattcgttgagtctctctctaacacattatcctatttgtgcctgtcatggtacactgtacctaaaatgattgaatagtttctttgataatttagtttcctgccattagaatataagcttattaaagacaagtttactgtttgtcttgttcattcctatatccccatcacccacaacacaacccattccccgtcttgcataccactgccatttagtttatttggttgacagttgccgtgatctctgtattcagttcaggatatgcatcctttggatttatagtggcattctgatcaggaatatcagcatcattcttttctgtggattattcatctgtgaggctctaaatggttttgtttatgtgtttgtttttgttcaaaggtcagctcaatcttatatttaattctgaaaaatatgacatgacaaatgttaattataattattattcacttgtgcttgacaaatactgctttctaaagaaaaattatcattgtgatactatttctttaaaaccccaaaatgtaaccagtggacttctctctagtatactatactaagacttcaatacttctaagctattgttttcgttttttattactcaaactgtttatatatggagactgcttatcagataaattcattctgggctttttgcaattatacttcaactagcattcttaccttaaaaagctaatagtattgtgttttaataaaattgaataaaactcaaatatacccagttttcacaatctttttaaaagagtctattgacagcaatttttagttggaatttttatcagaaatatcctccaaaccaaaagctttggacaaaatatttagtttgatttatttggtcattattgtggctgtaaatgtttgtgtttatgtaaactgtttttgtctacatggtattgaaacatgaattttttttgtctcaactaaaaacaattgtattccaagatatcttgaagtgtcttcacgtgtgtaaaatagtacttcagcattactgtatttacaatgatattaattataggtagatcca

SEQ ID NO: 40978 - DNA, 1159 bp, Homo sapiens
gggctgtggccaatctggtgtgctttgcgtgtctgtatggtttggttgcagcctccatcttgctttgcatcctgggggcatggccagtaactgcttggcaatccctcttgtttggtaatccctcttgagggaatgagccttctcagattagatatctgcatgttttcctagccctgtctcttatagggccccacccagcgactgggttttcttctggctggctgtgtaagtactatgcgtgatgtttgtaaaaagagctctaataatttggcctaaagaaagaagtgtttggatcaagtatttttttaagggaagttaaaagctgtggtacctttcggttcacatgactttaatctttcagaaataaaaacagccctaaagactactgggaaaatgcaggtcagatggaagtttgctaagcgttttgaggttacaaactgcttcatgggttttgagaactctgtcttgcctgcttcacaattggtaaggcctgcagaagtatgaaactaaatgcacccttaactaagaaggcaaacgttgactccagttagcacaattaaagcaacttaccaggatttaccttaaagttaacaattgttaagggttaccattataacatgtgattgaaactactgaaaatagatttacatgcaaggtgtgtaagaacagtaaaatgtgttttttagtaaaaggttataagaagggatggaaataaaaatctttgcctagggtcaaaggattgttttgagttaatttaggaaaaagctgaaagttcaaagaagtggtagaagaattgtggaaaataatcttgcagaagagactctctgtgtgaacatattgactaaattttaaaaagggtattatatggtttttctgtaaattgagcattgaaataaaagcataacaaggttttcctacggttctaatctgctctttggcaaaatttgtaaagggttataaaaggtctttgtttctttaaaatttctgagtcatgattttggcaaaataacttacgataatctggaattctattttataatatcaagtgttttaaaccttaagtatttaacagccttcccaaaataaaacttcagtttcaaaattgtcttctctggcacctggctttttgaatgcttcagaggacccatgaagtgttcag

SEQ ID NO: 40979 - DNA, 1281 bp, Homo sapiens
agaataaatagataaataagaattatgtcttatttatctctgtgagctcctgctcaaagcctacctctagaaaagcctgccattataccttgaatatggtaaattttccataaatatttctttgatgaggaactgaatatggtttttgaattagagaattcacctcccaaaaaaagggatttgtgaaaatagtgatcttaggttttgaattgccagagacattcccaatattaagtattaatagttctcccctttgctctgagaagtgttatgatttggataacacatggttttttagagtaaagtgaaagcaagtttattaagaagtaaaggaataaagaatggctactccataggcagagcagcctggataccaaattttatgcagcctgtttattgaatatttgcatgaattttccatagtatcttttccactctatcatttatggtttcatgtaaatattttgtttctcaaaggagattgtaagctacttgagaacataagccattttgtatcctatttctccaaaatgtgagtatattgggagtactgacagtgaataagactaaggcagatctacagggcagtaacccagtaggtacagtaatactcagtacaggtattggtattgatgatgaaattttttaaaatactgctttttagacgaagatgttagttaatgtgtagatgtattgagatctatccaggttgagaacagtagttctaacctgtgttgagagggctgtcctctaggcacaatttctgcagggcagacggagatgatgtctgattccccattgtagacctggcaccaggcaaaacatctgacacttggtatatgctcattaaatatttgttaaattaatgaaaggtaaggcttttagcaccctacatattggtgtttcataagcctctaccagagccctccaaattaggcccttggtaggtggcattataaaatctatgtgcagtctgaagagctcttgtatgcttaaatatgagctcagcaagttgatgagatggtagagctaggtcaggagacacgcagtcttctcagaccttccctgaaactgttcccatatgctattttctgtataaggtcctcgccttgaagaaaagtagatttttttttttttctgtaaaactctgccctacttggaaagccctgaagatgagcaaaggaaggcaggattcctttgtctctctgtgtcctcttccaccaacagaaagagcaagctctaagtaaaaggttcccaagttgggatagggggcagttgttg

SEQ ID NO: 40980 - DNA, 1138 bp, Homo sapiens
atttttctcctctttataggtcacacttttccactttctacttcataatttcggattagatgccagaattttaccttattggctactagaaacttctgaattcctaaaaattttacggaggtttgttatggggcatggtataggatacttagaaacagtatgatctttttatgtcttgctttttaaaaagctttgttaggtaggaccagggcagcatttagtctagagtggatttttctccactatcaaggcaagacctttcttagtactctaaccaatgccccataaattatgggattttcccctccggctgttgggaacagagctggcggccctttgtgaatactaggcactgttccctctaatactttcaggtggtttttccctggctgcaggtagtttcctcacgtgctgatcaatcagtactcaactgaatattcacagctctttggatttcgctcggtgtagtgctgtcctccctggtatttcaccctgtgacctttaaccatcttcggctccctggacttccatctccaagtcctccactcggggactgctgatctctgcctaggtcaccctttcctaggccatggcctgaacactctctccaggccagctgctggggcaattgtagagttcacctcatttgcttcccttctttcagggaccactgtcccttcctgccaggtggctcccagcatcttgagagctattgtttcatgcatgttgtctacttctatcgctgttttcaggcaggagggtaaatctggcttcagctactccatgttcatctgaggttgaatcagaacctcttttggatttatttactcattgatatgatatccgttagtttgaagaattaaaggcactgttaggataattgctacataaaggatttaacttagtgtacacacttaacatggggggtgaggtctgtgaaatccgtgtggagagaatgtgttaggaagtattctcataccatgatgtaaggactgttggctctgcctttcttacttcaactgaaagttgtgtaatttaaatttagttgtgaatttttgagactttaaaagaatggctcttttttctccttgtttctaatctgacattcttcaaagcagctacattgtgtgtaggggga

SEQ ID NO: 40981 - DNA, 1048 bp, Homo sapiens
aaacatttttatagggaacttaaataaaaattcatatagaaccagaatctatcttagtatttgaacaactcattggcagtaaactcagttccttctgtacaggattaatggtttccaagctgtaaattatgatttagagccttgtgcattaagattgactttgagccaggggaggcttggaagaggacaatgtatagtttgctttaggaggtcttggagcacatttgtgtggggaaaacagcagtgagttagagtgaagaacgagaaatgccagacgcaggggatggtatctggtagtctatgtgtcctgttgtgcagagtgctaggaaatccaaagcgacttcagaagtagaactgtggattcttagcggtgctaatagtgtgagttgagtgatgaggaggtggtcgtagttgaaataggataggataacagagctcgtgaccatgagaagtagacaaagagatgaattaaggaaatataaggaaggaaaaaatatattctggaaatgggctgaactgggggcaaagaacagtagggttgaagattttgctaaataaatcattggctgtgaactcttggctctcgtgagatgcatgaccattcccttgctcaggcatttccacctcctggaaagccttgtctttgcctgtcagaatattcaagccctaatttaacttctaccagctgcataaatatttgtttcatgacattagctcatagcaatctcttttttactgcactcatgtactactattataaatgtagtagcacttaattgatgtttagagctataatttaaattttcacctgcatgctttgtgtctccaataaggttccaaatttgtatagaattgggtagtgtaaaaaaaaatcctctctattgtccaatacaaagttatgtgtatagcaagaacttggtatgttatcaagagttttaaaggatattgagtttctattatgtccccaaaactttaccagatggcacaaaagaagggaattataagacgcagttcttattcttaaagtacagataatcaagttggatat

SEQ ID NO: 40982 - DNA, 1077 bp, Homo sapiens
gatgattatagtgataggtaccaaggagaaaaaaatgggactacgcctaataattagtcaaaagacatacgtatatatacacacacacactttgaagagagaaagagagagagggagggagagagaacttattgttgattaattgttttcagaagagccacttcaattccaataagaatcacctcagagaactgaaagtaaaccatatctgcttctagtgtctatgacacaccttgcactgtgccttaataggattactaatatttcccacagaggaggaagtcttgcttctattcttgcaaaacccctcccccaaatctgtctcttcaccaacagttatttgtttgtattaagtttcatgatgtcccaagatttttgtttgtttttgctgttttcttaatgtaaatgttttcataatgagaacacgttacatttttgacaacctagcatgaaaaatcttaccagctcttttctgcagtagatgcagcgtgcagcctgcaaagaccccatgtccaggttaggccaggtcacctgaacaggaccaggatagaaaggggaagagatttgtagaagacacacttcgtggtctcactagggtgtgcctgtttgcattttgtttattgtttttgcaaccattcatatgtgtttattgtttttgtaaccattcataagtagcagtaatttagcattctcatattaatattttttttcttgtcactagtgagtgtttgcatgtgtgtgtgcattggattgacgggagggaaggtgactctgttggtacatcctgaatactaggatcttgttcggcccaatcgcagtgttacaggtatcttgttaacattcaagccttgatgctttgaaatagcagttttgccgtaattcattgcctaaattctgacttccttactaagaacaggaagcatagtgaagtttggtaggagagaaacatacctcggacagtaactgtggctaaaccatagtcatggcatttaacattaatgtgaaacataagatttgtaagtcttccaagtaccatttcttaatgcttacaataagatgacgaatttcatagttccc

SEQ ID NO: 40983 - DNA, 1044 bp, Homo sapiens
tggtgggaactgttctctgctggagagagagcaaagagagaatatgagagctgagtttagaatcctgggaaatattcctgctttggggacgaatgaataatagaatctaataaagatgactaagaggagtagtgagggggtaggtggacgccaagaaaagcaccattataggagagatgaattatagagtttccaaattatcaatttcattcactgaaattggtgttcaattgagggtattctatatgccaggttctatgctagtccctgtagatacaatatgaacaagacatagtcttggtcctcaaagaattcattggaagtcagagatcatggcccatgtggcactattgagtgacttttgctgggattgcagtttaaaccagggaaacagaacgcagcctgtgggtgagccatgtttggagacgggcatgggagggtcagaaggaggctggaaggctgcctggagaagagactgtggaagcctggggagggtgttaatgaagtatctgactgtgtgatctgcagctgctcagacagctgaagtcagatggcctgggatggttgagaatcagggacccaaagtcaacatgagagcaaagagccactccagcagctgtgaagaagtgaaaaccaaggagagaagggggtcttgcattagcaagtggggatctgagtttgagatagaggagaaggagcaggtcaagaggataatggggttgaatttgcagtgctagtggagggctcaagaggttggaggatggagtttattataacgggagctcagagaataatcatctctaatttattattgacgctgtgctcaacattcaacatccatgttcttcctcaaaagctccctgctggatagtgtaagtgccactaccatagaaagattctacttcatcatgcctggtctactacagcctcttagctggtgctcctgactcaaattactctgtttgtggtcagttccttattccactacaaggctcatcttcttaaaacatcacgtttaataggttactgtgaagatctaaaagc

SEQ ID NO: 40984 - DNA, 1060 bp, Homo sapiens
ttcctggctgctacacattgaaataaataatacagtgtgttaaaatctttggtttaaatttagcacataaaatgccccatattgtgtgacactctcagctgaagtctagagagtgaagtttatgtttttataaaactagcacatacacactgctaaatgaaaaaggcttcaatggaagaaccacttacaggaatcagcagactgaaaatcttatgatttatcccagtatgtagagaattcaccttggcaacttgctgaaaaaatgtagatttggagccccagccctggagataatgatgtggattgcccatagactcaactttgaggaacctactcttaagcatctagttttggaagattgctatacataccatcctacatcatttgaccaggaaggaaaaaaagatgagaaaataagatgaaggcaagaaaagagacaaaaatttaagtcctgaaaaaaacatttctaccagatttttattgtttaaaaaaaaccaaaatttcagtggatgctagatagaatcacaactgtaagacaaaacagaaaacaatgtgaagtgtacaagactgcacagaaaacatatcaagatactgttcaagaagaggtaactggctataaatttaaagttcaagtgttaaagttaaaatgtagctctaagttttattttcccaacaacttttaaaattgtaatgtgatggatgtgctacttgtgatatttttggtcatggagcaggactgttataaacaattaaattggtttacttaatttttctcctgaataccaattcgtgccagtgaattatcaaggcgactttcaatttccaagatgattttctactggtcccagcgttgttgtgaagatgaattaaggtctgaggacagtgtctggcatattatcagtggggacagtgtagtggagtggttctgaacacatgctgtggatgccggagaccctgcgttcaaatgactgctctaccactaactagctctatgcccttgtccaagttaacttgatttagtttcctcatctgtaaaataaaaaaaaattagtgcctaccc

SEQ ID NO: 40985 - DNA, 1030 bp, Homo sapiens
aaagcatttctgcatcattgtgaacctgtttatatgtgctgaccaagtagagccattggagagggaaatgtagatgatatagaggaaagatgataattgagcagaatcctggagcagctagagtgctttgagcaccagaaaggactgattggggcagaaggaggtatactactaagtttatgggtagaaactgtgcattaaacataattttctttgaaaaattcattattttattgttttttcttttttgtgaagtgaaaggcaaatttatttatctggaaaaactggataatattgacaaaaatggggaacacttggaattgtctctgaaggaaatggcagagagtgctgagcagagcatcctggaatgagaggccgacattcagagggctccacagaagtagcccagcctgtgaaattggtgctttttctcagcccctctagattacatagggaccgaaaaaccagtgaaccaaattgagtgttttttaggatgggtatgaaggacaaggtatcagatgagttgggatgctggcaagacaaagggcaaagtggttcacagtggaattcagagacaatagtgaaagaaacccagagcaggaggaggaggaagatggtgaactgctggaattgaggaactgggtgtctccataaggttgaagaacaaacactaagtgtgaagattaggaaggtaggtgatgtgacacaattgactatattagcctctcttagagacccacatatagtaatctgaacttcctgtcaggttttatggacaataatcaaacatttcagcaagtgacatctcaaaaaaggtcacattctaagttttagcttatctcttgcattgttagtaattaaataatttctattaaatgaaaacttctgatgaagttttatttgaatgtttttctctaacatcggccattaattggttcaataaggtagtttttaataatgaaggttaattgagggatgcaaatggtcaggttttatatgaaaatgaaacaccaaaaataaaaatctattg

SEQ ID NO: 40986 - DNA, 1050 bp, Homo sapiens
atagtgcatttcaagattttctttatattggtttaattgatcttataattattttaaaataacctaagttatctggtaatagtttattggtagatggttgagcagtatctttcttaactcttatttagagatgggaattcaatatgtcttccaatatttcatacaatggaggaaggatttaaaaagtgaatgaaaggttgttttcccttagtttaaaaagataaattgtaatatccaaaatattataaagtaagtgggcaacccaaatcatcaagatagttaagaaaatataattaagtcggttttaacaaatcttaaaaggagaggagtcatacttgttaggacaagcttatgctaatgacatatcagcctgtgttatcccaggtcaatagatatgaaaaccacagtttacccagggttacttaactgataataatagtgtgaggataacaaattgaactgatacaagtagaaagactaagaatgatcttcgggataaatgaaaacaaatggataataaactgatcttgctgagtaatataggttatggtgttatgctttaaaatatcagtattaatagaaatattcttatgttcctttgttcttttaaagggtaaaaagggctgtttatctttttttgatcatgtcatcagtttcattgggttgccttattttcattcagaaagagtatggactaatatccatattgaattatgatttagacttgagtgtactggtaggaaatttatcagttgtgtgtgtgcaatagtgcttggaatgaaatgtcacattcacctctgatactgcacctactgtgttttctcataggcttaattttgccttttcaagtttgaggtcctgttgttcaacatgaacaacagctttacaaggaactatgtaatttacattgttaaaggaaagtatatgtgacactgtaacctttttactctagcattgttttcaaaatgttaattactaatttttccggaaatgatttttaaaggtaaatgtataaaacagatgggtaaataatatttggggaggataagt

SEQ ID NO: 40987 - DNA, 1043 bp, Homo sapiens
gaacactgctgtggctggagcaccaagaacaagggagctgcacagggcttggtccacacagggtcttataaactcagtttaggattttggtcttcatcccaacttgaatggaaacccatagaagttgttcagacatggggatgaaaggattagatttgcattttgaaatttacttggactatgtagttgagctttgcatggtgaacaaattggagggtggcaagattggatctagaactagtcaagagattactgcagtaaaccagggagtagatgactacactagactaatccactacagtgaattaaagaggtagaggtggagaccagagaaagattggtgagatttgagagatttccaggaggagaaatagatagggcttgatagtacctgtagagagtgaaggagaggacgtagcctagaatgagtcctaagtgtgtggtctgcatgcctgaatgggcagaggcacaatttattgggatggggctcactaaggggaaagccaggtttaagaaagtggtgacttttgtttttggatttgttgagtttaaagcggctttgaattatctaaatggagatgccaagtagtcagttgatcataggagtctggaggaaggggtggtctggagatggaagtgggtgtccttaatgtatagatggtgtctgagttgtagtggatgagagggtgtaaagagaacagagacgaaaagagagtgtggggctaactctggagaaaccctaacttttacaggcctgattcaagggagtgatgccaccaagattaagaaaggctggctagaggtccataataaaagagagtccagtgtcatagcatctatgtgaggagaggtgcaatagagattttgccagggctgctgtgataaagtcccacatgctgggtggctgaaaacaaaagacatctattgtctcacagttctggaggctgcaagtgtgaagccaaggtgtcagcagggttagctcttctgagggctgtgaggggaaatctgttctgtgcctctctcccagcctctggccatggttt

SEQ ID NO: 40988 - DNA, 1008 bp, Homo sapiens
actcacatgtgacggaggactagaccaaggtcagctctgcatgccgaacctttggaagccaggacttcggagatacaaagataattgagtgacaaataagtagcagaatatgatagaagggatattatccttacatttgtgactttctttttagctataactctgtgacctcatgtagcagttacacaaaatgggactgtaattcttacctttggagataaaatgagtggtagaggaaatgtttgttaggcttatagaaagatccaactattgtgtctttacagtgaacagaataattaaatttgatagaaccaactttcctactgtagaaatacttttaaagagtttatgtctaatgacataaaaatatacttaggaagctctgtttttatacagaacaaagtgtttttcaacttctgttgttacatcctttgaataggttaacatttctgcctcctttgaggactaattctttgctctttcacatcagtgaccaatgtagagtttgcttacatttatttacaacttattaacattactagagaatagcacactaaatgtgaaaggaacagagtaagatccatgtcagggtatcaatttttaactcaataaacttatcagtattttaaaatgccattttattatttttgcatagataatgtatattacatcttatttcccaaagcttaataggtttgaacatggactttatttgtagaaggcaagtaagagaataattataaaagtgggtctttgagtagaataatgataaacttacccatattataaactgcattgtgacatgtgtttccttaaaagaaatgtgattctgaaaaaaatggcttgcatttgagcctgttactgtggatctagatttgcatagaagacatttatagacggttcctgatgtgagctgcagctggtaaaatacattccttacctatccaataagaatataataggatttgctttttaatttttaaagcacaattatgagtcaatattaaa

SEQ ID NO: 40989 - DNA, 1047 bp, Homo sapiens
atttgattattgttagagaagagtgaaaatttagtatgcccttctgaatatttttagagaggaggccagtttgtgaaacaagtcagcctgtcagatacagtctggccatatcaaagacttttcaaagtctatgaaaatgtggagactcttgagttagagaacttggatctcagaagcatggagagccaaacattatggtaacaacttactgtttctctcatattctaactacacatttaaatgaaaccaatcctgaatgaaacaatgagttttaaaatggttagtttgggaaacttcaagtcttaatccttttcattgtatgaaataatatatcttcttaggttggaattgcgcacttcatgatgtactttaagtaacaaaagtggagcactttaatttttttctaaagagaaagtgtaaaatacattatcctgcaaaacttccttttatcctcacagttatttcttctctttcatggtgtaaaagaggtgcatttgaaaatagcaccaggaacctgaagaactcctttttttttgttctggtttatattttcaattgtgtatttattcataagttaatttatcttaccgttctcatactgatctttatatcctcagtctatactaaatttatggtaatactgattttatttagcctgtaatcaggattataaaataaaacatttttaagtcttccctctttgtcctttccaagtgccatcatcagcaactaggtatagaccagagagcatgaattttgaataaaatcttcactgagcttaggcagtatttggggagtcacatgcagcttggggagtgctaattgtataccattggcagatgatttgaaggaacaagtataagtatgttcaaatcaaaaacacaagaattgctgcagagatttaatggataaaagaacaattgatatgaaggagaaaagacaccccaaaaaaagttggtgtaagatcattcaggaaacagatatccactacagtatttcctaggattggatacagtggaatcacatttacagtcaagaatcatttga

SEQ ID NO: 40990 - DNA, 1069 bp, Homo sapiens
tcagtcactgcattacttttcagtgtttacaggatctctgcttttatagtggtctctcttaacccaaataacaaagaaacatcgtaagacttattaaatcactaatgaaataccccatttattttatatatatgtgtatgtgtgtatgtacatatatttcatagtaaggtagtttttgacacctaaatattatagcactagattttttaaaaattcatttttatggttcagcattatggcccttcatacctgtagaattagtagaattaggtgctggtggtcgggcggtggctcacggctgtaatcccagcattttgggacgctgaggtgggtggatcacaaggtcaggagttcgagatcagcatggccaatatgatgaaaccccatctctactaaaattcaaaaattagcctggtgtggtggcacgtgcctgtagtcccagctacttgggaggcagagacaggagaatcgcctgaacccgggacgtagaggttgcagtgagccgagatcgccccaccgcactccagcctgtctgacagagtgagactccatctcaaaaaaaaagagagagagagagagaattaagtgctggctgttttattatgggcaagaaaaaaatggtttacaaatgacacatcctttttttttcttcttgagacaagttctcggtctgtcacccaggctggagtgcagtggcgcgatcacggttcactgcaacctcgacctcctgggctcaaatgatctcccgcctcagtcccctgagtagctgggactgcaggctggcaccaccatgcgcggctaatttttgtgacacatcctattgttaaatgcatttataagcttgccaaagtgaagtagttaaattatattcagagtttatatttttaatcttgtttaagtgaattattcatcttttaactgataatttttgctataaaatttctagtggattaggatggtttcactttcacaaaagtgtgctcaatacagtgtatgacatgtgctgggcatacagttgatatttggtggatgtttaaagtcataattctcaagaagcttacggtccaaa

SEQ ID NO: 40991 - DNA, 1048 bp, Homo sapiens
attatccaacctgacatatgtgaggactgcctttggcaaatcaggacacatcatgaccctccaaatgatcatgttacaggttgatccttggagaggcaattttgaggggtaggaccttgaaattggaagaaccttgtgcataacgcctgtctcttctcagtgcttccacatcaattgttttggagcacctggaatttttaatgactctatatgtaatgacttcagtttgaaggacttacctgtaaattaactattattatttgcagatttttttaataacaaataatttaagttctaaaaatacttatttggtgctccagttaacaaaaatagccagcatcattgattcaattaataaataactaccaattcagaagtctttacaaggtcgctgtgtgaagtaaccaattaatctttggagccctgcatgagctagatctatatattttcaaacaactagcaaagggctgagacattcaagtatcccaataatttctcctcatgattgcaagtatcaggatctttggagaaatttagttctgatttcttactttccatgtgattaggggtctgtgtgatatgaaaatatgaagcaaaagagtagaaacagaggttagtgaaaatcactttcctttattttttccactgcatcatttgattacttttttttctgttttataatttatataatgtaggagattcaatttaggtgacaaaaagagtctattttatgtagtagttccaagcttgggctctgcagtcagatcaagagtcagaatgagcaacagagataaaaggatgatgatttccaacttcaaacattttacaatctagaagagacatggcttatagtaaactttattaaaacttacaattgggagtagagtataaatggaagcaggattttttccaactggaaagattagagggttcttatgagaggaggtgattcttttttttactgaggatcttgaatgttaagtagaatttcactgagtaaagaagggagtcaggagctcctcatactctgacctgggatgggagggga

SEQ ID NO: 40992 - DNA, 1063 bp, Homo sapiens
ctgataaaacagactttaaaccaacaaagatgaaatgagacaacgaaggccgtgacataatggtaaagggatcaattcaacaagaagagctaactatcctaaatatatatgcacacaatacaggagcatccagattcataaagcaagtccttagagacctacaaagagacttagactcccacacaataataatgggagactttaacaccccactgtccacattagacagatccacaagacagaaagttaacaaggatatccaggaattgaactcagctctgcactaagcaatcctaatagacatctacagaactctccaccccaaatcaacagaatatacattcttctcagcaccacatcacacttattccaaaattgaccacatagttggaagtaaagcactcctcagcaaatgtaaaagaacagaaattataacaaactataattttataaatttatatatataaatttataattataataaactataacagaccacagtgcaatcaaactaggactcagggtaagaaactcactcaaaaccactcaactatatggaaactgaacaagctgctcctgaatgactactggatacataacaaaatgaaggcagaaagaaagatgttctttcaaaccaatgagaacaaagacacaatataccagaatctctgggacacatttaaagcagtgtgtatagggaaatttatagcattaaatgcccacaagagaaagcaggaaagatctaaaattgacacgctaacatcacaattaaaagaactagagaagcaagagcaaacacattgaaaagctagcagaaggcaagaaataactaagatcagagcagaactgaaggagatagagacaaaaaagcccttcaaaaaatcaatgaatccaggagctggttttttgaaaagatcaacaaaattgatagaccgctagcaagacttataaagaagaaaagagagaagaatcaaatatgctcaataaaaaatgataaacgggatatcaccaccaatcccacagagatacaaactaccatcagagaatattataaacacctcta

SEQ ID NO: 40993 - DNA, 1029 bp, Homo sapiens
acacacacacacaaacacaacacaccatggccctttaccccgaaatgcttcagtatagttattgacttaagtaaatttaacattgatatacttgaatctatcatttgtattacagttttgtcagctgacccaataatgtcctgtaaagaagttctcccactaccctataatcccaggtccagtctagggtccagcattacatttacttgtcttgaatccagctttttcttttttttttttttttttgagataggtctcactctgtcgtccagtggcatgatcacagctcactgcagcctcaacctggctcaagcaatccttcctcctcagcctcctgagtagctgggaccacagactcatgtcaccacacctaatttttttttttttttttttttgtagagacaaggtctcactatgttgcccaggctggtcttgaactcctaggctgaagcaatcctccttccttggcctcccaaagcactgggattatagacgtgagccactgcaccggtctgcctttagcttcttttagtctagaacattttcactggctttctttgtcttttatgacattgacatttttaaataatacagtcattttgcctcctttctgttttcttcttctttttttaaataatagaatggtccttgttttaaatttatttgatattttcttgtgattagattcaggtgctggttgatgttaagttcctcacaggatatcacatctggaggcacacaaaggccgtcacaccaaggtgatgtcaattttggtcatctggtcaaggtgttgtcctattccttcactatatagttaccttttttctctgttgcaatgaataagcagtctgtgggaagaggagctgttacattttaaacagaaaatgtatttgacactgatggaaaggagaggaggaaaattaatgacataaatttcaaagcaactattaaattatttgattgcattcttcctcttttactgtctgccaaaattgataaaaaaaatttttctaataagaatgttttaaa

SEQ ID NO: 40994 - DNA, 1024 bp, Homo sapiens
ggagcttatattctagcaaggggagatggatatgatagattacacagtttattggaggacaataagagttatggcaaaaagcaaaaggaacacagggtaaaggggataggtgccatttggtggtgagaatgctgactgaaaaatagaatgatcaatttaatctgaaacaaatggttatttcttttataatccatataataaatttaaaatctaaaatgtaaaattttgaacacaacactggaaagggtatccacagcaggaagtccccagttcacctccatgactacagggcagctttgcacagccctctgggcgcactgtgtgcctctgcccagaagggggcctcgccgttccaccagaagctcagctccaggccctggaggggctgctgctcctcagttgcatttcttcagtagattcatttccttgatgcaaagcatctgtatttgttggttctgtcatttgagcgatgtctctgacttgtttgttttgaattacattacaggctggaatgtaattgtggtgaaagtatttttatattgctgagagtagcagctaatcacagttacatgcttcagaggacttataattgcttggttttgtgtgtgtgtgtgtgtgtgtgtgtgtgtgtgtgtgtgtttaactgcatttgaaaagttttatggagaatatgcatgattttaaatctgtgataatgttacatgcaccttcaatttcatccactttaaaaattatcttctcattgaattttagtgcttctactagtttgttcctttttgcagttggtcgtaattcatttctggcttcttatgctttcctgcaagcagatttcattgcatttattgtgttcatatcattttcttggggattatttgtaggacaaccaacctggagttttgcctctctagagtaccacccagtaagtctggctgagcatcttatgtccagtaggttcttggtaaacatttgctaaatgaaattactgattgaaatttggggaaaagtgaataagaagactatctag

SEQ ID NO: 40995 - DNA, 1032 bp, Homo sapiens
agtaaataagaagtaagaaatcctttatgatattctgattgtaaatggaaaatgagtaaagttacagctctttggattgtcttgcatggattaagcaacttaaatagtgcagagactctgtagggacttctaaagatctttttaaaaaattatttgaaaattgaaaaactcagctttttagttccttattttttatgtacttattttactatgtacggatggataattttaacactttaaaaataatacagaggtttttgggtatgataaaatgtacagtctctataaaagggttgttataggcaacttagaattctctcctcatcctgccttacagagtggctaagctttagtctattttgtattagggcacaggttatattttatttggggcaagaacagggaagaatcttttatttctaaaaggtgaaaatccctggattaaatttctgcatcctttctggttctgactccctaatgattctgaaaaagtgatttaggaaagagcagagagagccctgaactgtgaactttaagcaaacacatactcagttttcattctgtttgcagttgttaaatgtcaatttctcaatactttaaccccttttcttctgtgtagctggattgtatggtttataagacgaatcctaagcttcactggtttgaagagtagcatgagcgttcctctccaggatggctggtataaacctactctgattttgtcacgatacatacttgaaatgtacattctatgcaggaccttaattctgtcttataaatcccgctggttgtatatggctgtcagaatgaacgatttggtggttgtggctctgttctaaatattgcctctgctgacctaccaaacactgggagaccatttcaggtaatacaaactgcttatgctttttctttcttgctaattattttcatctctttatgggcttgtgaataactagtgtgtggccagtatacgaagaaacgatgatagaatcagacatctttgatctcagggcctctggtggagttcattta

SEQ ID NO: 40996 - DNA, 1050 bp, Homo sapiens
tcaagcgattctcatgcctcagcctcccaagtagctaggattacaggcacccatcaccatgcccagctaatttttgtatttttagtagagatggggtttcacaatattggccaggctggtctcaaactcctgacctaagatgatccacctgccttggcctcctaaagtgctgggattacaggcatgggccactgtgctcagcctattttttactttttttagagatggggtcttgctgtgttacccaggctggagtgtagtggcatgatcatagctcactacagccttgaactcctcttgccattttttttatccttaaaatttccatgtctcactctcttgccaactgttctctctcatttggtcccttgattcactctaaactcaaaccctgataaagcagctgatcggtgaagtgtctgttgttactaaagtagaagttagaggcagaacagtggcagagagccctggaatctggcccttggtaggtgctccacaaatgtttgttgaacaaatgaataagtggagccaggttgtctatgccctagtcccagctctctcacatgcgctagtgagagatatatacatgtataaaaaaaaatctccctgtgcctcagtttcctcatctgtaaaatggggaagatcattataggcttgtaaatgaaatgaattaatacttataaaatgcttaaattagtcctggatcaaagtaagctttcaataaattgtaagctcttatgttcaagctctcagaaccagaatactcgagatgcagacaaaacattacctctcttaagaggtttgttggggaaagtatagctggagttaaaaatttaacctcttagataagtcactgttcaagctactggttttcatctccaccattccacctaaattgccaccaccttgctgaattagacacacttgaccacccttccttcttggcctagtgtttttctgggattgtccgtaacaccaaatatttctctaaactcactaaacatctctttttaattcccattgcaaaatcctttttgtttacctgtactt

SEQ ID NO: 40997 - DNA, 1091 bp, Homo sapiens
ttttctttttctggttatgtaaataattcatggtcataaaaaattcaaactataaaaaagggttaacaaattatgtaaaaattacctaaaagtcctactattagagataatactattagtattttgggagcatccttccatatctctctgtccatatgtaaacagccatatgtacttttgcataaatggaattatatgttctctttttgattatcagcagttttttttggtagtcttaatatattagtcactcctccctacctcatggtatttctgttgctatggagtgactacctaaaatgggacaaaggatgtatgtgctttgaaattatatagatattcctgtattgccttctaaaaccataatgcctaatatcgtagccactaaccacatgtgtctatttaagtttaaattaattaaggtgaaataaaataaaatctagctcctcagttgtattagccacatttcaagtagtcagcacccacatataaccactggctaccgtattggacagtacagatcaaaggacatttccatcactacaaaaggatctgttggatagcatataaggttatcaactttactgctttttaataaaaccattatttttcatggcaggtttctttctgagagctaagcatagcatcatcataggttatcattttaatcatcataacatgttcagcataacattctaaagataggcttggaaaaaagaagtatgactaagtaatagtgttgcactcttggtgtgttccagatactatgctatgcacagtgttttcatgtgggccatgttataagccccacagaagccctatcaggtgagtattattatggtcctcattttcagatgggatattgaagctgagaaagttcagtaacttccccaaagttagagagctgggaaggatggggctgtgatttgaggcctgtcatctgctgttaaatactggcctggcctgcctctcggtgttaggtagctcactgcttgccaacatatcctctgctctctttcttccttttcagtttctttacctgaatactgtgtatctactgtgtaatttaattgaacatttagatttttttc

SEQ ID NO: 40998 - DNA, 1031 bp, Homo sapiens
cctgtcttctaggggtcttgtccgcttgacctttgttacctgttcctttgcattatcaatatacaaggtcatattggtaatgcaaagtcgaacttcttactcaacacttccacttggatgcatagcatcttagacctgtacgtccacaactgaagccctgagttttaaatttttgctgtagactagctccacccacggtcttctccatctcagttaatggcagctttatcctttaggtggttgtcaggccaaaaaccttggtgtccttaacttccctttcttttataaacatactttagactttgcattaccaataactgaaccccttccacggctccagtttgaaggattctgccatctacctaccacttcttatattttggctcactctgcatggcacttcggcttccaaagggatctataatccagtgatcatactatcttttaatcctatcatcttttctctgtctttttccttatccgggacagattctgtggcccatcactgtaactaatctattgcatacacccaactcctgaacccttgctccctctgccatactcacttgacggaacatcaactttaaatacagatctacttattccatgcctgcttctggacagctaactgttaactatggaaacacacacacacacacacgcacccagacacatacaatgtaaaattatctcacttttggctttaaggtcaacccttgtgtcctgatcccattgcaaatcatccacccaaggattgttatagcaattctcccctttaactcaatttcacttgcatttctagtgatcttcccatttctctcctttcctttgtagtaaaacgtcttgaaaggattgttttcacttgctatctctaattccttgctacagtttttctcttgaaccccctctggtcgagcttccacccccacactccagaattgctcttctcaaggcccacaataacatctgccttgccagttccagtgatgagtccccagtgctcattttcttaacttactggcagtgtctgc

SEQ ID NO: 40999 - DNA, 1022 bp, Homo sapiens
catttctttttgtataaaaagcttataccttttgttttaaaaaattgtatgtttcatttcagcccagttcggggcacagtagtcaccaatgatcgttggggagctggtagcatctgtaagcatggtggcttctatacctgcagtgatcgttataacccaggacatcttttgccacataaatgggaaaactgcatgacaatagacaaactgtcctggggctataggagggaagctggaatctctgactatcttacaattgaagaattggtgaaggtacagtgaaatgtctggtggctattaacataatattcttaatagtgtggtcatgtaggaattatttcttctatggctcaatggcctataaatataggacattgttctatcctgtgtttgttcttctaggcagtgactatatatacatgtataaatatataaatgcaacatattagcacattaaagatggaattattttatttatctaaaaacattattcttaattttttagcaacttgtagagacagtttcatgtggaggaaatcttttgatgaatattgggcccacactagatggcaccatttctgtagtttttgaggagcgactgaggcaaatggggtcctggctaaaagtcaatggagaagctatttatgaaacccatacctggcgatcccagaatgacactgtcaccccagatgtgtggtaagtcattcttgttaccaagtactcttttataaaggaagagatttaaaatttatcagacatataaagaagagtaggataaaaagagaaattggatgaattcctacatatacaaagcactttccaaactttgcttactctaatataaagagaaggggaagaatttgcatgttttgaaacatttattgtttatcagattgagcttacatcatttctaggtatctcccagtagtggacaaattttggctgaaagtactcagctcttagaaaaattgtaagctgttcagaccaatgaaaaatgctgaatggttagtctaaaacggaga

SEQ ID NO: 41000 - DNA, 1044 bp, Homo sapiens
ggggcccaagagggacattgtcaaggaacttgaggtagccattaggaacagaactgacctgcgttttggactgtactattccctttttgaatggtttcatccgctcttccttgaggatgaatccagttcattccataagcggcaatttccagtttctaagacattgccagagctctatgagttagtgaacaactatcagcctgaggttctgtggtcggatggtgacggaggagcaccggatcaatactggaacagcacaggcttcttggcctggttatataatgaaaggtgtgtatgctatgagattgctgcagttaccctccatattcctaatatatttctaacattttaattccttcacctcttgaaatatttcattttaagtcattggtggtatggggggagaaaatcattgtaaataatacttattagatatatcactatttactcaacataatcaagggtaaataaatcaggagtaaaatccaactcaatggtctgattttgagatcagactaaaaatcacaggatcaagaactttgaaggtgttaattttgtgggtcccccctttttctctcctaccctggtcctttatggcctctattctgggacaactctgtttcttcatcactatttctgactatttgcttctgaatcccgcagactgcttctttttatcctcttaccttttggtcatctttgctgcccagccaatgtcacccttgtttgtctcctcttttccttcatcgcagccttttcactttctccagttttttcctattgcttcctggtatgttcaaggctgccctattagaacagggagttctgattaaactcctccattaggcttaaactatatggaccaaatttgcatgtacactagaaagcactgggtattgtgctacgaagtcaggcaaccttctgcttgcacttcctgggcccacaaagggcacaaatacaaatattctgaagaactcttgatacttaaaacagcagtgtgtccaggtactccttccaagggaaaaaactgggagccatcacttc

SEQ ID NO: 41001 - DNA, 1020 bp, Homo sapiens
cacaatgaaatgaaggcattttgttatagggttccatgaaggtgtgaaataagcaattcagaattcaatggtgaatttggaaacctcttagttatatttgttccgtgtaggtaaccagtcagagtaattcattttctttcatagtccctcttgctctctcctctctccttgactaaccatcctcaccccaacaaacacacaactcatttatacacaggagcttggattacccagtttgggtgattacctggatccaaaaaaacctgttatatctctgttcacacttttgttgtacaaacagaatttatgcaaactaactccatctttaagttgtgttgctttctctggagatcaccccttagggtaaccctagaaactgcagctctggagatcaccccttactaaggtaaccctagaaactgcagctctgaattcatcacgttgtagtagcttattgggtgtagccgactggctttagcacagcagtgaactaatagaggctgcgtgtatagccatcttcctctggctattagaacgaaccattcgattgagaataaagtttccatatagtttgggtacggtgacatgaaagaagttgcagattgttcagtgagactatcgcttgtagggttgtaggatggaggaagaaagggagagtgagagggagaagtttatttatggaatgtcagggggccattgaagctcagcaggccctagaagcagaggacttccccccgtgcttgttttctccctctgaccttggatgaactagcgagcagtatattatgctgggtgattgtgctggtttgtcatggttagcattctgaactgtcactggaatgtaggaaacggatgaatttgaattaaaccatgaggtggtctgctgagccctctccttgtctcaaggaaacctgtcgctgtttgtctgggctgggcctaatgaaagcaatggagggaaagagaggtgggcctttgatctctttgttgcagctgctccctgggaactcgctgaaatcaatg

SEQ ID NO: 41002 - DNA, 1133 bp, Homo sapiens
tttgcttctgtgtttggcccctaaagcctcactgctcatgctgttgggtggagttctctggacctctcctgattttgaatgctgcctaattcataaatccttttgctcaaataaactctgttaattttattttgtctgcaatttttcttttaatgtacatacgtatgtagatatacacaggcatatagatgcatgtgtatatatatgaacacatgtatgtatttatatatgatatttgaatatatacagttagctttctgtatttgtgggttacacattcatggattcaatcaactgcagattaaaaatatttttttttaaattgcgtctgcactaaacaggtacagacatttttcttgtcattcttttcttgacaatggagcataacaactatttacctagcatttacattgtattaggtattataagtaatctagagatgatttacagtagatgataggatatgcatagattatatgcaaatactacaccattgtgtatcagagacttgagaatccacagatcttggtatccttgggcatcctggaaccgattcctcagggataccaagggagaactgcatatataaagtgtacttagtttactactcaaatgtatatatgttttccctatatttatgtttaattatttattcagtagccatagagtgttgtggtcactatggtgagggtgggggtgaggtgggaaaagttttgcagaattccaaaacctgtcctaaactttaggctaaactctttggtgcaagagagttaggtttatctgggtacacaatctcaaaataaataaaataatgttagagacattcattccattgatttgtctcttcttcctatttgactgtatgtagatatcaggttttatcaagcttgcaataaaatcctgatttcatgtcaagctaccagattttaatggctttctattgcacttaccatgaaatccaaactcacagccatgactcagtgagccctgcatgctctggcctctctaaccgcatcttcctctgcttgccagattcccaccactctggcctctttctgttcctcaaacattcaaggactttcaccaccgtgggcttttgcgtgcattccttttgtctgggatgctcttcctct

SEQ ID NO: 41003 - DNA, 1042 bp, Homo sapiens
tcattctgcttgccagcattaggaaaaatgtaaaacacaacacaaaacactctcttttgaccatcattaaggtgtggtaaaaatcacttggcttggtgtaagaaataatgatgaaaaatgtggttaagactttggaaatgataagaaagtaatgaaaggagagatttgaaagtgagttaggaaataggaaatgaaatggaacttgccacacatgaaaaatcactgaagagctaaacgcagaatcagttggatcagaagttaaagctgaaagtgtctttagaaataatctcatttaatgcctttattttacagaggagcaaacagacccacagacatcaaatgactttttcctattgcaaagagttgtaactgggaccaaaggtaaaggataagtcaggaagaaaggttcggagatttattgtgatattgagatgtcataggagaattaatgggaatgagagcagacagtattgttagtgggtaagaagtggtgcaaggattaataaaaattgtagtaagaggaagaaaaatggctaaaatgagaaaaagcaaagaccagtgtcttttccaaaagaagaaaaggcaggtgttttctgtggtggtgagagcgagaaggtgtgactgtagaagcagagggggagattcaaggttatgtgcctgggaaagagatgtgctgtgtccacttatttgtctgtgggactagatcgcagtaggaaaagggagcagctagatgtaacgtgctgatcaaatcatggcataggtgtgccgtcactgagtacctgctagaaaaagaagaaaactgatagaagatgagactgagaataaaggggaaaggattgatgacactaccctcattatagcaataatgacaataataagaaagaggaagaacaaccataacaacaactctgttctttgcttctctaagtcgttgctctgaaagtcttccctgattccattaatggaaatacacttgcagctgctcaggacccaaacctcagtgtcatccttgactcctctctttatttcaaatgtcacattc

SEQ ID NO: 41004 - DNA, 1026 bp, Homo sapiens
gagaggcctttcaagccacactgtggtccttggtaaactctgtccttctcaggtgctgatgcctcatctcagtgtgttgtgttggctccttcaggggcacttgtatttcaccaaaggacatctaaagagggaagtctaaacatgggagtggctgtcatgggagaattctgggcctcacggcagatccccaggtgaaatctttcgagggaggggtgttcccatctctttggtcatccaataaggatggcaacgtgaaagccacaaagaactcttgtgtgtgaccgtcggaggatcctttcgggccactgtgttcctgtagctagagaatgccaagtcatgagccctcaaaagagggctttctcatttccctcttcctttccctttgaaataatttacattgatcacccgctgaaaacaaacaaaaaacccaacttacaaaatatctctgtactgagaacctgtgagcaggagaaacttcaggcatccaggagctcaaggaagtgactgtggggcgcttctctgtcccacgggatgagagagcggagcagagtctaccaggcctcagcagggcataacgtgtcctctcctggcgtgttgagaagatatttgaataatctaataatcaaaatggtaaccttgaagtaaaccccaaattataaaatttcctgaaaatatagaaattaaatcagttttagtattcattgtaactcgagggaataaatgaacaattggttatccatctgtatcgaatgatgttagccattccattgaacaaatgaaaatgagtgtatgttgaatgaacagattgattcctttaactattatgggccgcttctgtgttttacatttagctggaagatacttttggatttactgaaattcaggtggccagacctgacaactatttttttttttgaatcctctaaaattctgaccaatctctgcaaaaacttcatgtgaaagtgcattctgatgacaggcgataggtcacttttctttggagggatatttgcatggatggcgaag

SEQ ID NO: 41005 - DNA, 1025 bp, Homo sapiens
atcctataactagaaatatatcacctacttttggaaaacaaactgaaataggatgcacatgaagggcactttagctgtctgattaagcagaatccattgatgtgtttgtttccaacaggcccagtctttgtctctgcatcccatacaatgattcagtacaaatcactttataaccttacttttctatctttcaatatagtgtttgttttcagagtttatctttagttatctgtctctaggtttagaacatcttgttttaaagtagcagaaattagttcatactcatttcttaaatatggactctgacttccaccatgtctggatgtatattttaagggcttatttccatcagaaatgttatgtgtgagatatatgtgttaagctactggctttgggcctgtttatctttgacttgttctgagtttccctatcaccttaaaaacatttgaaggccagggctgaaggatatgatagaataacacctcttttagcaacaacatgtgactctatagactgactctgatttgggatatgctgactctgatttcttatattgcaggctcaaatgtcctaatttaccctttgtgtatctctatgaactattcttgagcttttatgcaatcctgtgtgaaaaatcagccagccattttattttggcatttaccgactagcgaaatactaactagtacccactcaaagagtgcaatattcaagaaaatgctgagtggtatttggattttagcttgcctgtcatgaaattctctttaatattttaccagtcctctttaaaattttgccagttgaaaaaaacaaacaaacaaataaaaattactgtcttataatagtttctatttcttggttatgtaacggaagtgtccacttccctcttttccagcttaggagctttagtgtgctcagttgaaccccaaagtatacatacgtgagcccagcactatcacctcactaggcatccagcaggtccctgggtaagggatctttgaaagatctggaaagagggatgggac

SEQ ID NO: 41006 - DNA, 1050 bp, Homo sapiens
ttgactggtatcaaccttttacgagtttgagtgaattttagaaaacttacctcctttttcattcgtttgtccttcctcatttgcaatataattgccttaaatatttcctttacatacatgtagaatagcatcagacaatgttagaatgtttgcttatttacttataattttgtttactgtgctcattcttcctgttttcaaagagtttctttttgtttagacatcttctgttagtcatttttaagataattcagcggcaaaattttcttagttttccttcataagcatgttttgattttccctttttttcctgaaggaaatagtcacaaagtaagattcttggttgacagttgttcttttttacagcacttgaaaaatgacacttcctttggtgacttctgatgagaaatctgctcatattagaatattttttcctttacattgctgtttttctctggctacttttatgattttctctgttgttagttttcagaagtttaaatatgtcatgtctcggtattgatttctttgggtttatgttgtttggactttgctcacctgcttgaatttgtaggttttgcctcttgccaaatttgaaaagttttccggcattattttcttaagtacttttaagccctactatcttttccctcttcttccaagactccaatgacataaatttagatcttctgttaatagtaccacaagtccctaagtgtctgttttttttttttttaattcagcctacttttctgttgtttgctgtttagattgggtaatttccatgattctatcttgaagtctgtgaattctttcctctgtcccttccatattgctcttaaacccatctattgagttttgaaaatttcaaatattgtgtttttcagttctaaaattaatatttagttcctcttttcatcttccattccattgctgagacattccgattcttcatttgtttgaaatgtgttctaatgggttactgaggccttaaaatctttatcacataattatcacataattctaacatcattgttctcttggtgttgg

SEQ ID NO: 41007 - DNA, 1052 bp, Homo sapiens
atctctgccttctgggttcaagtgattcccttgcctcggcctcccgaatagctgggactacaggtgcatgccaccatgcccagctaatttttatatttttagtggagacggggtttttccacgttggccaggctgatcctgaactcctgacttcaagtgatccgcctgccttgatcccccaaagtgctgggattagcaggcgtaagccactgcgcccagccacctctagaaattttggtcctatttatgctcctgtcttaactttcttgacttcatgacttcatatttttctaattttcctattttaatttctggttcttttgctgatttccttttcctgacccttcttttcccacttatggctatccatgtctaaacttattattttgtactcttttccagtattgatgctgtttaataggaatacatctcaatctatagttctatgtgtatatatatatcaaaatacctattggatatttacacataaatgttattatttcagactgcaatgaacagccaacatcttaataatcttttccttaaaagtaactgtatacttactacataacccaacaactcttctccttggtatttcctcaacagaaataaaaatgtgtccacagcaagactatacaaatgtatagcagctttgttcttgatagctccaaaccaaaaacaactcaaatgtataccagtaagtaaatgaataaacaaattatgctataaccatacaataaaatactactcagcaatacaatataatggactactatacacaaacaatatctccaaatattaagctgagaaaaagaatccagatggaaagagtacacactccttatttcatttatatgaaactctagaacaagaagaaacttgtggtgatagaagatcactatttttttctggggccaggagtgagtagatgtgggatgactatgaagcctctctctcagcttctggtgattttctgccagtctttggttttccttggctgtggctgtatcatccttacctttgctttcatattcacatggtattcttcctat

SEQ ID NO: 41008 - DNA, 1049 bp, Homo sapiens
gcaaagcattcaagaggtgacttgggtgctgttaaaggcattcagttttataagggaagcagagcataaaaggttggaaaatttgcagcctgataatgtgatagaaaagaaaatcctattttctgaggagaaatttaagctggctgcaaaaatttggataagtaatgaggagctgaatattaatccccaagacaatggggaaaatgtctgcagggcatgtcagaggtcttcacagcagctcctcctgtcacagacctggaggcctagaaggaaaaaatggtttcatggtctgggcccaaggcccccttgctctgtgcagcctaaggacttggtgccttgcgtcccagccactccagccatggctaaaaggggccaaggtacagtttgagccattgcttcagagagtgcaagccccaaggcttggcagcttccatgtggtgctgagcctgcaggtgcacagaagttgagaattgaggtttggaacctctgcctagatttcagaggatgtacggaaatgcctggatatgcccaggcagaagaagtttgctgcagggacaaaggcctcatggagaacctctgccagggcagtgcagaagggaaatgtggggtcagagcccccacacagagtccctaccgaagcactgcctagtggagctgtgagaagagggtcaccgtcctccagaccccagaatggtgaatccactgacagcttgcactgtgcacctggaaaagccgtagacaatgccagcccatgaaagcagccaggagaggggctattccctgcaaagccacatgggtggagctgcccaagaccatgggaacccacttcttgcattggcatgacctggatgtgagtcatggagtcaaaggagatcattttggaactttaagacttgactgccccaatgattttggacttgcatgggcctttagccctttgttttggtcagtttctcccatttgcaatgagtgtgtttatccaatgtctgtgcccccatttcatctagaaagtaattaacttgcttttgattttactggttcataggtgg

SEQ ID NO: 41009 - DNA, 1022 bp, Homo sapiens
tgggtttagtagagtccaaaggagtgatgcatattgtgttggaaacttgagctggagatttaggcagacctaagcaaatccaagctacaccattttccttctgtgataccctacttttgctcagcttctatttggcactactcagtaggaactggaaggcattacagatatctttgattgaaggtttttttatttttgaacacttataatatgaaacttttacattttctaaagtggaaacaattgtgataaactttacatttagttgcacagcattcaaactctggttactttattcgtagcacctttaggttttcttgcattcattgcactgatttttcagaatactacatccacttggtttccctgaggccttgaccgataaatgatcacacaaattgtttcacgatttttttttccaaaagggaatttctgatggcagaaagtttctactgcttgtgtttgtgtgtatttttgttttccatatgattttgtatcttttcttccctttgggatgggacagtcttagtatggcctctttttatctttgcctactagtattgacatatggagtgaaatttttggggggattctataatcattcctgcagaaaatctcacctactcttcaaatttaactcgccatcatttatatagattactcacacatctgtatcctagccatttgctccactgaactcccaaccactatatacaagcatctactggacatttccacttgattatcctatagctttctcaaactcaacatatccaacctactccagtcctccccctcttagtctgagaaagtggcaccatcatcaccaagtttcctaaaccaggaatttaggagttatgttggctgctttttctcccccctttatttttattcagataatcatgaagtcctgaaacctctcaggtttgcttttctgtttccactgccatttcccaagttcagtcccaactgtagttgtctcctggactacaacaacagcttccttctaactgggttcctac

SEQ ID NO: 41010 - DNA, 1050 bp, Homo sapiens
tgcttaacatgtgtttgagcaccattgactttttatggccaatacaatgaagtaattttgattcagtttgattgatgccagatctgtaaggtatttttatgtggaatatgtagttttctgtgaaatgaagaatctcatttgtccatttcattattttcttatattataattcttcgtatatttaatacaaatgagtctctaattgaggcagaattttgaatgtagggaacataagaatgaatgagactgagatgattctgactttcatggagcttatagctttcctgtggaaatagatattatacagaatgatgacttacttagagttgtcactagtattaccaaggaaaaagacagtatgtaatgagtacacacaatatgggatccattaccttgtctttggagtatgtggaaaagtaacaggtaagccaagacttagggttgaggcagcaggggcgtgtggggaggaaaagggatgtgtgtctgtgtctgtgtgttagaggtagaggcagacattaggaacagcctggaggcagcaggttattttgaatacattagatgactcttatattttaaaatcatgctaatttgcacttctttatatttacttacctccttatgtattttaatgaattttttaaaaatgcttttttgagggcaatatatttatgcctttaatgacaagatctcatttcattatatgggaaaatgccatgtcttagaactattttaatgaattgcttgtcagccacagagtatgagttggcaaagaacttctctcagagaaaattgaaagaattgaaaacatttgatgatttactaatattttctggtccagcgaaacttttccaacaatttaaattcaaatataaattattagagatgttagttgttttctactgtgcctactgtgtcactgttaactgataaataagagattgatgtttttaaacctgttttacaggatttacaagcaattgcaaaatactttataaaggcatgtttaatttgatagtagtggtcttgattaggaagaggatgaatctagga

SEQ ID NO: 41011 - DNA, 1031 bp, Homo sapiens
aagggcgcacccatttcctccaaaaatgagctaaagggaaagcagtgccccagagtcaagggatcggggctgctgctccttcgactagcggcgcgaacaagtcatgctacttgggcctgtttcctcaactgtaaaatgaggggtctaggattccctctgggaatgtacgattctaaaatcgaacagggtttggtagcaccgccggggcggagccttacggggcgccgcgggaatccaacgacaggactcgccacagtgggagctctctccagaccctactctagccacgacgctgcggggtcagagggcggcgtgcgcgtccccgccgggactgcgtgcgcgtccccgcccagctgtcggcagaagccgggccgggtgggcggggcgcagcggggcggggcgcgcgaggagggtggctgcctctggagcaggccgggagaagagaaaaggcggcggcccggctggggaagaggggcggaggaggcggttcggacggctgtgtggggtacggagcgtcgccgggacagagcggagcagctgggcacggcgtccagggcagctagggcctgggccgcggttcggccgcgccggccggtgagtgacgggaggcccgcaggggaggccggcgccgtccgcgctgcggcggggacgaaggcagcggccgggcagtttgaggccgcggccgggaccgaggcgctggcgctggcggccgtggggttgacgggcccggcctggagcagaggaaaggcggctgaccccggtccatgcgcgtcccgggtcggccgtccgggcgccctgagagggcgtccgccgcgctcgtgtcctcgccgggccgcatgccgggccagccgttgaggtcagcaaatggcgacttaagcctcgagggcaccgacctccgtgtcccccccagtttgtgtgtctttgtattgggaagggacgaaggaggagttaaacttagggaaccctaagcttctcgttccgtctggtttttagaaacttgggttatttggggacaaatggcttaaagtaag

SEQ ID NO: 41012 - DNA, 1035 bp, Homo sapiens
ttcccctatgttttcttctagtagtttcatagtttcaagcctttaatttaagtctttaattcattttaactgagttttgtatatggtgagaggtagggatttagtctcatttttctgcatgcgggagatgtgactttttaattttttttaacttttctttttctcaattttcctccacaccatttattgaagagattgtcctttctccagtgtggattcttggcacctttgttgaaaatcaattggctgttggctgtaggtttgttaatttatttctgagctttctattctgttccattggtcaatgtttctgtttttatgctgttttggttacattagctttgtagcatattttgaagtcacataatgtgatgtctaagccttccttcttttttatcagaattgctttagctatttagggtctttgtggttcatataaatttcaggattgtttttctaattctgtaaaaaatatcattgatatttaacaggcattgccttaaacctgtagatcactttgggttttatggccattttcagaatattaattcttccaatccacaaacataggttatcttcccatttatttgtgtccttctcaatttctttcatcaatgttttgtagtttttcggggtagagatctttcactttcttagttaagtttattcctaagtgtattagtctgttcttccattgctataaagaaatacctgagactgggtaatttataaagaaaagaagattcattgtctcatggctctgcagactgtacgggaagcatagtggcttctgcttctgtggaggcctcagagagcttccaagaatggtggaagacaaagagggagcagggctcttacacagcaggagcaggaccgagagagagggaggaggtgctacacatttttaaacaaccaaatctcttgagcacgcactcactattgtaacacagcatccaggggaacatccaggccccatatccaacattggggattacaactgaacgtagatttgggtggggacacagatccaaacca

SEQ ID NO: 41013 - DNA, 1035 bp, Homo sapiens
agctcctgaaatgaagcccgcttcagaacttactcaaatgcatgttgcttcttattgcagctggactagtagcttgaactgtgatggaaattaaacgtctgcttctaaatcctgacaggaatctcctaaacagggtcaaaggccacctgtcttagtcagctcaggctgccataacaaaataccatagactcagtggaaacaatagattttattcgttcattcatttattcatccattttcacacagttctggaggctggcagtccaagatcaggatgtcacatggttgggttctggtgagaactctttttagcaaccatcttttcatctacttctatgtcctcacatgggaaagagaaagtgaaagctctctggtatctctttataatggcactaatctcaccatgagggctccaccttcataatctcatctaaatctaatatctcccaaaggccccatctctaaacgtcataacattaggggttaggacttcaatagttgaatttgcatggggaaataattccatctatagcaatgccaatatgtgaactaactaacaggcttaagccaggtacctgagatggtcacaattatgggcaagaagatgttcaatccaaataatgaaattatagcagtttacaaaaatgttacaatttatgtttctgaatgttccatactagaaataaatagaaaggcaccacggtctcaaagtgtgtgtgtgtgtgtgtgtgtgtgtgtgtgtgtgagtgtgtgtgtttataaattttatttgatagtttcaaattactaggctgaagaaagaagaacattagcaaaaaatgatagtggcattaatacatttgctcactactaatgacctaaaacgtggcaattcaaaaggaacaaataattatttcagtgtagactgtcacagaatctagggcatcatcaaactttgatccctttgggctttttacttggaaagaatgcagtttctctttttttttaaccttagctttattctccaaacattttaaaatttaattcatgggctat

SEQ ID NO: 41014 - DNA, 1040 bp, Homo sapiens
ttgatacacacctactggaatggccaaaatctaaaacactgacaataataaacgctggtgaggatgtaaagcattcattgttagtgggaatgcaaaatggtacagccactttggaagacagtctagcagtttcttatgaaactaaacatactcatatctcatgaaataaatatgagaggcattattatttaagaataataaagcaaacaattataattcaatatttttaactttttcctaaaaataacaaatagttcattgtagatgtttacatttgtcccaaaaatgacatttcaagaaatcagctatcagaatgattgtttcacagtagacttctttgttatattgcaacaattgacggctgaggctgtacatccttcttcagcttcagattgaatatactaagcaaaagactagagggatgaagtataaaaaacagtactcttctaagaaagctagattatcttctcttgattctttaattttcattgactgtcttcctgtgtcgtaccttaacactgataacctcatcttagccggactgaaaacaagtgacctattaaaacttcctaataaaaaataacattcaacaaaagttaattctacccccaaatacatttttttagaactcagagcaacttgggtttaaatccaagcttcacaacttatcagctgtgtgatattaagcagagttgtgggctttggtcattcctcatgtgtagaaacagagatgatgttacttggcattatgggatgaattgtatctccacttcaaaaaagttgtacgttgaggtcctaacccccagggccttagaatatgactgtgttttgagacaatgcctttaaagaggtaatttaggtataatgaggtcatattggtggaccctaatccaattggactgccactcttacaagaagaggagctttggacacagacaggtacagagggaaaactatgtcagaacacaggaagaaggcaccatctataagctaaggaaagaggcctcagaagaaatcaacccaaaataaatcaacttgac

SEQ ID NO: 41015 - DNA, 1035 bp, Homo sapiens
ttgaaacatttttaaagtagcacaaaagcttattttaaaaaatatcatttggcatgcaaaacttcggcagagccaattgtagatgaaaatgagacagatggccttcaaaatatgaagcacacattgtaaagaatgttgtactccaggcctgtgaatctcactgatatctggcagccacagttaaaatgttgtagcatctggaattgcgggctgtaattgaaactcaactgaagagctttctgtggagctggaatgaccagccaatgcataaagttgttaaacatgaaacaaagataactattatcttttaaaaacctctcattaaccctcatgacgttcttgggtgaaggtctaatctggcacacttgctaacttctaataaagaatcaaatggtcttccaactcacataatgactaattctaaagcatgcaacctcaaagtactacattctccctgttctagaaatacaaccctagagggccagtcttccttcagcattcaaatattgagtagaacaactgaactgtaaggttcaactaaaggaatgcaactgtgacttgagctgtggaacggctatggcctaagtcaagaattctcaacctcagcactagtgattgacattttgggccaggcaattctttcttctggggcctgtcctatgcattataagattgagcagcatccctggcctctacccattagatgccagaaacatactccacccccaagctttgacaaccaaaaatgtttccagaaatttccaatatctcctggggcttaaatcaagaaccactggcataagccaaggaagaactaaccatttaccatggtacaggatgagtatcccatatcttgggaccagaagtgttttggatttcagattttttaatatttgcattatgtgcttactggttgagcatctgaaatccaaaatgcatttcccttgagacttatatcagtgctcaaaaggtttcagttttgaagcatttcaaatttgggattttgggatttgggatgctaatctgcaataacat

SEQ ID NO: 41016 - DNA, 1072 bp, Homo sapiens
ttatatattttagagaggcataaaacatcaatcaaatacatttaagaaatacattggtttggttcagaaaggtgagacaactcaaagtggggccttccaggctataggtaaatttaaacattttcgggtggacagttggttgaatttgtctaaagacttgggatcaatagaaaggaatgttcaggttaagataaaggattgtggagaaccagttttattgttcagaagaatctctcagatggcagacttcagagagagggtaggttgtaaaatgtttcttatcaaatctaaaaggatgcctagctcttagttgattatccactggatctgcaaagaaaggaaagaaaataaaaggggaaggagattttctatggaatgtggatttttcccacaagagactttgcagggcaatttcgaggcatggcaaggaaatatattatggggctaaatattatttccttgtctcataatgtcacgccagagtcagattgaaaagcaagtcacaatatacatggtcaaataaaagccatctgatgaggatccatggtttgtaggacatgactccccagacctcttaggtaggaatttgggcaagataaaaatcagagcttagtccctgaactatagtcaaaagatagacaataacaagttttgttaaggatacagaaaattggaaccctcaaacattgctggtaggaatgtaaaatggtacagctgctttggaaaaccatttatccgtgtcttaaatagttaaatgtacacctagcagctatgccactcctatgtacttaagagaaaataaaacatatattcatacaaaaactcatatgaacagtctggcaggtacctggagtgttaaatggagttaccacatgacccaacatttctactcctaggtatttacctgtaatagtctgctagagctgccataacaaaataccacagactgagtaaattaaacaacagaaatttatttattacagttttggagcctggcagttgaagattacagtgctggcaggtctgttttcttctaagatctctctcctttcttgcagatggttgttttctg

SEQ ID NO: 41017 - DNA, 2093 bp, Homo sapiens
aacataccaccaagtggcatttaaaatgcagtcatgtcttacttgttttttgttggttttcttctgtgtttttaaatattgattttttgtcctaccaatgttcttttaaagcataggctggactagtctcatatttaaaaccacgagtccaaaaggccattcagcattacccaacaatcttactatgcctcgcaagtcaatatgtttttttctactttctgaggagtctgtcttaagtgtgtcttcttcctccccatggcgatcttgcctcatacaggggaaacatatacaatcagattagaagtacctcatctttccatcatcaacttgaacagtctgcctgcatcagtactcacatactttttggtagatttttattgagtatcttctgtgtgccaggcactgttttaggaacatgagatgtcctcatggagtgcgattctagctgtaatggggttggtagacagaaaggtggtaaacaataaactaagtacaatctggactatgttaggagctggaaaagtagagcagggtgaggaagtaaaagtgcaatgtttgggcaggaaggcatgcaaggccttattgagaaagtctgagcaaggacttgaaagaaatgggaaaatgggaaagttagtcatgcagctatcttgtgaaagaatgttcaagtaaacagtgctttcggtgcaaaggccctaaatcaggagtgtggtatgttagaagaatagcaaggagctacagttgctaaaagggagagaagcaggagttgaagtgaatgggctcagtggggagagggattacattgggcccaggaagccactgtgaggatggtgcttttgccctgtgtgaaatcgggagccattggaaggctttgaacagaggcttggcatatctcacttaagttttaaaagaatcattctgagtgctgtgatagggtgggagtgaaggggagcaaggaagagtagaagcagggagagtcttggaggctattgcagtcatcctggtgagagctgaaggtgacctgaccatggcagtagcagtgcacatgatgaggagtggtcaggttctggatatattttgaagatagaactgatagtacttttggacagactagacatggggtatgagagggtcaaggataacaccatgggttttggcttggacaactagaaggatgaagtaaccttcaactgagctggagaagtctacagggtagagcagatttggtaagggaagaacagacatccaaatggagatttctattctgtaactagatgtacaagtccattaagtcacgagactgaatgagattacctaggagtgagtttagatagagacagagtttagatagaggaccatggactgaactccagggcaccaaagttcagctgttctaggagaggagaaggaagcagcaaaggtaacaaataaagatcaaacagtgagttaggaagaaaaccagaagacaggagtgtcctaggaaccaagtgaaaaatgtacctcaaagaagaggttatggtcacctgtttcaagtgctatgaaaaatgtcaaggaagataaggattgagaattgatcattagatttagcaacatggagatcaaaaccaggttaagtggtagaggtgacagcctgactttagttttggagaaaatgggattttgtgtatttcttatttaacaaatatttgtataacaaagagaggttaggtaacttgcccatagtcaggcagctagtagaagcagtggcagatttcaggcacagccattctgccttcacagtacaagctttaaccacagtgcactgctgcttctgtgtggctggtaaggccagtattttgaggagttttgctgcagagaaaaggaagagaatgagatcaagagaggtttttgttttcctttcaaatgggagaattagtaagaaaatgattcattagagacaacaaaaactagtgaaggagaacagggagaatgcttgacaatgtccttgagtaggcaagaggatatgggatcaaacactgaagtggaggaaggggttggtagtaggcagaagcatggatatgtcatccagtaataagcaggaaagtacctcatatgcc

SEQ ID NO: 41018 - DNA, 1124 bp, Homo sapiens
atgttttcatcagagacactggcctgtaattgttttcttatagtgttcttgtctgattttgatatcagagtacttctggtcttgtaaaatgaattaagaatattttctcttcagttttttataaaagttcaagaaagattggtattagttcttctttaaatgattgtttaactttaccagtgaaaccactagttcctatgcttttctttgaggggagactttttattactgactcaatcttgttactacatactggtcttttcagattttctgtttctttgtgattcagtcttggtagattgtatgtttctgggaatttatccatttcttctagattttctgatttcttggcgtatagttgttcataagtctcatgattctctgtatttctgtggtatcagttttaatgtctctactttcatttataattttttaaattttactcttattttttcttagtctacctaaagggttgtccattgtgtttatgttttcaaataaccaactaagaatttcattagtcttttctgtaattttttttctgatctctattttatttatttctgctctgatttttattatatctttccttctgctgactttcggcttactttgctcttctttttccagttccttgtggtgcaacattagttgtttatttagaacatttctctttttttatgtagttgtttatttctataagcttcattattagaactgcttttgctgaattcccataccttttgttatgttgtatttccattttcatttgtctcaagatatttttaatttttccttttaattgcttcattgacccaatgaatgttcaagagcatgttatttaatttctatatttttgttaattccaaaattcctcctattatgggtttctagtttcattccattgtcagagaagatacttgatgtaatttcagtcttgatttcggacttgttttgtatcctaacatattctgctaggaaagtaggaagtaactagattgggacaaaatggttcagaactgtagtggttggaagggatcattgagcactaccactgaactggccagtctttgataaaagcaaatgctctgttcttttcctacgtagagttagcactacggtac

SEQ ID NO: 41019 - DNA, 1064 bp, Homo sapiens
ccttttcctagacctgttacctatttgtatgtcttcttttgagtaatatcttttcaggtcctttgcccattttttactcaggttgttttcttgctgttgagttgtttgagtttctggtatattttggataataactccttatcacatgtgtggtttgcagatattttctcctttgctgtagattgtctttgttgattatttcctttgctgtgcagaagcttgttaactttaatgcgatcctatttatctttttgcttttcttgcctgagttttttgggtcatatccaaaaagtctttaccaagatcattgtcaagtagtttgtagttttgggtcttatatttaagtctttaatccattttgagatgatttttgtatatgcggtgagataagggtccagttttattcttttgcatgtggataactagttttttcagcacagtttattgaagagactgttttttccccattgtgtgatcttcttatctttgttaaagattggttgactgtgtatgtgtgggtttatttctgggctctctcctgttccattggtctgtatgtctgtttttatttcagtagcgtactatttttattactgtagttttaaaatgtgttttagaatcagggagtgtggtatctctagctttttgctcaagattgctttggttatccaaggtcttttgtggttccatatgagttttagaattgtttttcctatttttctttgtctgttttatgttgccgtaacagaatatttgaggctgggtaatttataaataaaaggagttacggccagatgcagtgactcatgcctataatctcagtgccttgggaggccaaggcaggaggatcactcgaggccaggagttcaagaccagcctgggcaacataataagactctgtctttaccaaaaaaaatttaaaagtagccaggtgtggtggtgcacacctgtagtcccagctactcgggagactgaggtgggaggatcacttgcgcccaggagttcagggttgcagtgagctgtaattacaccactgcactccaactagggcgacagcacaagac

SEQ ID NO: 41020 - DNA, 1032 bp, Homo sapiens
gaaaggatgggagtaaggaaagggacagtaatgtcagaagaggacagaggtgcttatagttaagtacaactttatcaacctaatatattaagagattatctagcagttgtatgggatttctgttcccatgtacagtcttccctaatgcataacattccagcttaactttgcatctgtttactgctgtagctaaataatgagtttgccagaggctaccagtttacctgtcttgagaatgttcatactgtgttaacagcttgcacaggaatagattggtatccacatttccttttgttacttttttgcttttttgcaagcagccttgcctatatgtaacccattccctttttcctgttttaatcttatctttttttaacaatgtgaatatttgctttctatagcagtaactacattgaatagtcttctcagaagctggcagatttgaacccaagtttatttacatatttaagatagaagaaacatgaaaaagagcagtagaatgtgtgtagtgctcattaaggcggtataaaacattcatttcaattgccaaaccagcagataaaccatccttttatgtttttctccatattctgcaacacgcgttagagtgttatgtatttggagacaagggagtgtattttttcatctttgtatatccagttcctcatatggttctttgttaactgtcaaatgaaatattgtatatatttatggtagtatacaacatgatgttttaatatatgtagatattatggaaggattgaatcaagctaattaacatacccatcacttcacatacttaaccaatttttgtgataagaaaatttaaaatctgccctcttagcagttttcaagtatagttggccccccacatttgcagattctgcatcagcagattcagttaaccacggataaaaaatactcaagaaaaacccagcaacaataaaaaatcacaatacagcatatttaaaaaacacaaatttttaaaagacactataataatttacgtaagatttacattgtattcagtat

SEQ ID NO: 41021 - DNA, 1040 bp, Homo sapiens
tgtggagctggagatacaaaattcggagtcactaatagaaaagtttgcttcagattgagtcctatgaagtccataactttaaaagattgaatcaagttgggagggctggaaaatgagaaggagcaactagggacaggcaatccaggcaggtacgctggcaacaaagaccacagggaagctctgcttcggtgaggagacagtagtgctgaaggtggatcaactacaatgtggactaatttgtctaatgaggtcactgatgactttagaaggagctcttttaatacaaatgtagaggcagaaagcagattgggagggattgcgggatgagcaggaagtcaacaagtagaaaaaatgcccaactgtttcataaacttaactgtgagatagaatcagaattgtaaccagaacctatgaaaacagaaagacatcacttttttgttgttgttctgtttaagacaaaagattcttgagcatgtttagtctccagtgaaaaaaggatagactgaagatataggagaaaggataatttgtaatacaagtttcttgaaaagaaggagaatgttgatgtatagaaagtagagtttcattgaagtcaaataacaggtataaattgggctattgagcacaaaagatataagcataggtgttcttatctgagaatgggagatcatagtcattccagagaggacaggcctgccagatgtgactgtagaagtaggtgactcaagtgaggtggagaagaaaagatgctagaagatgaaacagtgagacctgaattttggatgagctgtccaagcagacagtatgtaatatctagagttgaggtatagagtaaattaggcaccaaagttctttagtgaatgtagggtagggttcaataaattatagcaaagggtagagttgggataactgggcttcagggggctcaaaaaatggaagttgttacacaaatgagaactaatgctctgaaacctgcatttgtggaccagcactcaaatgcaacagtcaaatccttcactcaaaagggctgctgagagacc

SEQ ID NO: 41022 - DNA, 1060 bp, Homo sapiens
aaattacacaggtgctattttctgccaacaattaggcacagattttttaaatgattacacaccccagtggtgaaaaaggacagggaatggatacattttatgcattaccaatggaaatataaatttatataagcttttcttaaaagcactttaacaatatctgtcaacaattttatgtaggttgaacatctcaaatccaaaactggaaatgctccagtgagcatttcctgtgagcattgcatcagcactcaaaaagtttatgattttagagcgttttagattacagatttttggatttggaatgctcaacctgtatgtgaaagaaaggaaaaggaaaactggacaacataagatgaactggaatctatacagtaggattaaatgaacattatagaactgcagaaatacagtatctgaaatcaaaaactcattggagaccagacacagaaaaagatgggattcatgaactcaagtacagtacaaatgaaaatacccaatttgaagtggcatagatagaaaaagaacaaaatagggcaaaagagatttgagacacagttgtttgatctagcatacttgtaatttcatagatctagcatacttgtaattgaagttcaagaagaaaagagaataggacagaagcttgaagagataatagctgagaattttctaaaactcataaaattatgacaaatatcttaaagattcaagaagttcagaaacactaagcagaataagtaaagaaaaaaacaaaatactgcctagatacatcatagtcaaactgctggaaaccaaaaataatgaaaaatagaaataaaaaaagttgagagataaaacatttaatacttacaaaggaacactaataaaactggtggctacatagagatgtttttcttttcacctttaaagatgtttcggtattttccatagtttctctatgtaaccagttgacattggaacatcttcaaaatgctaaaagaaaaaaacagccaacctagagttctatacttaaagaaaatttcctttttttaaaaaaagtgaaataaggatattttcagacaaa

SEQ ID NO: 41023 - DNA, 1057 bp, Homo sapiens
agaatagtggttgccccatggttgggtactgaaggaggaatatgtgaggaaagagtgatacagttgagaaagaacacacagagcctttccaaggaattcatattattctttcttcaattaaatgatgagtacttgattgtatattttagtattcttgttgccatttatacatagttgaatatgtgaaatatgttataataaaactatttttaaaaaataaaacaagagattctgtcagcctaaaactggactttataaagatttttggtcttagcaagaaatctttatattctgttactgagaatctaaagaggcagtgtcctatagagatttttttcattcacatttcatcctaaaaatgaccccaggaactacttgtacgttagacacatagcgaaaaagtgtaagatctcattgaagacttttgcttaaggcacatcttggtggttttaaccagttttaattacatgctttaccactgtgtttgtcttttctattccttcagttgcttcatgaatattggatggctctgaggaatcgtgtgtctgctgttgatgaacttgcaatggctacagaacgactaagagtgcgtgatcctagggagccaaagcctaatccgcctgttcttcatatcattgaaccacatgaggtaattggcaagtaaatcacagaaaagggaacagcaagcagatgtcacagatatctaagacccatagaaaaggcagaatcagggcactgagctctactgtaagtgtgtatttaatctccatttttaatttgacccatagaaaattgtctttatagaccaaaaatggtcaaagatgagcaatttcatatctattacatgcttagtgttcactattttggggcatcttgtttctctccaggttgcgcattcatctgtttttgagtttaaaaccttgtatgtgcttaagaccaatagatattctcagtcactttttagacatttttgtcacctcagttttatcagaactagaaaaatcttccttaaaaacaactgaaaccttttcttttgcagtgtttcttttgctaatga

SEQ ID NO: 41024 - DNA, 1038 bp, Homo sapiens
cttttacggtagacagcccaatattatactttgaatacattctgaaggaaaactcactcaaatgttgctgttaaaaaaaaaaaaaacagcaaacagtttctttaacactttgtttggcaaccattctctgaatttgaggaaattgacctattattcttttctttgtattgtgtgtggtgctggtgtgggaatcaggttccgtgattgcagaggtcttcagttcttacttacaacacaaatggaagagctaaataaatgccagaagctagtaagagaggctgtaaaaaacctggagggacctccatctcgtaatgttattgagtctgcaacagtctgtcacctccgaccagccagacttcctctcaactggtaggtaatagaagaaatcatacaatgaaatggtaccatttctttaagctagatttcttagagaagaaacaattgactcatatagtaaaggttttttcattttaattgagacagaagtagaaagagatgtattaatctaatttaaagaaaaataaagtctcaaggacaaggtatgaaaaaccatgtgatttgttttttctaaaatggcatatctagtggaaagaaaaatgaagtcaaaatattaagcttctccttaaaattaccagattgctggttatgtttgtgaatatttctgttaatctcttttttttcagctgtgtcttttgtaaagctgatgaattgttcacagagtatgaatcaaagctattttccaacacgtaagttctctatttgattattacccatcaagaaaatgaaacattttgcaagactcagttatgtgatataagactatgttttcccccacagtaacctttattatattgtttctttaattaaattgattagtacacctttggtatttgattgtttaatatgcccagttttacctatccagaagttatcccctaaatgttcatagtgtagtaatatataattaattgagatgcagttttgtggagtggtaaaatcccagactctagaatccagtggatttgaattatacagatt

SEQ ID NO: 41025 - DNA, 1059 bp, Homo sapiens
ccttaaattcttacagagggtgacaagtacacacacaccctcccacacacacacacagaacgtatatgtgtaaagttatagtgttatatattatgcacaaaattaaagcaggttagaaagagcatcttatatttacatggaagagtattagtggcttctccatctctcacggatcactttttttgcattaggtctaatatcttacaaactgtcattttgtatattttgcctgttattgtagtttttgcagggaagagtaaatccattgtctgttactctatcttggctggaagcaaagttatataactggcacttttaataagcaccatatagacacacctttccatataaatatgagaaacattaaaactgtattccatagattcaagagtgaagatgaaacatgttaagtagaaaccttgaaaacatgcaatcaaacttctggaaatcaaaatttcaatgtctaatatagaaaattcacttaataaatagaagattagacaccgcctaagaaaaaaatcaataaagtcaaagtatagaatagcaatagaaactctccaacatgaaaaacgaagaagactgaaaattttgaaaagagcctcagtgaggttgtggacaacttcacatggcctaatataaatgtattggagtccccaaaggaaaaaaaaaaaaaagaaatatattgtgggttttatatcatgtaaatgtacaatgtgtaaaagcaatgatacaaagtctgtgtggggagacgtggatgtataatattgtaagattattatcctatatatgaagaggtataatattatatgaaggtagactgtgtgtgacaaggcaaagaatgtgcaccctacagccaccacttcaacatacaacaaggagttagaggtaataatccaaaagaatagataaaaagaaaaaataaaaaatcaggccaggcacggtggcttgtgcctgtaatcccagtactttgggaagccgaggcaggcagatcacaaggttaggagatggagaccatcctggccaacatggtgaaaccccgtctctactagctgggtgtgg

SEQ ID NO: 41026 - DNA, 2394 bp, Homo sapiens
gactgaaataatgtcatctacttgggatgtcaaatatggaagaatgcttcctaactccttccacccgccacaccctatgtctacataatgtattcatttgtataatatagaaagcattggctttggggaatataaaaactggggtttacatccggacttattagttgtatgtccataaacaaattccttaaacatttaagtccttatttttcttatctataaaataaggtgttttaaagatgaattatgatgaagtatacaaaggatttagcacagtacctaacaaatattaaatattcaatgaatgatagctgcctctacttctccttttgttgtttttattttccatttatgtagtcatttatttattttaatgtcttcgaaagtattgactttaacaagtactttgtgatgcatttattatttcatttgttattatttatgtatttgatttatttctttgtgaggtaggatagaatctcagtcagatttttgctgttaggataccacagactggataactacaaagaagggaagtctgtttaactcgcaattctagaggctggcgcatctaagagcatgacactggcaactggcgaggatcatctcatggtggaaggtggaagggagtacatgagatagagagaagcaccaggggctggactcgctttgtaacaaccaacccttgagataactaacccgctcctgcaataatgacaattaatccactcatgagggttccaccctcatgactgagtcacatataattaggccccacctcctaatattattcactggagtttaagcttctaacacgtgaacttttgggggatacattcaaaccatagcagatgatgagcaaaagtacatacgatcccttatctattgagcttacagcttagaggagaacatacatttcttaaaatgtttcttaaatacttagataaatattaaattgcaattgagataactttcacaaatgaaaaaaaggaaaattctaactataacaggtttcattaaaaaaatagtttgttctataacatcatacaattgggatgctgacaactgagctgtgatctgaaacattaacatgagctaggtaaagaggaaaaggaaaaatcctctattgtagaggaaacagaaaatattaatgtaaatagatcatgtggcagaaatagcgtggctagaatgtaaagagctagggagatgatggtggatagagagactaggtaggtagagatgggaccatggaggatgttatttgccttgttaaagaattttattttttttcttaagagtagtaggagctattgaaacgatttaaacacagtggttgggggtcattttgtggttagatttgtatttcaaaagatcactctagttgcagtgtggagagtggcttagaagagggtaagagtggatgttaggatattaattgattgtctataagaagtaatctaggcaagtggtgctggcacttttgatttggactaggtttgtcctaaagataacagaaaaaagtggataaggcaaaattaacaagcctcagtgacagatcaggagataccaagatttctgacttgcataaatccatgaatggtgactggtttccccagtgaatactaccagaaaagaagcatgggccagtggctcacacttctaatcccagcactttgggaggctgaggcgggtggatcatctgaggtcaggagtttgagaccagcctggccaacatgatgaagcctcgtctctactaaaaatacaaaaattagctggacatggtggcagacgcctgtaatcccagctagtcgggaggctgaggcaggagaatcgcttgaacctgggaggcagaagttgcagtgagctgagattgcaccgttgccctccagcctgggcgacagagcaagactctgtctcaaaaaaaaaaaaaaaaaaaaaaagatgaagcatgtgtgcaaaaagattatgaatttgagatttcggcaagttgagtttgagacggctttgggacctcaaaaaagaggtaacatatagcaattgaattgatttgagctaaaaatataaatctgtggacctttgcatagcagtgatgcattggttctttcagatgttgctaactcccagcaaccatcaaggtaacttaattcaatctaaatatttgttgatcatcttcagaataagtgttgtaggtgtgggaaggatatttttattattattttatggcttctgaagagaatatatgcccattgtgaaaaaatttgaactgtacataaaagtataaagaaaattacaacccggacatggtggctcacacctgtaatcccagcactttgggaggctgaggtgggaggatcacttgagcccaggagttcaagatcagcctgggcaacatag

SEQ ID NO: 41027 - DNA, 1045 bp, Homo sapiens
ttgtacctgcctaaacagcatagatataggtctgaattaaaattagagttccaaagtcataggtagaaaacaaagaatctaacccaaaaagaaacaaagggtggggggggtggggagaggcagaaaaagagagaaagggaattaatttcaattaactgtgtctatgaaaatggagactataatttttattgtgtgaacccaggaatactagggccataattttagtaattatataagttattagtagtcttataatgtcacactatatgtatataccgttattgtttctaccattcctttacttgagcatttagattgtgtctagttttttcctcctctccacacgtgcattgaaatgatccttctaccttaatcttattcaatatcacagtagaacggacactgcatttctaaaacctttattcaagttgtgaatatctaaaatgaaaagtttaaatcttgttttatgtatttccctaaaagttgttattaaagtgtagttaaattacaaaatttaaacatacttggagttctgtagtaaatactcatcttcaaaacttatctttctgaaaatccaagttttcgtatgttttcagcagcataactcactctgctaaaacaaaaatctcagtatccattactttgacctttaaaagcagtgttttccaatgattatttttaggaggaaaaggttttctagtaatattttctagtatatatttaaatatttgcatcacttaaatgttacatttagatacatatttatagaataatattacgttcagtaaaggaccacatttagtggtctcctttcatgtttggaaactgtcgaaattgtaaatgtttaggcgttaataaggtctgagatcttacccagctcaaaagttagctgagagggtacagaaaagagtacatgactatcagagttactttttctcattttaatgttgagagagtatgagcaataatttcttagttcctgggtcggtttttttggagatacaagatgttggcaagtgttttgagcacctgtcaccattcaaca

SEQ ID NO: 41028 - DNA, 1090 bp, Homo sapiens
ggcagaacaggatatagttatcattacctatgatgtactgcgttcagaattaaattatgtcgatatcccacatagcaatagtgaggatgggcgtcgcctacggaaccagaagcgctatatggctatcccgagccccctggtagctgtggagtggtggaggatctgccttgatgaagctcagatggttgagtgtcccacagtaaaagtgagagtttctgcaaaatcttttgagggctggggaagaagggtgaaaaggaattaggggaccttgagtagtttaatagtttaagcatagttaacctgtagtactgatattggtcaaaagtttgttattaaacactacttgtgcttttctcttgtgctttgaactacataaccctttgaaattagttctgtactctgtgactcattgctctatatgaaatatatatttttcagtaagatgtctgtttatatatgatgcagatcaaagtaaactgtgtttaggaacttctgtaagcatttctgctaactgggagctcatcgtgtagcctctgatagctttgaaccaaagttgactttgacagtcttttaaatcagaggccaaatggtaacagaaaatactactttagaggacagaattttgattcagcctttgaatgtcatatgtctttattctgttgtctttggccagtctgtaacctgaactgaatgtatgaatcatgtctgttagtatatctggaggatagagtgatgcagggcatggatcagttattcagggggctttttcattttgtacgtatttgaactacccctctgttttaggggactgcgtggcagcctcccactaatgagaaccactgtactggaagatggtccattgaatatgacattcaacattgagtgtgataactgttaaataaaagtaggtacatctcaccagaagtgtagcttttaatgggctgtttttcatgagtatgcctgacttctgtgttctttctgtggttttctggatttcatttttatttcatttttccctctcatcaggctgcagaaatggcccagcgtttgagtgggattaatcgatggtgtatcagtggcactccagtac

SEQ ID NO: 41029 - DNA, 1032 bp, Homo sapiens
aaacttatggccttttaaaaatattacaatttgttcattttaaagcctggtatctaaggaaaacttcaaatttagctattaatcttagattatataattatagtaaaagtctaaaacaactgagcataaagctgtacattaattgtgaagttttggaaattttacatggcatatttattggaaaaaaataagttgtgaattttttggtgtcatcttttagttttagaagttatgaggtatgtcctataaaagtatataggcctctttcaaagcaattcagaaataaatgatatactttttcaccttgaaagaattatgtttttaataaagaaccattagctgaaaggagtttgtaaatatgttcaaggtttttattacttttttcatgttatagtaagtataaatcttcttccacagaacaattgtgcccaccaagtgaacttagtgtttttacaaatttgcattaataacataatcacttgtcttccagttggctgctactgctaccaaatgcctatccttttctagcataagaaataaaatgagaacccatttcttattgggcatagaacagttatgtctccatatggattttgtatgttaaaattacaaaagtaaagtaagttgttcctatataaacttcaaacagtattcacattgagttcctcaaatgtttataaaacatccacaatagacaatacacgtgtcagctacgtgtcagcttctctgaggggctacaaaaatgaaaaactttgcctttgttaccctggggaaaggaccagtggacataaatgtttgcagtaccagatagattacaatgtaataatactgtatccacagaggagaacataattccagccagggaaaacaaaagaaaatgccatggaaaaagtatcagttaaactttcttgaagaatggatgagtagatttttgattaatgaagaattaaagatagggcctttcagtgacaaaacacactgagcaaggccccagagttgggcaagttcattgtatgctcttagaataagaat

SEQ ID NO: 41030 - DNA, 1046 bp, Homo sapiens
atcaaacattccctctctttactgattttgccaaaattgtggctcagtgataacaagtatgtaacaatttatgactcacatatctgtgttctatctacgttccctacagaccaagtgttaatctattctgtttttcctgatcctgaattttacaaatatttaaacatttattgctgctgtagtaagacatcaccaagcgagccaagacagaatactagcagtaatgaaatacactctttgtcattcatttctgtgtaaggctggtggattcctgttctgtagtgaaagaatatgagattctcagtgattagggagtcaggtacaacatagtcaacatgaagtaaagggaattaacatttattgagtgtctaccattagaaacttttatagttatattatttaagatggacttctctccattttgtaaatgagaacacttaggtcaaaatcaataggttatttttctcaaattcatttagcttccaaatatcaatgccagtattcaaaatcaagtctttcaactgtaaaacttcataccacattgcttcactagggtcaaaatattaacattaatcaaggtctgtttttttacacgttttagtgtttgattcagtaatgaggatgcccaaacctaactgtgcagaagattcctagcatgtatgtcataatcttctggggaaatcggcatttttaacaaacttgactgattaattcatcagttttgggaatcattgcattggtagatagaactaggtgttcttatcacattctcccaggttcgatttcagttaggggaatatttttttccagcaactcgaattgtacattgtaggcacttacatttataatttgttagtgaaaatgaaacacgtgggggaaatttggtaggcatgtatttattgtttgtgtcacacatgctatgaatacctttaaaagtagtgatgctaattttttcttgcttatgtcctcataaagaatggtatatttcaaatgaaactacttttattttgattaattgtttttaggttggaatttatcttttggaa

SEQ ID NO: 41031 - DNA, 1028 bp, Homo sapiens
taagtattgtccaagctgttctgatctgtatgggacccttgaaaggggtcatagggcccatggtgaatgaagatcaagctatagggaattggaaggaaaggaaattgaaaattttcctcaaggactcatgtcagtcaaagtagttcttacttaatcaacaaggaaatgcaaactcagaaaagccacatagcaaggacctgagctccatctgggtctgcagtcccccacactcagtgcgccatctgctagcactcatgactcctcagaagcggtagcatctcatgtggaactaaataacacagactgtgaaaatattaggttcacgcccagggcaacaacccccaaaaatcccaatttattttgaatgagttgtaatgagtaggtggcaaatttatgacaccaagcatgtgctgttctatcacttggtattccctaggcagcattcatttcatgcctcctaagccatgacatggaagcctggccttctgtttttgtctggtcaagacctagagctctgtgggaacagtttttgtttttgttttttttaaacatttacatggcccttttctgctctttggggaaatgggagagattagagctgctgccacccagagggtggaataagtcaatggaatggatgagttagcagggaatgagcctatacctacaggtaggaagcgaggttttcatgaatctctaaatgccatttatctactttcagagataaacaaacaaatagatctaagccttttctgtgagagtcaagtaggttattcccgagcccagacgaccttctagtgtagactcagtgcagtgtacagtgtgacctaggaacatcagcatcgctggggaacttggtagagttgcaagttaggctctacaccagcccaccgagccagaaattctggcgggtggggcccaataacctgtattttaacaagccctcctggcgactctggtgcagactaaagtttaagaattactgctagtatttagttatcaagaaataggcaattctaaaaacttca

SEQ ID NO: 41032 - DNA, 1059 bp, Homo sapiens
acttcaactgctttctcccactaactccacatttttagttgtttgtattgctattgttgaataagttaaatattgctaaattatttaaatttggcatttcctttataatcctattttgcacacatctatttactgctcatcgctaatcccttggcatggactctccagtcatctcttacctggttatcaagcagcatccttttttgcaagaagcacttgtaggtcctctctcctctaagttctcaacagtttgacagtctccatctaaggatactgtagttgttgagagtgtagtgttggtagagagctgcttaggtttgaatctagctttgccactcactatgtgaccttgagcaagtaactttgcttgaatttctttattcttaaaacagggaagtctatatgtgctcttgtttgttggcccagtctatttcagccccagattcactctcagccctgccctaccccattctataccccagagggaaggctgacctctgctcttggcatcatctggactggttgacccactggcttccaactgggtttgcccaatgggaagcacctgcagcgaatcagagggtgggaggagagaagtgggcattatttccctgatttctccccacttcaggtgcctgtcttggggagtaactgtaccccttgtgaggatggttcttggaggtgaccactccttcaaggatccagtgctccttgaatgctgataacacgttaatggtattccactgctcctcttccctggataccccaccaggccttcttccttgaaccctgactaactttctaagcattgcctttattaaagtttcttcatttgaagtatttgggtcgaactgtgttacctgtcagaatccttattgacacagtactcagggtcaggaatgaccttaaaaatagaattctgataaaccctgatttctcaaggttgcttaataccctaggcaaattcatggatgacctctattcttgagaacacacaacacttagcagtaggtatgtgatgtggcatcattgtctcttgaatggtcatcctagtggtgt

SEQ ID NO: 41033 - DNA, 1076 bp, Homo sapiens
tttttgtgtatggtgtaagaataatgggtctaatttcgttattttgtttgtggatatccagtgaggtaaacatcatttattgaagagtctatcatcttcctattgtacattgtcatttgtaaccaataaagaaggaaatgttttcaggtaaatattttctgaattgctaaatgttacactaacagcaaagtcagtcatcaaaagtgttcatggagtcagccacaggattatctgctttctgcttcaatgaattctacataaaggaattcttgctcagtagaatgatgatgcaattttcaattttggtcacaatgagcaacagggaattatctttaatttctgtttaaacatcataaacatttggagttagccctgacttaaaatgccagctgtgttctgaactagccgtgtgacttcaggcaagtcactttatccctctgagcttcagttttcttacctgcaaaatgggaataatagtacccactttcctgcttgtattgttgtgaggattacatcatctagataatttacgtgaagtctttagcatggtgtctggctcatggcggatactcagtaaatatttttaaattgttgtttgcacttttattgctgtaattattaactcgacctgtgagtttttcatagaagggattatgtcttaggcatcttgtacctaatgtccaacatgttgttgtaaccccaacacctagctcaagcatgtttacagaattgagctaagatcctcttgagaatgctaaatgagaagaacaaaggggctgtgtaataaagaagttcagcctttgtaattattcagccatgtgcttctaattcaggttaaaaaaatttgaaggccaaagaatctttttaaacatatcttacaaaggaaggtagatttaactatttaaatggagtcactggcaaacatgttctaggaaaataataatgaactagtgcgatcaaaaggtgatctttactattgctttgttaaaaatagtcttctcatctaaaactgtttttatatatgcaactttgtgagatctttttataattcttgtaatggaaaagctagaatgata

SEQ ID NO: 41034 - DNA, 1064 bp, Homo sapiens
ttgtggttcattcatacaatgaaatattactcagcaataaagagaaacaaactgccaataccacagcatggatgaatctcagatgcatattgctaaatgagagaaaccaatctggaaaagctataatatggtgtggttccaatgatgtgaaacttctggaaagggcaaatcagatctatagctgccaggagctggaggtggagggaggggattgactacaaagggccacaaggggaactttcggggtgataaaaatagtttatatttttattgtggtagtgattataggactatatacatttgtcaaactttattgaatgtacacctaagaagagtgaattacactattggaaattatatctcaataagccttacttgaaataaagaatataatgggaggaaaatggttactgcatagagtgataggtgcagtctagggagcagtacaggctcataaagattcacaggatctttaccatgagaaccatgctttgatcatctttaatcttatatttgaacaagctcagaagctcctgtgaaatctgattttcatttaaacctaaccatagtaacttaatgtacacagcaacttccatacctgaaaataccctgaaatgtatagtcggctgacacctgtctcctcgtccattccaggaagggaaatagttgaaagtctgtgtgacaggaaacatcttgaaaacaaaagcacattctatgtccctaaaacaaaacaaaactgcaaatagttacctctatgcactcacttagattagttaaaatttagaagactggcaggactaactggggctaatgtgaagcaactgacgcttgcagacattgctggtgaggatgcaaatggaaacaacaatggttctgcatgcttccatctacatgaaattcctttatagggaaatctaatcaatgacagagagcaggtcagtgattgcctggggctgagtgtagagagggcgtctaactgcaagggggcacaaggaaacttttggggtgctgaaatgttcttcattgtagtggtggttacaggggtgactatatttgtcaaaatt

SEQ ID NO: 41035 - DNA, 1023 bp, Homo sapiens
aggagaatcgcttgatcccagagttcaagaccagcctgggcaacataggaggccctgtctctataaaaattttaaataaaagaaaaaagtagtagtagttaatattttttggtccttacaatgtaaggtgggttcttttatccccctttcacacaacaaagtgagaacaaaaattgttacttgcccatagttttacacagctagtaagtagtggaaccacagtttagtttcatagttgaaactaactactcttaacttgaaacatactcctaactacttttgctcgtcttcttacctggggtatattctcatcagttttctttcctaaactctaatgttattttaataaaatttgtcccatagtataatattccaatgtgatctaataggaacacatctcctccttcttaaatgtctgtactctattactttagtctgaggtcgcatcagtcttctttactggtggctgtatcacattcctgtgaatgtttagcatgttttccactaaaaactctgaattctttccccctccatgtgctgcttttagctccagcttttcatcctgcacttgtacatggaaccgtccatgaatttaagcctgagataaataaacattggtgtgtttgagataatcagaggtctaaaaaatttcagactggttgtgttttttttgtgtgagtctttctgattctgctgtttgattacttgaaaccttacagtagcaaatatccttctcattttgcatggagtaaaagcatcaagattttgggggaatgctattagtatttttaaaaagattttaaggcaattttaagttgaaattttaaggcaatattaactataaaattattaaattctgaataatgatctcctaacttctccccttaaagtatattaaattttaaaaagttttgtactttgatttaatgatatagctacattaattttctcttcttcctaataaaactcagcatcagtatttaagattttaatggccccccgattttttattattttgttttt

SEQ ID NO: 41036 - DNA, 1051 bp, Homo sapiens
gaagataatgtaaataaagataatgaattgcagagaagtggtgtcttacctaggacctcccactacagtcaagaacctcttacattaatctggtgccctttctgttatacggtaactgcttcatccatagtgagacttttaatggcaggcagatggcaaataatttttcaatgataaatgatggctgtttgttaccattaccagttattttaactcttgcagtagactgtttcacatttatgggaaacattgctggccacttttgtttctggagtctctggaattgccaaatagattgatcttgtcttttttgcttaccctatgggtccccctttaaaaccctgacaatcaaggtacacataggattctcagtcaaaacctctgtctgtacctccagtttgttttacttctacatttaatctaggacccttctgtaggaagcctttctacaaacagcatttcctagtggtgtggttgagggataggaaaggcagggcagtcaacaggtctgggacatggatgcgaattgaattctcatctggtaggagacttgaaaattgaattctcatctgataggagactagagttgagagtagagaggctgcattgaatgctcttcctttctagccctaccaagctagttaggatgtagcagtaggtcctattttcctgaggggatttttggcacttgggaggaatgaagttgcccctaagttagaatttcaaagtagagacagtttgtctttggtgctattacccaccctctcctctcacagctgtttggtgatcttctgcacatcctgccctcttctatttgcctgatgctctgttgccatttagcagagtatctcttgttaaatcttttttttttgaaacggagtttcgcactgtcgctcaggctggagtgcagtggcacgatctcggctcactgcaacctctgcctcccaggttcacgcgatcctcctgcctcagcctcccgagtagatgggattacaggcacacactatctcgttagatctttaaaaggtctcttaaagtctcacttctctca

SEQ ID NO: 41037 - DNA, 1143 bp, Homo sapiens
aattggtcagtactgagttgaaatatgtaactgtcagtgtcagaaacagggatttagaattgtgaagttactgacaggaaggattcttgtgtagcacagagcttggtattacagtctcacagttcattatctaaaacccttgagaataactaggcttcctaattcagaatttttcagaattcagaaaggtaatactgtatatatgcatacacacatacacattacatctgtgattatgtaatacctttctgggtcagcattccataatctgtcacaaaagtatttctgcagtgaaacaaatgaatattcatactaagtggataaaaaaaggtcataacctaccattaggtttggtgttactgccaaattaattttaacaacaaacttaggaacacaactttcactttccaggatgtttttgaattttgagtaaaaaggattgtgaacctgtataatacagtcagtaagtgtatatttatctgttcactgcagttggactgtctctctaaaatcctggctctgacccttgccaacaacttctatacttctctaaacttctgttttctcattaagaaaatggatagtacctcatggggttgttaccagaggtatttgaggtaatagatacaaagcatttaacagcatcgggtgtgtaataagtattcaaacattaatttttgtaacaacaaactttttgtattttcagtattctagctacagaaatcttttccataaagatttatgcttgagtttttataattattatcaggaagaagattgtgagaaagcattcttcaaaatggacaatgtgcttatagatgacagaagaatacatgtggattttagccagtcggttgcaaaggttaaatggaaaggaaaaggtatgatggtttatcttttgtttttgttctgctttttttttttttttgagatggagtctcgctctgttgcccaggctggagtgcagtggcacgatcttggttcactgcaacctgtgtctcccaggttcaagccattctcatgcctcagcctcccaagcagctgggattacaagcatgtgccaccatgcccagctaatttttgtatttttagtagagatggggtttcaccacgttggccaggctggtctcgaactcctgacct

SEQ ID NO: 41038 - DNA, 1032 bp, Homo sapiens
gatttgtatggatttatctttttcatctgttaaagttaattttttccgaattattatcttgcttaattatattcaacaagtttggagttctttttcttttccacagaggtactcatttttctagctgtcttctcatttctctaatttcctttcttcagtttcttttctactgagacaacctcagctctagaagcttacatgaacaccttgggaaagtgtttttcttgtcatcaaattaaactgttatcttgtgaggtaacttttcaactggggacactctggagccaggctagaacccagaaatttctgtgaaacagcgcagactgttcccccacatattttaaggtttatgtggcttcctgaaagctgaatttgtctttatggttgggattggtgcttaattgtcagatcatttctcttcattcagcagttagaattggataataaatagtgtccatataaatatttatttatttttttgagatggagtctcactttgttgcctaggctggagtgcgtggtgggatctcggctcattgtggcctctgccttcctcattcaagcaattctcgtgcctcagcctcttgagttgctgggattgtaggtgcatgccaccacgcccagctaatttttgtatttttagtagagacagggtttcactgtgttggccaggctggtctcgaactcctgacctcaagtgatccacctgcgtgttctcccaaagtgctgggattacaggcacgagccaccatgcctggcctattttgattttaacagaagcccactttggctaatattttagaattaatataaatcaattcttggaggtttataagtttgtctcagttgctgtccaattaattattaaaaatttttttttagagacaagatctcactgtgtcacccagctggagtgcagtggtgtgattgtagctcactgcaaccttgatcagttactgttttagcatgtttgatataactaagaataaagtatgtcttctatgtttctcagatttttttattctttaaata

SEQ ID NO: 41039 - DNA, 1029 bp, Homo sapiens
atgacgcaaaaggggtcgcgccgagggtgacgcgtggcgtagacgacgccgtcggcctgcgcctgtcacccccctcctcccggggtttgtagcggaggaggagcgggcgccatggcggttctactggagaccactttaggcgacgtcgtcatcgacttgtacaccgaagaacggccgcgtggtgaggcttgagccccactcacctgtcgccggggcccccgagcttgtctccctactttcccttctctgcgcagtccagggcagagattggctagagctcgagcttctgggctgctggtgcccgcgactgggctattttattaaccggccttggctagaaaagtttttgtgacgggaattcgtttgagccttggcagcccttctcccgtattttgtgttggccagtccggtggacggtgcttgcggtcattaattgcctttgggagtgtgtgtgtggggcgtgtgtgtgtgtgattcgagctgcacatacaatacccatagcttttgtgcctttattgtgtttactcgtgagaggaacataggaactattgcttggtgtgtaatcggttaaatcttgatgaaggcagttagggtgtgcttggcgcagcgagtgtgggcataccgcttaggtggaggaggaagaggttgtctggagtgtggactgagccttcgaggcactgggctaagtcctgggcttggcttcttgcccccgagggtctgatttttccactgggggaagtagacacaggaacccattttagttttctatgtgttatggtagaagaatgtgtaagttgccacggaaaccagaagagggcggcttctttggtggggggtgggaagaagcaaagctagcgaatactatatagaacacttgaactagttctttcaaagatgaatgggaatgagggttttcttagcttggactttctttgtttggaattttctggaaacggcaagtagtttggtgtggctggaaggactggtgtgagtcgtggaatggtagactcgagtgtggtcagatacgcc

SEQ ID NO: 41040 - DNA, 1033 bp, Homo sapiens
tggtgttagcaggtgctggtaagatatctggtatctttcatgtcagtgaagagtctacagttcatttgaaagctacaagttcaagaagctaatgttaggataaattgtgtaaaatagaaaatcagtaattgtcttggattaaataaattgttggtgcctttgttcactatattataaaatacgaaatgactgtgaaatatattgacttggcatatgcacagaatacagtctcattctcagtgaacttatcctaaatgtgacagaatagcagtaaaaagaaaaaaagaatgtctttaatccagctggttcaagtaggttttgtcctaatctaagtattagtagagacacttaattaaccaggggcttgactgcgctcgtttcctcctttctaaagtgagcataccacacagggttctgaggattaaagctaaagtgtatacatcaaacagctctattgctatccctttgcataaatggtggctgctattaaggataaaacttggtaaaaggcaagagctgtttgaatctgaagttttgttttttttttttaacacaaatgagaaaaggagaaaccctgaacttacctagcttttcctctacatggagaaaatatttaattttcttgttaacagtttctcttctcttctgactctgtgatgcttattcttcattttattgaatagttataatgaaattcaaattgctagctttaaccccacttttactttttctgggattttatattcagtattaattatttaaattagcatcctttttcattacagaagatttaactgcttaaaaatcaatcacaacaggctttgtattccaataagtttctatacaatactacatatatatgtaatataattagagaatgctacaacagatcaattgaaaatttttctattaacaggttttcatttaaccaaagtaacattgtgtgtgttgttgttgtttttaacttaaaacctagggatgcgtccttgatggcaatgagaaggcgcattgaaggtttgactccagaggaaat

SEQ ID NO: 41041 - DNA, 1087 bp, Homo sapiens
ggtttcttcctttaggctcgattttattctccagccaccatatttattgatgagatagactccatctgtagtcgccgagggacttctgaagaacatgaagcaagcagaagggtgaaagcggagctgctggttcagatggatggtatctgtgtttagcttgagttgaacagggacgggaggttgttaggtgtggtgtctccagttccagtgggtcaaactttactcatagtgctaacccaagcttttaataggtattcttaacttcagatggactagagggggtggcaagaagttcctgatagtgatagtaatagatttggtacactgacagtggtgacaagtcagaattaatggccacacacagggcacccttttggtatatacaactatcttactttagctatgaaattgaaataaaaataaatgcagataaattggccttagagtttatgtacgctttgaaaaagatttaaaattgttatgtatttgagatctggcttttcgattaaatctattttgagtcatatatttgcatactacagaactcattttctttggattacaaattcacataggtaccagttaacctaagtcttaaggaggcattaagactgtgcttccttgtattgttgtactaaatagttgttgatctttaaatagctgagcttcatttggtataatccaacttaatatctttttcactctccccttacccttattttaggtgttggaggtacttctgaaaatgatgacccttccaaaatggttatggttctggcagctactaattttccctgggatatagatgaggctttaagacgacgccttgagaaacgaatctatattcctttgccgtcaggtatcttcctttcaatcttgtcagaaagcctgttaactttcatgtagttttgtttagagaatttaaaatttgttattaactaactttctggaagagatacatgaggagtatcttcctttacagtactagtttggctatatgccttaatactaaatagtaaggaattaaaaagtaaagaatggctctttacttaattatctcttcttagagatccaattcttactggaa

SEQ ID NO: 41042 - DNA, 1035 bp, Homo sapiens
cacccacctcggcctcccaaaatgctgggattacaggcctgagccaccatgcctggccgagacaggatcttattttattgcccaagctggttcttgaagtcttgagctcaagcagtcttgccaccttggcctcccaaagtgctaagattataggcgtgggccaccacacctggcctgagtttttttcttgaaaaaatactttttttttttccttaaaaaatactatgctacttcctctggcttgcttttctgagaagaaatctgctttcatctgaattgtttttccctataagcaaggtgttgatattctttcattgctttcaattttttctgtgtctttggttttcagaaattaaagtataatgtgtgttggcatggagtctttggggtgttctatttgtttctgaggctatttttcttcataatctttcaagtacattcataattattgaagcatgtaaaaggctttaaaatctgtcaggaaactaacatcactgtcattttggtcttggcatctgttcattgtctctttacatttaatttgagattttcatggttcttggtatgaggaattttctgttgaaacctggacattttcatattatatcatgagactctagatcttatttaaaccttctgtttagctgatttttcctaacattgctctggcagagagattggggtgccaccgctgccaggtggggatggaagttcaggttccccagccagcctctgtcggcacctgcctaggggcagaggccttctcattactgctgagctgcggtggaagttctccacacgctctccagggacactgtggttggggagtggaagtctaggttccctctatgatgtccagtgactgtggcggggaggggtgggggagagaacatgcaggggctcttgttcatttcatttttgggaatgaaagtttcagcttcttatttagcctctgattctaccctggtgggggtttgaggtaactcactgtaggcttccagaagtagaaagtcctaggccttccaccctgccttt

SEQ ID NO: 41043 - DNA, 1044 bp, Homo sapiens
ggaaggaacccttgtggcataatcccctctcaaaggcccaacttttaatactagcacattagctactgagtttcaacaccttgcttttggagggacacattaaaaccatagcagtagctgggctgaaattaaccagaattaaccataatttgtcatttactatccaggtttccccctggaagttgcagtcctcccaatagactccagagttcctaaatagttgcatcaaacagattctgcaggtgcagtttttgtttaggtggaaatacagattcttgatgcttcctactctgtcagtcttccacgatcctgtcccaataattgatttttatatgtttatcttctatcttgtcagcttaatactatgctagaattgttcattctaggagaatttttgtagattccttagtattttctgtgtggacaattatgttatctgcaaatatttctgtatttttggatttctatgccttttatttcctcttcttaccttattgcattggctagaacttccagtactatgtcaaatatttaagagtgacaaagtagatgtccttgctgtgttcctgttcctgattttaggaggaaagaattcaatgtttcatcacagagagtataatgttagctgtaggtgaggtgtttttgtagatgttcttttttttttttttttttttttttttttttttttttttgagacagagtctcgctctgttgcccaggctggagtgcagtggcgtgatccccactcactgcaagctccgcctcccgggttcacgccattctcctgcctcagcctcccgagtagctgggactacaggcgcccgccaccacacccagctaattttttgtatttttagtagagatgaggtttcaccgtgttagccaggatggttttgtggatactctttatcaggttgaggatattccctttaaattctatttttctgagagcttctgtcctggataggtattcagttttagcacatgcttttctgcgtttgttgcatgatcacatgggtctttttctttagtctcttaatatag

SEQ ID NO: 41044 - DNA, 1115 bp, Homo sapiens
attcatttacccattttttaattggattatttgtggggggttttttgctcttgtttgagttctttgtatattctggatattaatcccttgtcagatgaatagtttgcaaatattttctcccattctacaggttgcctctttattcttttaattgttgcctttactgtgcagaagcattttagttttatataatcacatttgtttagttttgcttttgttgcctgtgcttttgaggtcttcctaaaatcttggcccagaccaatgtcctgaagcatttctcctacatcatcttctaataatttcatagtttcaggtgtaaacgtttatatctttaatttattttgagttggttttatatatggtgagagttagggggtctagctccttatttctgcaaatggatatctagttttctcagcaccacttattaaaaacactgcacttgctccagtgtatgttcttggtgcttttgttgaaaatcagttgactgtaaatacatggatttccggattctctattctgttccattggtctgtatgtctgtttttatgccagtaccatgctgttttggttactagagcattgcagtttagggtcaagtagtgtgatgtctccaactttgttccttttgctcaggatctctttggagtcttttgtggttctccttttctatttcttttttttattttttttttgagacgaagtctcgctctatcacccagtctggagtgcagtggcaggatctcggctcactgcaacctccacctcccggattcaagcaattgtctctgctcagcctcctgagtagctggagttataggtgcccactaccatgcccggctaatttttctatttttagtagagacggggtttcaccatgttggccaggctggtcttgaactcctgacctcaggtgatccgcccgtctcaacctcccaaagtgctgggattacaggagtgagccactgtgcccaaccaattttttttctttctttctttttccttttttttttttttctgagatggagtcttgctctgtcaccaggctggagtgcagtggtgcgatctcagctcactgcaacctccgcctcccaggttcaagcgatcctcctgcc

SEQ ID NO: 41045 - DNA, 1453 bp, Homo sapiens
tcctgtatagtaactattttgattatatcatcaatgttacctgtttcctctttcagaacagtgctgcatatacagattgttattggcaaaggaaaatctggctatctggcaatattttacctaagcgcagattaattggtgaaaaaattaactcttaagatggccattaataattaggaaagtttacagagtggtcttagtagaaaattcaagtcctcctaatttatttaaggttcaataatgcgttcaacatgcctgttatgtataacgcttaggttctaaggaagattaaggtttcataccaaaatacatgtagcttatcttttaggaaggggaaaaaggctccattttgaccatagtaaaatttgtgttgtgttttatttccttttcttaagctccactgataagggattgtttttatcaaaagttactatttgtagattggaggcataattttagtgattttcatacttttagctttcttcgcataaaagctaattgaaaccgtatatgtagtaaaattaaaggcagagctgttgcagttgaattggagagttagggcaaagaacacttattagcccacacttcccacctttctacaggtggtcctttcagagctcagcctgaaaacccactactgtgttatcgtgcgtcttttggggttagtggttcttttgagaatctgaaggaagctgtggactcttcctagaaaaaaaaaccacacatacacatacaatgttgcatgcagtttcaagggattttggacatattgaaacctatcacaggctgtaggttatggacctctgtgccatgagaaaattgatacattaaactaagaactttgtttttaacttaccaatcactactcagcacatcttatataagctgataatttgtgatggaaaaggtctgtagcatgtgatataaggtgaccttatgaatgcctctcttgctggtacattaagttgttttaatatatcatttggaggggactgaaatgttaggctcattacaagcttgatacagaaatatttctgaaggatttctaatcagaattgtaaaacaatgtgctatcatgaaatcgcagtcttcacctcatggttcatggaacatttggttagtcccataaaatcctatgcaaaacaaagtagttcaagaatttttaggtgggtagtcacatttataaggtattcctcttactctttgggctttttcagtctgatttatttaaattttcatttagttgttttacttttggactaaggtgcaatacagtagaagataactttgttacatttatgttgtaggaaaactaaggtgctgtctcctcccccttcccttcccacaaaatctgtattccccctattgctgaaatgtaacagacactacaaattttgtattctttttttgttttttgttttgagacagggtctcactctgtcacccaggctgg

SEQ ID NO: 41046 - DNA, 1663 bp, Homo sapiens
tgtcacccaggctggagtgcagtggcacaatcttggctcactgcaacctctgccacctgggttcaagtgattctcctgcctcagcctcccggagtagctgggattacaggtatgcaccaccacaccccactaatttttgtattttaatagagacggggcttcaccattttggccaagctggtctcgaactcctgacctcaagtgatccacccgcctcggcctcccaaagtgctgggattacaggcgtgatgagccactgcacccagccccatgctttgttattttatttacaattggagaggaaggtttggctgtcagttttaggtgcatactggctcttattgccacctccgttgctaccaggaaactccttttctactccctgagcctgaactagagggaattctcctagagctctctgtgctcagcttcttccaagttttgggctaccttgagtccagcctgcagactactagagacaaaaaaatggagctgggtgtgctggcagaggcctgtagtcccagttactcgggaggctgaggtgggaggattgcttgaggctaggagttcaagaccagcgtggacaacatagtgagaattaattttttaaaaaaataattttttttaaatggtcaccaggtttaatggtacttcaaatttacatcttctcccctaatctacctgttattatttacttttcaggatcttgaagtagctgcttcctgcatcctgaccaggttttatagctgccttctgtgggagggagacaggagagtatatgtagtacatcttcctcaaaactgggacctctctggttgcttttagggttttcttctctttaactttggttttcttcagtttgaccatggtgtgcctatgtgtagttttctttgtatttttcttggttgagattcactcagtttcttgaaatgtacattaatgactttcatcgatttggggaaattctctgtcattatcccttcaaagatttattttgctttcttaccttttgagactctaatgattatacatgtgctattcctttgatactgtcctccatttctcttatgctttattctttcttttattctacatgttttctctctgtgcttcagtttatataattttattcatccatctttgaattatctgaatcttttgctgtgctcttttttttttttttgccttaaactgaaaaatcctaaatataccttaaaataaaaaatattaaacttggccaggcacagtgactcacgcctgtaattatagcactttaggaggccaaggtggacagatcacttgaggtcaggagtttgaaaccagccaggccaacatggtgaaaccccgtctctactaaaaatacaaaaaaattagctgtgcgaggtggcgggcacctgtaatcccagctactcaggaggctgaggcaggagaatcgcttgaaaccaggaggcagaggttgcaatgagccgagatcacgccactgcactccatcctgggcgacagagcaagactgtttcaaaaaaaaaaaaaaattgttcatctcattgtgtatattttttatttctcctgtttgaaataagtgatgaaactggaagcataaataactattattaactgtatcattttttttttccaaaaagggtttttaaaatattctattatt

SEQ ID NO: 41047 - DNA, 1054 bp, Homo sapiens
aactgagtcacatatatatagataaagcttaaagctatagtacttttagaagaaaacataggagaaaatctctgtgggctggagttaggtaaagagttcctagaaatgaccccagaatcatgacccatagaaaaaaaaattcatcaaaactaagaactttccctctaccacagataacagtcaagagaaaagacaagctacaggctgggagaaaatatttacaaatcacatagctaagaaaggttttttaaaactataatatataaagaaccctcaaaactcaacagtaaggaaacaaataacccaagccagtgacctgacatgtttctttaaatgtctgggtcaaaaaaagaaatggatctctgtctctttaaatctgccagagcaggtcaaagaaaggcaggcatctgtgctagtccctcagggaatcactaacaccaaccaagatagacaacctcaaatttttggagggcagagttcttactgcccaccttggcactaacgagctgctccaggaaggcaagctgtggttttcatgactgctgcaggactgaggaatggtagatgtagtgggttcacacacgctgctgcctgaaccaaattttagcagcctctcccttcatgaagcactctcctggctgctgtaagtatctgatcaggttccaaagttccaaaatagtttatcctgatagtctttttccagtttaattatttttagggaagggtggacctctgatgcttcctactctgctattttctgtgatgtctccttctactgtggtttttactattatctctttgtatggtttttgtttgtggttgctctagtgactacaaaatatatattaagttttcttttcttttcttttcttttcttttcttttttttttttttttttttttgagatgcaatttcactctgttgcccaggctggcgtgtagtggtacaacctcatctcactgcaacctccacctcccaggttcaagcgattctcctgcctcagcctcctgagtagctgggattacaggtgccctccccaacacctggctaattt

SEQ ID NO: 41048 - DNA, 1050 bp, Homo sapiens
aaatgtttatatccccacttgaaaatacctctggcacttaaatgagaagttacccacaattttgaccatacactgtctgatttaatactctttagtgattgtccgtgggttaaagttgaaatttgccctctgttcataccgttccctctgtctggaatgtcctacttccatctctctcttctataacccttcctcctttctgaagtctaattaactcttggtcattctctctttttttttttttttttgatacagagtcttgctctgtcatcaggctagagtgcagtggcgtgatctcagttcactacaacttctgcctcctgggttcaagcaattctcgtgcctcagcctcccgagtagctgggattacaggcatgcgccatcatacccagctagtttttgtatttttagtagagacgaggtttcaccgtgttggccaggatggtctcaatctcctgaacttgtgatctgcccgcctcggcctcctgatcattcttaattattctttgagggccagacatgatggctcatgtctgtaatcccagcactttatttattttgagataaggtcaaaacatttcacctagggtgtaatgcagtggcgtgatctcctctcatgcaacctctgtctcctggctcaaatgacctatctcagcctcctgggtagatgggaccgcaggtgcatttttttttgtattttttgtagatacagggttttgccatgttgcccaggctggtctcaaactcctgggctcaagtgatccacccacctcagcctcccaaagtgctgggatgggtgcagtggttcacacctgtaatcccaacactttgcaaggtcgtggcagacagatcacttgagcccaggagtttgagaccagcctgggcaacatggtgaaaccccctctgtacaaaaaatacaaaaaacttagccaggcatggtaatgcatatttgtggtcctagctacctgggaggctaaggttggagggtcactggagcctaggagacgttgcagtgagccatatttgtgccactgcactccagcctaggtg

SEQ ID NO: 41049 - DNA, 1030 bp, Homo sapiens
tttttttttttttttttttttttttttttggatttttagtagagaccaggtttcaccgtgttagccaggacggtctcaatcttctgacctcatgatttgcctgcctctgcctcccaaagtggctgggattacaggcgtgagcgaccacgcccagcctgtttgtttttttttttttgagacggagttttggtctgttgccaggctggagtgcagtggcgcgatctcggcccactgcaacctccatctcctgggctcaagcgattctcctgcttcagcctcccaagtagctggaattacaagtgtgctccaccacacccagctaatttttgtatttttagtagagatggggtttcaccatgttggccaggatggtctcaatctcttgacctcatgatccaccctccctggcctcccaaagggaaatcatattttaatcaaacatcccagataaatattacagttaggttaatttcttatattctaggtgacttcatgccatctatatgtcaatgaattccaaatctctctctccagaaatggcctttctctgaaattcgtaatttctctatccagctgcttcctggctatcttcacatggatttcaaataggcctttcaaacttcacatgacccataaagaacttttttttttaagcataaatcagatactgttatcttcttgcttcgaactctgcaatatcttctcactttacttgaggtaaaaggcagaccatttctattgcttgcaaaacccacatgtattcctgccgcatttcttacagttcttgccccatttcctacagttctcccctttatcagctgtgctggtcttctctctgttgctgttatttctgtgtggaatacctaatcctgatttataaatggttgagtccttcttgtttttttacggtttagctgaagtcaccttcttaactggtcttccctagccattcagtcttatgtagctatccagtcacatttgttacatcaccctgtgttgattctctgtgtagggtatgtcactgttcctt

SEQ ID NO: 41050 - DNA, 3075 bp, Homo sapiens
atccttcttaaaagattttgcatgcaaatgtgaatcctaacagaagcatgtggttgttctattttagtcttgtatttctagaattagaccccacttttccaactggatttcttttctatttaaaccctttaattaattctttattaattagccaaaatgtttctcccttctaaatccaggcattccatatctataatacttagaagttagtttttgtttttaatctattttttgatattttcatgagtcacactgaagtattcctaagtatccaaaggatatcttgtaaacaaccaggttgttcttttcgaagtaggagaaaccctttgcaatttgtgttagtggtagactgtgagtcgcacctttactctgatgccctgaaaaatagaaaaggaaagattattaatgactgttgtatatttattgagaatagggaaaggattggtgggttagaaaaggcattgttttgttgttctttggtacattaattttttagaataaatgagcctggagtggaagaattttttttcatgaaagacaaaataggaagaatatttgaggcctaggcattccaccaagagaagcatatacagagagataaatgaatatgcatgttaacatgttaacagatgtttgttgcacattgagaacctttttttttttttttttcggagtgcattagagaagagtagaaagcttactcatctggtaccctcttcttgcactccacagctgaatttgcataggtactcactttgaatatccttttaactaccccttaggctgcacttttgatcattaatttcctttgaaatgttttctagatttctaacatgctttattaaaaattatgcatttaacctttaaatatatgcctgaatttttcccaagctatttcttaatattcaatattgaagaagataattcttatttaacatctagtttatttgcctaggttggattatctcaagatgcccaggatcaaatgagaaagatgctttgccaaaaagaatctaattacatccgtcttaaaagggctaaaatggacaagtctatgtttgtgaagataaagacactaggaataggagcatttggtgaagtctgtctagcaagaaaagtagatactaaggctttgtatgcaacaaaaactcttcgaaagaaagatgttcttcttcgaaatcaagtcgctcatgttaaggctgagagagatatcctggctgaagctgacaatgaatgggtagttcgtctatattattcattccaagataaggacaatttatactttgtaatggactacattcctgggggtgatatgatgagcctattaattagaatgggcatctttccagaaagtctggcacgattctacatagcagaacttacctgtgcagttgaaagtgttcataaaatgggttttattcatagagatattaaacctgataatattttgattgatcgtgatggtcatattaaattgactgactttggcctctgcactggcttcagatggacacacgattctaagtactatcagagtggtaagtaaactcataaaatttattttagtttgttcataataatgtaatttattgatgtagtaaaatataagatggtatcatcactggatgagagccagaagatgtgggtcaggtcttgattctgttggataaacttgggtgactccattaggcacttagacttatgaaatgaaagaatgtgctagacttgattgtttagacttatgaaatgaaagaatgtgctagacttgattgtttctaaatattattaacatttttgagtcacaccttttacattttatttgaaaatatgccagacaaacaatttttttttttttttttttttgatggagtctcgctctgtcgcccaggctggagtgcagtggcaccatcttggctcactgcaatatccccctcctgggttcaagtgattctcctgcctcagcctcccgagtagctgggattataagcacctgccagtacgcccggctaatttttgtatttttaatagagatggggtttcaccatgttggccaggctgatctcgaactcctgacctcaggtgatccacctgtctcagccacccaaagtgctgagattataggtgtgagccccctgcgcctggccaaaaacatttttaaaataattttttaatgaatcctcatatccaacattcagttaaagaactagattatcagtactttagaagcccttaaacaatcacttccccttttctcctccacaaagataattattatttcagaactttataatcggttctttacttttatcgatccttttatcacaaatgtgtatatctttaaataatatattatttcattttgcctactctttaacctttatttaaatataatctatatatattctttgtgttgacttgtttgaggttcctccatgttattgcttgtaacatttattttcactactatttaggatttcattacatgactgttacacaacttatataaccctaaacactttatgatccttgatcctattttatcctcacaatgtcactgtgaggcaggatgaagaaactgagacctagttagatgaagtaacttgcccaaggtcagacagaaatcaagtgtaagggctaggctttgaacccaggtttgtctgatttcagggcccatgttatttctactacaccacactgcctcaccaagatccctccaagcgctaatggaagtgtaagtcaatctaacatttgttaaatactatgtactaggtgcttaaccatatattctaatatgctcgcaacaattctctgaggtaagtattattagcctcctgtgcttctgtgaacacaagtagattgacattaaaatgggtagaactgagacaattgaacctactttaatgttcgacatagtggaatttagtgtcttcccagattcgactgaattattacctggaaagcttcttaaaaatatgattcctaggctctattcccatcttttgatcaaaaatcttcactggggcatagaaatctttttgttgttttttgtttgtttgtttgtttgtttttgagacg

SEQ ID NO: 41051 - DNA, 1050 bp, Homo sapiens
caaagcccttctgctttacaaacagggggatctgctgctccttcgtcatatacaaatggaagtattcctcagtctatgatggtgccaaacagaaatagtcataacatggaactatataacattagtgtacctggactgcaaacaaattggcctcagtcatcttctgctccagcccagtcatccccgagcagtgggcatgaaatccctacatggcaacctaacataccagtgaggtcaaattcttttaataacccattaggaaatagagcaagtcactctgctaattctcagccttctgctacaacagtcactgcaattacaccagctcctattcaacagcctgtgaaaagtatgcgtgtattaaaaccagagctacagactgctttagcacctacacacccttcttggataccacagccaattcaaactgttcaacccagtccttttcctgagggaaccgcttcaaatgtgactgtgatgccacctgttgctgaagctccaaactatcaaggaccaccaccaccctacccaaaacatctgctgcaccaaaacccatctgttcctccatacgagtcaatcagtaagcctagcaaagaggatcagccaagcttgcccaaggaagatgagagtgaaaagagttatgaaaatgttgatagtggggataaagaaaagaaacagattacaacttcacctattactgttaggaaaaacaagaaagatgaagagcgaagggaatctcgtattcaaagttattctcctcaagcatttaaattctttatggagcaacatgtagaaaatgtactcaaatctcatcagcagcgtctacatcgtaaaaaacaattagagaatgaaatgatgcgggtaaaaccttttaaaatgtccatttttatacttaatcatctgtttgcttggtgtttattttaaaatattgtgtccagtatttttctttctttttatagctaaataaaatatattatcagttatggaatttaaaagtgaataaatattaaagtacttttgattgtagcattttattttagtatttcaata

SEQ ID NO: 41052 - DNA, 1080 bp, Homo sapiens
taagagagaatggaattgggtgggaaagatcataaatctggctatagttttccaagtgaagatgtcaagtagggaggtggggatgtatgtatgagccatacatatgaaataggtcacctaagggatgttacatagacaaaataataagatggcctgcaaccaagcttattatttaatagctagtaggaaggggtaaacctgcaaaggggacagagaagaaataggtgaaaaggaagaaaaccaataaggttttcagtgttttggaagccacagtaagagagtgtttcaagaaggggagggaatggtcaaaatgccaaatactgctaagaaagagatactgaccaagatgagagctaaaaaataatcttgttgactttagtgacatggtgtattagtttgctagggctgccataacaaaataacacagactgggtggcttaaacaatgaagatttatttgagtgctggagactagaagtccaagattagttactggcaggtctagtttcttctgaggccattctccttggcttgcagatggcggccgccttgctgtgtcctcatatgtttgtccctctgcatgtgcatgtgtctggggtctccatctccatgtccaaattttctcttacagggatacaggtcatactgcattaggacccaccctaatgacctaatttaatcttaattaccaaatacagtcacatcttgtggtactggtggttaggacttcagcatatggattgggggttcagcaaatgaggtaacttgtcatgtcctgggagcataattcagattggagtgggttgaggactaaataggatatgtagtagtaaaaaaaaacaaggtataccttcaagaagtgtttctggaggagagagtgaggatgttagcaagagtagtgcttctcaaaccatctatggtgatttttcaaatttccagttcatcatgacttcaattcataattttataacatacaataaattattagaaaatgaaaatttaagtgccacacatggtagctcacgcttgtgatcacagcactttgggagactgaggcaggaggatcacttgagctcagaag

SEQ ID NO: 41053 - DNA, 1050 bp, Homo sapiens
ataggaggatcatctgtcagtagcctgttcacccattagtcttactaagccatttctcatttaaaaatgtcgtttgaaatactgaatcctctaggacaagtaagtagttgcctccctcttgaaaaatgcatgtcaacatactttctgcatgatagtgagtgatttatgtttatataaaacataaagtacaaggagtggaagagagcagccaacattttagctccaggcactgtgcttggtagtttacatgttttcttatttaatcctcacatcaaccctatgagcctattacaggcaaagacactgagcctctgaaatgtgaaataatttgccaggtgtcactctactttacagagctgctggaactcaaactcacatctgtctgattccaaatcctctgtttttttcatcgtactatatagcctcctaaagtctttatcacataatcatatatagtctaagtatcttcttttgtcttatatttgtattcctgtaatatagttctctgaaaacgtaatctctaagaggataagagccagaactactatgcacaatggcaatgtgcttaataaaataccaagatactcatataaaaaagtagttctttttttttttttttttttttttttttaagacggagttttactcttgttgcccaggctggagtgtagtgacgtgatctgtactcactgcaacctccacctcctgggttctcctgcctcagcctcccaaacagctgggattatagacacgtaccactacacccagacaattttatatttttagtagagatggggttttaccatgttggtcaggctggtctggagctcctgacctcaggtgatctatccgcctcggcctcccagagtgctgggattacaggtgtgagccaccgcactcagcccaaaagagttgtttctgatattttgattgctacctttttaacaatctgatagtctctgattgtttatataagaattaggaagctgggagcagtggctcacacctgtaatcccagcactttgggaggccgaggtgggtggatcacct

SEQ ID NO: 41054 - DNA, 1055 bp, Homo sapiens
gaagaaagctctggatctatcaaataaagaagtccttcgtgtgggctacatatatagatgttttcatgaagaggagtgaaaagccagaaggatatagacaaatgaggcctaagacctttcctgccagtaactatactgtcagtagccggcaaatgttacaagaaattcgggaatcccttaggaatttatctaaaccatctgatgctgctaaggctgagcataacatgagtaaaatgtcaaccgaagatcctcgacaagtcagaaatccacccaaatttgggacgcatcataaagccttgcaggaaattcgaaactctctgcttccatttgcaaatgaaacaaattcttctcggagtacttcagaagttaatccacaaatgcttcaagacttgcaagctgctggatttgatgaggtaagaatgtttaaagacaaaagaaaggattcttcttaccttatgctacataacactttttgggtgataacatgccaaaatgtttcctttgggagaatttaaccctgtatacacatttatgtattctatcagcaaagaatgttacgtttataattccattaattactattaaaaataatatttctttagtttcttctgtgatatgtatcactaaattctggagtttctggaatttaaaaggccagatcatgaagtcataatggaagtgcagttgaagaaagccataggtgagggtaggggaaggacatctgtttgtgtgaaatacaagcttggtgaactaagtggctgttggggaaatgatagttccaaggatatgaaatttaactttatagtagggagaaagaattatagttaagagtttgtgtaagcagttgtgttctcaggcccaaatcttaaattcacaaaaactaacaaaatttcacttcaggctaactgccaagtctttaatatttctcttcagaattcattttgaagttttttcataacccatatatttaatcatttcatttaggttattaatagaattttcttcttatgataacataccttgtaagcatgaatattttaggtgtcaggagtcat

SEQ ID NO: 41055 - DNA, 1030 bp, Homo sapiens
tttggttattttagatgttttatttacatcaatgggagattgttatacatcacaaaagttatttagtcattgaataacattttcgctaagtaggaacagcaatcatttttcagcatgaagatacagcgttgctttcacttttgatctgacaattattagaaagtgaactgaagaaaatgtcagtatgcagtttcctttaaagatgggaactcgctatgttgcctgcgctggattccaactcctggactcgagcaatcctcccaccacagcctctcaagtagctgggactacaggtgcactactgcacccagccagggtacctttctgataaacttaattcaacccaaattaacactttgaaatcttatgtaatggtatcattttttttttcctaagttggacaaactaatcaatgatacttgtttgttgatgtttgtatttttgatgagggtctgaactttaaaaaaaaaaaaatggcgatctgtcatacccaggcagtttgattccagagctcttactttaaccatgagattaaagtcattgaaagttatggggtaggtaggtgacatgatcagaattgtttattaagacgaatctggccccatcgtagtgtgggttaaaaaggtaagcagttttgctttgaagaattattttaaaaattctttttgcctagtaataatttgaattttcacatgtcatagcagcaaagattgttgagatttagtaatgccagtattaaccataccttgttgtggggattataaaattagtataactttctagaaggcattctgacaataagtatcagaattttaaatatgtattctctttgatccagcaattccacttctgggaatttattttaagaaaaatgctcagcaatgtgtgcacaagaatttttattgcagcaatttttttattaactaatttcgttatgtgcaaggaatatgctatatgtatattatacatatgttcattttattaaactatgaggcataataaaatgaacatccatgaacttaccacctga

SEQ ID NO: 41056 - DNA, 1035 bp, Homo sapiens
tttttttttttttttgaggcagagtcttgctctgctggagtgcggtggtgcaatctcggctcactgcaacctccacctcccaggttcaagcaattctcctgcctcagtctcctgagtagctggaactacaggtgtgcgccaccacgcccagctaatttttgtaattttagtagagacagagtttcaccatgttggccaggatggtctcgatctcttgacctcatgatccacccgcctcgacctcccaaagtgctgtgattacaggtgtgagccactgcacccggcctgaaatttttttaaggtgaaaatgttttgacaagttcctttttcagaataggtttttgagcagaactctttcagcttgttagacccaactttgcttttgtttagcttcacagcatagctgaaagttgccaaactggacattgtgcaataaagtagaattctatattgataagcaaactatttccaaactaaaaatgtgatagataaaagtgtgattaatcaaatgatatgatcagagtaaagaattttgccattttgatccttttactttgttttagccacctatagtgttaccaaccatctttatccttgtctgcagggataataatgaactaatgtagtgttttaagataatttaatgatactatctttccaaactttgttagattttaaatgtattattgacctgagaccttaatgacaaatcactgctattagacaattgaagtgttcatttactttgtaattccaataatcatagttatggaattatggtaaggttttgcttttctgtcctaataaatatatatattttttgagatggagttttgctcttgttgctgaggctggagtgaaatggcatgatctcagctcactgcaacctccgtctcttaggttcaagcaattctcctgcctcagcctcccgagtagctgggattacaggtgctcaccaccacacccagctaatttttgtatttttagtagagatggggtttcactgtgttggccaggctggtcttgaactgacct

SEQ ID NO: 41057 - DNA, 1025 bp, Homo sapiens
aaagtcagttgaaatcacctgcttttcctgaagacttcgagtttggtatccatattatcccatggaaatttgaatatttaatatcactgaataagcctttggtccaaagtggtgatgtataataatggaattattagcctattattctgagaattaaacacattgatatcatcacctttctaaatatcagtagaagtttgaatgtttactaatataaaaatcatcttgaaagatttcttccttttctttttttctcccaggaggaagaagcagtacttttttgtctcatagcattagtaaccaagctaatgttcaccagtctgtcattagctcctggctcagcactgatcctgcaaaagaccgaattgaaatcacaagcttacttcccagtaggtctctgtctgtgaacactttggatgttttaggtccttgtcttgtttgtggaaccgatgcagaagcaatttatgttactagacatcttttttcgtagaagtactataattataagatttcagatagaacatgcaattagccttttgaaatccaacttctgtgcaaaattttagtatcagaaaatacgagatttgcaggggaaacatcagtaaactaccattaatgtcaatgcccagttttgacttttgttagcctgacactcccaaacagttgtagaatccgatagatgactgatggcaaaagattgtgaacatgtggaagaaaatcagtgggattctggtgctgatgaataggttgccttcagagtattattgacagacagcttgtggaactaattctttatttttgatgttgtgggaattaacacatcaatggtggttatgggaactaccaatgggttcctacaatttttatcagtagtatgtggcatatacaccttcctagtggcagttgccaatgttaatgattattctttttattgcaagtatttcctatgatccttccacactttatttccttaataataataaactttttcagaaagaattgagtagagcaaaaatgacaaagat

SEQ ID NO: 41058 - DNA, 1030 bp, Homo sapiens
gggtactggttaaatggcctgatctcaggccgggtgtggtggctcatgcctgtaatcccagcactttgggaggccaaggcaggtggatcacctgagtttgggagttcgagaccagcctgaccaacatggagaaaccccgtctctactaaaaatacaaaattagccgggtgtggtggctcatgcctgtaatcctagctattcaggaggctgaggcaggagaattgcttttacccaggagacagaggtttcagcgagccgagattgcaccattgcactccagcctggatagcaaaagcgaaactccgtctcaaaaaaaaaaaaaaagggcgtgctttcctcattacagtcagttgtaggttatggtcagccaaagaccatgcacttgtaatcggggtttatgtgtttttgcattttccaagtttcctgtttttgagggtttgtctgtggctccaaagttcttttgcttattcatttattcagaaatatttactgaatgcctaccatgtggtaggcattcttctaggtgttaggacgtgtaacagtgagcagaacgaaatgtcgaaacgcatagagcaaatattctaatagttaaaaaaatagataatgtatcagtaagagtccaattagaatgtcagaaactaccttagatgtagaaggaattggtctcacatgtgttagaagggctgggaaaacaaaaggtaataggaggggtgctgggagaacaaataggaagaaaagggaaaacccagaaatagtaattgttagtacccctgctacttgactgttgaaaatgctgtaaaagtttgttctgaattaggagaaaaggcgctccctcaaccaggctgaaactaccaccagtgttgttgccagaaacctggagcaggaaggagctgcttctcccttccgccttccagtcacccaccattaatacctgctattggcaaggcccatctggatggcagatggcaaagcagcctggaaagtggagtttaccaacttctacctcctacagtatatagtggagcacagc

SEQ ID NO: 41059 - DNA, 1147 bp, Homo sapiens
aattctcacacctcagcctttcaagtagctgggattacaggcgcgtgccaccacacctagcaaatttttgtatttttagtagagacgggattttgccatattggccaggctggtctcgaacccctgatctcagatgatctgcctgccttggcctcccaaagtgctaggattacaggcatgagcgacagccgtgggccagatatgtatattttagatgtaggttaattcccataagaatacaaagagttgcctttgaacatccaactgcttgatccctaaaagtcattactgtagtttgagataaatgtggggcattattaaacaatattccttttgtatctaattcagtgtatatagaactttgatggcagtagtttctagatttcattattctaaaggaaaaaggagagatttattcttgtagaagggtgtgagtcagaatttaaagatactcttgttgggaagaagtgctaattccttagtactttgctttaatagtatcctcatttctgatgcctagactctgtcagtcaaccagcagtggactacagctcactaccacacaggccctggcagtccttcctatagcagtgcaccatgtacaggtgttgtgtgcaacaacccagaaatcgttacagttggagaggatggtcgaataaatctcttcagagctgatcacaaggaagctgtaagaaccataggtaagaaaaatcccagcctggccaacatggcgaaacctagtctcttctaaaaatacaaaagttaggctgggtgtggtggctcaccccggcaattgcagcactttgggaggccgaggcaggtggatcacctgaggtcgggagtccgagaccagcctgaccaacatggagaaacaccgtctctactaaaactacagaatttgctgggcatggtggcacatgcctgtaatcccagctacttgggaggctgaggcaggagaatcgcttgaacctgggaggcggaggttgcagtgagcagagatcgcaccattgcactccagccagggcaacaaaagtgaaactctgtttaaaaaaaaaaaaagaaaagttagccaggcgtggtggcgcatgcctgtaatcccagctactcaggaggctgaggcaggagaatcgcttgaacctgagaggtg

SEQ ID NO: 41060 - DNA, 1066 bp, Homo sapiens
atgttttttaatgctataaaatgttagaatgtgccatcagctaatgccaggcttacgtatttctagaccataaagcagtttttcacaaattcatctttacagaaaaccagcatctagcttagcatctttccccttttaatttgtaggcttttaaaggcaaatcattcccaccatcacttaacgccgggattatacacattctagaaatgattctgagaggagtgtatagtatggtgcctatctacactcacatgatattcttattcacgttttttttaaccataagtggcaaatattttaaaatatttgaaaaacactccagaatctagtacgctttatttttagactgaacctaaagtaggttgttcttttaacaaagggtttaattcgggtggggaatataacatatcaaaatacatgaacaaatggaaagttacttctagaaaagcaaagaaattgggtatcatttttgtttcttgggaagctaattttgttgaatgtttagaattgagcaaagatgtaaatttttgaagggcagtttagaaaaattaactttgtgaatgaacttaagatgtctgtactctatatgtgatgctgtgcagtttgtttttatatggaaagatgtcaactatagccataaccaataaaataaaaactgatgaggcatgcagctttcagcacatcttttatacatgaagaaattaattttgtgttgctatggtgttgaaatatccaagatgttctgtatctatgtaaacatgattcctttaataaattgtattttattattaagcctttttttccttttaatataatcataagttgctattattgactgagctgttactgcattatttggattcaatcataccaaccctattttacaacgggggaaattgagtattagagaaagtgacatgcccagggccacataaagcatactcgagggaaggagaatcaaggtctacaaaatatttatatcaggtagactgaatgtgacttttaaaagtgatcttcttacctgtagattatctgattgaaggagttctgcatctaagacaatgga

SEQ ID NO: 41061 - DNA, 1036 bp, Homo sapiens
cacctgtaatcccagctactcgggaggctgaggcaggggaatcgcttgaacccaggaggtagaggttgcagtgagccgagattgagccattacactccagcctgggcaacagagcaagactccatctcaaaaaaaaaaaaaaaaaaaagtctaggtttgggacctgaacctacaacttacagcctcctaggcaaataagcaaattacttaaccttggtacaccttagttaatctgcaaaatagtgataatactaataacaatttgtttggattaaataaaatagtgcatgcaaagcgcgtatcatatagtgaccagtagctgtcactgtgactaatcactggcttgccctcttcatgtctaaccttctcaaaggtgcagtgctacccctggcgctgggtttggctatcactgctctgctgcttctcatggttgcatgccgactacgactggtgaaacagaaactgaaaaaagctcgtcccattacatctgaggaatcggactacctcataaatgggatgtatctatagtaatgtaatttcaataccttggggcagggacatgttttgtttataatttatacatctattaagttctggatatttacagcttcttttgtttttaattgggccagaagattctgcaaatcccaaatctttctttattatttattgtaaaaaaagtttccttagaagtcataaaatattttgaaatttagagaggaattcatgattaaagattcctaaaaatataattctgatttatgtaagctgtccctgaaaatagaaatgtgtacttagctgagagaaaattcagcatctcaggaggtggtattaggatgactgtgttaacccattaccttttagaagccaactgttggccccttaccatgctggactgctataggcccagcttccccttgttctgtggcccttttcttcctccttgaagctcccagtattctttttcttttcccctctaaacctgtttctgagagtggatctcaagcaagttcatgccttcaatcagatgttactt

SEQ ID NO: 41062 - DNA, 1068 bp, Homo sapiens
gatctggctaaagcccctgatttcctcaggttcatttctcatcatctcctagctctcccgtgtttttcatctctgtttctttactggctcattctcctgactgtgatcatgttcagatttcttaatgtgtaaagaaacaaagtagcatcctccatcttctgtactcccataaatgaattaccaattgctaaatccagggggctctccaggcttcacctcacttgacatttccttagcatttgattcagctgaggactttcttcttggacgtctctttcctcagcttccaaaagcccactccctactatagcggttgtcctcctatttctctgactggtcttcttctgtttttttttggtcctctgcttttgtctgccctctaaatgctggtgtttcccaggacctcgttcctggctcacctttcttcttcctttctctctggctgtcctaacccctattgtgactgcagctaccacctttatgctaaaggctcccacatatttaggcccagctaatccaaaagcctaagagaaaattccacctgatcgctgataggcatctcaatctgaaaatgtcaaaaaataaacttacctccttcagccacccaacagtctctatcatacatcaaaatcactcaggcaaaaatcctacagaccaggtagatggaccacctattttattaatacaactatgcttcatctataattctatcatagtaagtataacactttgttgcattttttcccatttaaatgtctgtctacccagacttactcgttcaaaaactgtctcatttacattttgtagaagtagagtaccatagtggatagaaccacaggctctggggctgtcctgtctggggttatttgctagctctaccacttaacaatcttagacaagtcacttcagtcttttttttttttttttttaagacaggatcttactttgccacccaagctggagtacagtttaagagctcactgaagcctctacctcccagactcaagtgatccttctgctttagcctccctaagtattgggattataggcatgagccactgtgcccag

SEQ ID NO: 41063 - DNA, 1032 bp, Homo sapiens
gaaacagagttgggcagaccaggcatctttggcaggactgccgaaggggtgaagagtttatggagagatctgtgttatcagaggccaggatggatgaattcctaccacattactgtggtggagagaaccacgtgagcatgaacaaattagctgaaagtagagtcgagaccaaagcccaggtcttggctctacctttagaaccttgaataagtcacttcatatctctggacctcagttgcctcatctgttaataagggacttcaaccagatgtcctccaaggtgctgtccagcactgaggaatgataaataggctgacattcatactttaccccatcagcccttacccatgctaggtgtcactcattggtcccagcactgtcccatggggaatgtggacttagctcagaatccttttgaaaatagtgctccaggctagaagccattattctcagcaaactaacgcaggaacagaaaaccaaatactgcatgtcctcacgttagaaatggaagccgaatgatgagaacacatgaacatatggagggaaacaacacacactggggcctgtcagagggtgggaggtagggggagggggagcatcaggcagaacagctaatggatgctgggcttaatacctagggatgggatgatctgtgcagcaaaccaccatgacacgtttacctgtgtgacaaacctgcacatcctacacatgtaccccggaacttagaagttggagggaaaaaaaagaaaataatgctccaggctgccacctgcggctgatgggagtcagcacccaatttccaatctatttatgatctctccttttgctttttgataatcagcctttggatttggttatgaagatgtaaagagtggtctttcacagatgcagagagattagatgtacagttattatattagggctttttctaattattaaaataatatggatttactgtagaaaatatagaaaaatacaaagaaagttaaaagcatctagcaaaactcaccattaaaattttgtcgcattttc

SEQ ID NO: 41064 - DNA, 1065 bp, Homo sapiens
ctccccagtagctgggactgcaggcatgtaccaccatgcccagctaatttttgttaattttttgtagagatggggttttgccttgttgcccaggctggtcacgaactcgtgggctcaagtgattgcctacttctgcctcccaaggtgctaggattacaggcatgagccaccgtgctgggccccgtccatttctttatgtgtaacatttggaaagctgactattggaagaagaaagaacagattacccatttgaaaacgtgagaatagatttttatggtcctctgacatgtcttagatgagtgggctgttacatccaaatatccgtgattttaaatcagctgcagatgtagtgtttttagtattaaagctcagaaaagaaatccagcaactaacagtagctcttccacacttcagtgggcctggaccgcaagatggtaacccacacggcagctagtcctgccctgccaagaaccacagggccgagtgaagatgcagggggtgactccttggtggaaaagtctcagaaagccactgccccaaacaagccacctgcattatcaaacacagagaagaggaatcattccgccttttggggaccagagagtcaaatcattcctgtgatgccaggtaaggattcacggtgggttctcaatgaagaaccttgttttctgtagccaaacttggctcacaattaagtttatgtttgaagagtgttaaggaagtatcttgaaataagagttaaaattaagaatttggccagaaaggcggggggaaatcttgacatttgcactaatttgtagtaagggacacttactaaatacactcatgtacctactccagagacactaatacatttatttgtaaatacattaacacttagcttacgtaaaccaatacccaaagtgttaaattttaggttgttttgagatgaaacagcataaccattatgtatttgtgtaaatcctcttcacccaagcaagtgaacatttaaacaagttgtcttgaaagagatgcatgtgctagtaattcaacgttatgcctccaatttaactaaatctatcacta

SEQ ID NO: 41065 - DNA, 1031 bp, Homo sapiens
ctaattttgtatttttagtagagacagggtttcaccatgttggccaacctggtctcgaattcctgacctcaggtgatccacccgcctcagcctcccgaagcacttagactacaggcgtgaaccaccgcgcccagcccaacgtctacatgtctaagaaagattaggtcatcaaattttttaaaatatccattgcatggaacttagcgacactaaagatattgtagtattgtagagggaacccctcaccacacacacaattcacttctggagaggtgctaaggtcttgtacatttaaatatcctgttactcggtcatcgtgtattttcttagtgtatgcagtgtgcagggtccttgccaggcactggggatagagtggtgcactggtggtccctgactctggtaaacttgcagtaagtctgtgacatttttgaattctcagtattcaatactcaggatccagatggtaattaagccagcagagtgcagaatgaggataaaagagttggaacaggactgtgatttacttgtactatattggatctagccttctatcaaaaactgaggttagtatgcatactggaaatgaaattttctaaggagttagagattttaggatcctaaggacttgtcaactttgataattttcataggcggcattaaaaatttgtttggctgatgacaacctgtccagccaggggttaagcttactgtaaggaagcagggtaaccattcacagacaggacaggcaccaaactccagcccgtgccagcactgtgaggtcaccagtgatagcgagtaaacagtctgtccagctcagcccggattccatcagccctgctaattcattgcagctggacaggagagccagccagctactcaaaacattgttgagtccctttgctgggcagctactcaaaacatcattggtcccttggccaccaggaccagtggagacatgacattgtctccagcagggatggctcacttctgtagatctgggcgccctctagagggctttccccctgggtacc

SEQ ID NO: 41066 - DNA, 1031 bp, Homo sapiens
tgtatgtttattgtggcactattcacaatagcaaagacttggaaccaacccagatgtccattaataatagactggattaagaaaatgtggcacatatactccatggactactgtgcagccataaaaaaaggatgagttcatgtcctttgcagggacatgggtgaagctggaaaccattctcagcaaactatcacaaggacagaaaaccaaacaccgcatattctcactcataagtgggagttgaacaatgagaacacacggacacggaggagaacatcacacaccagggcctgtcggggtgggggtcaagggaagggatagcattaggacaaatacctaatgtaaatgacgagttgaagggggcagcaaaccaacatggcacatgtatacctatgtaacaaacctgcacgttgtgcacatgtaccttagaacttttaagtataataataaaaaaataattaaaaagaagtatctgatctgacaaatttatcgcctgtgtgatgtaacttagccctctgagcctagtttctgcatcagtattatgcagatgataatacctacctcagagattcgttgtgaaagttaagttctttctataacttcacctggcctggtacctggtacaaggaaattgtaaccgcccaatgggttctccttgcccactgcctacacagagctgatttatcaagacaggggaattgcaatagagaaagagtttaattcacaaggaactggttgtgcggataaaacacaagaccagatgagccagtttatcaacctaggtactgccaacggggtgctgccaaccatcgaggacagggtctataaaatatctcaagcactgaacttaggttttataatagtgatgcctaagccataatttctaatcttgtggcttatttgttagttttgcaaaggcagtccagtcctcaggcaagaaaggggcttatttggggaaagggctgttaccatctttgtttctttttacttttttttttttttttgacacagggactcactttgttatgcag

SEQ ID NO: 41067 - DNA, 1030 bp, Homo sapiens
acccactcctttttcttgacgtggctctcctgactttgcctgcggtggctttcatcatacaaaaatgggaggaaaacttctggtcccttttataaaaagtgaaaagaggggacttgattttcgttgaaaataagaaactttaaggccgggcgtggtggcttatgcctgtaatcccagcactttgggaggccgaggagggcggatcacctgaggtcaggagtttgagacctgcctgaccaatgtgatgaaaccccatctctactaaaaatacaaaaattagccagagctggtggcatgcgcctgtaatcccagctattcgggaggctgaggcaggagaatcgcttgaacctaggaggcggaggttgcagtgagccgagatcgcgccattgcactccagcctgggcaacaagagcgaaactccatcttaaaaaaaaaaaaaaaaaaaggaaaagaaaataggaaactttaaagcgtgtttcttaaggactaaaaatgatgctgattcgacggtttgactttttgtagatgctctgaatgagagaatcaggacacatacaggaggcacaaaaatggtagtggttggacatgaatgtcacggagggaataagagaccttgattgtgcccacgtgtggtcaggctccgtgtgtttaatcatgccctgttgctgtttgatttataatagcacgaatgatatcagcaagatgggggcggagctcagcccctttggaagtgtggattctccaaaacctgtggatccattgaaagagtctggaaatctgtgtccatcacatcctgcctccctccccacctctaccttagatgaggctcagaatccttgtcaggggagcagatatcaaagggtcaccctgcgactgcttggccttgaggcaaacactgggaaggactccatagctttccttctgaagtggaggcaggcagcactttcacttggaccccccatcagcatctctgaggcccaccacggctgttgcacacacatcctctctgcccaaacacagaccaaaatat

SEQ ID NO: 41068 - DNA, 1498 bp, Homo sapiens
cttaacaccttctgccactttctctcggtgctaatggatggaattcctgcacaagttttaactgaacaagaaatcccagcaaaaggcattttctttctacttctttgattgtggaaaagcagacatttctctgaagcatgaccttattcttcgaaacggtattgctagtaaaatagcatgcaggacttcagacctcagggatcctttccatgcactgaccaagaattgtattaatcctttttatcattatagtttttttacattttctcattctgtcaaccatattggagtgaagtggcatagtcatcactcactgtaatctccaactcctgggctcaagtgatcctctagactcagcctctagagtagctgggactacaggcgcatgccaccatgcctggcaaattgttttatatttaggtagagattgggtcttcctatgttgcgcaggtaataaaactgtgaaaatcctggaatataagctaagaaataccaatgtggacatagggcctggcaaagatttcatgaagaagacactaaaaacaattgtaacaaaaacaaaaattgacaaatgggacctcattaaactaaagagcttctgcacagaaaaagaaactagcaacacggtaaacagacagcgtgtagaatggggaaactatttgcaaactctgcatctgacaaaggtccaatatccagaatctacaaagtacttaaacaattagacaagcaagaaaaaaaaacccaattaaaaaatgtgcaaagacatgaacagacacttttcaaaagaagacatacaagtggccaacaaacgtgaaaaaatgctcaatatcactaatcatcagataagtgcaaatcaaaactgcaatgagttaccatctcttaccagtcacaaagttggagatggtggtgaggctgcagaggaaaagaaacagacactgttggtgggaaagcaaacttgttcagccgctatggaaagcagtttggagatttctccaagaacttaaaatagaactaccattcaagcctgcaatcccactactcgggatatatccacaggaaaagaattcattttatccaaaagacacctgcaccaatatgttcattacagtgctattcttactagcaaggacacagaatcaacctaagtgcccagcaacactgaattgaatgaaaaaaatgtggtacataaacaccatggaaatctatgcagccaccaaacacagcaaaatcatgtccttttcagcaacatggatggaactagaggctattatcctaagcaacctaatgcaagaacagaaaactacatactgcatgttcccattggaaagtggcagctacacattgaattcacatgaaccagaggcactggagattactagacaggtgagacaggaggggcacctgggctgaaaaaccacctgttgggtaccatgcttactgtttgagtgatgagatcattgggacaccaagcctcagccttccaaaatctacccatgta

SEQ ID NO: 41069 - DNA, 1048 bp, Homo sapiens
ctcccttccctgaattcagaactgtagttctccatggcatgatacaaacaggtccttgttctcttctcctcttccccttttccacatcccagccccacctctgtaaaggctttgtgcattataaacctggaatgtatcgactttctttcaggggatattggaaagataatggtcattatacttataaactcaaattttgagaggttttagattattcagaagcatacttggaactaatgaagggtatataataaaacaactggaatccaatttggtaagctaaaattatgactttccctgggtaaaaagtcttctcagaaaaacaatgtcagaaaataacagcgtgctgcttagaaatacggctgggctctgtactatgcaaaatctagaaagtgtggggaaactttaaacccaagaaaacgttcttagtattcatcctccaggtgtcttacttcagaatgcatcctttgagattatgtccacttaagagaaatcatcagttaagaaatctactttaacaaaacaaaaaggagaaaaagtaataatgtgatggcaatcttaatttttgggtacaacatgacaagctgtgagtttgtgtgtttgtaagagaaaaatgtgtgggtacttgctaataaacaggtgaattaatgcacatccttatctcattgctggcttctttccaagttgagcaacaacaaaatgctgtatttgagtttctgacaaatttgttttaaaaatcaaatttgaatgtactattctataaattgcctttctgaatagaacatgacatgccattttctagcagctgccagtgataatttgttttacactaacttttaaatcagtgtgtgtactgcagggaaaaggatataggaatactcatcttacaggggaatttgtgaccagaagatgtagtaacttcaatgactgaaagtcaatgctgatagtttactggcaacattaattgaagcatcaaaaataaatggcaaagagaaatcaggacaaaaaatctaattgctgtttgggaaaaaacttgattttgatgttt

SEQ ID NO: 41070 - DNA, 1065 bp, Homo sapiens
aagaattgacaaactctgatgcatcattagaatttccatttggaatcttaaactaaaagactccatttgcatttggaattttaaactaaaagactcgatggtccaagatatttgctgtctgtctccaggacgtgatgcttaaaggcagaccacctgagttcatttcctggcttctccattaccatctgtgtgagcttgggcaaatcacataactccctaatttactttaaatggcatcatctggttttttttttttttttttttttttttttttttttaaaggcataatgacataactacttcagaggactgttaggaagactaaatgagttaatctgtgtaacgtttttagcagtgcctgacacgttagctatgatgacatgttagctatgatcatgactgttggtgactataaaggacacattcttatttgtgaatcaccttcttaaaaataaaattgtttgctttgcagattttttaaaaaatggatttggccaaccatggacttattctactgcaacagttaaacgctcagcgagagtttggtttcctgtgtgactgcacggttgcaatcggcgatgtatacttcaaggcacacaaatcagttcttgcttcattctccaattactttaagatgttgtttgtccatcagaccaggtaactaaagtggttgctaataacctaatgactgtagacttcttaacctccatgtccctggccctcatcaagaccatgggtctctctacgtctcctagctcctaggtgacctgctcccttgtggcctcactcgcccccactacccttcttgttacaggtgctttcagtagcacttgagaatcactggacctgccagctctatgcagcccttccacctccagatgccctcgctgggtgtcacctgcatggtcaggatctgcaaaatcaggtccatttttttttttttttttttttttttttttttttttttgagacggagtctctctctgtcgcctaggctggagtgcagtggtgcaatctcggctcactgcaagctccgcctcccgggttcacgccattctcctgctt

SEQ ID NO: 41071 - DNA, 1050 bp, Homo sapiens
tgacagagtgagactgtctcaaaaaataaaaagaaaaaagaaacaccacttactatttaagtttttgtgggtcaggaatcagtgcagcttagctgggtcctctgattctgtgtttctcacaaggctgcagtcatctcagagattcacttcctagttcactcgtggttattggctggatttggttcctctcaggctattagattgaggcctcagttcctcataagctgatgtccagaagcttctccatagagcatctcacaacatggcagtgtgcttcatcagatgaacaagtaggggagtgatatggtttagatctgtatccctgcccaaatcttgtgtcgaatggtaatgcccgtgttggaggtgggtcctggtgggggggtgactggatcatcagggtagatttctcatgagtggtttggcaccatccccttggtgctgttcttgtgacagtgagttctcgtgaggttgtttaaaagtgtgtagcacctgcatctccccttgttcgctcttcttcgcttctgccatgtaaggtacctgctctcccttcaccttccactatgattgtaagtttctggaggcttccccagaagccaagcacatgccagcatcatgcttcctgtagaacagtgcagaaccatgagccaattaggcctcttttctttataaattaccccgtctcaggtatttctttatagcagtgagagactggactaatacagagagcaagagagactgtcaggaagagaatgctagtaaaacagaagtcacagtcttttgcaacctaatcacagaagtgatttttgctgtgctctctttgttaaaaacaagttagggccaggcacagtggctcatgcttataatcctagccctttgggaggctgagatgggagggtcacttgaggccaggagttcaagaccagcctggtcaacatagtgatacccccgcccatctctttaaaaaaaaaaaaaaattaaaaagcaagttatggccagtcgtggtggctcacacctgtaatcccagcacttcgggaggccgaggtgagtgga

SEQ ID NO: 41072 - DNA, 1044 bp, Homo sapiens
aaaaaaaacaaaacaaaaagacacaaaactgttttatcacttttcctcatgctaccctgtatagtcacactgccctccccctacccggactgtccctaacccctggcagtgagtaatctcttctccatctccataattttgtcattttgaggatgttatatagatagtcatacagtatgtgactttttttttttttttttttttgagacggagtcttgctctgttgcccaggctggagtgcagtggctcaatcttggctcattgcaagctctgcctcccgggttcacgccattctcctgcctcagcctcctgagtaggtgggactacaggcacccgccaccaagcccagctaatttttttttgtatttttagtagagatggggtttcactgtgtttagccaggatggtctcgatctgtatgtgactttttaactggcttttttcacagagcataatgccctcaacttggatccatccaaattgttgcttgtatcaaagttcctgtcttcctgtggttactgaaacaattttttggtatttcattttgatgttactttttaatatatctcgttgcatagatatttagtagttgctctggttattacatcttacgtatataacttattacaatctactgatttcaacatcttgcagattaaatgaagtatagaatctttatttccctaatggatgattggatgcagaaaaaaaaaaagaattcttatttcttttatattcctttacccttccgtatttataattttcttaactattcttctgcagacatagaaaacttcatcagataatgttataatttttgcttcaaccatcaaacataatttagaaaactaagaaaagcaaagtctgttgtatgtgcccatgtttttattctttctgttcttttctccttctgatcttctaagatttcttttactgtttttttttttcaagaactttatttagccattcttttaaggtaagtctagtgagacaaattctcttagtttgtcttcatctgagagtgtattaattttctcttcattc

SEQ ID NO: 41073 - DNA, 1056 bp, Homo sapiens
tcctatgtaggatgtagtaattaacaatttagaaaaaaaaaaaaaatcacagttttggtctgtgtctgaattgcccatcacccagcctttaccagaaatttctgaagctttgaggatcctaattttatgttaattccgttaagacatacaaccttttgcaaattaatagtatattttttaattgatatattaacattggttgtaatttatattatggaatatatgcttatgataaatatcactatactaatatataaagcaacttcttatgatgaatattggtatattagtatatgttttaacaatacttaggccaggccccgtggctcatgcttgtaatgcactttgggaggccaaggcaggcagatggcttgagctgaggagttcacgaccagcctgggcaacatagtgagacctcatctctacaaaacataaacaaaaacttagccaggtgcggtggcacatgcctgtagtctaagctacttgggaggctgaggtgggtggggcgggggggggtcccttgagttcaggaggttgaggctgcattgagctgagatcatggcactgcgcttcagcctgggagacagagcaagaccctgtctcaaaaaaaacaaacaaacaaaaaaaaaactttttttttaaatagttgcaggtggctgcagtggtagcccctgtagtgattaaccttgaaatcacatatgttttgaagtggtcagtatctttatttctgtgtattttctattgccctactttttatactttaaaattcagcaggagtagtagtttgggaatgttaaaattgcattattaatgaaatggtatttataggaagagaatatattaatacttcttcaaattttatttttaattttgtagaaagaagtttaattcttgacacttagttgtatggaacctaagactttattaattatctggactagtgattattgaatcaaaatgggcatgaatgagctctaatattaatatcacaggttgttgaatgttttataaaagtaattgctgatctttttttggtggtcgtatttgcatttttat

SEQ ID NO: 41074 - DNA, 1024 bp, Homo sapiens
agaacagcgtgcatctggagttggctgaatgaggtttcagtcaccctgtctgttggaattaaatctttacctggtctcattttcagagatcataatctgagatactcaacccacatccctttggcttacaattcctaaaagcaatagtggatccagtggcttatgcctataatttcagtgctttgggaggctgacacagaaagaccacttgaggccaggagttgaagaccagcctggcaacatagcaagactcccatttctaaaagacttggaaaaaaaaaaaaaaaaaagccgggcttgctggtgcgcagctgtagtcctagctactcaagaggctgaggtgggaggatcgcttgagctccagggttccaggctgcagtgagtcgtgactgcacctcgctccgtccagcctgggcgacagagtgaggccctgtcactaaacaaacaagaaaacaataatagcagtgcttcttgttaatgtccagtctttgaagagaacagcagaggatgggaacggcaggtctgagtggcatggagcccgacaccagggagaatgttttcaggctaatagcactgtgttacagaatcactggtggactgttaaccatttttttgaaaaatgaaatagaatagaaaataacagaatacattgctcatgataaacgtaaatactggtttgtgaagcttttgtggcaattggtgtgtaagcatatatgtgtatatgtactatgtttaatgatttataggttgtagtcagaaaaacttacaggataaagcgtgatcttggtaacgtaaaatgtatctgtgtttttatagctttaatctccaatcagtatgttacaggagaaaaggcatttttccttagtatgatctatctactcacagtacttctgacatcaaatatatggggacctcttcctcctcctaccagccagttctccaattctccagacactaacaaggtgtcctgcaattcagttcaattccagcactagccagagttagtgcagacgccagttagtta

SEQ ID NO: 41075 - DNA, 1035 bp, Homo sapiens
aggagtgaacaggtcaatgggcagcccttgttttgatcttgatctttgacctaattgcacaaagaatttaacagttgacaaacaggagctattcagctctgtcagattgtactatcaattatatatgtaaatcttcccatcactaaagttcttaaatgtctcctaatgaaaattagtcaggtatttaataactaggaattgtgggagctctcttcagtcactctgttataactcatctagctacaggtgttgagtgttggttgccagggcatattttaaagtcaggggaaggatgttttgaagaaaatttgatccaaagtttgtgggtagctatcctatccttcttaagacactttaaggcaaaccattgaatcattgcaaatgagaaaactgaaggccagagagactaatttacttgcccatggtcatgtaactgcctcaaaacaaaatgtccccacgtccacacacggatttgatgatctgcaggatactgtgaggccttatgaccagaggctttagacacgaggaaaccacttgtttccaaatattttaggatgcaagttcaggattctcttctttgcttctacatgtgagatacctgtgaaatgaatacgacctgaattaccattaccattattcctatcaccaaccagcaaaacatttcacagcagagagtgcggtgggcagggattttggaagcctgagtccctgctaggcctcttcctttaactgtagaatctgaagcaagtcattcagcctgtctagagtctccaggttctggtagttaaaatcacagggttgaaatcttctgccactggctgtgtgagcttgagccagttatttcacttccctgagctttctttcacatcatctgtaaaatgaagttaataagtacacaccgcagaggactgctgtggggattaaatgacagaacccaacataaatgctcagagtgctgcctagcaattagaagagtaaacatgaactgtccttagctactcccctacaaaattaggagatgaactggatgctctc

SEQ ID NO: 41076 - DNA, 1020 bp, Homo sapiens
tattttttttagggtagggtggaagagaggaaggacaaatttgtctatataatttcttaacccttaaattgtcgttactaaggatcacgaaaacttcttctgaggatagtaaatttaaaagcacatcttataactttgaggaggttagaaatgctttttaatttaatatatgttatgtttaatacttgcaagagctgtcttaagacatgaaaggattaagggtcttttccttgactgttttcatttgagggtaatcagatattggtgttaaacagtactcgatttttgtagcctacttcacctgtggagttttatgaagaactgagtctgtcacctcagcactatttccagagaaacaactttctttcagttcccttactggtccttggtagcagactatttagataggcttggtagaagatgccaaacctgtctgataaatattctttgctttaagcaatcttgacatatacagtgcattattattaattatagtctccattctgtacggtggatcactaaagcttatccctcctgtgtagctgaaactatgttccttttgatcaacatctttcttttccccatctaatcccttatcccatgccctggtaactaccattctactctctacttctatgagttcaactttgctagacaaaaatggataagtatgtgaggtaatgatatgttaattatcttaatttattcattccacaatgtaaacatatatcaaaacatcatatagtaccctacaaatacatacaattattatttgtcaattgaaaatcatttttttaagttaaaaataattcttggcaaggaagaacacccagagataaagcttggcaaagctgtgccttcttagagtcttcatcttcgggagtttgtggtagaagcactgcgggtatgtaacaaaatagagacctggctttggctttgagtgtcaaagagatccacagtttggcagatagcacgttacataacaccattgccatggctttgttagaaacaagagcttgg

SEQ ID NO: 41077 - DNA, 1037 bp, Homo sapiens
aaggaacttgagccaacctctctcaatcagaccatagtaactggtgtagaagagcgtgttgggctcagggctcggagaattttccaagggagtcttcaggccgggctctgaaaaacaaatttttgctgaagagaaaagcagagaggaagtggcctggatcccacaaaagcaagtcagcaggtcatggccagggccactactttggcagctggagcagctctgatggggacaactttcagtctcgtccactgatttcttgaggccattttctatgggttccttttgaactgctgtttcaactttgcttggaagaaccaggatcttttagagcttattcttagaaggtggtggagtcttagatgagagagaatctgttttcatgcagaaaatcatgggttccagttctgggagaatgcccatccacccaaacttcccatctctaggaaaatcactgcttatctttgagaaattccgcagaaggtggagaatttagtgtcactagtcacccattctgaaggtcttgcaaaatgcaactagcatatattagaccattgcacccccgttgttctacctaaactgcaatctctggctggatcatctgaaaggaaaggaagtacctctgagctcgggtgggctcagaatctgggagaaagttttatatactattacctacaggtttttactgttcatttagcttcaagcaccgacaccgccttgcaaagataaagataaagtctattagacaatttaatcatgagattctaatgaaaaaaagaagaaacagaaaggtaaacagatcccatctatttccctaaaatggtgagtataaaactctgaaaataggagagcgagagaagggtctctgtgggcagttaggttggatgagctggaatggctgggtcccatgttgtgctcagacattgcaaagaacaaccaggggcaggcgagcagcagctccagaaatagatggcaggaggctcctccgtggaagcaacctgtaaaatatccttcctctgccccatggtacgccagccctg

SEQ ID NO: 41078 - DNA, 1053 bp, Homo sapiens
atgtgctaatttgtctatcactaaaccagctgaactatggattaaatagcaccccatccccctcaaaaagctagaaggatttaaattgtatagaataagatgccatcttggctgcagtcaaacatttgtgctaataacaagagcccagaacaaggatgtctttattccttaattccaaagttagttatgtttcagtttcaattacgaatatggggaaatcctaagaggctgaattcagactaggccctccaaagattcaagggtgggcctcggatgctatcagttgggccccaaagatgtttaagggctttgcctttcgtctcaacaaaaacctaaggtagagggtccctcctgtcaactcccaggcaatcactgatctttgtcactgcagacttttcaaggattttctataaatggagtcagtttgctttcactgaaggctattttgacactcatctgtgcgtgtgcatcagtagttaatgctcttttcttacaaggcagtatgctgttggatataccagttcaccagttgatggatgtttggctctttactccatttcctgctgttacaagtaaggtgctgtcagtgcaatcaaattagaactcaggattaagaaactcactcagaaccgcacaaccacatggaaactgaaaaatctgctccagaatgactactgggtgaataacgaaattgaggcagaaataaaaatgctccttgaaaccaatgagaacaaagacacaacataccagattctctggtatcattctctggacacatttaaagcaatgtatagagggaaatttatagcactaaatgcacacaggagaaagcagaaagatctaaaattgatacctaatatcacacctaaaataactagaggagcaagaacaaacaaattcaaaagctagcagaagacaagaaagaactaagcaaaactgaaggagatagagacacgaaaaacccttcaaaaaatcagtgaatccaagagctaatgttttcagaagatcaacaaaatagaccgctagccagactaatgaagaaaagagaagaat

SEQ ID NO: 41079 - DNA, 1037 bp, Homo sapiens
ggatttgcatcattattagctctaattttaaggaactgtccatattcaaagaacagtgttgaatgaaagaggttctataggacaaccccccagtaactgttctaaagacagcagaaagagaatgactttgaattcctgaagtattttcaggcctttttggtttaggcagctaaacaaagcagagtgtgcccttcataagtggcttctgcttttttatcctgtcatgtaaattgtggtcatatataaatcaaacctaattctttagttgatttgaggcaaaaatagaggcaatctcttggcattttttacttttcctctgaataaaactaaaccactcagaatcatttgttctaggtttagggttaattagggagctagaatttgtatattctttgctttttatgcagctgaacccttaattttaggtttagtaggatcctggagcacatactatgtgtctttcactgtattaacattgggaatttacaagcagtttctctctacaagttactttctatgaaggtatccatttctactttgagttaaaaagttttgctctatgtaaaaaatggttaagttttatatgaacgcattaccaatatttagtgcagactaaacatactgatgctgtatacatttacttacaggataaattgttagctatatatgattggcttgtgtggggatggtagatggggcacattttaacctggcatttaagattcaggctttcttagctcatgtccccattgtttgcctactcttactctctgccttcaacaatgctaaacagttttctgaacccatctaccatattccttcccagcattgtgccgttgctcaaattgtgaatgcccttcccaggccactgttgtctgacaaaatcctaatcattttttagagttgtggttctcaactgaagaatagaggaaattttgcatctggcctttttccctgcccagtatttggcaataactggtaactggagacattgcatcttgggagtgggggctgccactggtgtctaatgggtaaag

SEQ ID NO: 41080 - DNA, 1075 bp, Homo sapiens
gaaatactacctcagccaagtaatcaaggctaacaacagttcaaatcatagcaccttacctctggtctaaaaacccacagccccagactaaggctgagaaaaacttgacaaatcctaattgtggaacaggctacaaaataaccagtatttctcagagttgtcaaggtaattataaacaaggaaattgtcatagtcaagaggagcctaaggagatatgatgactaaatgtaatgtatcctggataagacccgggaacagaaaaaagattttaggtagaaactacagcagtccacataaaatagggattttagttaataatgcaacaatattggttaatttgttgtgacatgcattactgttagtaatataagttaagcaatgggtgtacaggaattctgcactatccttgcagcttttctgtgaattcaaataagtttattaaaattcttttaaaatactaaacctttttttttcttttttctttttttttaagacagggtttccctctgtcttccaggctggaatgcagtggtatgatcacaactccctgcagcctcaacctcccgggctcaagcaattctcccgcctcagcctccctagtagttggtaccaaaggcacatgccaccatgcccagctagtttctttttttaattgttgtagagatggagtctctttatgttgcccagactggtctgaactcctgagctcaagcagtcccccaacctcagcctcccaaagtgttgggattataggcatgagccactgcaccttacctaaatactaaatctaattatccatgtgaaaatactgttgttgcaagaggaacgtggtagtcattttaactccttaagtgctaatttcgtgaggaagagtacagattctaatgttggtattagctaacaaaaaaaaatgggaaacacatttttatatcatatgtcttcattgtgtcaggcactgccatttgcttggattttgtcataagcagtaacagttatgtctggcctttaaggaaattaaagtactttttaaaatttcaatttggtagtgctttagagtagagtttgatgaggtctg

SEQ ID NO: 41081 - DNA, 1158 bp, Homo sapiens
tttccccagtttacaggtttgaggagatgaaattaaaaatacatatatgttacttccaagtagttttcaaaggaggcttttgtaaaattttctcttaaagattactttatggtcacaagcattgggcctcttaaattcttaaggaatagccatgcctaacgttgaccacatggtcgttatctgtaggtattagagactggaacttaattatttaacagaagagttacaaagatttttaaggactgcagccttatttatgatatttgatatggaggatcaggtctatattgaaaagttaaatgtaagatcaaacattgtaaaatttacttttctctatatgactgggctgggagttggtaaatgagaagtttaaacaatgccatgtatgagtcttattagtgtctgcacttgggggaaaaataggaataggacattccaagttcacaaagctagtcaaaaggctaagcaaggattttcattcaaacttggatctgattcttaaatctatacattctaatggaaaagtatgtgttactctgaaatatatacttctttgtgaaatgtgttttactactttcaaatgttaatgattgtcaatgtaaggaatatgaagggatttggcttatgtgattaaaaatagattgtattgactagacccttgtgatagggactttgccttgcatttagtcctgtttcattgtcttactcccattttatggatgaggaaagtgaggttttaagagttaacttcttcagttttccatactcagtaaatagcactgtataccttcgatactcaagacttaaaccccagggtgtttttttactctccttttcttcatatccagatctagtagattagcagcaagttgactttacccttctaaataacagaccttgaatttatgcagttattttcatttccactacaatccttctagtctgggtttcccacactctacttctgtcataaacacttctaactattctctctgcttctacttaccttcctgcaattcattctccacaattgccaatgatcttttaaaaatgtaaaccaaatttctccacttttgacccagcctaccccacaaatctgcagatcattctacttcttcaactataattttcaataacctcccccaactcagccctaca

SEQ ID NO: 41082 - DNA, 1033 bp, Homo sapiens
ctaaaccgggagcagatgatggtccctgccttgccaagtctttcgtaaaagtgtgcttccaaagaagagcttaaagagtggattttagttttcttcccaaactgagatatccatatagaaagcagactaccagtcagtcagtaaataatctgtctctgataccaaccatggactgttgtatataccaaaaaatcctttttaaaatattagcccaattaatgatgagagcgaagattgctgacaacatccaatttacaaaaactaagaaggaatttctaataaaccgtatcctgtttataacatctatatacctggcaactatgaaggcagccttttcccccatcaattacggaattaaagaaacattttttaattccatctgctccacagttgtatcaacatggtaattaaagagttccagcgatttccaacatccattctgctttaacagggagttttgtagtgaggaagctgctggaaatgaagagtgttcttagtaactttttatgtgactggttaaagttaagaatgcagacccaaactaaatgaagaggatgcattaagagaaagattactcatgttgaattgattttgcctacctgttaaaaccctgaaacactaacttgcaatcaacagagcaagcactgctggctgtgctgattgtgtataaatgaacagccagaagtaaattcagtgttatacaaacaagccacagaaaacacgatcagttttggaaatgtaaaaaaattgtgtaagtttgtctcataagtaggggtagctcttttctggaggatgttggggttcatttcctcatcaagaatgttttaaacgctgaaaacaatcttgtttttatatatcgagtgacatgaaatacttgtcttaatagtgctaaaatgcaacggaattgttacacaacttgaggtagatctgagtttcatttccttcttattttaggtctggatattacacttagcaacatacagtaagcttgaaatctctctcattatattttatcatcaagcaatcagtacac

SEQ ID NO: 41083 - DNA, 1048 bp, Homo sapiens
cttgagattctgcaaacacatagtcacaaaatacacaaagtaggatgtgttccagggaaaatcattaggtgagcaatttcaaatagttgaaatattactcgtttctttttcccttacaataatctgcggacagctgcagtgtttaccctaggccaaagtactgaatctagctaaaaatacatggtactatctcagggaggtctaatctgaaatatgaatggataaactattttggatatacccccaaaataagctacctgcacagttacttccagtatgccacactctgcaccccacagtcaccaaaagcatctgcacttgggcaaataaggaatctctcatgccaggaagagtacaaggaagaccaccagtaccatgaaagagatgccaacaagctgaagaactgacacctgagaaaacaaaataaaagactctaacataagaataatgatttcctcagtttataagatccaaatatctcgcttataaaataaacatgtaaaaaggaaacaattagacatattgggaataaaaaagcaatttaagaaaaatgtgctttatttaaatttaggcatttatttgtaaacttatgaataattggccaagttcaatgcatatgaaatctttaatcagagtaacaaaataagggttcagtcttatatcaaactcaacatctgtattagttatttactgttatataacaaattgccccaaaatttaggagcaaaaccaataaatactatctcacagttcctatgggtcaggaattgaggcacagtttacctgagtgcttctggcttagaacatctcacaaagctgtaattaaggtgttcgctgtgggcaacagtaatctcaaggctcaactagggaaaaattcacttccaaactcacttacgtggatgttagcaggagacccctagtccaccctgattgttggtcctctagcaaggactgtatcagttccttgctacctgtgccctggcatgaaatgacaaagtgaggaatggaagggagagggagcccaaaacagaagccatgatcttttaat

SEQ ID NO: 41084 - DNA, 1049 bp, Homo sapiens
ttgaacagttgaccacctttggccaaaacttggagattggcacaagagtaggttacggtctgtttacaccttcatttaggttatagttcatgatgtctggggaaagctttaagccaaatttaaaatatttaaggggctgctttaggctaaacttgatttaacgacttctaaaatggagagaacatttacctggtagacattcctctaggaacgttcctataagaagtaagttagataaaaggaagacttctagcaataattcttagatatattggcatttaaactatttcctttttttctttcctttccttttttttctttttctttttaggtgatgggtaataattttacatacatataggatatagagtgatagtttgataatatgtgtatacaatgtataatgatcaaattgggataattagccttttgctgtatgaattctaattccagttctaacatttgattctagtcaaaggttgatacggagaattatgtcaggatataaacaagtatctgggagaaataacaagtttctggaagaaagaacagataaactatgtgatgaataggagtttattattgcctcttacaaaaaatatatgatgtagacaagaaaaacgtggcagtatgtgcacataaataaaattaatttggtctttaactacataaattgcctgatattagcctcatataaaatttggattaatcagaatgcccagggtatgtagtctttagataaatggtctgccaggttaattaaggcttctttatttattaagtcttctttaatttcttaggaaaaattattgccaaattgaaagtgtattaatttccctttctgccctatcaaggagaatgtactaaatatagcccttgatttgggaactagtagcatcttgaaaatatcgttattaaaagctgttctcatataacaagctatagattgaaacagaaactggaagtagagtcgctatgtgacatttgagggactgggtgccaggtgctgtgataagccctttcatacatattttcttatttaatcttca

SEQ ID NO: 41085 - DNA, 1034 bp, Homo sapiens
tgatttgatttttctaaactatctaccatattttaagtgtagcagctttgactttgcaataacgtggcaagtatctgatttctcctttgaggcagaggtttaagtgtaggcctgttacacttgtttgatacctttttcatgacagtctcagtatagatcagttggtacagaaatacatgaacacattttgatagggcttatttcacacaaagaagtttatggttatttgtgtggggtggtgttgttatatattattgtctttaagggaaaagaagctataagattcgctgacagccaaagtatcatttagaaaagtgaagcaacaagatttaggttgatgaaagatacatgagtttgcattttgacctgttcagtgtctgtcttccagcacggtgtgtacacttcttcaaaattgtacacagtttgctaattagaaatatcttggaaagcctcatggtcactaattttcaactagcatcaggtattttgaaaacgtgtgtctggatattaactcttgtttaaactgaatgtatgatattttgttagaatggaaaagtactatcttgttaatttaagtattttaaatatagttgtatatttttcttactcttagtcacctgtaattgaaatatttctgttttgcgtcatacacgaagctagtgaaaaagaaagtgcaaggcattttcagatgagcaagtgactatcgtggctgttgccagcagggcagtattgttaaaaaaaatcaaaataaaccctcccaagcattttgggattttatggattagaaatggaagaacaggagaagcatatgcaaagtgaaattgcacgaggggaattttctgaggtatcttcctaggcagagccgaaatctcctactccaaaatgccctttctcataccaccggaattgttgagtttgctgaactgcctggaattcagcccatgaaaatcactggagttaggaaacatcttccctttaaaatgcttctggtgtggttaaaggaactagcaaccactcatgtataattactgtga

SEQ ID NO: 41086 - DNA, 1050 bp, Homo sapiens
tctagatgggctccagagcttctaccagaagaaatgagtagctcagactctgtggagctgagggtgggagataaagttggactggttgcctgagactatattggcaggtatggagtgccaggctggggagcatgggctttcttccacaggtgacaagttgacagctgcttttacattaatacctctattactcagctaggcctgccatacggggtggtagaagttcaaagtcaaggagtcagtggagatggcttcattctgaggaccctctccttggtgtgcaaatggtggtcttcttcctctgttctcgtgtggtcttccctccatatatgtctgtgtcttaatcttatgggacaccagtcatgtcagattgagcccaccctaatgacttccattttaacttaaccacctctttagagaccctatctcctaatacagtcacattctgggtactgggggtgagaatttgaacacaggaattttaggggacacagttcagcccataataacatctaaacataagaaccaccaaaagggaggctgctgtataagggtagctacagggcgatgtggtcctgggcaaggctggtgatgggtgattcagtgaaagaaagactaagaatgctggaggccactgggaagcacatcagaaggcctcaggaagcagcacagcctagtggttatgaatgtggcctctgagttgaaccacttcagttcagatcccagctctgccacttactagctgttgtgggacccttagtcaaggtatgtaatctttccaagccatgctcttctctttaatagtgttgactattcgaaaatgttttggggtaagggtgagaaaggccagcaaggctagggagaagcaagtgtccaatgtgacagggaacctgcgtggtgacaaaaattggaaagtcagaaaagaggccatttggaaggaagagatgttaggtattttgagcataattgagtttgaggcaatagaggaaaactcacatggttatgttcagaacatgagtgaaaataatttttaagttcaggctagcgttg

SEQ ID NO: 41087 - DNA, 1028 bp, Homo sapiens
aaatatactgcccttattctctggtatttttttgttttaaatttgaacagttttgaaggagtaagactgatatgtaaatatatatcaggatatcattttctgaacttagattgaaaaatatgtttcttgacaagtgctcttgacaagcgcatgttctgtagtaattgaagaacatagctgggagaggtggctcacgcctataatccctgaactttgggaggccagggcgggtagatcacctgaggtcaggagttcgagactagtctggcaaacatggcgaaaccccatctgtactaaaaatacaaaaatcacccagggcatggtggcggacacctatatatcccagctacttgggaggctaaggcaggagaatcacttgaacctgggaggcggaggttgcagtcagccaagatcgcgccacttcactccagcgtgggtgaaagactgaaactccatctcaaaaaaaaaaaaaaaaaaaaagaacataggtgctttgccaaatggtgatatttgtgcatctgtgcgctcagatacatacaaattagaaattacaaacttgataaatgagttgagtgtggcttaccccatgtgcgttgtgatggtagcaatgagattgaacgtgccaggggacttcacattctcttgcagctgcttgacagaagatctgttgactctttgggaagacatctgtctttgccatttattccttttaactggggaattggaggaataaaagttgtatctctttccagtgacaaagaacatgttctgtctgagcctttattcttggtgtccttgtctgtgaagagacatttgcttgtcccatctctcttctacatcttgccgtccccccttcttcttcttgtggtgacatccttccttccatccatctctgcatccttccttccaataataatttatgagtcctctaatttgaaggatacatattgctgcttcttttctcctgcaaggaaactgcacatttcttttaagaaatttcttcatttcttaacattttttcagctgta

SEQ ID NO: 41088 - DNA, 1686 bp, Homo sapiens
cccacaagcgttatctggccccaaatgtcagtagggctgaggttgagaaaccttgttctagattaagtggtcagggaagccttgcaggggaggggacatttgggccagcacctgagtgataagaatgagccgtcggccaggcgcggtggctcacgcctgtaatcccagtactttgagaggccgaggggggcattgtgcctgagctcacaagttcgagaccagcctgggcaacacggtgaaaccccgtctctactaaaaatacaaaaattagcccggcatggtggtgcgcgcctgtaatcccagctattcaggaggctgaggcaggagattcacttgaacctgtgaacctaggaagaagaggttgcagtgagctgagatggcaccactgtactccagcctgggcgacacagtgagactccgtctcaaaaaataaaataaaaaaaataaaaaaataatgagctgtctacgacaatatttgtaggaggcgcatttggggaagaggaactatcaagaacaaagtccctgaggcccgggtggctgtggaaggagcagagagaaggctgatatgggtggggtgagtgaagtgggctggggatagatcacatagggttttgtggttgttgtaaggtttttttcaagtgactaactgggcttttgagttatcagagagtttgaatattggtgtttgtttattgttttgtttttattttgaaacagagtctccctctgttgcccaggctggagtgcagtggcgccatctcggctcactgcaagctctgcctcccgggttcacgccattctcctgcctcagcctcccgagtagctgggactacaggcgcccgccaccacgcccggctaattttttgtgtttttagtagagacggggtttcaccgtgttagccaggatggcctcgatctcctgacctcgtgatccgcccacttcagcctcccaaagtgctaggattacaggcgtgagccaccgcgccctgtcgaatattgtgcattgttttgaatttttctctttgattttattttccacagaattatggcctcgaaactgataacatgaagaacttggttctgaaactgagagcatcttcccacaatttacagaattacataagtagccgacggaaaagtcccgcttacgatggcaacacctcccgcaaggcccccaatgagttcctgacctcggtggtggagctcatcggcgccgccaaggccctgctggcgtggctggaccggtaagttggagatgtgccttttactgccctgcaagagtagatagagtccaagctgcatggaagctgtactttgtcttaggaaaaggaaccattgttcttttcatatcatttttaccggctcttaaggagtcctcgatcagtggtagattttaggattcctttgccagttaacttaaaaggttaatagcaggaacaaattaacctcagcttagagaagagtgaaactgtgctaaaggttgtgttttactgagattaaacattaatggttgaggatttgattggtatgaaagctgttagttgacttcagaagggatgttaactgtcaatttttgttttgttttgtttttaatctattccttctctctttctattcagattgctattttatgtgtcacttgagagaaaacagttaaataaaaactaatttaatacaaaatttagc

SEQ ID NO: 41089 - DNA, 1072 bp, Homo sapiens
tcaagtaaaatctatttaaaattagaattgttttgttaaagttaaagccttttgttgttgtttttaacttaccattgttcatcttgcaaaaaaaaaaaagtttcttacctacttccgagtatatttatgctttatgtatcttgattttgacacgtgacttgcctctctctggcccacatagccaaagccagctgaaagaagtttctccacagccgggtgcagtggttcatgcctgtaatcccagcactttgggaggccaaggtgggcggatcatgaggtcaggagattgagaccaccctggccaacatggtgaaaccccgtctctactaaaaaattcaaaaattaactgagcatggtggcacttgcctgtaatcccagctacttgggaggctgaggcaggagaattgcttgaaccagggagtcagaggttgcagtgagccgagatcacaccactgcactccagcctggtgacagagtgaaactccgtttcaaaaaaaaaaaaaaaaaaagtttctccacttcagaggggatgtgtagaattttgagaagctgaatagctattcagcttgtgctggatccaggatcactggacagttttccttattcttgtctaatgtccatcttgtcatctgtcttatcatgtggcgcttttttgggcaggttgtatggaaggggacatacacagcagagtaatcaaaagcttgtgccctagatgcagattgccttggtcaaaagctcagcactaccgctgatgagctttgtaactttggagaatttatttactgttatcatgccagtttccttaccggcaaattagagataaaaacatttctaccttcacgggctgttttcctgagataatacatgtcaaacactgagtccagttcctggcataaagtgttcaataatgttaagtattctgttagtttcagtttttaaatggtaccagattcttgccttgggatgctattgagatggcataatgtatctcaagaaatatcgtcatgtttttttaaaaatgatgaaacaatttaggacatacagaggcaactgaatacagaaatttataccc

SEQ ID NO: 41090 - DNA, 1030 bp, Homo sapiens
ctggaggagctgggggtcacacggattggacaccaggagcttgtgttggaggctgtggaccttctctgtgcactggttagttcaggaaaagacggtctgtaccgtgatgacgttctttagagccttgctctcttaagccgtcattgtttgtgatttagcatatcactctttccttaatgctccatcaaaataaaacatgagctgaagatactataggaaggggaaaaataagttattttctacattaaaggttggcaaactatggcctgcgagttaaatctggcccactatctatttttgtaaataaagttttataggaacacaaccatgtccattcacttacgtgtttgtgactgctttcttgcgacagtgacagaattgagtggttgtaacgggaccacatggttcccccaaagcctaaaatatttattaacttgtcctttacagaaagagtttgtctttttcagaaaatctctgtattagtctaattttcttttataaggaaaaaatgatggaaatactcctgaatgaaaatgtcaccttctggcgaggcgcagtggctcatgcctataatcccagcactctgggaggccgaggcgggtggattgcttgagtccaggagtttgagaccagcctgggcaacgtagcaaaaccctgtctctattagaaataccaaaagttagccaggtgtggctagcacgcacctatagtcgcagatattcaggaggctgaggtcagagaatcacctgagcctgggaggtggaggctgcagtgagcagagatcgcaccactgcactctagcctgggtgacagagtgagaacctgtctcaaaaaagaaaagaaaatgtcatcttctaaattgaagtgagaaataggttctgattttcatgtctgattttgttactataaaaagcggttgagtttcacagatatttgtgatatttaaataactgatatttgcacttgacatgacctataaaatgggaaaaaaatgtggccttcattacattttgtagatgatgggttttgg

SEQ ID NO: 41091 - DNA, 1048 bp, Homo sapiens
gacatttcccagtgttcacaaaattgtctatagcttttttttttttgacgtagaccaaacaaaacatatctatggaccagtttgcaatttcctctgtggacagccatggtcaggtgttaattgtccagtgagaagcgcacctgtaagatgtgaataaaattggctgcatagtaattaatcagctattcagtaaacttttttaatgtataatttgtttttcctatttacctaattccgttattcctaaaattgcaacatgtaattccatgcaggtattatttagccagaaacactcatgccctgatgtattcagcaaaccactgaatagttactcttcagggtaaaaacaggaattcggcttctcttggttgagtttacctccccatagtggctatataatattggcctctgatgggagctgtttgtgtttgcacagaaagttttcacatatcacctaaaatagggagtgtgcccccatctctgtgctggttagtggggtcctacgtaaattagtaagttatctgttgactcaaggttctttccatcttcaaggtgctctgcatcgggaaatgaagcaaacaagaaacaccagcttcagttcttaatccagaatggcactcaccccaaaacacaattcacaaaacttcttaaacacaggagaatattgtagtctttcagtttgcgttgtaagtatacaggctatagagatacataagtgtatatacacacatatacagataaacataccatacatatttattgtgaatgacattttgataaaccttcattagatttttatttcaaccattagctccctttctaaaagctaaaaccaaaaaagtacaaatttccttttttgtaccaattactctgctttatgctagggacagccaggtgagttaggtgtaaatgaaatccgtgtccggaagctggcaatttagtagggaggcagcagtgagcagctgacatgtatagcatttctctctctctctctctttctctcgtttttgagacagggtcttcctctgtcacccaggctggagtgcag

SEQ ID NO: 41092 - DNA, 1058 bp, Homo sapiens
aagccttaaccccttgctcacacccagctgtgagtcccccaaaaggagacagtctgtcagctccatcagaggaaaacccctacgtgctttctatcagaaaaggcggcgattatgataatctgaatcatgctttcctgaggataaccttttagtgaaaggaagcattctatttcctattttcagagatttgtggaaaggggaaattcagtgctttgggattgggagtggatgtgtgtgtgtgtgtgtgtgtgtgtgtgtgtgtttctaattttacttacatatgcattaattgaacaattttgcatgttctcacagtaattttatattacattgtcttcaggagaatcaagtcaaaatactagttggaatatgatctttgaaatagaggaaaactagcttaatatgtagggtggatcagacttcatgtaacacctgttaaagttgtcagcaccatcttaacagagataccaactggagtcttaaactaaccatgagcagatgacacaactgtgggtggcatttaggaaacgactctgtacactaaagccttaaattgttactaataagtatttaaaaaaacataaatactctttgctattaagatgcctggagacacatggtttgaagtggtttgattctaagcaccccaggccaatttgaagaattttacataaagctgattaaagaaaaacccttcctggagctggagaaattcttcattcttacttggatcaaatcagagatggacaggccgggcatagtggctcacgcctatgatcccagcacttcgggaggctgagacaggaggatggcttgagcccaggagttcgagatcaacttgggcaacatagtgagaccctgtgtctaccaaaagaaccccccacattaaaaaaacccggtagagattggcaccgtggaatagagaaacttaatgagtgtttaaaccaagcttttcaagagaccgtttcccaggcacatacatgcggggcgtctcaacatcctgtcaccattgttcttgaactcacttcttcaacaccagcctcacctgggaacataga

SEQ ID NO: 41093 - DNA, 1030 bp, Homo sapiens
gaactatcgacttacaaaagctcgtctgcttataggactatttttagtgctctttgctaatctctttacccaacctttattttataaatacatgctactgataagcagctcttcatgtagactttgctactcttggtattgcatgaatctgggtagggcgattatgagaaccatagaaggccttagatttaaaactgtctaaacctggccacagtcgacagctggatctcacctccttgttatttgacagatgtgtgccttaggaaagaagttcttgtctacagaatgaattaacctgtctggcttttattattaatgtttagctacactgtcaccaattttaccgtaatgttagtggatcctcagtaattattaagcagtgtgtcaggcacatgtctaagcattgtacaaatatcagctcatttaataggcaccaccacctttgaggtaggaacagttatttccattttgcagttgaggaaaccgagtcacacacagattgaccgatgtcacccagcagagcaggtggtttggcttcactccactccattttctcaggagtttcttcccaaggccacatctagaccacaccgacaatctttacatttatgaatagaacttcaggattcggtctgaatagcatatggtagcggaggagtctcatccagtatatgtctgtgttattctctatctttagttcatgtcagaaagttatttgtaagtcaaattaattcctagttcatggcgccttgccagtcagttcagtaaaggcctttgcaaagcaaatgatcttttacaacgtgtagggttagccgcacataacagaaaacccagtgggttaaccaaattggggttccatggcgctgccatcttgttcagccattcgtagcacatggcgtagggtatggcctggcacatggtgttcattttcatacttaatgcttcagtgcaaggtggcggctcctgcatgattgtcttcctattccaggcagaagggagtctcatggaagacagaagacaggtagcagcc

SEQ ID NO: 41094 - DNA, 1033 bp, Homo sapiens
ggtgcccggcgacccgggggcccgagtgcagaggcacaaggtgcctttgtgtgggtgactcccgcgggacctcgtccatgccgcctgcccagagccgtccgcaggcgtgacagggctgtcggacaggtagagggagactccggcgggtccgccgagcctgtctgtttttgttggagaaggcgagagggccgcgcaaaagccaacaccatagcatttgcgccagggagaaacctcgagccaggactccccgggaggcagtgacttttgctccgggaggcgccagtatccccggtggcgctgcattttcaggccacatgtaagcactgggaaggagaaatataattgtttggaaccactgtcttgattcatacaatatttgggatgaggaaggcagtggggctggggcggtgggggggtggtggggggaatgagcagaggtagaagcttgtcctcctagctggctcgcttacttttcaatgtctcctacgatttcgagggaaaggtactagagtttactcaacccttttctgtactttcaagagaacaaagtccaccaagaacaatctgtattttcatggtttccccccacccccaacgacatctctgtttcaagttactatttgtttttctatctgctcttccaggtgaggaatggtgttctttctcagtaataactagaattgtgtagcgctttacagtttgctaagagctctctctgttattgtccttggtcatcacagtaagcctgtgaggtaggtaatactggtaagaccaggtcgtctttcaaaccgtcccacccatggctgcagcataatgaaaactgatcaccgctacatctcatttctcacgcctgtgacttacacatagaccacgtggaataggatgtccgaggtgtgtggggtgtgtcagtgggtatgtctgaccatttcctgctcctctgggagaactccttgagaacgggtttgtcaagtgagcagaatttcctggactcctatataaaatgaagctaaaaacaacacatgtttctgccttg

SEQ ID NO: 41095 - DNA, 1035 bp, Homo sapiens
tctttccctgatgaccacagacctctccaagctgggcactgttctatggtgcgttttgttaaagtctaagggaagtcctgtaggaagaggtagttgttactaaacttgaggaaacatgaaacaacatatagcacacaattcaaaaaacttactaaaatttattaagagcatttgacatcttagttaagtcactgttcataactactgttccaccatagaatcttcacaagaacagcctgctggacttcacaagaaggctgatggatgttgggggtgggcatttggggtgtggaaaggccgcttggcacattctcagcatgcgccagcccacaccgccccttaccaccaaagccttctatttcccattccatccagtaggagcagctgtagctgacctgaaaccttcggggacaggctcattgattgtttaaatagggaggtgcaagctctcaggggtccggggccttgatgacacagctcaggcaccacaggcacctcccacaagcgcgtcaggctgtgtgaggctgagcacagcttattttcactttcttgtccataaagtctcacatcatattcagttgttttccttctaccctaaaagaaacacaaccagaaaagccagtctcccattttcatctgtttaaggaattatgtagccacaaggatctttagaagcaagtcctcttaggagaaaatgacaacctctatgggatttcaacaatggagttccttttgaaaagcagtggtgcagcccacacctcctaaattgccgtactttcttcgccttttgttgagtctgtatgagatcctcattaacaagtttaacaattcctggagactgaggcttttgtcaattatgacgagacttcccatttcctagaccatggtctccgttagcatttttgtgtgtgtagttactgttttgaatccatttccctctgtctttaaatgtttttcctttggtatttgaatttgtccttgtgaatcaccatgagtccatttttggaacaaatcagggtataaatctcttataag

SEQ ID NO: 41096 - DNA, 1034 bp, Homo sapiens
tatccctaagttctagttaatacctgtttgcaaaatcctgactgaggttagtacttgttttacttcaggtgcctggtactcaaaacaattaagccactgttttttgtatataagaacatgaggtcctttctaattgggaccagaatcatttcctggcccaaatgaagccggctattctgaacaattcagaagtagtgatggcagatctcaaaaatacataccagaaataaccacatcattagttgtatgtgaaaggataccagaaataaattaaccctttattttctttgtttatttttaagaggaaggaaaagaccacctactttgtggcttggctgtgttttaagaaacaaaaaggctttcgattccatctttctattcctgttcccctatctagcccatctggcactgcttactgccttatttgagaaaaatgtaatggtttctgaaatactgcagtactgactttctttgtcattctgagttaattttgaatggtatgctaaagtggctctgtcgtgattcatatgtattttacaaaaggtgatacaggctcttgagtcaaagacacttgggccagttcttagctttatacctctctgtgcctcagtatcctcttctggaaaatggggaggattgaaatacttcgttcatagggttaaataagttaatacattttaagggcttagaccaatatttaagccacagaaagtcctcagtaatttaaaattgacatcattattagtatttttatttcttatgtattgtgacaattgatgtttaaaattatttggatcttttccctttttctcttccttccttgggctgatttattttcatagaatcttggagctgaaagaaacctcagacagacaatctcaagcatccttgttttttcagatcagaatgttcagataggatatcaccccatgtcatacagtcttcagcagccaacctgcagcgtccagatctctctccacccctcctacctcacagggtcatcccgcatcctttccccttttaccacaacactt

SEQ ID NO: 41097 - DNA, 1051 bp, Homo sapiens
gctaaaaatctcaaaagtcaagtaagttagtatttgctaaagtcatgtagctgacaatatagtgatgaaagacatatgagaaaacattgtccacatccaaaactgaacttctgtctaactaccctagtgggcctgccctccctgcacctcttattcactatgctgactaatggcatcatccacccaggtcatccaagcctaaaccttggaggtcatcttaagcaccacctccccagacctttacaactgctgaccctcagaactagtcagtcgttaaccagcttctgacattacctaaatttctcccaaacccatcccaattttgtacccaattcttctgacttaatttaagtctatcatttttgtcagaattactagatgaattcttcagtcatatgtatagatatacacgtgctccacaggttaaaaaaaaaaaaagtatgatatttttggtcttttgggttttgttttggtaactttttatcaaagaagaatgaataagtatattcgataaattagactatgatttctcaaactcagaactgttgacatttggggccagataattctttgttgccagagtctgtcctgtgcattgtaagatacataaaggcatccctggcctcttcctactagattccagtagcactacctcagttaagataaccaaaaaagtgtcccagcattgccgaatgtcccctgcaggctaaactcaccccagggagagccactggattagactaagaaccattgagtaacactagtcatatgctttctgtgcaccaactgctttctgtgtatcatctcatttaatccccacgagaactctgagggtagatgccattcttaagcaaaccaagaccttagttaagtaatgcatgctgtgtaaccatgcacccacaccagggcttgcacccgggtagtttgactccagaacctggttccctcaggttggaaccatctccccacttactagctgtgtgaacttgggcaagttagggaacttatgtcacctctgtcgccctcagtgtcctgtaagatcctgagaata

SEQ ID NO: 41098 - DNA, 1084 bp, Homo sapiens
ctggctaacatggtgaaaccccgtctctactaaaaatacaaaaaattagccgggcatggtggtgggcgcctcaagtcccagctactcaggaggctgaggcaggagaatggcatgaacccgggaggcggagcttgcagcgaggcgagatggcaccactgcactccagcctgggtgacagagcgagactccatctcaaaaaaaaaaaaaattcattttctcaaataagaaagaggaagagtttttacagagatgataaactaattcaaggctagtactctaactaaaccttctgcatacaagaagagaaagtcctagacgcacataattgcaacacaaggtaagataagctaagcgctaaaaatagaggttgggcagattcctgggtggttgagagagggagattaatgctcagaagaaatttactaacattcattacttattctcaatcaaaactctaagaatcagatatagagaatttcttttgtgatacaatgaggggcttacttacaaccactttcgggattttttcctgtgagagtctgctgtcccttctgtttctcaatcttttaactaactcaatcaagctttaatggcagaactttcactaccattgaactattacaatcctgttctgactagttgaactgaattactgctgaactttactcttattaagctctctagtgtagttcccaaaatttgaacccaaaatactttgtgtctgcaaaacagacaacctctgaggttcttaaaattagactaattaattggtctactttagtgtctcttaaactattagagtctgtagtatgtagcttttaagttagaatttttttaattttgtgttttcatttcactgttaatgaaattatttacatttacaagacaatgtcttttgcaatgcaaattcagaactaaaattgttttcatgacagaatacaacctgtttcttaagtttctcaagctagcttttctctattagcctctgtagatccctgagaatccacatatttctggggttccacgcttaatcttttttttcagctactctgcacatttctcaagtttgggaaatactgagcta

SEQ ID NO: 41099 - DNA, 1050 bp, Homo sapiens
gcctcccacagcgaagaaccacccaacattaatcagcccaagatgtcagtcatgccaaggttggaaaactttcctttagatgatttggccataaaatctttctctcaggagtcttggaacttcccatcataaaaacgtaggaccgttgcatgtttgttaggaaccctgagatgatatcaccacttttcttaaggtctttgtcatttcctcttcatgaacctgctaattctcttgggttggtttgaattgggcccatgctgagttttctttgttgtttttctcaacctttggatatgttggttctgacagaaaccattcttgtttcctctgcacttatacaacttctgacaccagatgtgtgggttttttccacaccaagcaatctccaattctccgaacaccagctgggtatcctgcagtttcattcaattctgacactgtccacatgtttttagtgttagatcccacaagttaagggccaagtcccacaagactgcgcctcacttcagatgacagtcacaaatctgggcctctaggagttctgagcgaccagctataaaataaatcagagggttccatgtccccctcctcagattgaatcatttttcagaatggctcaaaaactcagggaaacaccttacctacacttgagtaatgggtaatcaattggtctcagtgaccagccccatcttgagctacctagaggcctcatcctaagttatctcattactgtaaactctgggggacttgtgaatttaaagcaagacatgccgattactcaggaaatttcaagggctttaggagccagcgacaaagtccaaatatatttcttattaaaccacatctgtggatttatttttctcagccgacatgattattttggtatttctgctcttgaataacacaatagagatacaaaatactatgtactctatttgtgtggggggaaacacaaagaaacagaggcttaagaagaggtggagtaatattttcggtgactcagcatgtcagttgtggttattaataatagtgttgcttcgacttcaccat

SEQ ID NO: 41100 - DNA, 1033 bp, Homo sapiens
ttagctcttgtgttttacatatatgcttcccctcttcatggtttgattttcggtttcttcttttatagccttatgtaatgatgccttttactctaaactggcatacatctcattttggaagaatatagaattgaacactaaaataaaaatgaaagaagagtttgagagtgtctgtaaaaatactcatttggctgtaatctggtgcctgcatttgtgattggctgtgcctttaagcacattctgtgaaaacacctccagggttttgaagtgtaatgctccattgttattctcgaatgcatataatagtgattttcccaccccctccaccataccccatgtatcattatggtagtgaaaacatttctgctactggttggctagaaggtcttcatgtgttattgcctaatatcatttgaagtgtttaaaagggtactgtctataatcataatatcaatttagtctgtctagcactgtttccccataattgctttaaggacttcacataaatctgttaacatgagcgttcattccttctgcagtggggagttgcaaagtagatcaagctacaaattgtcaagaaggaggtgtaccttttaaagtgtggggaggatttggtttgtcattgactgagattgaaaagtgaatgggaatccaaaagaaatgtagttttaaacctaggaaaggagctgggtatggtggctcacacctgtaatcccagcactttgggaggccaaggcgggcagatcacttgaggtcaggtgttagagaccagcctgggcaacatggtgaaacctcgtctctactaaaaatacaaaaattagccaggtgtggtagtgcacacctgtaatcccagctcttagggaagctgaggcaagagaattgcctgaatcccaggagcagaggttgcagtgagccaagattgcaccactgcactccagcctgggcaacagagcgagactccatctcaaaaaacaaacaaaaaacaaaaacaaaaaagaaaacccaggaaaggaaggtaaatttatttatatta

SEQ ID NO: 41101 - DNA, 1057 bp, Homo sapiens
ggattcatgctcagcatgttataaaggtaagaaaaacatgtctagtatgtttagtatagtatagttttgtggtaaagacgcagacttcagcatcagactgcctgggtttaacttcagattctactactagttgggtgactttgggtaggtaattttgtcctctgtgcctcagtttgctcttaggactcatatgaggattcagtgtatgcctgatacttagaaagcactgaataatatcttagttataagtaatcagttaaattattatccccatgccttgattacctctggtgattaatgactgatcaggagactgctgatctggaaagaggtataggaggaagtcgtgttattccattggagcactagaaaattctccagtgctatggaaacattggggtgttttccaactcatcaaacttgcattggacacctagggtttcttttcttgatgttgtcacattctgattgtgcatttctaggtttttaagtttttcgttgtttcttgttacatttttatgactgactggattctctgtgctgtggagaggagtgaggagatttcctgaatctcaaggagcttgaggccttgataggtttttcctctttctgaactggaaataacttagatttcctgacatctcagggaatttgaagctttgataggttcttctccatttgtgaactggagataaattcgtaaatcactcgtaccctttcagagaagtagtacagatttcctctcattttttttttttttctgtttattttagagcaaacctgtgcaacacacggcccacgggctgcctgcggcccaacacaaattcttaaactttcttaaaacattatgaaatttgttttgcattttttttaagctcatctgctatcgttagtgtattttatgtgtggcccaggacagttcttcttccagtgtggccgagggaagccaaaagattgcaattgcacagcactgttttaaaggcttcatatattaaaaataataatagctaatatttatggagagtttatcacagtaaatactttgtgatatggtttg

SEQ ID NO: 41102 - DNA, 1040 bp, Homo sapiens
aaacgctggcaaacagtgaaatagattgtatcagggatcttgtaaagggatttcctcataggggaacacttaatgtcttaaaggcctttgattcctccataattctaaaattttaaaagagtcctgaacctttggctcagatgagaagcaatttatcatgtgactataatagaataatgtagttatctacgttattacttccatacaaaaggacaaattgattttaaacgagtatattctcatactaacttgtatatatattaatggaaaaatgttaatttctgtcagaacggtttgagaagttgtttttgaaaacctagaactttgtgtgcatgtatctgatttttttaagaaacctagcagtttttccctaatcttgctttatctagtttttatgctttaaaaaattacataatatttccttttatctagttttaccagtctatactaacagaattggtttcagatactaaactttatgttgagatagtcacatggcacatattccttgatcaaatgtggaatttaatagtgatttttgttttgaactgtgttcttattttaagaattatatataagttggaggtggacgtgggaatattattatttttggtgagatcatgagattataaaaagaaactaaataactgtataatccccttcgggcttattcgtgtagccctttttggacatagggaatactcacctgacttttttgctcttaaaaagacttcttgtccctcatatctcaccattcgttgggtttattctttcttattaggccagggggtgaaccagatttccattcattcccacatattcccctctttgatatgaacaaaagatctttgaaggcagattgttgaaaagagcgactgccacccttctcttctcagtttcccccaaacccataagtcactgcgttcctaattccagccttgttttatctcattcgatttatcatcatctgacatactgtatatatgttcttcccatttgtttgttaattgactcacctgtctggaatgtaagtaccatga

SEQ ID NO: 41103 - DNA, 1063 bp, Homo sapiens
gaaactttacaagcctaggcgtttctcggcttttaaaaaatgctgtgagttggttttcccagcaaggaaggttgatgagcatgcacttggctccaagaagcagctattacacaaatagaatccaagtgcctggctaagccgcccagcctcggtgcgtcgggtaacagccaatggcggcggcctgccagcctcgccccgcccacctcccgccggccccgcccctccacctcgcccccttccgcggccccgccccgcctccccgccctgttcttggcggcctgggctccgcggccctgctggcgtccttcgtctgtagttcctggcttttccaccgtcagccactcgttttaattacgcgaacgggttccaactcatccagcctttaagtttgggtggtggttttgagagggggaaagagatgcaccaaaggaagtaggggaaaaataaaaccttaagcgctgggcgcgccacgcgggacgcagaggttaggggcgcgcggcgaggtagcggggcggcggcgcgagacggcgcaggggaaacactcggtgcctgcgtgagtctggccgcgccggctcatgtgtacgcgaagctgtgtcagcagaaactttagaaaacacgctgtgcgagcggccgccgcctcccgcctccaggaggagcctgcgggcgcgcggggcggacggtgcctgcaggcggcggccgcgcttgcccggaaaggaatgtggctgcggccggcgcctccttccgcggggtcccacaaaggctcatctgtgcgcggcgcggcgccgtcggaggagtccgagcctgttcagtcaggctgaggacgcggttgttttcgtccccctgtccccgcccccacgagcctacgtgcggggtagggagggcggcaccggaacccccgcccgggtcgggccgaaaggagcgagcggggcctgccggcagaggccgccgggctgctgtgtgactcggtcccctccgcgctcgccgccctcatcctcgcccagcgcctccgcggcagggttaattccgcccgctgcctggtggtcccactcccgggggattccgg

SEQ ID NO: 41104 - DNA, 1058 bp, Homo sapiens
agcgaacactggggcactatgatgacgccagatgactgcacactggggtactatgatgagtctaggtgagtgcacactggggcactatgatgaggccaggtgagcgcagactggggcactatgatgaggccaggtgagcgcacactggacactgtaataaggcccggtgagcgtacactgaggcactatgatgaggccaggtgagcgcacactggggcactatgatgaggccaggtgagcgcacactgggacactatgatgatgccggatgagcgcacactgggacactatgatgaggccaggtgagcacactctgcgacactatgatgaggccaggtgagggcacactgaggcactatgatgaggccgggtgagcgcacagtgggacactatgatgaggccaggtgagcgcacactgggacactatgatgaggccgggtgagcacacactgggacactttgatgaggccaggtgagtgcatactgggaccctatgatgaggccaggtgagtgcacactgggacactatgatgaggctaggtgagcggacactgggacactatgatgaggctaggtgagcgcacactgaggcactatgatgaggccgggtgagcgcacactggggcactatgatgatgccgggtgagcgcacagtgggacactatgatgaggctaggtgagtgcacactgggacactatgatgaggccaggtgagtgcacactgtggcactatgatgaggctagttgagttcacactggggcattatgatgaagctaggtgagcgcacactgtgacagtaagatgaggccaggtgagcgcacactgggacagtaagatgaggccaggtgagcgcacactgggacactatgatgaggctaggtgagtgcaccctggggcactatgatgaggccgggtgagtgcacactgcgacactatggtgaggctaggtgagtgcacactgcggcactatgatgaggccgggtgagcgtacactggggcactatgatgaggctagctgagtgcacactggggcggtatgatgaggctcggtgagtgc

SEQ ID NO: 41105 - DNA, 1034 bp, Homo sapiens
tgtcttgttagaccaaggcaggtaagtttgcccagcattgacaatggggagaaatcagtgccagttcagtatctaccctgctccccggcccaccctggccaacaagcacggcttgactgttcagtttgtgttcatcgattactttcaactatggtattttattatttgattataattaagatagcaccaattttatcacaataacttaattctggaaaaaaagatgaacatttactttgggtttgtagtctcctaaatcagctgtgtacatgatcatgggaatgcatgctgggacactatgatgaggccaggtgagtgcacactgggacactatgatgaggccaggtgagtgcacactgcgacactatgatgaggccaggtgagcgcacactgggacactatgatgaggccaggtgagtgcacactggggcactatgatgaggccaggtgagcgcacactgggacactatgatgaggccgggtgagcgcacacagggacactatgatgaggccgggtgagcgcacactgggacacaatgatgaggccgggtgagcgcacactggggctctatgatgaggccgggtgagcgcacactgcggcactatgacgaggccgggtgagtgcacactgagacactatgaggctaggtgagcgcacactggggcactatgatgaggccaggtgagcggacactgggacactgtgatgaggccaggtgagcgcacactgggacactgtgatgaggccaggtgagcgcacactggggcactgtgatgaggctaggggagtgcacactggggcactgtgatgaggctaggtgagcgcacactggggcgctctgatgaggccacgtgagcgcacactgggacactatgattaggccaggtgagcgcacagtgggtcactgtgatgaggccgggtgagcacacacggggacactatgatgaggccaggtgagcgcacattgggacactatgatggggctaggtgaatgcacactgggacactgtgatgtggctaggtgagagcacac

SEQ ID NO: 41106 - DNA, 1031 bp, Homo sapiens
acgaggtcttgctctgtcgcccaggctggagagcagcggctactcgtgggtacagtcatagcatgccgcaggcttgaactcctgggctcaagggatccttctgctttagcctcccgaatagctgagactacgtgccttgctactgtgccagcaaaatttttttttttaactttttaaatgtttttgttaaaaatgaaacacaaacccattagcctaggcctacacagggtcaggatcatccatatcactgtctccacctccgcatcttgtcccactgtgaggtcttcaggggcagtgacatgcatggagctgtcatctcctgtgataacaacactttcttctggatgcctcctgatggacctgccctaggcattttacaggtaggtagaaggagtacactctgaaatagcaataaaagtatactatagtgaatacataaatcagtaacatttattattatcaagtattatgtactatacgtaattgtatgagctagacttttataggacgggcagcacagtagatttgtttacacagcatcaccacaaacgtgagtaatgtgttacgatggctactcagtcactaggagacaggaattttttagctccattataatcttatgagaccactatcgtatatgaggtctgtccttgaacaaaaagtcagtatgtgatacatgactgtataaatgttatatgcatattactgtatacatgttatgtttcccaacaaaaaagaagtttactatgacaagcttaatagagaagagtagctcttgtgttacattttgattgtctatttatgatgcattttttcttttctctttaagaggttctttatttcttacatatgaagttctggccctgaagaaggctgtgacattagatactcaagtggtagaacgagaaaaaatgaagtcatatatatatgtgcacacagtttctttagacaaaggagaaaatcatggtaagtttattgtaaagtaatcctctgtgaaaaatggaagctagttattgcatttaaaaatgcgt

SEQ ID NO: 41107 - DNA, 1060 bp, Homo sapiens
tttgaatgcaatgcatgtttatcaccttttaaaacatttaataatagacttgccaaggttctttgtgtagcatagagatgggtacttgaatgttggccttattgtgagtaaaacgtcgtcccccagctttccctgccgtaaatgctgctctcttccctcccgcagggagctgcactgtgcgatgggagaataagaccatgtactgcatcgtcagtgccttcggactgtctatttgacctgcagtccagcctatggcctttctccttttgtctctagttcatcctctaaccaccagccatgaattcagtgaactcttttctcattctctttgttttgtggcactttcacaatgtagaggaaaaaaccaaatgaccgcactgtgatgtgaatggcaccgaagtcagatgagtatccctgtaggtcacctgcagcctgcgttgccacttgtcttaactctgaatatttcatttcaaaggtgctaaaatctgaaatctgctagtgtgaaacttgctctactctctgaaatgattcaaatacactaattttccatactttatacttttgttagaataaattattcaaatctaaagtctgttgtgttcttcatagtctgcatagtatcataaacgatttcttcatagtgagtggctacagaatctatacaaccagaccaggcgcagtggctcacacctgtaatcccaccactttgggaggctgaggcaggcggatcatgaggtcaggagatcaagaccatcctgtctaacacggtgaaaccccgtctctactaaaaataccaaaaattagccaggtgtggtggcgggcgcctgtagtcccagctactcgggaggctgaggcaggagagtggcatgaacccaggaggcagaggttgtagtgagccaagatcgtgagccaagttcccgccactgcactccagcctgggtgacaagagcaagagtccgcctcaaaaaaaaaaaaaaaaaaaaaaaaaaaaaatatatatatatatatatacaaccaaaaaaaaaaaagttctgctgtggtcctctccatgatgtactca

SEQ ID NO: 41108 - DNA, 1023 bp, Homo sapiens
cgtggtggcgcatgcctgtaatcccagctattcgggaggccgaggcaggagaatcccttgaacctgggaggcagaggttgccgtgagccaagatcgcgccattgcactccagcctgggcaacaagagcgaaactccgtctcaaaaaccaaaaaaaaagaaaaaaatttcgtttaaggaggaatgttttcagggaaaataaaactaaaacttaaggactgattctagagtttcagttttgatctgatttcctaactagcacacacttcctgtgacagtggcataatcagtgtttgaatgctgatggcaaccaagtgaataatgacgagaagagctggttcaggagcagttggcaaagaaaaaagcctttccccttaaactgttactaatataatattggaaaatgtcttgtattacagtaatatcgagtaaaacttctaaaaaagaaatcgctttgtaaaggaaagcgcttaatactgcagtccgattctgactcccacaaataaggtggctaagtggcttcattattcgagatctcaatcgcatatgtgtaaaatgaaggggctggacagagtgatgagtgttctacctgggatggaggccctgggaggtggagaccatggctgtcttgtagtaggcatgtcttaggtatttactgaatggcccgttctggtcctcccaccagcctcttagcagccttttctgcatctcttctaacttcgtgtagatgcctgggcctttgtaactattctctcaactcaccattcatctttcttggagacgttaaaactatccactggattcaatacaactctgctttccactaaaaattctttaaaatgtccctcaacctttttcgtactgtaaccatatgggaggtgatacagtgcctttcctttgtgattaaggtcacggtagtcacttggaaggatcctttaagcttccagaaatgacttaatctctaagatattgcaaattgttcttcactcagtgagttggttttgtttccaagtccgacttctgag

SEQ ID NO: 41109 - DNA, 1043 bp, Homo sapiens
gggaacagattaaggttgcagatgccttgcagccaaccacttggcttaacctaggacaggtgggaactatttgataatagcatataacacattgtgcctcttgggttagcttcatattattttaattgaactaataagaattgatttgcgaatctctcttagccaatccaagaacatatgtatacatctaaccatccacttcttctttttaacctcaggttaaccccaaagattggctttccttggagtgaaatcaggaacatctctttcaatgacaaaaagtttgtcattaaacccatcgacaagaaggcacctgtaagttccaaaggattctattcaggggctactgtttttcattcttatacttgtcagggtaacggacaagttatactgtgacgagtagccagtgatagtccaaactcctcatgaggttacattgagggccagagatcctgtgggccaggcaattgctgcaggggagaccacttaacttttcaaatgattctcattccttatgaagaaaagggcagttctgagccattggccaaatgataagcatttcccaaaatgctgtgtttttggtgtggagagccagcctgtccccttgaccacctgggtgcagggactctccccggcacctgacggacagtgggacctgcgagtctcaagggccagatttgcctttcagagctgtcctggaacttacccaagatagggacagtcagacttgcacccaagcattgctggtgcccaaggtttcatcggggcttcacccacttctgttgtcagaggtgtgcatcctcacacaggtgacactggcaggcagtcattttgggaggacatggtaagaaggcgacactttatgtcctgaaatctgatagtattgattgtaatagctgcaaagaccagtgcattatgtaaatttggttttatttattctgctgacatttaaacttttgttaactcagaatatttgagacatacgcacataactgtagcattgtagaatgggtaaggattttgttatctaatcagaaatctag

SEQ ID NO: 41110 - DNA, 1030 bp, Homo sapiens
tccttgggctttaattttccaactttggtcaagaattaaaagttctttaactcaaaagtgagtcataattttcatgtttaacctttttgttttgatactgcagttatgcttatgagtggctatgaattgttatatgaggtttcaaagtcctaagaggaaaaactttctaggcacaccagagagccggaggcctaaattttctaaggtcagaacctgttttgagagtcctgtgtagagacaggagccggagaggggatcccagccccttgaagtttcaggatgcggcacgctggctcacagtgctatgtgctgtgggcggagcctccggagcttggatcctagcttctctgttggtgccagcaggctgctcttgtgttttgggagaaagtgctccagaagcaacacatgcctacctggtgccactttcacagcctttcaatgtaaggaggacataggctgaagtcagtagcagggcaaggtggtatctggagttcccctttaatgctctgaaacctgtaaagaaaattacatctcgaagataaaagaacaaactcattgcatgtctgtttgaatgccaggtgtgtttttttttaatggggattggtgattctagagcatagcactgtaaaagaaaggatgtatacaaaagctttgacatttagaaccatggtctggccagtgtcctgccatcattcctgcaggcacaccatgactgactgcgctaattccccagaagggccatgtcaggcttacatgtttgccctcagcctacagagtccaccccactgccttgatctagttgatgtgatcataacgaaacctgtattgctcatcagtattgaagctgttggtaggccatagattgcttgaccttcctgctacttctaaaatgaaggtttttgtgggatgttggaaaggactgctttggagggcagcattgttggatggtggttttgaggatttgtcgttatttccagaatggcattatccctggtaaaatgtgttggaagaatagggtgggaagtgtcag

SEQ ID NO: 41111 - DNA, 1336 bp, Homo sapiens
aaatgacctgcatgagtccatctccatttgcaaccacgcggattcctgccagaccccagggcacagatctatttcacttgggcaagtcagggacctgtgccagctgtgcccaacctcctctcacctccggggcccacgtggtgatactgcacagggagggaggcaggcgctgtcacaggagctcctcagagaacctggaaatgagatattgaggactctcggttcgctcctactccaagtgtgctggatgcagcattggtaaagaagcacggaaaagccaggcacagcggctcacacctggaatcccagcactctgggaggccgaggcaggcgaatcccttgagctcaggagtcttgcccagcctggggaacatggcgaaaccccgtctctaccaaaatttaaaaaattagctggctatggtggtgcacgcctgtggtctcagtcaggtggctgaggtgggaggatcacttgagcctgggaggcagaggttgtagtaagccaagattgcgccactgcactctagcctgggtgacagagcgagaccgtgtctcaaaaaaaattttaaagaagtggggaaagtgggtacttggaaccaggacaccatctttccgggagaccctagagctgaagccgtggctattaagacagccatgccaaggagcagtgcacaaagtcctcgtgggaacgtatgtgggaaactgcctctgccttggaaatctcttcaatgaccagattttgtaacgtggccaggccagggctgtccaaacaggtttttcaacctgcaggaaaacagccatgggcaggaacttgctgatgtcagcttgtaactgccccagcccacgtaagtgtccatttcttccaagtaaaaacgtgagctgtgtgccctatttagtgctgtttttgcgctctgctccccctcccccaccattgagcgatgaacgtggcaactctctcagatggttctttccccacagagcatgctggggtgttgggcaggctcactttctgcctctcttctccccattcctgaaggcacacccctctcttcatgaaaaaagcatttatgtagatattcagtcatttaataggcccaaattctttcccttttgaacaaatattgacaacttggtagcagcataagcaggagactgtcctgaagtctgaggagtgctgagaactcgccagctgttgcgctgttacctctctcggtagaactaggagaattagatatgcctgaaacattgttcaggtgagaaagctgatctattgaatatggaaattgagctctaagagatttatactctgcaagtaaagtctctattaaaacacctgttt

SEQ ID NO: 41112 - DNA, 1048 bp, Homo sapiens
gaaatgaagatttagagaaataattcactttttaaaattggaagatttttttaaatcaagtatttattagtgatattactacttacttattaaatacttttttccccaataacagctgcttcaaatacagcgttgttttttttttttttctttgagactgaatctcactctgttgccccggctggagtgcaatggtgcaatctcagctcactgcaacctctgtctcacaggttcaagcaattctcctgcatcagctccccgaatagttgggattacaggcacatgctaccacgccctgctaatttttgtatttttaatagagacagggtttcgccatgtttgccaggctagtctcgaactcctgaactcaagtgatccacccgtcttggcctcccaaagtgctgggattacaagtgtgagccaccacgctcagcttgcagccttcccccatcccttttgggtgagtgggaagagggggaagaacaggtcagtcctgggcatttaataaacagacttctagagctttagggagcctctggcctccctgcacccttcagatgaagaaacaggcccagatcaggagttaatttggaattttaggatttactttaagcaaatgctctgtatacctgagttgtcatttctaatgtattcaaccctctttggcattaaatatgatagaagccatgtatttgaaggatggtagcattttttaaagtttaacattatatatcatgggattttaaattagacatctatgtatatgtaaatagtcgaacttgtctgggactcggtttagatgatgttcaacaaatgtccacagcaagttcgactatcactgcttttctgtttacaagacagtcgtgagactaagcagctcaggactcctgtaatgcacaacagaggcttgaaaatgtgaaatctttgctgtgacctagggtcgggattctacctttgctgtatcagaatgtcccatttctggaggtctataagatgcaggttcctctgggcacccctgtgcattgacacccttccgtcccagaagtct

SEQ ID NO: 41113 - DNA, 1029 bp, Homo sapiens
ccgcacacctggataatcttttctatttttagtagagatggggtttcatcgtgttagccaggatgatctccatctcctgacctcgtgatctgccctcctcggcctcccaaagtgctgggattacgtgagccactgtgcccagccaatttttaagttcactttctacacgctactgggttgttaaaaccaacctcagtaaaagtatccgttttacaagttacttgctttttcaggccaggcacagtcaggagtttgagaccagcctggccaacatggtgaaaccctgtctctactaaaattacaaaatttagctgggtgtagtggctggcatctgtaatcccagctgcttgggaggccgaggcaggagaatcgtttgaacccaggaggcagaggttgcagtgctgagatgatgccactgcactccaacctgggcgacagaggagactccatctcaaaaaaagaaaacaagttaattgctttttaaaagggttgtgtgaactttcagtcagatatgaaactgtttcagaaccaaaaataagttattctaaattcctgctagtcagtttgcaaaatgcttaatatctttttaatgttaattattagctttggtttcaggagatgtcattttcacactgtcttcaaacttagaagagactcaggtttagaatttggagtctgggccgggcgcggtggctcacgcctgtaatcccagcactttgggaggccgaggcaggcagatgacaagatcaggagattgagaccatcctggctaacacggtgaaaccctgtctctactaaaaatacaaaaaattagctgggtgttgtggcgggcacctgtagtcccagctactcgggaggctaaggcaggagaatggcaggaacctgggaggcggagcttgcagtgagccaagatcacaccactgcactccagcctgggcgacagagaaagactctgtctcaaaaaaaaaaaaaaaaaaaatggagtctgaaatctcgtgtgcatggactctggtcatttgtctttgtcct

SEQ ID NO: 41114 - DNA, 1040 bp, Homo sapiens
tctagctacagctacttggttttccatagagttaagttggctccttagatgctgaagtctgtagttatgaccttgctttcattagtaattagcacctgggcaggtactaaccaatgaatgccctttacacctggcaagaaggaatgggtggggaggccagattgtttcaatctaaagggcactacgttgtggtgggttacgttttttggtagacagacactgcctacaggcaactaagtcattccattaactgtcattatcaatccatgtgtggccaagcttgaattgtcctgctggtttagcttcctgatggggaacaacagctgtcgcaacgcacagtgtctgcagctccatcatgggccccaggacgtcccacagcagctaacactggtctgtactcggaactctgccacctggccagtgacttttgtgcgtcatgttcctgggaatagtatgactgtccatgattcctaggaaagctagaggaataactgaggatgaggagctagcactttgacccctgtggggagtgctggttatagtggttatcagggttgtgacaagtggactcttgtgagttccaacactggatgattttattattcctattactcaggcagtaaaagactagtacatatcctggtgttatataattatatgaaaacttatcagaatgagttttataactagcgtacccatgtttttgttattgtgctgcagataaaatggcgcactgaaatgttactgaattatgtgacaatttttgttacaattctgtgcactttttacaagatttgtggagcttagatagatggctggcctttggcatctgaacattttcctgagcccgatagacaagcagattttttttgtttgtttttggagacagggttctcatgcctgtaatcccagcaccctgcctagttcaagaccagcctggctggcaacatggtgaaaccccgtctctaccaaaaatacaaaagttagctgggcatggtgatgcacgcctgtaatcccagatactctggagactgaggcag

SEQ ID NO: 41115 - DNA, 1044 bp, Homo sapiens
gcccggctaatttttgtatttttagtagagatggtttcaccatgttggccaggatggtcttggtcgcctgacctcgtgatccacccacctcagcctcattgtttcctagactcaccttctcactcccaagatcagaaattggaaatcatcattctcagtaaactatcgcaagaacaaaaaaccaaacaccgcatattctcactcataggtgggaattgaacaatgagatcacatggacacaggaaggggaatatcacactctggggactgttgtggggtggggggaggggggagggatagcatcgggagatatacctaatgctagatgacgagttagtgggtgcagcgcaccagcatggcacatgtatacatatgtaactaacctgcacaatgtgcacatgtaccctaaaacttaaagtataataaaaaaaaataagaaaaaaagaaaggaaaaactcttcacaggcttctaaatttgcagagacaaccatgcattccaggtgaatagtgatgtttaatctataggcctttagttccctatcttttctgagcctacaattaaaaccgactctagcatataataagccatcttggccttgtcccttacttttgtttatgtgtgtagttactaagtttactaagtagttactaaacttaagtttctgtgtataattacctgcacatttcagtgaagcatgttggtgatgaagtatttatgatatacctagtgaaactgaaatcacatggtatacaatcaagacttagacttcaggagtttattagataaattcttgttcaaggtccctttctctttattttgcctgccctgaggtaaggagatgagaaggatgtagattgtgtttctagaaagaatagtttcttttgctgaatgtaacatcctttgattatttcttttccctttcttaggggaaagtggtgtctaagaattccagtttacttccctgttagataacacacaatgtatgttatttccagtgtagaagaagttggttcttaattagagacactcaccaaaaagggcct

SEQ ID NO: 41116 - DNA, 1065 bp, Homo sapiens
ctccccctaacagcctccacctggcagccttaaagtgcttgtgggctgggggttcagatgttccccatagataaggaattgatttcagggttggccactaggattccttagctcggaactccacacacgcattcttcttaagttattgatgttaggtacacctgtacaaccaccctgcataaagttcattcattcaacaaatagagcacctactttgtgccaggttttcaggtactggggagacattggtgaacaaaaagaggcttttaaaggattatcacctgcttggttgacagtcacatccagtgaatggtggaacccatttcctgctaatgtgtatttgagcctgaaatgcacattgtcccacctttcctcaatggcaaaatgctctggaaaggagatgctggtctgactaaataaaatgggctttctgtttggagttgtaaagggagccgtgccttcctcagcccctcctgaaagaaagacctgctttcaagaagcttatattgcagggggaaagacacatgtctaatacatcgtcagggggtggtgagcgtgctactgtaaattttcacctaggctttggcaagagctagaattaactttcattctttactgactctttgaagcgttaaaaccactgggcagagtgacttaggagtgggcccactgtgatgtgtttttgttggttttctggtaaatcacttttgggttggacagtgaaccatgatggtctttcttcaagaacttgtttttgcaagggtttggtgataagtccatcatttccaaacccacttactcttccatcctttctcaggtgctgtggttcagggaaatgattgttttgatagtattttacctattgcaccattacttcatctgtaaatttcttataaaatatgtcttgggatccagccttgtcttttttgtttgttttttttttttttttttgagacggagtctctgtctgtcgcccaggctggagtgcagtggtgtgatctggactcaccgcaagctccacctcccgggttcacgccattctcctgcctcagcctcccgagtagc

SEQ ID NO: 41117 - DNA, 1035 bp, Homo sapiens
agaattaatatgccagtagattcagaagccaatataatttttgcctaagttacatcaagatgattcatttgtgatgcagagtattttctatacaaaatttttctttttaattcaaacttaaaagtgacacgtgacatcgaggcttgacagtgcatgtggtatgaaactgacctaagtacaaccccttactcaggcagagctgagtgcaacggtatgcggaggagtggtcaagaagattacccttctgggtgtggttttctttatttcactaaaagaagaggtgcagagctcagctaagatagcactcaggaaaaagttaacctgttctccgtcactacttttctttctcatttctcataatgaatggtaatttatttttatggtttcttttttgtattttggtaaaatatacagtttatcctcttacttttaggtttacatttcaaggtattaagtacatttacattgttacatagccatcaccaaggtccatctccagaactttatcttcccagattgaaactctgtacctattaaactctccctccccatccccaccaccagcccttggcaaccaccattctactttctgtctctatgaattcgacaactttagatacctcatgcaggtggaatcgtgatagcatttgtccttttgtgacagtctcatttcctgtagcataatgtcttcaaggttcatccatgttgcaatgtcagaactcccttctctctcttatttcttatggcaggtatgttttcatttcattttgttttagaggtcttttatgatagatcagaacttaaaagatgtttctgacatttgataaagtgaagatagttgtgaaactgttaaggaaagacagtagccatcaccttgtgtattagagccagagttactctttgaaagactgtattctgtataatatctacaattaaaatttttaaactttttttgaggccaggcgaggtggcctgattacaggcacgagcctgtaatcccagcactttgggaggctgaggcaggcagatcacatg

SEQ ID NO: 41118 - DNA, 1046 bp, Homo sapiens
atcatcaaaaaagctgggttcccctatggctgtgactgtggcgttccttccctgttgtcctgatgctgctggcgttgacaatgtgattctgccactgttgaatttgtgttctataatataaatttgactatcagccgggcacagtggctcacgcttgtaattccaacactttggaaggccaaggcgggaggatcacttgagcccaggagttcgagaccagcttggacaacgtaatgagaccttgtctctacaaaaacttttaaaaattagccaggcacggtggcgtgcacctgtggtcccagctatatgggaggctgaggtgggaggatcacctgagcctgggaggtctaggctacacaggtctagctgtgatcatgccactgcactccagcctgggcgacagagcaagaccctgtctgaaaaaaataaagtaaaataaaattgactattatatactgaggtatagttctcttgttctcttgtttagggttctccaagcttcctgtatctgtagactgatgtttatcattaaatttgagggatcaaggctattatttctttcaacaatttttctgccattctctttcttttcatttactgggattctaattacatatgatttagacaacttgaaattgccctataagtcactacacctctgctcgttttttcttctcattcttcaaatctgatcatttctattgctttatttcagattcatcagccctttcttctgcagtctgttgctaagcagtgaaacttttattttacagattgtaatttttcgttttagcatttccattggtccttttttatcaacccatttctctgctgagactcctcattgatcttattaggacgatgcttttctttaagtctttggatatttttagattagttgttcagagtctttctctgctgagttcaacatttagaccaattggatctagatgttactgatagctttttcttcttgatcatgggtcacatttttctgcttctttgcacgtctactaatttgttatcgtgtggtggacattgtgaat

SEQ ID NO: 41119 - DNA, 1047 bp, Homo sapiens
ctggccagaacttccaacactatgttgaataggagtggtgagagagggcatccttgtcttgtgctggttttcaaagggactgcttccaggttttgcccattcagtatgatattggctgcgtgtttgtcataaatagctcttattattttgagatacgttccatcagtacctggtttattgagcgtttttagcatgaaagggtgttgaattttatcgaaggctttttctgcatctattgagataattttctactttaatatatttttaaaattcatgtggcaaagcaaaggtatgtggtatgtcatgaatagatggagctgttcatgtcatttgtacaaaaattcacgctgcatgtttgttccatcctgggcactactgctctagaccctgggctgacagcattgatcacaacagacctgagccttgcccacatgaagctcacactctagtacagaacaatgcaggaatagcccttgagggcctccctgcttaggagtagagcccgtgggagactgaagaatatcgatgcttgtcataggaacagggaagagagaggagcagccagttagcaggttgggagtgtggcgactgtgatctggaatctggtcagctccagccgtggagaatcagcttctggggtgtagatataagctgtcggggtggcaaagaagagtcagggcctgagaaactggatgggttttgggacatcatctgagaactgaacactgaaaaatgaatgagacctcagaaattgaaagagtagagaaattctcaggtcaatgagaatgcagttgaaggagaaggaaggaagaggagacattggaggaaacagatgacatggtcaaaaaaattgtaggaaaactgaagaaatagatggtagaatagaagggaggatttacttttttaaaaaatcactgtaggggcaggcacagtggctcacgcctgtaatcccagcactttgggaggccaaggcaggaaggaggatcacttgagcccaggagttcaaggccagcctaggcaagatggtaagaccctggctttgaaaaa

SEQ ID NO: 41120 - DNA, 1079 bp, Homo sapiens
agttggattttaccttctttaataacacatcttttatgctaaaagataaatagtaggaattttcacctcacctccagtaatgacagaacaagacccaactggaggagtcccaacagaaaatatctataaacactggacataataccaaagcaactacatcagtgaattggagagtggacagagcagacgaaatcgggtggaggagacaagctcagagaaaaagaggatgggagctgtacaaattctctgtttttatggcttctgttctggggctaaatatagtctacttggagtgtgtggtcttggaggagacactaattgaaaacagcagtctttttgaccagggaaatttaaaaaaaaaaaaaaaaaaaaaaaaaaaaaccgagctagggaatcatggacactgaaaaaagtggaagaatcttggaagcaaaagagcaagagaaggtttcagcaaacatgtctgcccacatttccgagtgacccttgaaccacgtatgtatggaccaaattcaaagcagctcatctagagaaaaaatatctgaactgagactgaagctgccaccccaaaaaatagagattgcaactcaaacacagatgattgcctacttaaacaaaagaaatcataatcatgagagaaaattaactgaatccagaatttctacaacttaatattgataaggtccagtatacaataagaaaaactacctatcatataaagaaccaagaaaatgaaacatattctcaaaatcaactgagtccgatgccaagatgtgccagatactggaattagcagccaatgatttttaaacagctattagaactctcctcaatgaagtaaaacaaaatatgctttcaatgagttgaaaaatatgaattctcaagagagaggtgattaaagaaagaaatcatttctcaagagagaaatgattaatgaaagaaccaaatgatatctgatatacccacctgctgttcccatcccctccacctccacaacacacacaaaccatttgcctacctagcaaatttctcgtccttaagtactcagcttaggagtccccactttaagaagcctttct

SEQ ID NO: 41121 - DNA, 1761 bp, Homo sapiens
gggcacttaaggaaatctctaatcatcagctgactgctaagctaactaagcagagacttcagtggccacacacaacaaagaatacaaattttacaaaatttttccagagaagtcattaaacaaagaataacaaacagcaacagaaaacccaggttggacgggtggtacaagaatataactttcaaagttactacattataattatttaaagtgtttaattttcagcaaaaaaaaagaaaaaagtacaaggcaggcaaaaaataggaacatatggcagtcagaaaaagcagtcaatagaaactgttcccaaggaagtccagatttttaacttactagacaaagactttaattggctattatatattcaaagaactaaagaaaaccatgtctaaagaattaaagtaagtatgagaaagatgtctcaccaaatgtgaatatcagttaagagagaaaaaacattttttaagaaccaaatagaaattctggcattgaaaagtgcaataattgaaatgataaattttcttcagggccttaatagcaaatttgatctggcagaagaaaatatccatgaaattgaagttaagtccattgagataatccactctgaggaacagaaaaatgaatgaagaaaaatgagcaaagcctcagagacctgtgggacaccatcaagcatatcaacgtacacatccccagaaggagaggagagaagagagaaaggggcagaatatctgaagagatcatggcttgaaaacttactaaatttgatgaaaaatgttgatcttcacattcaagacgttcagtgaactccatataggagaaattcaagagatccacaattagacatatgctactcaaactgtcaagagacagagacaaatagaatcttgaaagtagcaagacaaaaattacttttcatgtacatgggctcctcaataacattaacagctgacttctcatcccacatcatgaaggccaaaaggcaatgggatcatatattcaaagtgctaaaagaaaaaactgccattcaagaattctgtatccagcaaaactatcctttaaaatgaggagaaattaagacattcccatataatcaaaaactgagagaacttgtcattagcacacctaccctacaagaaatactaaagggagtccttcatactgaaatgaaaggatactagacagcaattcaaatccacattaagaaataaggagcaccaataaagactgtatatatgtatataattgatagtataaatttacttttctttgtaattcttctgtcatttaaaagacagttacatcataaagcaatcattataaaactgtattaatgggcttctaatgtataaagatgtaatttgtagggtggatcacaaggtcatgagattgagaccatcctggccaacatggtgaaaccctgtctctactaaagtacaaaaattagctgggtgtggtggcgcacacctgtagtcccagctactcgggaggctaaggcaggagaattgcttgaatccaagagatggaggttgcagtaagccgagatcacaccactgcactccagcctagtgacaaagcaagactctgtttcacagtaaataaataaataaataataatactactacaaaggaaggagaaggaacagaataatactagagaaaactttttgtatactcttgaaattagattactattaatctgaagtagattgtcttaaattaagatgttaattgtaatccccagagcagctactaagaaagtat

SEQ ID NO: 41122 - DNA, 1152 bp, Homo sapiens
cttgctcgacttattggcagcccttggcatagttgctcactccctctgtggcctttcccgttcccctcctacagcacacagattccttttctgtctctttgtgggatccttctgattttctggacttcaaccatggaaataccagtgggccagtcctcagacctctcttctctgttcacattctctctcttggggggtctcatcctatctcttggctttaaatgccatttatatgctgatgtctcccaaatctagaccttctacttggacctcactaccaaactccagactcacaaatccgccttacaaatccacagattcaacttgcctatgaaatgtctaattggtgtcttaaacttaacacatcagaactgagctcttgatttcttctctgctccaagcctgctcttcctccagatgtccccattgcagtaaatggcaaccccgttattttgttttctccaccctcaaatcttgaagggatcctcgactcttctctttccctgacatttcccaagcaccagcaaatcttcgaattatatccagattccaacagctccttgccacgctggttcaaagcgctgccacgtctcacctggagacttgccgcagcctccggacttgcctctaggatcccacttgccccctccagtcttgcccacttcaggagcgagcatggtaaaacctcccgaaaaccctccgtgctgctcacctggctcaggttaaaagccagagtccttgcagtagcctgggagtcccttctggcctcagaccctgcttctctgacatcagcccctccttcttcccttcacctccttcaagcagcatgacactcttggcattcctcagacccccaagcctgcctggaagtccccgctcaggcctttgcactgccttcccccagctgaggctgcctcccaggcactctcggttctcgtggctcactcctcacttccttcttgtgtctgctcaaagtgtgcaaaccagtccagtgaagatagcaccctcctcacccatcgccctctgtccacttgctttgctttctcctctttactgtacttatctagttataatctaatcatatttcatttgtgatttgattacatgtcaaaatgataatattttggatactttgggtttaatgaaacaaat

SEQ ID NO: 41123 - DNA, 1033 bp, Homo sapiens
atttggatgttgagactgatgatgccacacacatacaaagatactgtaaaaaggtttattacacacactatcaggcttttggggagagcaaggaaagcttcccaggttggtctgaaaatgtcttgtgaaagcagggaaaggagactggcttgaggtttttattatggccatgggtggggctggggtgagggttccagtgcatgggaaggggcttgcacgacttgcgtgtcctgctggtgccaaagagggaacacccaggcttcctatcagcctgctcagatgtgggagctggagagggatgggtgaggcttaaaagccccaccaatccacggagccagactctttattacagcttattttagatttataaatatttgttcaaaacatgaaaaaaattggtgccagacaagatatacctatccttgacagataaccaaatccaggagttcagaagttcttgagtaacaaagccagcaacacagggttcaatcactttttcaaatacacaacataaaccaaggcatctactcaccttaaaaaatattctggcctcatgatattctcttttcgcttggaagtttaaagtaatgactttcttgggaaacatatgagatgatgaaaatagtttttatcatttgttttaatattattgccttattcaaaatctcaacggtctcatgatggaattcaaatcaaaatgaagatctgcatgttactaatttccaaatttacattttcagtccagaccctcacctgaggtctagacattactcccaagcatattcttcatagttctgtttgggtgtttagaagggatctcaaatttaacatgtcccaaatagagctgttgatttgccctctaagcctgacctaccccctactctcccatctccgtaagtggcatcaccatcttcccagttgcattatctgaaattctagaagtcactctcaattgtcctctttccttcaccctccacaagtcttgtgggtagagttatgaaacatagtcaagatttaatgtgtttagaatctc

SEQ ID NO: 41124 - DNA, 1027 bp, Homo sapiens
ggttggtgggatttggaggtgcggagtggaggtgggtctcgtgttgggaagtgtaggccagccccagtgcggcttggaattcttacaatcgatgtgatcttgttggcacccatagacgggcgaagctttgaggagcctctagttgtacccacactctagataagcctgcccactgcacgccttgtcagtgtgtctagatgcgcttctcagtcctgccaggtgactggccctgcctcttgtgctgctgcagacacaagcgcgcggcttctgattcgatgggctttccatcagtttccacaatacccgccaagtctgatttccttcctagctttataaagattccttcacgccctccccccatcccaactcctatactccgcccaggcaactgccctggcctttttgggctgtgagggggcatgccactcaacattgcacacgtgctatttcagtcacatgccacaggcagttctcctttatcagagggagccagcccctaacaacattgtcaagcatagatcctcgtggacaaaactttgcagatgacatatttactaaaggttagccctgcttatcttttttttttttttttttttttttgagacagaatcttgctctgtcacccaggctggagtgcaatggcaggatctcggctcactgcaacctccgcctcctgggtttaagcaattttcctgcctcagcctcccgaatagctgggactacagatgcgtaccaccacgcctggctaatttttgtatttttagtagagataagggtccgccatgttggccaggctggtcttgaactcctgacctcgtgatccaccagccttggtctcccaaagtgcagggattacagatgtgagccaccacgcctggccaactctgcttatctttaaatatgattggataaatcaaagtcagtttgccaaaatgtcttaagttttcaatttcagtcaatgcagtaaatgttttggggagtctgcagtgtatcgggcactggctcaagcactatcattttaccaatg

SEQ ID NO: 41125 - DNA, 1029 bp, Homo sapiens
tccactgcaaccttgaactcctaggatcaagggatcctccctcctcagcctcctgagtaacttgggtctataggcatgcagcaccacacccagttaattttgtttgtttgttttttgtagagacagagtcttgctatgtttcccaggctggtcttgaactcatggccagccacgagtatcaagtgatactcctgccttggcctcccaaaatgctggggttacaggcatgcgtcattgctcctcatctttactgataattttaacctcttctttccacatttgagtatttgatcaacctggtatttattttggaagtatgcatctactttaacttttcaataagaaaagccagctgccttaataccactacttgaatgattcatcagttctccactgtcggtaataccatctttctcctataccaagtttctaaatatacatatatgtatatttatatataacatatacattatatatttatatttatacatatacagatcaatttatgggctcactgttctgattcactgatctttttttaatcaacacttgcacagacaccaagctgttttttcaaacaagtttcattgaggtataatttgtcagttacacattgcacatattgtataattgttaattatacaatacattgcacatatttagtttacagtttcataagttttgatttatatacccatgaaaccatccccacaatcacaaccgcatcatcacccctgaaagtttcttcatgcccctggcaatcccttccttctgcctctcccaactccagatcccagcaactgatgatttgctttcatagtggtggagggacctttccttccattctctaaaggttcaataatttaagtctctggaatcaactgacagtagacaaacaggagaaaaggcatacaagtttattatgtgcacatgtgcacagcaaccacacagaatattagactcaaaaatgggccagatggttgaagcttaaatagcattttgagatacagaaagaaatggggcttggag

SEQ ID NO: 41126 - DNA, 1525 bp, Homo sapiens
gtgaaggaaactcaagattctcctttatttctgtgcttgtgggaatccccctggcacaccccaaagaggggtccctgctccgtctcacagggatctttttgtatatttggcttagcatcatacatttgccatgttgtttcatcatctgcctaatttactgtttttgaatatttcatttgtttctaattgttactacagataatgctggggtgagcaactctgtgtacataggtttatctcctattggaatattttctttatataggcgttttttttttttctttttttttggagacagagtcttgctctgttgcccaggctggagtgcagtggcgcgaccggagctcactgcaacctccacttcccgggttcaagtgattgtcccacctcagcctcctgaatagctgggattacaggtgcatgctaccatgcctggctactttttgtatttttagcagagacagggtttcaccatgttggccagggtggtctcgaactcctgacctcaagtgatccgtctggctcagcctcccaaagtgctgggattacaggtgtgagccactgcacctggcctatataggcttttttcttaaacctatttagtaatgttttcccaagtttattttttatttttaattttttccccaagtttatttttctatttttttttcatggaaaaatggggtaacttagcagtttcaatattgaagactgaagtttaaaaaaaatttaaattcaaggtacttttaaaattcagttagaaaagtaggctttaaaaattattagagacaagagtaccaaagcggtgtgtgtatgtgtgtgtgtgtatgcatgcttgtggattggaaaaactttggagactgattacttttcattatatatgtgtcacagtgaaacagcttttatgtgtcatgtaagattactgcttgcctctctaaggaaggtcgtgactgtttaaatagacgggcaaggtggaaccttttgaaagatgagcttttgaatataagttgtctgctagatcatggtttgtattgaactaacaaggtttgcagatctgctgacttatataaagctttttgattcctactaagctttaagatttaaaaaatgttcaatgttgaaatttctgtggggctctatttttgctttggctttctggtgagagagtgaggaagcattctttccttcactaagtttgtctttcttgtcttctggatagattgattttaagagactaagggaatttacaaactaaagattttagtcatctggtggaaaaggagactttaagattgtttagggctgggcggggtgactcacatctgtaatcccagcactttgggaggccaaggcaggcagaacacttgaaggagttcaagaccagcgtggccaacgtggtgaaaccctgtctctactaaaaatacaaaaattgtttagctctgtttttcataatagaaatagaaaaggtaaaattgcttttcttctgaaaagaacaagtattgttcatccaagaagggtttttgtg

SEQ ID NO: 41127 - DNA, 1009 bp, Homo sapiens
ttcctgctgctcctaagaccaccatgaggaaggctgggaattggctcttgaattaatttgttggtatttttaagaatagctattaaagtactgttgttaattttcccaagtctattttattgttagtatttgtcacattttctttgtaaacagtgaattaaaaatattttataggaatattcattcttatctagatttcctacttatataaaaaaacaagtgaatgagattgttacaaagggtaattttgtgtgagtagaataataaaagttgaaattgagaagatgcaatgttttagactgaaactgatggttggtttgttttccccttctttctaacaggccttattccactgctggggattgatgtgtgggagcacgcttactaccttcagtataaaaatgtcaggcctgattatctaaaagctatttggaatgtaatcaactgggagaatgtaactgaaagatacatggcttgcaaaaagtaaaccacgatcgttatgctgagtatgttaagctctttatgactgtttttgtagtggtatagagtactgcagaatacagtaagctgctctattgtagcatttcttgatgttgcttagtcacttatttcataaacaacttaatgttctgaataatttcttactaaacattttgttattgggcaagtgattgaaaatagtaaatgctttgtgtgattgaatctgattggacattttcttcagagagctaaattacaattgtcatttataaaaccatcaaaaatattccatccatatactttggggacttgtagggatgcctttctagtcctattctattgcagttatagaaaatctagtcttttgccccagttacttaaaaataaaatattaacactttcccaagggaaacactcggctttctatagaaaattgcactttttgtcgagtaatcctctgcagtgatacttctggtagatgtcacccagtggtttttgttaggtcaaatgttcctgtatagtttttgca

SEQ ID NO: 41128 - DNA, 1044 bp, Homo sapiens
ggtatctgcctgcctcggcctcctgaagtgctgggattacaggcatgagccaccatgcccagccaaatgttttacttattaaccctgcttcattctacagagaattaatatcagcttagataattatatgtactaaaataaaaaaaaaattagctatagaacaagagtgaggaaaagaaatacaagcagagactgatttcagagcttgtactgttacctcctctgctgagcatttgaggttaaactgggactagatctcaggtttccagaccttctgcctttctggggctctttggtagagtatatgaaaatattcggcttggaagtgccaggctgggctcaccaaatactttgctgttgagcctaattggatttaaaaaatgtcactgaagagtatgggaaatagagccatgagttgtctggcagagggttgggactttgaacttaaagtgataccttcacatcaacaacagtcattctctgccccttcttctacccctgacattggaatactcttgatctgtggctcacttcacaggatagacccagattttggcagaatctgaacagctcttttgggacagtgacatggcataacaatttgtaaaagccacaaaaaatttgtaagcaccgatctgtagagtcaggttatttgtagagctgcatgaccagaaaggctgatatttgtaagtgagtcccagctacactccttcctctccctgtggaaagcacattagaaggaaaatgagggaatgtcatggccttttgtttataaaaatcattaataaattttgctacttgaaattattaataataaattactagtgacctccctcacaactgatcaagacatactggttaagaattgtttttgtagagagagctataatttattttgagtgtttttgtgtgtgcgtgatggagtctcactctgttgcccaggctggagtgcagtggcgcaatcttggctcactacaacttccgcctcccaggttcaagcaattctcctgcgtcagcttcctgagtagctgggattacaggcgc

SEQ ID NO: 41129 - DNA, 1049 bp, Homo sapiens
ccattatctaatagcttacaaagaaaaaaatataatgtatacagtggttgaaaaagtaggagttacaaaaaaatgtgtttgcattttaacttttcaggagatgttacagcccagatagctcttcagcctgcactgaagttcaatggtggtggtcatatcaatcatagcattttctggacaaacctcagccctaacggtggtggagaacccaaaggttggtatatattggtgcacccttatctacattttgtgcacagtaggaatcgattgttgatttactgaagttaccttatacttgttttttgttttttttgttgttgtttttttgagacaagagttttgctcttgttgcccaggctggagtacagtggcgcagtcttggctcactgcaacctccgcttcctgggttcaagtgattctcctgcctcagcctcccaagtagctgggattacaggcgcccgccaccacgcctggctaatttttgcatttttagtagagatgaggtttcattcaccatgttggccaggctggtcttgaactcctgacctcatgatctgcccaccttggcctcccaaagtgctgggattacaggcatgagccaccgtgcctggcctaagttaccttattcttaccagaggtatcatagtggcatatttttcataacaacgagtatgataaaagttgtaactttcaaaaggacacaagtaggaatggagaatgctttcatggggttatgtcataagattttatgttcacgccaacatagaatatcacatcaactccaccttctggtttctggatggtacttcatattagggaaagactgagagacttcattttatgaactttttttttttgagacggagtcttacagtcgcccaggctggagcgcagtggtgcaatgtcggctcattgcaacctccgcctttcaggttcatgcaattcttgtgtctcagccacccaagtagctgggattacaggcatgtggcatcactcccggctaatttttatatttttggtagagacagggtttcaccatgttggcgggg

SEQ ID NO: 41130 - DNA, 1051 bp, Homo sapiens
gtgtcttgtagtaaggtgatttattaggataagattaaagtacattccagatggtcgtagtatatttccagtgaatcagatcggtctggagaaaatctttgcaactcgtatcacaagagctctcaaaaattgaaaacaaaaagtgcaaaagccaaaggagaaaatggggaaggacatgaacagatgattctcagaaaaaataccgtaatggtctttaaacatagaaagtcgctccacctcacttacaatggaaatacacgttgaaattacctttcctggtgggagtggaaaaatggttcaagttccacggagtacaaaattacttgtgtttattcttataccttgcagttatacttctaaccctaaccttattctgaaggtgcagctccacacatggaaacaataggtatacaaggttattgcagtgctatttgtcatagcaaaagttagggataacccaaatatccgttaatagggaactgattgggaatggtgcatccatacagtagaacacaatgcaaccattaaaaagattcaggaaataatcgtgtgttgctttggaatgagtctcaggttgtattaagtattcacttaaatatttaagtgtagtaagtattcactgtattcaaaagcaaaaataagcatatatgcttttatgtatttacttaaatacataaaaatatatatttatatttaatatgaatatttatgtgtatatgcttattttcggggaggaattggaaggatatcctggaaacttaacatttttagttgcctataaagagtggggggtggagacaagatttctctgtctttgaacttttagttttacatagccaaaaaagtaaataaaaaaggaaacaaagtaaatcctaaggttgaaagcaaattgaaacaaatgaacttaactgttaactaatataactaagatacacagaaaaaataattattctttgggtttttttttttttttttgagacagtctcactgtgttgcccaggctggagtgcagtggtgcaatctcagctcactgcaacctctgtctcctggg

SEQ ID NO: 41131 - DNA, 1671 bp, Homo sapiens
ataatgactaattattagcactggtgtgtcttcgttaactgtgattgctaatctctccctgcttcttttggtagaaagactacctacaagatctctagtctgatttaaaaatcaaccttaatacttgaatgaaatgctggagttaataggccacctaatgaaattgtaagcggccgttaaataattctttcttaattgcaggattggtcttgatttgagcaatggtaaacctcgagacaacaaacaagcaggggtgtttgaaccaaccatagttaaagttaagagtttgaaatttgcaacagaagctgcaatcaccattcttcgaattgatgatcttattaaattacatccagaaagtaaagatgataaacatggaagttatgaagatgctgttcactctggagcccttaatgattgatctgatgttccttttatttataacaatgttaaatgcaattgtcttgtaccttgagttgagtattacacattaaagtaaagtacaagctgtaaacttgggtttttgtgatgtaggaaatggtttccatctgtactttggtcctctgatttcacatattgcaacctagtactttattagtttaaaaagaaattgaggttgttcaaagtttaagcaattcattctctctgaacacacattgctattcccatcccacccccaatgcacagggctgcaacaccacgacttctgcccattctctccagtgtgtgtaacagggtcacaagaattcgacagccagatgctccaagagggtggcccaaggctatagcccctccttcaatattgacctaacgggggagaaaagatttagattgtttattcttctgtggacacagtttaaaatcttaaacttgtctttttcctcttaatgtatcagcatgctaccctttcaaactcaaattttcattttaactgcttaggaataaatttacacctttgtgaaaattcatccctgcctatcttacctcgttccttttatgccaagtaagccaatgtctttttttttttttttttttttttttaaaccttgggaagtaatgaactcagtcctagtaactagtatttctttaactattacccacatggccaacacctagaagatactatcttaaaattggattgtgaaattcactggtaagctctcagggttacttgtgcatctttaccttctctgggtttaatccaagttctttaactattgcagcagagacagctgcaaaggcttcattgatttcaaatatgtcaacatcttccagtgaccaacctgcttttgtaacctagaggaaagattcatagaaaagaggtctaaacttgggtggaaaggctaaagttaaaccattctttgtcaacataaatatatgctgcatgatactggtaactgctactttggtttgttcttaggttaatacagtgacattctcacacatttttgccttagtgacatccattccatccaaaaggttaagggtgtgatctaaaagatcccttagaaattctaaattgtcttaaaattttgaaccagtagcatctgttatgtgtacctaaggctaatgtaacagaatcagttcccctagaaagcatgtgatccaaatgctctcagtggctgggggtagtggctcacacctgaaatctcaacacttggggagcctaaggca

SEQ ID NO: 41132 - DNA, 1790 bp, Homo sapiens
cagcctcccaaagtgctgggattacaggcgtgagccactgcacttggcctggactcatcttcattgtccacctcctaggctaaatttatgtcttttatgtgcttgtaatctctgcataccactttagtgacacttgccctggagtgtgattggtaatccctctccccactagatccttgaaggcaggacctgtgttccctgtttaaccatagttctcaattagtaattcaaatttgggttggggagagctaagtggtaatttttaattccttcaaattttccatgaattggactaatttaaattctggtcagagataacaaaggataatacaatttgatctatgattatcttgtgataaatacttaatggaagttaaattatttttaaaaatcacagaaggtaactcaggttacaaaaatactttgcagagaatcagatatcaccaaggagagaattcagaagatcctggcaactggtgccaatgttattctaaccactggtggaattgatgatatgtgtctgaagtattttgtggaggctggtgctatggcagttagaagagttttaaaaagggaccttaaacgcattgccaaagcttctggaggtatgtcttgtgctggctgtcacataaaatacttttattatccctgatcctatcaaaggtctttttacattggaatattgacagaaaacagctcaaaaacatttatattctcttaatgctttgtgctaccaacacatttatagagccatttttcatgtaactggagaaattttgttggaaatttgtgaactgaatttgttcatttctaaaatgacagttccatcttaggataaaaggagttaccgtgtgctgcctaactaaattctaaacttgtaatatagcacttttaccacaaatgctactgagtccaaggatattaaaatcatgaaagagcaatattcacagatcctttgtaactctcttattagcaactattctgtcaaccctggccaatttggaaggtgaagaaacttttgaagctgcaatgttgggacaggcagaagaagtggtacaggagagaatttgtgatgatgagctgatcttaatcaaaaagtaagagccactttctaaaattgtaaagttataccgattttgttaagtaaaagtaggttttcttcccatttatttgctgcttgtagtctcacagtgatacgagcagttatacgcatgggataaaataacattgggccactgtaaattgagatgaagtaaccattttcatctcttctgcagggactagacattgtttctgtatagtatatctaaatatcctgtgtaggcaggacttaagggaactttatgtagacttattttattaaaatgccattttttttgagaaattgatggtcttggcaaaaaaaaatttttaaaaatgctattacaagaattgtacttttgttttgaacagtactaaggctcgtacgtctgcatcgattatcttacgtggggcaaatgatttcatgtgtgatgagatggagcgctctttacatgatgcactttgtgtagtgaagagagttttggagtcaaaatctgtggttcccggtgggggtgctgtagaagcagccctttccatataccttgaaaactatgcaaccagcatggtaagaacagtcatttcttgtcttagaggcctgagagcagtagctgtggacttcaattttttttttcccttttgtgaagtcacctaattttcttcttttcctaggggtctcgggaacagcttgcgattgcagagtttgcaagatc

SEQ ID NO: 41133 - DNA, 1111 bp, Homo sapiens
gttattattgcagcagaactcctaaaaaatgcagatgaattagtcaaacagaaaattcatcccacatcagttattagtggctatcgacttgcttgcaagtaagattgtttgcattcagagaaattttttttgatgtaatagttgtaaactgtgttgtcttaacgttttgattaataactaaattttaatttgaaaaccttcaatttaaatgttttagcatttaagtagtaatatttgaagttaaaaacttggaccagtatcttttttctcatttgactaccacattttctcctaataatagattttagtggctatgcttatgggatagattaaacttgccatgatctgaagagggagggttttttcatgtcctcctcctatatgaaatggctgaacggatattattacttacgacattttggctctgtgttaagcatgatgaatgcaaagagtttgagtagtgactttataagcgtttttctcccccacacttttaaacagggaagcagtgcgttatatcaatgaaaacctaattgttaacacagatgaactgggaagagattgcctgattaatgctgctaagacatccatgtcttccaaaatcattggaatgtatccttgtggttgtcagataaaatttagactttttaaagcataagactttgagatgggcatggtggtatgtgcctgtagtcccagctactaaggaggctgaggtaggagtattaattgaacccaggagtgccagtccaatgtgggcaacatagcaagaccctgtctcgggagtgggtgcgtgtgtgcgcatgtgttgcgcgcacgcgtgcgtagtagcagcagtatcaattttgtgcaataaaattttgaataaccaattttatgcaaattgatatcaatagagaggagtaatgctgtattgaaattacctgttgccttccctgcttttttagggtgaaaaggtaataaaaagcatgtctaaaagtgatatgaattgcagatagtgataatgttgtaacattttggtgacaagtaatgcttgctgctttaatagattagattactaaaaggaagtcccttgaaattacccttgatttttcacgtgtgtaccctttgt

SEQ ID NO: 41134 - DNA, 1049 bp, Homo sapiens
cgaagtggcagagcatgaaattggtggttattactttttttttttttccccgccatcagattccaccccgcatcaaagctgtgccaaataggctcgctttgtttagggacagggtcccacctgtcgcccagacgagagtgccatcatagctcactgcattctccaagcacaggtccgcgccgccgcatccggctttgtttttattttttgtagaaatgggtttcgctatgttgcccaaaggggtctcaaactcctggcatcaagcgatcctcctgcctcggcctcgcagtgttgggattacacctgtgagccacagtgtctggccccatttacactcttagtaggtggtttttaaataattaacacagatttgtagatttgggaaatacgggggctgttggatgtcatttacctttaggctgaaattactgtctttcagagttgtggcttatcctcatttcttttttatttttaattgattgtctacagttatggctgcagcttcgattgccaatattgtaaaaagttctcttggtccagttggcttggataaaatgttggtggatgatattggtgtaagtacacataactgttgtgttagtttccttaaagtaaaactatcttcagtgttttgctatgttctttctttgactttatcagaatccacgtactggaaggtgatattaaaggtgaacgtgtattataatggggctgtgttgatttctataagtggttcatattttttcctgcgaatttcttaggatgtaaccattactaacgatggtgcaaccatcctgaagttactggaggtagaacatcctgcagctaaagttctttgtgagctggctgatctgcaagacaaagaagttggagatggaactacttcagtggtaggtagactggctaaagaatgatcatttttctaaaaacgaccgactttcagaaagttgaagccataagtgggtcatttgtgctgtgtcagaaataagttacatattctgaatgcccagaagattgagcaagaagaaaaaacaaaagaagttacacat

SEQ ID NO: 41135 - DNA, 1051 bp, Homo sapiens
taacttggagaagggcccgcccctccagttacaccccagctccaagctccacccttcttacaaccttttctagaaggcactagaatggcccactgcgtctgcgcaacatcgtttgaggcgaaggttcaacctcttcccagcggtccaacatccgacttccgttctccgctttcgcgcccttcccatcggctatctaattggacaaaaatgccgaccccgccccttccccggagcctcacttccgtcacagtcctgtttctctccctgttgtccctgcctctttttccttcccgccgtgccccgcggccgggccggggcagccgggaagcgggtggggtggtgtgttacccagtagctcctgggacatcgctcgggtacgctccacgccgtcgcagccactgctgtggtcgccggtcggccgaggggccgcgatactggttgcccgcggtgtaagcagaattcgacgtgtatcgctgccgtcaagatggaggggcctttgtccgtgttcggtgaccgcagcactggggaaacgatccgctcccaaaacggtaagggcgggccgggcctgggtcgggtttgcggccggggagggccgagtcccaccgcgaccggaccccggctgccctcgtttctctcctttacctccgcagaaagggcctcggggccccgcagccggacccagcccacccgccgttctctggggcagggcgctgtggccccacttttcccacagcgaggaggagccccgccgcgcgcggcagggttttgagaccggcaacgcgtggatgtggtgtccggggcggcgttggaaacgcgccctccgcgggaaagcgggcctcccgggctcgcacgtgcgggccacgcctcgcacccccttttgtttcagggcgaccccctgagtgtccatgttaaacgccaggttttattttaggaccatttaccagaaaaagagtaggtccatccgcgcgccctcggatgagcccggtgccctgtccgcccgcagctgcagtcgaggtcgggcgtccggcgtccagccgtatccgggttgaca

SEQ ID NO: 41136 - DNA, 1049 bp, Homo sapiens
agcgcagccttccacaggctcgaatttttaagacttgacataaagtctccggaattccagattattaaagtgaccccctcatttcaacccggcaaaacttctcaccccagtgtcataagattcgatagcgatctcccagaaacttggactggaatgctcctacactgaggggatggggggaagaagaaatgctaaagattatttcagagttacagaaatcctgttgaaattccaatgcatcgtttactcttagcgctggggcttcacagtttttttttaagttggaaatatttacaaaatttcccatagggtgaaatccagagttaatccaaaaccagaatcttttaaaattaagtacattcaaatgtgcagatttcttaaacctcatttagttgagctttgataggtgaaacgcacgttttgaacaactctggtaacaaagaaaaacattaaattgattataggtatgttatatttaaagaccagttgtgaaattagctatattgtgctcaaagtatgttactgacatttctccgtcgttaaaaggaactgctccattctagttttttataatagtctgtattatgtatatagcctgatagtgctgaatttctgaattgaccttcatcttatttactcaataatattcatttgacaaatacttattaagtgcatatatgtgtcaggaactgtactagatgctgaggatatagcagtaagcgcaacagaccaagctaacagcttagtaaagggtgaggtaaaacaaaacaaaaaagtattcaaaaaaataaactaatttttatcttaatttaaaaaattacaaatttttaaaaatcacaaattggtatccatgtataattcatttccgtgcattttcttgtgtgaagaaagctcagtaaaagtatttcttaggtttctgtaattctagttctctactcgattttcttctgcaattttctgagccagaacccttcttagaaggcatattagagactttaaaagttaaataataaaataaatctcttctttaaacagcattgtactacgta

SEQ ID NO: 41137 - DNA, 1022 bp, Homo sapiens
tcccctggaccagcccagagcccggtagctccggtgggtggctagatccagaagagaaaaatcactgcggttcaactctcaggaagccccatccctaggggaaaggggagaccaccacatcaagggagcaccccgtgggacaaaggaatctgaatagcagcccttgagtccaagatctctctgacatagtctattcaattgagagggaactagaaaaacaattctggtgatatgacaaaacaaggttctttaacaccctcaaaagatcacacaagctcactagcaatgaatccaaatcaagacaaaatctctgaattgccagaaaaaaattcagaaggtcgactgttaaatcgaggaggaaccagagaaaggtgaagtccaacttaaagaaataaaattatgtaggatatgaatggaaaaatctccactgaaacagcctaaataaaaaacaatcacaacttctggaaataaaggacacacttggagaattgcaaaatgcactggaaagtctcaacaacagaatcaaacaagtagaagaaagaacatcagagcttgaagacaaggctttcaaattaacccagtctgacaaagaaaaaaataattaaaaacaatgcctccaagaagtttgggattatgttaaacgatcaaacctaagaataactggtgttcctaaagaagaaatctaaaagtttgaaaaacatatttgagggaataatcaaggaaaacttcctgagccttgctagagatctagacatccaaataaagaagctcaaagaacgcctgggaaatttatcacaagaagatcactgcctaggaacacagtcatctgtttaatgtcaagatgaaggaaagactcttaagagctgtaaggcaaaagcattaggtaacctataaaggaaaacctatcagattaacagcagatttctcagcagaaaccctacaagctggatgggactagggtcttatctttaccctcttaaacaaaacaattatcagccaagaattttgtatccaggaaaact

SEQ ID NO: 41138 - DNA, 1019 bp, Homo sapiens
ctatgttcacatttaaatgatagtgttcaacttggtagggttctcaaagtgatcatctactccaaagctcttacactactgatgaggaaattcaggtccgaaagatgaagtgatttacccagttttccagctcactgatcaaagccaggtgctggagtccaggccctttctctctccgtgcagggctggggcgacaccgagttctctaagcagtatgtgtctgtgagcaggcctgggaggctggccctttgcccttccgagaagatcgctgagcagcaagtggaagtggtgcatggtttctccaagcagagtggtgaatagacatcaagggacaattcctttctgtatcagcctattttgctaggagcctagatctaaagctttacgtgccccaaatctgggtgcccgacccagtttgtcaaagtgggatttcattttaatgatcaaccttgcagtcagaagtgtggtgtatgtcaaaagacagttctgttgattttgaccttgggattttagggcagtagttctctgacttttcaatttcatggacaagtaaagtttctgcaaaatgggaggggaatggcaggcagccaacagaggtgtgccaacattctggtctttccaagcatggacataaataaagagaaactcgccatctaccactgacacagttatactctttaatatgggaaaggcaccatctctgaaaacagggccatcctttgagtggacctagtttagctttatgaaaaatgcacagtatttcttgctcgtcagcatttgggactcgtgttgttggaaggctttgagaaaccattcatgcccttgtgtgatcttctgtggacaaaagcagttcccaggtaaactcgctctgaggctgaacctacaacctcagaacccccttttttccagggaggtcacgatagccatcacggtttcttaattgtatggggtgaacagattctaacttttcatttctaacttaaagtacttcttcaggttgtaatttgacatttgcagaa

SEQ ID NO: 41139 - DNA, 1033 bp, Homo sapiens
cagatttgtatgttaggtaagtcgaactgtttcctttccagaaaagacagtgcccatttcaaagtaaacacatcacaaatgacctagagactttcttccagggatccctgggtcacactgacttctttgcagtctgttttgcattgaatttgacacatcctactattggaatgatctgctgaagtctccttccgtcccagctccttccggatcctctgtaaccagctttttcgtatcaaagagcttaggttgaacaaatggaaggctgtattttataattattttggtgttggtgtgaagagaatatgttattgacccttttcgtgggcgatgggtctgctgtatggaatacacacagatgtgtatttatataaggcggtctagacacaaatgcagaactcttgcagtgtctcacttatgtgttatgttccaggctattaatgattttattgaagacacttccagaacatattagtcaaactagttctctctgcctgcttatagaatgggctgaacacctccagaatgtcaccaaaatcagtgggaaacagaattggaaggtgctgcagatagtaaacacaatggcagttcatgcattaaaacccagtgtgacgggtcagggaccgtattggtttgttgtgctgtggatcatcttctctgaatgctaatcaagagaatctgaaatgcccactaatggagaactaatccaggggcgtataaccttctgattcaagaccttacagaagccacattacaacacagcaccctgaaaatccaggggccctacattcccaccaggccacaccaaacgtccaggctttcctgggagatattttggtggactggcggccaaagttaagtagcttctgatctaaaaatgactctggctttcccatgaaaataggacagcatcgtcatcatcactgacttcttgtctgatggtgcaggcaacagtctgccctgtgactcagttctgtggcatatgaaggcaggagaatcacccacctgcccgaaggagacctttagaccttct

SEQ ID NO: 41140 - DNA, 1024 bp, Homo sapiens
gctctaaatttagtggctctaaatgtcatctggaatgggccagagaatgaatattttaggttttgtggaccacagcgtgtctgtcaaaaaacactcctgtgtgtagcgtgaaggcagctgcagacaataggcacatggacaagaggctgtgtggccacaggacgtcacttacaaaagcaggcagaggagcaggcttgtcccgagggcagtagcttgctgactcctctctagtgttatacaagatctggtacacaccataacccacgtgacatgtctaccgtgggatatctaaacatttttggtgatctaagagggatggagatagagactcccatcccaggtgaccatctacgggtctagataagccgcatcactgtcaaagttgtcgtttccatttagcagcaggtcatcagaggccaaccactaggacccactaggatcttgcaagatagaattgtgaacgggaaatatccctgagagtgcttttccccagcagaagccatgattggctgcatgggacctctcaccttcccagggccaacagctgctgctttagtctgtggccccttcctggctgcagaaccaatcatcatttatagctccttcaaatgactgcatgtttggaatgagttcaggtaaatataattttaaaaaataccatgggcacagcacacggtaagccctcacacccgcaccagtgggttcacccacccacggggatgttcccggagtcccctggagatagggcctccgatttcatggctaagttttcttggagagaatctgcatgttggatttgtgtgaaaaacaaactccatcagaaaatggagatgctaaacctagaaggtatctgccttttctatcccatgtgagggaagaagtttcttgtttttttaaagtagggtagcaattggctgtttagacctttttctgttctgccagtaggttgggggacacggcttactgaccctgtgctgagctggagctgcggagaggcatgggtgtaacggggaggagaggagag

SEQ ID NO: 41141 - DNA, 1032 bp, Homo sapiens
ctcccaaaggcttccgaatccatgatcactttacaactctgagcataagggcgggagcgctgatggcgggaaagcaagtcaacagcacgcccatcccacctgcagcatagggaccgcacctccccttgatttcatcggtgatattctatttataggacttcactcattactgtgaacacccaaacaactaatgctgtgtgtaagggggtctgcgccctgccactgatggtggagactgtgcttaggattagagtcttcgggggctccacttacaggtgaaataggcaggtctgggagcctggggccagggcgatgcctcttctcttctcactggaagtttgggagccttgctcagtgggggccttgggttttctggattcttgctaaagtgcttccttaagccctgagtcctctcttctccaaacaccacagaaacagccagtgccattgttatgcacattctcacaaagcaaggagctagagagagcaggtgccaggagaggactgagtggggcaggcacatggcaggcactggctggggcggatgggagctgccagcctgtaccctcccagggaaccccctccccatgtcacagggaacagctttgccatctactggagagctgtggcccatgacggtgggtgagatggctggtgctcatctctgccaccctggaagggggtaaagaacggcattgccttatattcattgttcagcaacatcttttgtctttaatgaccttcagaaaaaaaaaacaacctcattcatctctctgttttttcttaaataacacatgatgttgggatccttctggagtctgtggaatttgctttttaaagaggaaaggaacagaagaaggttcctgaccaggcatttttcatcctcacctatcacagtccaagaggaaatgagtttaaattgaagtcaatgaaatttgcagaaattcacgaaggtggcatttttaaatgtaaaattggtctttttggggaaagtaatggaattgtctttttaacaaagaggctttcaacctt

SEQ ID NO: 41142 - DNA, 1018 bp, Homo sapiens
ggatatatacgaagccaagaaaatctgattgtcagcattccagtagtgtcaacacagacgtcaaagcccagagtctgccttggagtctaacagggattcttcctccataaaactggaactgtgaaaggctgtaacctcaatgtaaagatgaaccaaaaggaaggttgatcaccccacaggtctagtggccaactcggaagtttgtattggtctgagttgagctgaggataataaaagtctctgaaaagtggtgaccacagagcggcctgcttgcaaatttgcagcgtgtattcagatcccccggatgctctggaaatctccaaccatgatgttagcttcagatagtcttggactgagcatgtggcacatgtcagaaacaataaactgtaaaaattaacctaggaggttttaaaatgaatcaaaagaacctgtagaaataagaaactactggattgaaaagctcaccgtatgggtttcatgtcagcttaaacacagctggaaagactgttagtgaactggaagacacatcagaaggaaatatccagaatgcagcagagatacagacatgaaaaaatactttttaacaaacatgggaaagagattaagtatgtccttccagaagatggggatggagggaagaaagagacagtatttgaagagacaatggctcagaattttctagaactgacaaataatactaatccaaagattcaagaagcccagtgaaacccacggaaaataaaagaaaaatccagtcacacgtagatgcatcatagtgaaattgtggaacaccaaaatatacaagacattaaatgtcaccagaagagaaaagacaccttccaaagagtgacagaccaccttccaaagagcgacaccctaaagtctaacttcttcccagctgcagcagaagccagaagatgatgcaatcgtatctttaatgtgtgctgaaagaaaaagaagttctagtctagaactctacacttagcaaaaataacttccaagaataatggcaaaataa

SEQ ID NO: 41143 - DNA, 1048 bp, Homo sapiens
tgggagggacctaagaggaggtagttgaatcatgagggccagtttttctcgtgctagtctcgtgatagtaagtctcacgagatctgatgggtttatcaggggtctccgcttttgcttctttctcattttctcttgctgtcgctgcttaagaagagcctttcgcctcccaccatgattgtgagaactcctcagccatgtggaactgtaagtccaattaaaccttttaaaccttttttggtttcgtttcgggcatgtcttcagcagcagtgtgaaaacggacactggggaaaatcatctgaattaagagagtgctggggtggggcctggggcgtcggggctgatgctgccccagcattttggtttccacagtggagcccagggaggaagttgggaaagaatgaggaaagaacgattgcccggaagcgtttcactgtcctgaggagagtgagcctgaagattgtagaaggcagttgcagaggttgtctgtcatcctggacaagagacgcacttgttgcagacgtttgcttgaggacagaagagactggggctgctgttgcctattctgtttcatggctttactctgagagccctgaaagcattgaccctttgcttcagtcatccattgagttattcccacccaaccccaacgtgggttcagaaccctttcagagacatctccaacttgtatttgtgtctaagagtgttagtctcctttgtcagactatgaagaagccttgtcaaggcaggagggaaaagtgctcttggcagcctcacaaatctggctttagctgaaaggtattttttgtttgttttctttaatcctcgtcaactggacatggtgcggttaagagaggcaagtatgtgtgagcctggacagctttccagctctaggggcagaggaggtttgatagcccttcatggcagggtgcatgcgaagagttttgcttgccggcatagataaacttgactatgtctgctctactcaatttgatgtatagtttgaaaggtaatgctgtattacgaataaaataatgggtatatctaccta

SEQ ID NO: 41144 - DNA, 1196 bp, Homo sapiens
ccagcgtttgtgtcatctgtttaaatatgctgtctggggccgggtgcggtggctcatgcctgtaatccagcactttgggaggctgaggcgggtagatcacctgaggtcaggagttcaagaccagcctgaccaacatggtaaaccccgtctctactaaaaataaaaaaaattagccaggtgtggtggcacgcgcctgtaatcccagctactcgggagactgaggcaggagaattgcttgaacccgggaggcagaagttgcagtgagccgagattgcaccactgcactccagcctgggtgacagagtgagactctgtctcaaaaataaaaataaaataaaatatatctacgctgtccgagtcttcagaatggctttgcacaaccaatggggcagtctgcgtaggaaagatagaatgaaactgtccttcaaacatagagaaaggcagaagggcaataggagagggacacccgtcacaaatcaggtgggggcattgcctacccattttgcaatattcggttctgtcttactggcagcgtctttgtttggccaaaaagagggcaacaagtctttggttcctctacttgctctgcttgaggaactataaaatgaagtcatctcaccaaggccatccgttctgttgttccatatacttctagggtttttaatctgaagtatcgaggaagctgtctatctgcctctccagctcatttcagatgtaatgttttctcttcatagttactgttacactctggcccaattcctagtgaaatgattttatttagaattgggcttttacttggctaaacttttccatatgatgcttattccaaaatgaacccttcatgccaacacatttttgtttatttaggagaaagaaggaggtattaggaatgaggtctgatgatgacattagtgtgttattagctcaggtcatctggtgatagcgcaggctgtgtggctgacatacctggtgattggaagcacattaaatatccaaatgaatcagtctcatgaagctgattcaatggagagtgataagcaaggacactggagttctaagttttttaacaggaataatgtaactgtgatagcaagccttgtgtattttgagtaataatccatttattttttaaatgtatctatctgcctgcctgtctgtctgtctgtctgtctgcctgcctgcctgcctgcctgcct

SEQ ID NO: 41145 - DNA, 1094 bp, Homo sapiens
tcaacattggtctccaagtatgtacccttctacggtggtatagaaaaaggaaaaacttgtccaaacagggcagagacagtaggagatgatttggacaggaactgtagctgtttgaagagagataagtttgtgtaatcaagggaaaggagacagttgactgagatttaaaagatgtttataattttaaatgtctttttaccctctagcagttggtctctatttaagcagaatttaaatttaacaaagcaatactgattacgctttttcattgaaacctgcatttatgtgacttgcatacacctatggagattccaaaatctgttagtttgcagtgtgaaatcctgtatgtttctactgtcataacccctacccaaatttcaagtggatggttacgaattggatttctcatttggagttaagaaataagaaacaggatttggaatcagagtccacaagagtactatatttttttttgattgatggtaaagacttgctaagtttatggcaggattgtggagatatttttctcaggatgcattagtgtatttgtttctggtggaaattaagatgggcaacaaattcagaaagcaaggcagatttttatccatcacaaattaattaaattatttagaacaaactccaaatgaaactcaagaattaaccatctaagacaactggcatctcaatgccgggtgcaatgaagggtaggtagtctaatgtcactgaaggacctagaagcacctccatccaggtatacccagtgatgctctgtgccttcttccccagaggaagcacctccatccagatgcaccccagcaatgacctttgcctatgtccccggaggaaggcttcctagggctttgggccaagcgatagtggaagcatttttaaacaatccgaagcgggaagggaagattcctccctctagaggaggagtcctggctactggaaaaagagaatacagtagaaagggagggtgatgatcctgggtggctcgtgggcacctcatggtgataagccagtgcaaactatccccaggtttgagagaatcctcgccaggattctccgtttctggtatccccataggtgttagc

SEQ ID NO: 41146 - DNA, 1114 bp, Homo sapiens
tcttgttgcctaggctggagtgcaatggcgcgatcttgggtcactgcaacctccacctcctgggttcaagcatttctcctgcctcagcctcccaagtagctgggattacaggtgcctgccaccacgcccagctaaattttgtatttttagtagagatgggggtttcaccatgttggccaggctgtctcgaactcctgacctcatgatccacccacctcggcttcccaaagtgctgggattacaggtgtgagccgctgcacctggccgatgatgattattttttaattgaggactatgttacttagagctcgtcccaaagacagttaaatccagtctagaatactttctctcctgtttggttgtaggaattaggccaactgaactctaagggagccaaaactgaacccagccttgtctgccaggagtgagaacagagcacgttcctcagacctgtacaagttagttgccgccctggtggagactttggccacattcatccgacctgaaggagtgctggcaatctgaatgtagtgtgtgctggacaccagctccctcctttctcctgggactgtatccactcccctctcctctgtgggcaccgcagtacctggggattctgtgtcctggagaccgaaatattggttcagaaacaatctgccagctgtccccactttagctgtgctgctctctttgccagtccctgaagtttttattttcttttatttgtctggttaacctgggccacttgggaatcttctctgtagatgggagttggggaagagtggcagagctggatcgcttaatcactgttcaggaagagtgcagtggcatagaggaaaaagcttgccttgggagggcagccgtgtgtttgacttggaagggatcttggagtgcaccttgtcagtttcttcctaaggataaagatgctgaagctgtagtcttgaacccagcccaggcttccaggtggacagacttgtttaagtgtgtgtgtgtgtgtgtgtgtgtgtgtgtgtgtgtgtgtgtgtgtatacacaaagatatctgctgttagtgttttggtaaggctttcttttcttccggttttttttttagagttgtgattattttctccaca

SEQ ID NO: 41147 - DNA, 1050 bp, Homo sapiens
ccagacccctggtgagggaaccctctgtgtctgccgaccatgtctttgcagaacaattcaatctatcccgagaggcagcctcccagaggcagcaatggggaaatgccaggcttctcaacctccgtgtcagcattcttgatatttggggtgggataatcctttgtcagggggactgttctttgcattgtaggatgtttagcagagtctctggcctctgtctgctagacaccagtggcactctgtagtgtgacagtgaaaaatgtctccagacattgtcaactgagaacttctgacataatgggaagggtaaaaacttagggccaggccaggcgcagtgtctcacacctgtaatcccagcactttgggaggccgagacgggcggatcacgaggtcaggagatggagagcatcctggctaacacggtgaaaccccgtctctactaaaaataccaaaaaaaattagccgggcgtggtggtgggcgcctgtagtcccagctactcaggaggctgaggcaggagagtagcatgaacccgggaggtggagcttgcagtgagccgagatcgcgccactgcactccagcctgggcggcagagtgagactccgtcaaaaaaaaaaaacaaaaaacaaaacaaaacaaaaaacaaaaaaacctaggcccaaaatactgatgctcgaatctcagctctactgggacgaccttgaccaagtctatctgagctcatagtacctgccccacgagattgcttgcataattaaactcaatgatgtggtagctttcagtacatgtttattgaagccaaatctcttatcatctgttttcttaattaatggcaagaattacgttcagatgcgcagtaagcaataaaaaaaaatctagcttccttgtttcaccaaaggtacacttctagctctttggcacaaaccggtttagttcagtgtagatggaatcgctcggagatctggcttcatcacgggagagaggacatttcacttctggtggtatctctcttgtacccgttgagagctgctcccacgcagttaatggcgccc

SEQ ID NO: 41148 - DNA, 1023 bp, Homo sapiens
aaaaaaagaaaaagtcagttgttgtttttaataaaataagcttaaacaaatttttatcagttcttttattggtcagttttgttttgaaataacttactcgttttaaaatccagactgaaattcttctcagtatttggaaaaaaatccatctgccagtttatagacaagccagcatataggctttgacatatataagctgtcatgaataactttgttctattaaatgactagtcacaatttaatattttaccctaggattttttcccatctggctctagtattaggctgtattttaaaggataccggttctaagaagttgccgtaactataaataaagtgacagttactcgaacagataggctgtactcagccaatagcctggccatttagaaagctgaacagaaccactttaccctatgttgacagtgagaacaaattgaacatccttgacttaagtgccatttgtacacccctttcccgtaacaggaagaccctctatttcttttgctgtgctcatctctacccaatacatttaaaccgtgagagggagctgtgtctctatttttccctgaaaagtgctcgtctgttggcatttctggcggactcctcacagctggatatttggggttgctttacataacctggcatgtaagggacccaggtcacttctcctccataagctcctgacttccatgcattggagaagcttgcctcccagggagtgacttaccagaaatggggccagaattgataaatcaaaggggtttaggggcaagatcagtgtggaagcgggccccagagagaagctgcattagcggagctcccgggagcactgttttgacctcagggttctgttgattctggggccagctaggggcggagccaaagccaacccaagccactcccccatgtgcagcatcccagcctctctcccggcggctgctcctcgtggtccaccagccaccctctcaccacagggccggctgttgggagcttagagaatcataggaaagaaggaggcaa

SEQ ID NO: 41149 - DNA, 1033 bp, Homo sapiens
gtctcagcctcccgagtagctgggattacaggcacatgccaccaagcctggccaatttttttgtatttttagtagagacagagtttcaccatgttggccagactagtctcgaactcctgacctcaggcagtctgcccgccttggcctcccaaagtgctgggattacaggcatgagccaccgtgactggccagtgttgtattctttaaaaaagaggattgtccattccatttctactacccaaacatgacttcttgattctattccattcaatggaacactttttcattctctataaagtgcacagcaaggaagaagctataagaaaccttctctgtcttcagtgagtttactttgtcctggaggaaactagccagtaacaaacaactccagctccaaggtcaggcgtggttcctggtactgtagggatgtgtgcagtgtggggccatggaggcacgcccttgtggggaatggagaaagtttcctaaggagatggctgtggtttgctttgaatagggagtctgggctaagtgtgtttgaagtcaaaggaacaaaactagcaaagatacgaaggcagacattccagggtcctctcggagaatataattcctaactcactggagccctgtgtatggataggaagtagtttgaaagaagctggaaaatcttggcaacagactctggggatgtttaattcaaatctaaggagtatgaaatttattccgtagatcatggtaagccactgggtagattggacccataataacaaaacttaataatattttttctgtgatttatggtttttaatatttactaagtgtcaacaaagtgtgaagatttataagagcattatagtgtgtatgtaatttttacgcaaagggtttattggttgatctatgtagataagtaggatgtaaacatatgggaagaatgaggggaaagtcagatgttctgtatcatgccacccacaccatttaccctagccattgacatcacctggagagctatgaaagtattgctgaaatcccaccaagt

SEQ ID NO: 41150 - DNA, 1029 bp, Homo sapiens
ggactttgtttgccatactgcctatcctgaaagaaacataagcactttccctggtaggtcagctctctggatactggcaccctgggactatttctccccctgagtggggattctcaaaccaggctctgccatcttcaacattgtttgggtgaaaaagtttgtgctttcctaagtgtctcaggaaaagattctgtaacacactaaagaggctaaatgccatcatctggcaccacgacagttgcatttttgtttaaaataggaatttgaggatctaaagtatgtgagctagatatgaggaatattgtgaatgttagggatattgaatattcgtttacacaatatttgtcatctttgcacggaagtggtgagaccctaagggagagggaagaaaagggatgtgagttggcccccagcacctgcagggcctgtgacctgaccatgggagggctcagcccccatccctctgagaggccgcagggaccctccagtcttagctcccagttgtcttcaattccgctgtcttctctactctcacctgctgctaatcacgcaccgcagcctcccacaagcacccacctcatggccctcgtgtccccacccctcggacagcctccgccatggcccgtgcacttccctggatgccccgcgtgtttttgctgcaggaacttctccggaaccaggtcgtctctcaaggaaaccccttcctctgcttgcccctccctctccacatctcctaggccctcggagtcaagctggtgtcctctcagcccacacttttctctttgagatcagcacgttcctcctgagcatggcctgctgtgagcttcaggtcatttgtctcacccgcctactcttcctccttgtcatgcaacattgggtctgccaggccttccctgtaagctgttgaggctttctctcccctagaaatcctgcctccattccagtggccaatctgaaccccacatgaatgtccactttgcagagctggagataattacacaactgggctcacccattttactttaaatt

SEQ ID NO: 41151 - DNA, 1034 bp, Homo sapiens
ggtgcagacgtccacaaatagaacttttagaaaccttcacttttgcatttgtacattaatgggttttctgcaaggatgagcagaaatatactatttttgctatagtcatcatatgcctatgtgtgtataaatagatgcatgtattgtattttgtatttatcaagcttaacccaaaatggagcttatcaaaataaagctcatttttatgctatcattttccaagctaataatttatttttaattttcttttgttttaaaatttgtcttaaatatgatttttctactttttacatgaatttcattcatttctctaattccttgtattgaatttcagagcagtgacccaaggtcatccgtactgacatgttttggtatgaatcttcgtggtaatgataatagctacagtaatgagggctcctacctgctagattgccaggctttttaatttctgttagatggtttgcattttagccagggtcctctagagagcagagcttggggcaagagtgagagctgacactttctttggaaggtggaagcccgggatggctagggtgaaaaatagaggggaataaaggcaaggaaacatgagaagcaactcgaagcattcttgccggccgcagcttcaggggccctaaagagccacagttggtccttagcaggtgtgtttgtatgacacagaggactcttagtgaaaatttgcaaggaagaaaccacaacttggaccagccctctgaaggcaaggagaagggaaggaggcctttgtttacccagaatcctcctgtctcccattactatggatgaaggtgtgtcccggggggagcagacaccctcgcatttccagttcacatcacatttccttgcacttgcccaggaagcaaaaccccatgcccagaagatcaagagatttcattcaagcttgggagtagagcggaagctccatgctgaaaagtcccttgagtggggatgagggccgggtaaacccaggactaacttggttaaagttaaatctcttgagagtttgacaaggacac

SEQ ID NO: 41152 - DNA, 1089 bp, Homo sapiens
gagtgggatgccagtgaggggaggatcataggacatgagttcgaggtcaagatcctgtgtctcactttactaattatgtcaccacgggcacatttcctcagagcagttaggtgaatgctgacagtcatttccatgccattgtggccttggggtcccacgtgaaatactaaaagttcctcctgtgtcaaaacggacagagcctcttctaaatgttagtctctcatcagatccccattcaacaagagggagatttgtgaggactgccatgatacctcttattgccatagccgcagtgttgagcagagctcctagcccattttccatagtttcagcagttgacaggtgctgatgagaatatattcataaacaggccaggcacagtggctcacgcctgtaatcccagcactttgggaggccgaggcaggcagataacgtggggtcaggagttgtgaccagcctgcccaacatgatgaaaccccgtctctacaaaaaatacaaaaattagccaggtgtgatggctcgcacatgtaatcccagctactgggaggctgaggcatgagaataacttgaacccaggaggaggaggttgcagtcagcagagatcaagccactccactctagcctgggaaacagagtgagactctgtctcagaaaaaaatgtatacatatatacacacacacatatattttatattatatatgtattgtatatttttatatatattatatataatatatactttatatataatatatatactttatatataatatatcatatatactttatatataatgtatatactttatatataatatataatttattatattatatactttatatataatatataatatattatatataaagtatataatataataaattatatattatatataaagtacctataatatattatattatattttatattttatattttataatatatattatatattatatattatatattttatattttacattttatatatattttatatattttatatattatacattttatatattatacattttatatatcttatacattttatttattatacattttatat

SEQ ID NO: 41153 - DNA, 1033 bp, Homo sapiens
taaccaaggacccctatggacatacttgatttatcacaacggctgcagagtatacattccattgtactgtaatttatttagctttgctctattagtagacattgagatcgcttactttttttccttctccaaatgttgggattaacagcagtgtacatgtatctttacagccttgccagtatttctaaagaacagatttccaggagtagattttccaagccataaaaataactgaattctaagatcactctgaacagactagtatgttttttggtggatctcagaaggaaaggaaggcattcactgtgaggacaccccttcagcagattcagaataagtcattttctgaatgttttatcagtgtcaccatcaatactctgaaatgcatgcatttgaggattctatggattcaagacagggttagcgctgtctcttttgtattgagagagagagagagagagagagagagagagagagagtgtgtgtgtgtgtgtgtgtgtgtgtgtgatgtgcatgcaatttggtaaagaaccgtatttattttcatctttatttctcctaaagattctaagccaagttatcactttgcctaagagctcttctagggaaataaattaaaaacacatccagaggcataataaataagaaacttcatcttttccagctatttcaggcttccaaagtacgctatttattctaaaaaactgtcctttattgaaatactaagcatattctgctgtctctgagatagacaaaattcctacttgtagttttaggaaaaaattttctactcattctacggtttctactcatttagttaaaaaatatttattaagcatttactaaataaattctaaatactgtaagggataagtataataccaaaaactaggtgtttaccctaaggaagttctcatcaccctaaggaatttatagtaggaataatatatagaaatataaaaaatatttcttcgtccttggcaggacagtgggagatataaaaatagtaaaagaaggctcatccatttcggga

SEQ ID NO: 41154 - DNA, 1036 bp, Homo sapiens
cagtatggccattttcacgatattgattcttcctacccatgagcatggaatgttcttccatttgtttgtctcctcttttatttccttgagcagtgggcaaaccttttattttacttttcaggaatcacttttaacatcttctttaacaatctcccttttgctcttaaagttataaacatcaaattatggctgagtggcattacacctggaataaacttcaaggcacactgaagaacttacaatcaggcagagaaggggcggatgtgggttgttatattagccaacttttgttttaagttagacttcttgaagacatgtaccataaactgacagcctccttctcagcaaagttgtgacatggttttgctttgtgtggagtatattgattttctttctcctgataaactttgcacatcatctagaggctttattgacatcttgagagaaaacaaacttgtaattgaacatggtgatagactcattaactttttaggtctgatctgtttgactaggtgtaacttaattgtaaaactggcattgttaatttaacaaagtgtacatttattatatagtcctccagtttgcatagttactttgtatcagaactgataaattcagttactgggtttatgtaatacccagtaagtcgaacacttcagtatgaaggctaagacacaataaagaagtcacaagataaacaggctttgccatggctattttaaaggctttttttatgtattaggtagagaatgttgtggttatgctttatctggcattttttggtttgtttttgtggagtttctgtttgtttttaaagacagggtcttgctatgttgcccttgctggtctcaaattcctgggctcaagcgatcctcctgcctcagcctcccaaatagctgggacaatgggtgtgttccaccctacccagctgacatgttttaacttaaagaaaattaaaactttattattaagattaataatgaaacctctgcatggataggaagacttaaaactagtagttgtgtcttagaaaaga

SEQ ID NO: 41155 - DNA, 1050 bp, Homo sapiens
gaccagtgttgtaggtggtgctgggaatataatagatataaaaggcaataaacaaaaatcaccttctcccctggctcacttttcttttctgttcccttttgtttctcaaactatgttttaaaaagttacgtgattcaagcattttaatttggtccaagtcttcctgctctatgacctctgggacagcttgcctggagggagacttggaggctaacatcctaccaaggtgtataagacaacaaggtgtacaagatgtataagacagccagagttggtttctgctgcttgcaaatgtaaccgattaatcaactttcaggctcaagtgtaattaagtttgaattaaactttctgtgaagtcccccttgtctctttagtagagcctcacagggtggggaaagacacctcggtaggctgtgtaatttccaagttatctaaaaactctcagaatttctccagctgtagcacaatatggttctatatttaagatgatccaaaatattagaccagtaattatcctttgatttaacttcaagtgcatgcagttagtatttctgaactaggagggacacaatgactttctgttgggaagattcaatttgtaaaacaccaattggattaggatgtgtttcctatgaatgggactagttgtgtgttaaatgaacaagaacaaagcacaagggaatgaatacctgactagtggtgaaaaataagaaacatgccttgaacaaggatatagaattgattagaagtctggtgtgaagccaaaatagatagtgatttggataaatgattatataaattcttgctaacaacccaagatgtgtgatacctttaaaatactgtgtttcatatcattggaagaattgtattttaacttcagagttaagatatatagaaatagaaatatgcaggttaagtgaaatcaaacgtttcaatacaaattcctttggttctgtgtgcactcagaaccaaaaagaagatatttatgggtgcatgagtttgtgtggttgaggggacggcaaggacttgggattcagctgacttttattt

SEQ ID NO: 41156 - DNA, 1046 bp, Homo sapiens
tcttctgtatcacagaaatgcgtacgttgagagcctttgtcctttgcctagtattttagaattaagattttatttatcatatgttattcattgggatgatgtcagttaattaaagtctagagaaatgtgggtcaatgttggtaattcattgacttttcaatccagctatttattttcatccagcccacagtagtgctagcctttcattgcttctttaatagagatccctctgtaatgataactgttttttgtttgtttggtaatgattttactcactactctttaagaaaaagggagacagaaaaagaagtcggtcttgcagacgcaagttccccaagtgtacctttagaatgctcaaaagctcagcatcatgaggaccctggagagatgggaacataccagatgtcgctttgcattttgttgtgtagagtgtctcagtgtttttgttttgatacccagccatgcgcttgacccatgctgctagtttgaaattctcaaaattgtgggcaggaagttaaaagcatattactctgaaaaagtatgtgtatatattttaaaacatgttacttattgcattacttccaaagtacatggttttgttgtatgtatactataaggagtgactactattatagtgagaacctgcttctacaaaaaatagaaaaaaaaaaattagctgggcgtggtagcatgtgcctgtaggcccaacaacttgggagaccgaggcaggtggatccattgagcctggaaagtcaagggtgcagtgagccatgatcatgccaccacattccagcctgagtgacagagcgagaccttatctaaaaaaaaaaaaaaaaaaaaaaaaaaaaatccctataatttattgaatgcttaccataaatcatgagctaagctcagactttacctaaatatttaattgttatgatatttgtatagtgctttttctaatttcacatatgcatatcattatggcaatgaggtacaccaagccagtattacttactttttatgtaaaagatattaaaagttttacaaagtctgtcagt

SEQ ID NO: 41157 - DNA, 1098 bp, Homo sapiens
ctcctctggctttctcaacacaagacacaacctcatctaccccaatctgtgcctaagtcctgattgctttaggtggcatatatgacctatttataccaacttcctggtattcttggtaaaaatggcaataaaaatgaatattgaattccaagctaaattcttttcaggcattatctggtttaattatttcataagaacactctcagttaagcattattagtaaccctattttagatgtgaggataataaggcttaaagagattaaggcatttgcccaagaaaagaggaacttatgagtgtggacttggaggttgaacctggactgtctaatctaaacatttaactcctttagcttttcagctttttttttttttaacacacagatataattacgatagatgtcacatactcatatgtccacagtgatcactcaggtgatgagaagttaggttagatgtgggcagtagggggcggtgaggacagtagtggaagggtgaggtggaattcatgttgaaaagtcgcttctgccagttgctggcaagaggtgagagggaaactcagtatggctgtattgttttctttttaatcaaaagaaatcatcaatctggaattttacatgggatttctcatttaataatatgctttgtgtgggaaaaaaatagaaaaacagaaagaaaaccaacctgtagcattggcctaaacataacaagccaaaatagagtgttgtggggactaaatggtacattaatagtaggtacttaccagagcctgacatgtcgtaatcctcaggaacagtaaggcttggctgagaggtgatgacctgtgagcctaagaaatgctcacagcctcttgatgcagagcagtagaggtaggggtggttttacttctctgaaatcagttagccagagccagtctgccccattagaatcctgacttcctttgctcttacctatgccaacttggtaatatctattcaatggtacaatagtatctatttccttttgtgcagattagctcatttacgaagagtacttagaacagtagccagaacataaatatttagaaatgtaaaattctttattgttattctattaatat

SEQ ID NO: 41158 - DNA, 1047 bp, Homo sapiens
aattagttgctatgactgtattcatttgtagtgctttacataggttggacagagaaatattgcatggaataagtaaacgtgaatttcactttggctttgccaccagcttccatttttgtaagttcatttctccaagaaatctaagtagattcacctttctttctctcccacccctccaattaaagtaaccattatgctagtttaatgggataagtagtacttttttcatcttttgtttggtaataaaatgtaatttggggaaatgaagttgtttcctggatacctcaagccaataaaatagtgacacaaggacgaatatttatacaacatccttggtttttcagtccagtgtccttatcttttgccttagttagtgatgttaaaatgctatgcctttttttctatattaaaaaaaaatctctgaattcgaaagggtcaatgagatatatctccatgagaggcaacatccaaatcatctgccaggtgatcccaccttgtcacaaaggattgtgactgacagcagaaagaaagcaggcatgagaaaacgagatgcagtcaagagctgacgatcacatcaaaaaggaaagaaaggtgaaacatttcgactacagtgaaatttgctgttaagctttttctatggagagaaaagctttcttcatagagaaaaccatatttcaagaattaccactcaaaaagcgtaggtggccacttgatgatagagaggccatgtgtactcattcttgatgacaagtacagggtgacctaattgggggctttcactccagcaaactgccccgattccactgaccccatgacgaggatgcttatttttccaaatagccacaagtcttgaggcaggataccttcagggttggctaactcagctcctaggtctgccatccttagtgctatgcaaaatgtagacgggctttgtaggggaaaaggggttatttctgttattataaagaggggagttcacctaaacatcatcagctaccctgttgttggttcctatccgtggatgctaatttctgccagtgatctctg

SEQ ID NO: 41159 - DNA, 1044 bp, Homo sapiens
aaaattcttacagcctggcagcaggtttaattgaatttatcaaaatgcttccaaataaaatatacttactcagcaacttgtaaggaatatgaaaaggagaaggaaggaaatctagtgactttgcttccatcctacctccagaaacatagttttcttcttggcacagaccgaatagacttgatcagaataattaaccatccttaccacctcttagcaaaggacagacttcttgacagctaaagctgctctgctacgattatcttgaatgtcaccaggtagaggtggggtctgggggattcaaatggtgggaaaatatggaaagcacttaaatgaggatttaaaaaatatattatttaggaaaataggacagaatgtgcaaacaaatactcaccctcgacaattttgtcattgttatggcagtggtataaatggaaaccaagggccattagcacaaatgtccacaagtgccaggccggtattttaaagcatgatactggaggtcaaatattggaaagtagtggagccactgagaactggagatggcatgcctgatttaaagacatcacaatttttaaatgattaaaattcagtgcactaaacaacagaattcagcgttttgcagtctttcaaatggagagatgcctattaacgagtgttgctgagtattacctatgaagatctcccattagtcagaatagtctgaataatatattctaaaaatacatttctttatttaaatttgaggttgtcttaactttttttgagacagtctcactctgtcaccaggctggagtgcagtggcgcaatttgggctcactgcatcctctgcctcccgggttcaagcgattcccttgcctcagcctcccaagtagctgggactacagatgggtgtcaccaggtccagctaatttttgtatttttagtacagacgggtttcatcatgttggccaggatggtcatgatctgttgaccttgtgacctacccgcttcaccctcccaaagtgctgggattacaggtgtgagccatgagcctggccttcttaa

SEQ ID NO: 41160 - DNA, 1042 bp, Homo sapiens
gtgtttgtgagtgcacggacagcacatccttcagggactgtgaaatctgagacaccacaagggtacaaagtagaaggcaaattggaaataatttttctccaagttgatagtgaccagggggtgggaaagttattcctgcattgctgcccccaacatacttataactcctttgaaatttgaggcttgaagtgtttatttcacaagtagctcatgctgtcgggcaaagtgcggttttgcgtaaaaatagggactcaaaacaaagattgattcatcagccatgatgaactttgttttgttaaatttaaacaaactggtccaaactcatacttttttgtgggatagattttctatctttcctcagtgcaggcagttgaaaaatacagagttttaatattctgtactgaatccctttctaatgttttactttgtgcacttagaagataagtattcttctgtgaaacaagctaaatgtatgctgcttcagcttttcatatgtcgctttggaggagggccagcagaagaattctagaatataatgccatccttgattgtttcatagagattaactgaatttttgtgcattggagtaaatttgaactttgtttaaggtttataccagtacatagattattaggttgttctttaagacactgccttatttagagtaggtgacatttacaatttaggaaaaaggaagaggaaggaaggaaggaaggaagggtgagctccttctccctggacccctgctcctttctccctgtgccaaattgttaactcctactcatctttaaagtttcaggagtggtggcttatcctggatctccacagacagacccagaccccaggcttcaggaacacctttacccccttcttagtatcacctatcagagttctaatttcagtttgcatgattattaaatatttgtctttcctgctagagtgtaaactccatgagggcaggaccctttcattgcttgactatggattcctaatgcccaagagcctggcaggggctagtgtcaatcaccagcactatttgtcc

SEQ ID NO: 41161 - DNA, 1958 bp, Homo sapiens
gagcaaatgcatagctttaaatgactgtggtggtctgtgttttagtttctttcccttgaagctttagggtgtttttttttttttttggtagtaaacatttgggtaaaccgaggacactgtaagttcacatcagcagatggctcttccctccttgtcagtacccggtttcctgaggtatgagctcccactctctacagcaccccccctatatctatcccttgcttctaataagacctcccactcctcccaccctcccctgcctctttctttccggctgctcactttgccttatatgttactgcaatttaagaaggtgacaccaagagcactcactttcttgtcttccatttcttgagaaaaagcgtcctttctcctcttagatgcaaaggcctccacttgtgctggacacccacctctgcctcatcaaagaggttgttcctttggctggtcccctctctcctttattgtcttctctcatttccccaatgcacattgtgttgtaagagcgtctgcctcttaaagaacttacctggaccccactcacttcacttcttgccccattttcccttcccatttaatctttcctcccctgagacagcatcaccaacagctttgggcaatgccaagcccagttagatgctcctctcgtttgttcttacgcagcctctctccagcactgggcactgtggaccaccccctctggttgaaactctgctttcgtggcttctgagacctggtttttctcctacatctacgattctttctgcttagcgttttgagccttttctggcttgaacctgaacaacttctgaaggttgaaggtcctcagagcttggccccacgtcctctctatcttctccttgagttatattcccatggctttagaaaccatctatatgctaatgactcccaaatttatatctccagctcagctctcctctcagcactcccgtctcatttatccaaattacttacctgacaactccacgcggatgtttctcaaacatctgaaatgtaatatgttcaaaactaaactcttgctttttttcatggaaacttatttctccatgaatcttctccatctcagtgaatgacaactcattccacataattgccgaagtaaaaagacttgatggattttgattctgcacctcccacactcccacatccaatccatccacagaaatggttgatatacctccagagtacatcttccattgccaccgcgataacctgccggcaccttgctttgtctctcgccacccgctcatacagtgttcaaggtactcttattaaaacgtagatcggtcccttcactttcctgctaaaaccccgttttttccccctacattgcacttagcactttaagtcactctcctggccagtatagccatgactggcctggtctctgtctttgctgtccgactcacacctatggccaccaacgcctagtcacctgattttccatttgtgcaacaagccggatttgtgtactttgttcacagtgttccctttgtttggaatgtgttttccttctctcttctcatggctgtgttctttttattcaagtttctatctaaatctcatctctgatttatttctctaaccattttttctaggtaggatacctagttattcttgaccacagtatcagttttatttcctccctagcattttgtattttatagtgaacactttgtatatttgcttctgtattacctgtgtcttccactagactccaagtctcatcatcacacactgactgctgagcacatagtagggattaataattgttaatgaatgaataacttgatctgtcaatctccaaaacaaatgaaatattcaaggattgtggaggacaagagaagaaatggtctgtttcttcaagtagctcacaaatacatgttacaacgatgaggccggagcttctgtatgaacttactctgccctcaacagaa

SEQ ID NO: 41162 - DNA, 1023 bp, Homo sapiens
gaggggaggggaggggaggggaggggaggggagaggagaggagaggaaaagaaaagagaaagaaaagaaagaaacccagaaaggtatttgttgaattggtcttgaaaagttaatttgaagaactttgacaatatttctgaaaatccatttataggatatgcccacaattcattgtatggctggcttttttcccttaatttagagagctggaaaatcatgatatacaagcataaattaatgaattttttgcttgtgattcaccttctgactcctggatctaggagcaaggggaattattctgattattttttcctggctggactttgaaataccctgtctctaatcagtagcagctatgtttaaattctttttaggggcaaggcaggaattctaatttttctgaatgtacagagtgttcctctcagcaattgactttgtttattgactaatgacagattttccctcatgttggttaagaataactttaaaggtatatcagataatgttttgtgtacagtgttctatgttctctgtccaggcatatgtaaatatagtcagtgttttttttttttttgttttttgttttttgttttttgttttttttttttgagacggagtctcactctgtcgcccaggctggagtgcagtgacgcaatctcagcttactgcaagctccgcctcctgggttcacaccattctcctgcctcagcctccccagtagctgggaccacaggcatctgccaccacgcccggctaattttttgtatttttagtagagagggggtttcaccgtgttagccaggatggtcttgatctcctgaccttgtgatccgctcgcctcagcctcccaaagtgctgggattacaggcgtgagccaccgcgcccagctattttcagtcttagccagtaaactgcatttaaaactccaagtacttcagtaagacagcagagatttccaaaggtttcagaggatagtggtgggttatatttttgtatggcttttctgagggttgttttattttc

SEQ ID NO: 41163 - DNA, 1029 bp, Homo sapiens
tttgccaacctctggcttaggggaaaagctgaagagaaagcgagtatgtatttcctcaacttttttggtagttaaggcctgaggactatggctccagctgatgtcatttagtagcaaaatatgtaggaattcgcagactgttgttttttagttgttacctgccacttttagaggtatctctgcaaccttaataattcacaactgagaaatctgtcactcaacagtaatatactcagatagggaactcttccctgagttatacacaattcattcataagaaacaccccacgaaccaaaagaaaaaatcctttgttttgtgtgaaaactaaaagttggcataatagcaatgcatcctggagcttctggggtttgggagttggaccaaccctgtgcggtccttgtgatgggtaatgtcagccaagaaccccaggcggagaggatgtgacacacttagtatggttgccgtcctgcagcctcttactttctgcatcgccaagccaagaacaccaatttagctgcgaactttgttcccccattgctttctaaaaggccactctctgcttttgagacccattggtgctttgaggcttatattttaattttgaaaagagcttacctgattttcttatgattaaatacattttagtttgtttgcatgtgaaaatgttgtagaagacaggtaaaggaatagacatgggttttcactttctagcccacttctatgatagctcaggaccaacaacttctctaacccagatacctacaatggactcttaatgtgtctttgtgtctttttgttcctgctttgtcccacaccgctctgtgtccccactgcagtgagaatgatgattccaaatcacacatttgggctgccccaactcctcagtggctctttggagccttcacaacaaactcttaattctccaaaaccacatgcaagacacagtgttctggcttcacccacctctgtggcctcccctcattaccctcaccttcaatgctgctctccactcctactgacttgatgcc

SEQ ID NO: 41164 - DNA, 1030 bp, Homo sapiens
tcattttgcttgaggcactatttcaagagtctaaaagagtttcaccttcattttgaagtttgttttgtaaagttattatagtcatttatgtggcagtaaatcaatccttattggtatactaaaatctaggtattatagatgctagtgtcactatgcagagaatcctgtactttttaagaagttggagtcatccagctgttccttactctgatgccctgagagagtatggctctcttactgcgaatgcatttcggacacaatgtgttgctcgagtattggtttttctctacacatgtaatatccccaaagcctaaaacaagatgtttatctttttgatagacaagcaattaacttttgggggggagtttcaaggcagtaaagcccatctgttaggacactggaaataaataggaatttctgacagaagaacattatggcctttcatttgttatgctgtagctaaagctctgtcagcatttttattataaacctaggggattatcagtctgcagtaaaactctttttggactgaggcttatttagattcagagcgtactcacgaagaaaacctttactttcctgaacacgggatagatttgtttctgcttgcctttctaaaggagaaatgtgtctgggatttccatataattgtataaatttataaaatatttgatttattataaacagagtcattggtgatcacagtacattatttcctataaaggcagtgtagaaactggttggcagcatagttaccaagtagcgcttaaaatagttgtttatttctaagtcatacagtagtaggattttggcagttgccagatagctcaccattatccatgcattgataagattgaatacacacttcataagaccctttccttaaaatattgaaatttgagtggctgatcctgaatatcattcctattctgaaatgtgctccaaacagttttaaaaaatgacttcagtttcagacagaaagaggcatgtaatagtaatttatttttattcacatgaaagtataaagaca

SEQ ID NO: 41165 - DNA, 1050 bp, Homo sapiens
tctcttgttttcctgttctttcttttactgctatatcctatacagtggcatcttagactcttgacctggcctcaactacaacctgtcctgtgatgactcttgacatctctcctagtattcaaaactgcccactgatcatctctagttgctccattgttattggttaatatgcccaaacagttccttaagttataaattcttaaaagttattgcagattcttgtgtctctccacctatttgtttcgccacaccattgtgtatggtgataatttcttcacctgcgttcaccctgcctaactgccccattttacccttcatcatctctcacctcagtcattatagttgcttattaactaatctcttggtcaccagtctccctcgcctccaactccagttaccttccttaaataaagaaaaagaaattgatcctaccagtctcctgtttacaagccactgataactcctcattacctataaaataaactccaaagtaggcagcgtagagctcttcacaatctggggaaataatttctatacaaaatcatttcctatgacaaacattgagttgatagtaaatatttttgaataacctcttaaaacatcttccaggtcattgaatgccctctattctgggtgaagccatcacagactgtttcctgaatgtgctttcttttcacctctgcactattatgtatggtagattcttcataaggaaggaccttgcatccttcaagacagagcccaagtatcaagccctcttagaaattgtccatcattttcagggcatagttagttactccctccttgaagttcagtttgagatgataggattatgtggttgcatctcagtctccagcactgcattgaattctgtagaacagagactttgccttgtttatcctgatgttggattccctccaggacatactacgtttaaaacattggtaattatctgctatttgaagcttcttcagcttgttcaaaatttgaatggtcagttactttcaagttttcattttaaaatgaatattttattgaatataatgcagt

SEQ ID NO: 41166 - DNA, 1032 bp, Homo sapiens
ttaattcatttaggattatggcctctagcttcatccatgttgctgcaaaggacatgatttcattctttcttatggctatgtagtattccatggtgtatatgtaccacattttctttatccagtctactattgatggacacctgagtttattccatgtctttgctattgtgaatagtgtagcgatgaacaggtgagtgcatgtgtctttttggtagaatgatttgttttcctgtgagtatatacccagtaatgggattgttgggttaaatgatagctctgttttaagttctttgagaaatctccagactgctttccacagtggctggactaatttacattcccaccaacagtgtgtaagtgtataagcgtttccttttgtttgcagccttgccacatcttttttttttttttttactttttaataatagccattctgactggtataagatggtatcttattgtggttttgatttgcatttatctgttgattaactggctgtatgcagaagactgaacctggatgcctttcaccctatataaaaaaactaaaaatggaccaaagattaaatgtaaaacctcaaactatcataattctgaaagacaacttaggaaatactctagtcaacattggctctgggaaaaattttttggctaagtccccaaaagcaattgcaacaagaacaaaaataaacaagtgggactgaattaaactactgagcttgcacagcaaaagaaattatcaacagactaaagagacaacctacagaatggcagaggatatttacaaactatgcatttgacaaaggcctaatatccagaatttatagggaatctaacaaatcaagaagcaaaacacaataaaaaaaatttaaaaatgggcaaaggacatgaacaggcacttcacaaaagaatacatgcaagctaccaacaaacctatgaaaaaatgctcagcatcactaaaaatcaattcttaaagcacccttcttataaggaattccaggcagaacgcagagttagtattgcagtttttag

SEQ ID NO: 41167 - DNA, 1050 bp, Homo sapiens
ttgtgtcaagtgacagatctgcctgtgtacaattattggtggaatcatcagaggctgttaatcatcaccaaattgttttccttggaactgttttttatatgattaccactgagaatcaacaaactcttaaatcataatgacagttgaaagacctaaatgtcaaccaaattaagaaataatttcttagagtaatgaaaattaataatattattataataaaataagaaaacttaataacaagatgaaataatgttaacaaagctacgacataaggtctactcttggagaatatttgaatttcagggtaaaaatggcatcagaaacactaacagtctcatataaaatcaagcaaagtcaaatttgaaccttttgagtatgtgggatcctgccatataatcacattggtgatttcaccctaaaagccaaacatttcattgcactgatttgattttaaagacttctaattttctggtaaaatacccagaatgagaaagaggggaagggaacagagactaaagatagaggaaatttattattttggaaattgaatgcctagctcagaatgcagttgattacccttctcaagacccatgtctatgttcattttccacatgtgaaaaatatataaaaggctgttaccccgtgagctgttgtgtgtgaaacttgactcttgtgagcacccaggactgtcctgcatgaaaggaagaaatcaagtcaagtaaaaagatactttgttctttggtataggcagaattaagaattaaactcattatttaaatacttgaggtaagatacagtatttgaacttctcaaaagtgaaattagggaattttagagattaaaaggaacataaatgtttaatattacaggtgagaaaactggagtctaagaatgtttaattaaataaagatatgtctcccagcactttgggaggccggggccgatggatcatgaggtcaagagatcgagaccatgctggccaacatggtgaaaccccgtctctactaaaaatagaaaaattagctggccatggtggcgtgtgcctttagt

SEQ ID NO: 41168 - DNA, 1026 bp, Homo sapiens
aaagattagataggcatttctaaataattggcaagtccctactttggggctgacggttttaagatcaatgaacagaccatgtggacagcaatcactcatcccatctctttactttgttgaatgtcttaggtaccgaatcttgagggttactagtgatagaaggaccaatgagttctacctccaggagcctcctactcttgtaggaaggacaaacaagtagataaataattagaatgcaaattgaacactgtctcagaggtctgcataaatagctatggaatcatagggaaggaagcagttatccaagggggtcatagaagactctacgagaaaatagtgtgtgttttttattttgaaggatcagttcacattttctacatgggaaggggagaagatgcagaggaaattgcatacaaagacacagtgtgatggtgaaacagatttagtgggcagaactagagaacactgcataaggaaaggtgagaagtgagcctcttgcatgctttcataaggagctggactgaatcatttagcaagaaccagctaattgtgattgaaacaaggggtaaaatacttaggcttatttctgagaaagtagtaaagtagaggacatgctttgaagcttaaaaaaatgagggtgacttctttataataaaatgattatactatacatttaaaataatttttgaattttgagttatttttgttgaaggaagctattttgtattgtgtgtgagagaaatctgtgttctttcaacattctagtagtgagaacaggaaaataatggatgaaatggctaggataggaggattatcataaaatagagtgtattttgtatgcctggcataagtttcacagggtttttaatattgttcttgatgtttcataatgatatgacaaataaattttgtttagatgaaaatgttttctttgctgataaatatactctgtccaagcagtagcaatgcatttgggtgtcctcacttttatctaataaaactttcatggttctatcattttacgaa

SEQ ID NO: 41169 - DNA, 1029 bp, Homo sapiens
accatggcacacatatacctatgtaccagaacgtgtatacctgcatgttctgcacacatatccccccaccttttttttttagaggaaataaaatattcaaaaattcaaaaaataaaatgaaaaaaaaagtattgtggggcttcaccagtatagcaaataactgaattcagctacattctccccatccaaagtctgggcttttctttttagtttcatgtaacttgggagttgggggtaggtttcagatagaagttgtttttggttttgtttcaattctatcttctcttttttataagtgaggaaactgaagcccacttaatccccaatctaacttgttgctttactcctcttgtcgtctcttttcctggaagtacacacttattttctgtctacaaggaaccagtgcaagttctaatctaatcatagtaatttttaacacctgtcttaaaaaacattttaaaacaatatttaaaatgctcttcgttttgtgattgtttcctctggacatgcagcagtttcaagatggcttttactaaactttacagtgatgtctgcaactaacccaactcatagggaaatttcctttttttttttttcctgttcagtttcttcctgggtagcacaaaatctccccttacgtgctcatccccacatacagtggtcaggttatcacctccttgcttagaagagtgtcagtctctgtggccttgatattaactcttccctgccacacttttctgtgaaatgagatagtaatggtgcctgcctcacagggttattgtgagcattggaagaattaatccatgtgaactatttttgagcaatccctgatatataaaaggctttctgctaagaattagctgataaggaatgtaggaccatcggctggtgggttgtgcacaggcaatgggttgatgttttgtagggtggaggcatatttgggagcagctgggtgtcgggttctactctgctcccttgttctcccagtgcaagatgcttccccctgccttcatcttgtcaaggctcttg

SEQ ID NO: 41170 - DNA, 1053 bp, Homo sapiens
gatacagaggcaggacaaagacaggattgcagatgaccattgccaagcaacccagatgttcgttttctaggtttgcctgggcacaggcttatcctataaccttctctgtggtgcccaggcagctgtagttcaggcctactcaggctttttatgaccttcgttgtactacttagataaaacagaatacttgaaatcactagttacagagaacaagagtctataaactcattctgtaaaacaaaggaaaatttgtttttcttctccctgtgttgagggagtgctgagagagtctccagagcatattagataatattatcaagacttttcctgggtctaggctgtgcctgttgctgcttctggaacaagttagcctaaaacaggaaaacttatttctctttctttttaattttattgttctttaatttcccgcctcaaccttactgcgaataatattctgccactttatttaaatcctggcttagtttaaggagaaacgtaaagatgggtttcctggtagaataggagtaaacaggactgactgtgacctcactgctaatgacatgtaccttccttttactttctcaaaaccgaagattcccttattggcatgaggactgtttcaaaagtacttacatttcccacctgcattgtgattgatgtgttgaatgccctgacccaggcagctacagaaacataatttaattgaagtcggttaaaaattgtgcctttgtggaaagtgtggagaaggacttcaagatgatataaagcagaatagaaaagcttaaaagaattcaatttagaaaaatgtaatttttggtacctctattaaaaatatattttgacttttttaaaaatgagcaattctttgtgtttaaaatggaatgttagtggggatatttgtggtatgttctaaatgttctgtagaactggatttaggtatttgagtaacagcagatattagagtgcatggttatatatacaacaatgttgtcagtattgaaatacacattcagtgtcttagacttttaagaagatttttgattgacaaaaacc

SEQ ID NO: 41171 - DNA, 1028 bp, Homo sapiens
gggctctgccctcctacccctcccccacaaagatgtcccctccgggccattgttcccttgcacttgtcttccgtgttcctccctgatagctctgtgcctctagcgtacagcacgatgtgggtctctgttgttgaatttaaattggcccagtgaggcaatacagcacaatggggaaaagctgtgtctcgactgggtgccatcgggcaggcagcttgagctcagccgtcctcagtcttctcagctgcaaaatggggatgctaattgtgaaagggaaattaaaaatcgggaccacaattcactctgccaaaagaaaaattaagctgaaagctgagtcatgcaagatgcggcctttccttttgttcctaagcagagagctacagataaaagcttcaacatctccacaggtagcttctcagtgttcaccttatgttacataaattgccaatttactgagcacgatttactgagtagagaggaatacgtaacgacgattcccctacctgctccttttctcttttcccctttaaatattgaagccctcaaaatcaagattggagaaaggcacacaccacagattgtttctgtgattccatgtttatttcttctgggcatgtccttaaccttgggaaaataaacttctaaattgattgagacctgtctccaaaactttttggtttacataataatgcccattttatcatgctaccatgaggatgacattgggcaatgataacccccgacctatgcctggaatacagtgattgctcaataaaaactggttcttattataattcttattaatgtcttttttaaaaaatcaatctgctcactgatttttattctttcttaaaaaaatagactacctttagactgcctcctttcatcatgcacaatgtgaggcattgggggtacaacgggaagtaattgtctctgccttccaggaattctgcagagtggtaaagagggcaagtaccaaaaattacagagcaatgagctaggtcttgcaatgggactatccttggtctcct

SEQ ID NO: 41172 - DNA, 1028 bp, Homo sapiens
ggcggcgggcgggcgtggggggtccgggccacgcgggcgacgcgcctctagggaagcgatcttgttgcaccttcccgttattctgaaagcaaatcgtagccagacccgagcgcagcggcttagcaaataataaggggagcgtcagtcgtgctcgaaatgcttccttcgcgatggcgtcagtgttccgtgagggaatgaagccgcagtaggaaataaagaggctgtgcgcgtagtctgaaaagcagaagtcaacatttttacagatgaagaaagaatacggaggcaagaggtctttctctgcagtttggtggatttccaacatttagacttgtttggaagaatttcctcagctgcaccaatgaagtccttgatctatagaagtcggcagtccctaaatctacgtctgcattttgttgcaaatcctttataacattccattaaaataatgcagagttatttaatatccagttggccatcgtgagagtaattcgcggctgagattttgttaatcattctgtcttctgacttaacagtgaacgtaggtgattttttttgtaaaatgttgcttcacatgaattgtgagaatcacctctaagtttgaattgtactgaaggcactataagaatttcaaatgaacgctgagtagccagtagccttctggccttttcgtttaacaagcacagagttcgtttttaaaattaagttactttgacagaggaaatgtaatagccttggtagacaacattaaaaatgtaactgtcagatgttttaaagtctccaacagccgtatctgttttagagccatagaatatttacttactgaattgcctgtttaaagatgaactttctaaatgcagggaatagtaacttgcaaaaaagctatggtctctaagtaatgaaggctgtttcagtacctagaaaaatcaaaatcaaggttttgatgctgctagtgtaaaagatgcaatccccttcttaatggcctgcttatttattaagctcctaggcactatgctgaatgccctacatgc

SEQ ID NO: 41173 - DNA, 1025 bp, Homo sapiens
atttgaaaacactccaggccttgtttgcctagaaaacaccaagtttacattgaattaacatgttgtgtttgcttcacccattttctagcagacagcacaagacaacataaaatgttaaatgttatgattgactaactctaagtccattctgtagttttaaagattcagatactgtgtagggaacccgtggtgccgcagtgatggcttcaggttactgagccagcatccctgagtgccaacccgcaggcttccccgggagcttccgtggccctcggagtctttggggcaacaacgcaaatgcacactcactaaaagcacaccctcctgaaaagagaagtgctgggcaaaacacagtggtgcatgtgtgtttatgtgtacgtgttgggattctttctgctataggaaagaacacattcagggctaaaacctcacatactgtgtacacagtgataagtatactcatggtcttatctttaaaactctgggtaaagaaattatgtttttattttgactatctctgtttgccatcaaatgagtaggcaaatgataaatatgtaagaccaaaaagttaaattttatccctgatcctctctaaccttaaacatattagagttaaatgtgagaggcttaaacatatgagtgtccacagccttgtgaattagaaggaaaaggaattcttctccaataccaaactcttactaatggaatgccctccggatgcatagcactatacataatggtagacaggatttttgttaaatattcatttcctgtgaaatattcatttcctgtgctaaaaataaatttcatgagctaatatatccataaagttatttagttattcaagttgcagattggcactctgtaaagctgatctgaatttgaatcctcatcttaactgtgcatacctttgatttttccatcacctgtaatgcaacagtgttgagagtaaaacttctccatcacatgtatttcctaatgcaagaagaatcctcaaaagcaacacttaccaaacaaacatttat

SEQ ID NO: 41174 - DNA, 1033 bp, Homo sapiens
cccaaaacctttcattagtgtgccagatgtcattgactgactatatagtttcaaataactaaaaatgtcataagattagagcttgtgcttgttattggtggtttttatttgtattttttccctagttggaagggcacaatatcttctccactctgagctccagtgaatatgagcaggtgcttgagatcatccgcaaagccatcattgccacagaccttgctttatactttggaaacaggaagcagttggaagagatgtaccagaccggatcactaaaccttaataatcaatcacataggtaaaaataatttttaaaagcttagaagcccagaaagtgttatctggaataaattgatacttaagaaatgtaatgtggcgtaagcttatatttgaaagaaggaatgtaaaaaatttacatgtttttcactttatgtacatcttgtttatatttactttagatgctttgttgtttgacaagattgctggcaatgtctagtgaggataatcaaaatacagattggaagttacactaatcacacagggattggcaactttcaaaggaaaggctggaatgatgtttctccaagaggtcccttcttgcattgatcagcattcagggtctggccattggcctcagaaactcaagagcaaatgaaaatggattctatttccagaatccagtcctattaagcaagctaatgtgattggtgtagaaactggactccccttttattgatctgtaattgtattaggcagtcacaagggtcagaatattggcatcccatggggtagaaagccaagtagcaatgaaaagtttatttggtgaacatggaattacaacaaggaggattagataaattagatatcctaatggaatcaggctaaattagtctgatgcccttttgtttttgaggatgggtgtcttgcctagtggattcagaaataggtcaggtatgttctttatgaacctgttcacccatctgtatattagatcaaagttcattggctaacctgccatctccccttgacaatt

SEQ ID NO: 41175 - DNA, 1067 bp, Homo sapiens
cattattgctggaatattaaatcaatttattctgtttactcataagatatgaatgattattttgaacattgaaactatactttttctttgccttttttaatagcccattttgactttaaaaatagtcaaaattttagaaaacagaccaattaggaatgattattctcattattgagaacattttcttaatgttccactaatcttaaattatctgttgcttttgaaatgtgatcatatttcagaaagttatctatttataccaacattttgggatcccgtgacttcttactactctttatagaagcactatttctgttacttagctagagagttcttccaattcgtctgcactagatacaatttgctgttgtatattacaattatagcaaaattattgtacttatattcaacactacctgtactggtaatctaaaatatatgacaaagtggctagtttaaatccgtccttttctacagctgtgttctgaatagaaaaggtatttggctatcaaattctcttttaggcatatatttgttttttcatctgtctttccttttttaactctgactgtggaagttgtactggtagattttatcatcatcatcatcatcatcaatcatcactattataatagtaatcgttttatcatgtattgggtacttacaatgaaccagaaacttaaatattttgtacatattttaatacagtttatttttattatatccccatgagataggtattaatttattttcattttacagatgagaataatatgcatcaaggaggttaagtaatctatttgtcacataactagtaagtggcagaatgacattaaaagatagaattatttggctccaaaatcggtgctcttaattacagtactataatgctccctaatatgtggtttcatgtactaggtaattaactttcaaaatcagtattctatgtattgtaaaggcattgccatcatgaatgtttgatgcgcttagttgcatcgttgacatttttttccaaaagcggtggttccctaatcccccagcagtggacagaatactaacagccttta

SEQ ID NO: 41176 - DNA, 1063 bp, Homo sapiens
taactggccataggcaagttgcgaagcagaaaagcttttgccacttggtgcagtttttctctgttgaataggccaggcctcctctaaatgccaggatttttttttctcccctcagtttcccaaaggcttctcttagtgcctcctcatttaactgtccacgtgattggtagtgctgcctgctcagtcctttttaaaacccagcaaaactgacctgtccaggtctcatgtcctcaggcctacgaaggtaaatgatgaacttactctattgtgggtgctcttcgaattatcttctgggtagaagtgaaaagtgtttcagatatggagctatttgagtcattttcaagccatccccagtaggtagctgatgttgagcttgctcatggttcagtttggtcgtgaaagcaacatgtagtcatcattcctatcatttgcttgacaccagctctttcctttttaaatgacatatgtttacatagatacatacataccggcataaaacaagcatacatagaaattttttttttgagacagagtctcgctgtgtcgcccaggctggagtgcagtggcgcgatctgggctcactgcacgccccgcctcctggattcacgccattctcctgcctcagcctcccaagtagctggaactacaggagcccaccaccatgcccggctaatttttttttttgtattttttttttttttagtagagctggggtttcattgtgttagccagaatggtctcaatctcctgaccttgtgatccgcccgcctcagcctcccaaagtgctgggattacaggcgtgagccaccgcgcctggctgcatacatagaaatttaagcaggataaaaggcttgtgtgtatatgtatgtgtacatatatttacacatatatgtaaaacatgcttttttgtaaatggatgaacattctaaaactttatgacagctaatgtctactttgacctcattcatcattggagactatttgtttgtttaagaagaataaacgccagaaacaacatcaggatgacttcacttaaaaataattaggagtcactgaattagca

SEQ ID NO: 41177 - DNA, 1050 bp, Homo sapiens
atggaccttcccttcacatccgggagcctcaagccacaccctgcgatgggtctgttatttctttagtcggctgcagcactgctctatgctatgaaataaacagcacagcatttcctttttattgatttataatagttgtacatattttgggagtatgtagaatagttggatacctgtgactgtggtaatcatatcggtgtgactgaggtatctgtcacctcagatatttatattttctttgttttgagaccattatgaatcttctagctattttgaaatacacaataaattattaagtgtaattttcctagtgtactatcaaacaatagaacatattccttttatccaactgtatttttgtaccccttaaccaacattatacacaatggaacattattcagccgtaaaaaggaatgaaatcgcgtaacttgcagcagcatggatgaaactgaaggtcgttaggttaaataaaattatccaggcacaaaaaggcaaatatcacacgtctgactcacttatgggagctaaaaagtagatctcatgacagtgtagagtagaagggtggttacaggtctcttattcagtgttccccgtatgtatgtggagtatgtatttgattttaggacttgcttagagaatcaatttaatttgactaatgatattatttaatgctattgacaaacatatagaaaatatgtagtttaataagtattttgtcaattcgattttaaatgtaaattaaataggggaaaagagtgcacaatttataatagtagaacaattattatatctcaagtgttcccaaagtcaaactacttgtatcttaaagaataccagttggtgtgcagtaaatgtttaacagcaacctctctaaaaacagaagggtcctgatttgtgtgtttccctgtttctctggcgtacattccctcaatatggacaatttcaagctacccatgcgccataatgaatgcagagttgggaagaaatgtgcataattggctcttgcaagccagttcggtgcaccactgccacaacagaaaagtagactct

SEQ ID NO: 41178 - DNA, 1060 bp, Homo sapiens
ctttgttaattaaggaagttttgaaatgagtgcctgtgtgatgatggtatagtaatgagaaaaatataagtatgaaaatatttttgcaaaggaaaaatactgatattagatataaaaaacagacaatccttgtattttgattattttaaaatttaacaaattaggtaaaaatactagaagttgtacattgcgttatttctgtatagtgcttgaattgcaaacaccataaaattcagttctgtataatatctcaagctcacgtgtaacctgtgagtttggttatatgtgtggtagaaagcacgatggtagagaccagcattctagtgttccttgtgccactgatattttatgaatgttggcaaattactgaacccatataggccttcgttcacacctcattgagaatccactaaaaaaatttatgttgaagcgtcttgtaaattataaggtgcttcgcaaatagaagggattattattgttcagagcaggaggatactagttgattgtttgatctcagtttgtgagttaatattttaaggttctcaggtgattactgtgtaatggttttctgctttatttttacgtacttcataaggtgatttagaatatgtaaacgtaaaagtaatacacgcatttaagtaaaacagtgcttttaattcaatattattaacaatggaatatttttgaattattctacagagtccatattttaattagcatgtccttctcttttacatatgcagattttcaattgagaaaggaattgctggccaagtagcaagaacaggggaagtcctgaacattccagatgcctatgcagacccacgctttaacaggtaagaaatagctgatgtcgacactccattgatttcttctgtgatgtcccactcagctgaaacctcttccgtggagcctgagttctccacgtcccaattcagttctttcttccttagttttcttctctgaaccaactctgctatcaatagtcagtatattcagatatttataaaatgatggattctaatccactaatgtatcatgatatctagatacaggagtt

SEQ ID NO: 41179 - DNA, 1042 bp, Homo sapiens
taagaatgcctttaagtggttttccgccctgggcgggccaggtattccttgccctcattccggtaaacccacaacctcccagtgtgggctttatggccatgaacatgtcacagtgctgctgcagagattttgtttatggccagttttggggccagtttatggccagatttttggggggggcttattcccaacatgtcccccttctttgatttgcaaatcgataaaagcaaaggcagctttgtgacggtcagctacttctcgcaggagtcaggatccacatctgcagactatacaaacaacacagatttatgaaagcacaatcatcattgaaattacaaagcttccaagtgtttttatccatattaatgggttactagctgctaatttgtctgcagctcctttaagcactccagttccttgcattaagctcaggcgtgcctgggatgctttaaatatttgttcttttaattttgctgtatccaaaaaccagtttgtagattgtccttctagaagcttttttattctttcccaaattttgatcttactaagagctattaatagtttccacaaatccttatgtttagctcctacaatgagccatatcatttgaggttgaggtgccactataccaccatggttccagataataggaacttttgctgtattttttgccatttctaccgtctgactgttttgttcagatcagctgaacgtagtgtggctgtggctcgcagactgagaggtgcaattcaagctaaacatccccttaggggaccaattagtaatgattccataggaatcgttgtgcagcacctctgcctgttctgcaatgcaatcttactaaacaagtatgttcattttttctaactgggtccaatcctgtttacaaaaaggtttttgagggtggtatgcctcaattatagtagcagatttattatggtaaatactgagatcagaaagcatgtgtaactgtgttatagagtgattgcatctaggcattattgccagccaagattgataaatatgcccaataagtataatt

SEQ ID NO: 41180 - DNA, 1025 bp, Homo sapiens
taatgaaaaagttttgaaatacagtgagaattacaaaatgtgacatagagacatgaagtgaacacaggctgttggaaaagtggcgctgatggaattttttgatgcagggttgccacgcaccttccatttgtaaaacatgcaatatctacaaagagcagtaaagcaaagcacaatcaaaatgacgtatgcctgtgctgacattcagaaatacatctgttgggtaaagtacttaaactacatcttttctttcccttaattttctcattattcagctgcccttgaatgcttaatccttttctactagcaatcttaaacttaaaaaatgtttgctgtatcagtcagtgatttaatactattttatctcaaggatcccttttcgctaaacttgttagtgtgaaaagcccttttcatcttgtgaacctttttgtcctaaatgagattcattaatttataaaaagccctttgaaaattataatgttcttttggaatattagtttttattatttctgttttattgaactgagctaatgatgtgttttcaaattagtgccttgttgatttgcagaatccctgcctgtgtgctttctacttcgacatgaattcattgtccagggacagtcctgataatcagccatgatcgttctgtcctcatgccctgcttgttcctctgctaccctctcttttagtacttcctcctgcagtttctgtcatctgtgctagcattctttaagatgcattctctaaacttcggaactatgctactcctaaatcatacctgatatggtttggctttgtgtccccacccaaatctcaccttgaattgtaataatccccatgtgtcaagcacttgaccagatggagataattgaatcatgggggcgatttccccctattctcatgatagtgagtgagttttcacaagatttgatggctttataaggggcttccccctttgctcaggactcattctctctcctgccgctctgtgacgtggtaccttccactatgattgtaagtttcctgag

SEQ ID NO: 41181 - DNA, 2072 bp, Homo sapiens
ttgtgatcataattatgctctacaactaatcagtcactgaatatagaatttagaattttcagagtttctgtatgaatctgttcattaccttaattgagtgaatgacttgaaaattaagagtacctgagccttgtggaaattgttaaaccactgaccagataattattatacaagcacatattattctgtgaatagaattttcttaaagtagattgcagtaatgttagagaagacactcccagtgtatggttgtaaaagccatcatttctttagtgattatttagttattttatttttttctattaaatatgagctttcttggctgtttggccacagtgttttcctttgcttcaaaatacaggcttgatgagatttctttacatggcaggtgttctacattttttttctctccacttaattgtcagctgtaaccttgcctccatcactcttaattatagtggcctctatatttttgagaagacggaggttatgtgatataagcccttgttgttattctgtatatcaaaatgtctttccatggactctcttcttatttctgtatttggggttgagtatcacactggaatttaccttctgaagacgacttccaacacctgggcttggatcctgttcctatcagctttgtctagagctacattaattcagttaaaatcatttctacttgcattttcaagagatcaggactatgtctctgagaagtattgaaaccagtctaatccagtcagttatatcagttgggaatgtttatttctagtgtcttcttcacatgcatatatttacttggtaataattacaatgcacatattattttgatttctgttttttactatgctataagcatttcatgattttatgcagtctaaaattatctttagtgactaaaaatgccccattgagtttctgtgtgataattttttactttttcattctattggtagatatttagattgttttaaaattttcatagactggttatatttatgtatatagcagttttattcttgtgaaatatttcctaaggaacaatgctaggatccagggttactaggtcaaaggacatgacttatttatgacacttaacacacactgttaagttggtttaactaaattactgttacagttgaaggtttcattgtagtcccattaaaataacaattatataacttttcacgtgtaaatggtatgacactcttttaatgtttttatttaaagcaaatacacatacttctgtatgttaactaattgtatttccttttaccagaatgcatctctatttcttctatgtgttatacattcagaagaacttctctggtataatgtaaatgacacttagatttgaattcctaatttgacattctaatctgaaagaccttttgaaaaacggctttttaaacccaaatgtaaaatggggataaagtctaccaaacctgagagatatagccagaataagattaaaatttatgtccttacaattatttattagaaaacccaaaacaaatttaaaaagcacaggggatgaattaatgaaatatgagaagaaattaatggagcaaaatttaaaatatagacttgattaataatacaaaagatagctctttaaatagatcaattccataaaatagattgtctttggcaatctatttcagaaaaaagaaaatataggcattaggaatgagaaagggaatattaatatggacaccagggagattattaataattaaagagagaatagcaaatactatatactaatgtaattgcaaatttatatgaaatggccaatgttgaggaaattacaaattatcaaaattgaagaagagttaagaaacctgaatatactgctatagtgaaaaaactgaaaaaattaggaaaagaccacctaaaatgacctgaggcccaaaagcttttgctgagtaattccaccaaacattaaagaggagaaaatttctacattatatgaagtgtgctaggaaaataactcatctcaagttatttaaagctaggaaaataactcatctcaaaagggagtattatttttgacacaaaaattagtg

SEQ ID NO: 41182 - DNA, 1063 bp, Homo sapiens
tggcaggtgagtactgaaagcatttagtatactggttatgctataaaattataagtgattaattacatttggaaaaaagtgtcttagttttttctgtattacacagataaagatcttaagtgtggatgaaatattgaaaataatcagtttgaatggaacttaatgcaaccttagagatcagtttttattgtaagacataaattgaaaaacttaatagaatcacatatgcagatatattcctttatttttgatcatctgaagaaagaaatctctaaaatgacctgggccagcgctgggggttgggggtgtggagataggggagggaagaattccttgtgtccatagcaatgtaggattctcttgaggtctctgtgagtctcagggtttcactgggtgccttcgctattaatgtcacatttgtggaactcacaattgaagagttccttggtctggacgcttaaaaggtaccaggaagtgacagaggggtggacctagaattttggcagctgctaggagcagcagaaaatgctgaaaagtgatgcttgaggataagatggggactctgaaaagtgaactttggcagagtcataaaatattacagtgttgatattggcaaagctgccatgtgttcagacagtgtcattgacaataccacatactgttttataaggccattagaaaaaatgatgaaactttatgtagtgatttttcttcgctattattcataagattctcttacattatgccaaatttggagaaaagcgcatctctgagaaatactaaaggtatgagctgataacctagaaatggtatcagttgccaagatctctataacgtttttttgaaaaaacgtaccccgtatcttgatcaatacttatttgactaatactcagagtttccttatgaaatagtatgccactattttcaataaagattcagatttagaaattcctcgggcaaccttttggtaggtggtgactggccagagggcttctgctctaacacatccctgacagaaggcatgctctttagttccactaaaggtgctggttacactctcagg

SEQ ID NO: 41183 - DNA, 1096 bp, Homo sapiens
cctaatttattcatcccactggtatgcaagtttattgaggtcagagataagttcctggcacacagtggttcctcagtaaatatttgttgaataaaaacacatgtttataaaaatcctatgctgcataaaaattaatgtcctctggaactttttttttttttttttttttttttgccaatttgttcctcatcagtgcctcaaaatttggtattcctggcaattttcttcttttccatgttcctctaactttttatttcaaagagagcttcattgctgatctgagtgaaatgctgttctggtacttcaccgctgagtgtgtgctgcaagtgtgcagggaaaagggaacattctacaccatgtgttcttaacctgaaattcctgtaagatctgcaaggaatcatgaactgcatcagtgggagggggcagtattctctctgtgttaccttgaaaatggtctttgtgctgggggagggacactctttttcagtaacaatttatattgttaacttatttcactttgaacttgtaaggtggcagaagttaggcaccttgcccaatgtaatatcactagtgactgcaggtttgggcttcaaaccttagtccatgctctaaaccagcggttcccaaccttttggcaccagggaccagttttgtggaagacagatgtttcacagactggtcggaggagtggtttcaggatgattcaagcatgttacatttattgtgttatttgtattattattatgttgtaatatataatgaaataatggtacaactcaccatgatgtagaattagtggaagccctgagcttttttccctgcaactagacagtcccgtctggggtgacgggagacagtgacacctgaagtgtgtcacttatgtccaggctactctgtaatctcattttagtcgctgtcactgcagaaaaccctgcttcacaaagacaggttgttggacacggaagcaggcttttcagtgcttttgtggcaacctcaggatattctacctggactttcatccagaacatatggagatttgaagttgtctcaaacatatttttaaagccactgtcatttgccatctcaagcagttgat

SEQ ID NO: 41184 - DNA, 1055 bp, Homo sapiens
aacatatttgagagtctagtgaaaccagccttatttgagtgaaaagagtcttatatattgtagattccagctggataaatagagtcaaaccagattagagcaaaggaatttattattttgtaagaatgagagttttctacaagattttattttaaataacaatgtattaatttaatgatgtaaaagtaatatccttgtaacactttgttgcatttaaaaaaatactcgagtgtttttagttttacctggtaaaattgacttaatagggaaattagctatcttgcatattaaaaaagtccctaagtaaggcaggtttcaaggttggctgattaatttggctagaaatgtctctgaagactcaatttctcatttctttcccttcctctttttctccttcctgtccctttctctctccctttcccctccaccccctctccttctctctctttcccctcctgtctcccctctgtcttccttgctgtgttgttgttgatttcaggttgatgcctcttgttattacagggtggctgccaccactggctaggtctgagaagctttcttgtttgtgattctctcaaaaccacgaaatttaagtcattttcttcagtctgattggagacatttattcggtgtctggcatgaagtagacttttggtaaatacttgtggatgaattgttaaaattgcataattgttagagatgctagaaatggctggtgggaggctgaatgtgctgcttcaactcctaagatacggatatatattaaaaagatgagtggtttatgaatgttcatagaaatacttatctcccataaagagaagatacgtgtgcttcacttagaaatattaaaataactacagcctgaaaggcaaattgagatggatagtgttgaaggatagaggtgcagtgaagtcagtcacaaagttctccatagtatcagtgtgtgacttaaatttcttttcccatcctgtggaatgagcacagaaagcaggctacttactcatggaagatttagtaaaaatgaccctatgttaaacctcaaggaaattatcagt

SEQ ID NO: 41185 - DNA, 1035 bp, Homo sapiens
ttttgcattaatttcatttcttttggatacttggtcttatagatacttagtcttaggtaaatatctaaaactaggatttcagaaaacgccaaactattttccagagttggttgatctaagagttcctgtctttaatggcttctttctaacttttcttcattccagtgaacaggtggatatattgggaaacttagggaacatcatagtagtgaagaaaaggagcctttggcttttcaatgttgatcctctgggttcttattgaatctcgtgccacgtttccaaggcctgttatttcttgatgggcagagacctgtggctgtccttgcccaacaggcctctgcatggactcttgttgttcctgctggccccttaagttttggttaaaactccctattgccagaataactcccatcattccctgtgcagattgctttggtttgcttgccatccagcccgctgcattcttccacgtggatgttgatactgtgcagaatgatttgaagcggttttaagggaaaggaataatatgagtcacgttgagaagttcttagtaaatgtggaggaataaccttgaagttgtttgtggctgtgaaaagaatggaggggatgagggacacgtgaacatctcccctgctgctgccctcagctggtgttgaagcgtggatccaggagtacaccctagacaagatgggatcttgaatgaaaacccaagccaagaatggaagaaagaaatggtggggcttgcgtcacatcgagttcaagcctatggagaagacacacttttcttgtttctttgtttaatcagctttattgaggtataatttacatacaataaatctgatcaagtttaactatatagtttaatgagttttcatgaatgtatattatcctgtaactaccaccccaatcaacgtttctgtcatctcagaaagtccctatatacctctctgcaggtaatgttccctcctacaccctccaccctcctctagttcctggcaacctctgatctgccttttgtcattatagttcatagaa

SEQ ID NO: 41186 - DNA, 1065 bp, Homo sapiens
gctagcaggagtagctatacttacatcagataaaacagactttaagtaaaaaaccataaagaaatacaaatgagatcatgtagaatgataaagagatcaattcttcaagaggatataataactctaaatatttgtgcatgcaacactggagcacccagattcataaagctaatattactagatctaaagagagagagacactccaatacaatgagagtggggaatttcaacatccgcctgtcagaagtcagcattagatcctctaggaagaaaatcaccaaataaacattgtgtttaaactggtgtttggatcagctggacctaaggtttacagagcattttatctgataattgtggaatacccattcttctcatcagcacatggaacagtcttcaggatataccacatgttaggccacaaaacaattctcaagatattttaaaaattttgaaatcaagtatcttctcagactacaataaaacttgaagtcaataaaagaaagaaactttagaaactagacaaatgcatggaaattaaacaagatactcccaaataaccattgggtcaatgaagaaattaatatgaaaatcaaaacatttattgaaacaaatgaaaacggaaatacaacataccaaaacctgtcgtatacagcaaaagcagtactaacagggaagaaaatagcaacaaacacctacatcagaaaagtaggagttcaaataaacaatctaatgatacactgcaaggaactagaaaagcaagaataaactaaatctagaagtagtagaacaaaagaaataaatattaccacagacctaagtgaaatactaaaaaattataagactaaaaataactaaaaggatcaatgaaacaaaatgttgggttttggaaaagttaaaaaaaaatgataaaccattagttagactaagagagaagacctaaagaaacaaaatcataaatgaaaatggagacattacaaccaactgataccacagaaatacaaaagatcatcataaactgttatgcacaactatacactaacaaactgcaaaacctagaggaaatgg

SEQ ID NO: 41187 - DNA, 1056 bp, Homo sapiens
gatagctgtatatattaaaaactcaacctgaatatattaaaaataattgactttgtatttttctcgtgtatagttctatgaattttaacacatatgtagattcccgtaaccaccactgacctcagcatgaagaatggcacttttttgtgccgtcctttataatcctgccctccattcaccccgtccttggcaatgacttctgtgttagtgatcactatagttctgtgttttcccaaatgtcgtgtgaatgacatcatgcagtgtcgagcctttttgagattcatccgagttgctgtctgtaccaattgtgtgttccttgttattgctgagtagtattttgttgtatggatgtaccacaatttatcggattactttctaaagcctatttggattatttccaatttgggggaaattatggataatattaatgctattttaaataatactttagaatgagagatttctcttcatgggaaatactgggtcctaattgctttaactggtgtttgtgttgaactatcttgtcttatgtttttgtctctgatgaaatttgaatgataaactaaatcttatttttgatagagactgtgagtcttttgagtctatttaagacttgtaagatgtatttgtgaaaaatgtcatctatttcatatttattttactagtttcaatttcatagacatgtagtttatttactagttttctaattaaattaaaaggaagaatcagttggtggcataacttgccaggcattcactaagtttctaatatcttatgtaatgttggacacaagaggtgtgtattaaatacccatttaatgaatcaagatagaatgattgaataattcagaagcactgtaatgtgtttaatgagattttttttgattcatggtaatgtgatgaatataaggttgtactttttagcacattatgttaaaaatatagttctttatagtaattggaagctgtattctttagagtaattatatattgcttatcacagtgaatcatttttagtattcaaggatacattgtctaaaagtaggttttattttac

SEQ ID NO: 41188 - DNA, 1050 bp, Homo sapiens
gttgaataattatttctagaaacatccacttgagagggttgtacctggaatgtgccagtactattcattttctggctagtcatttagtatgccaatgagcaagtatttattgagtatccactatgaatgtataattggagaacaagaaatatagtccacctctacgaaggaaggtggtcccataagactgtaatgccatatcttttctgtgccttttctgtgtttagacacacagatacttaccattgtattatagctacctacagtattcagtacagtcacatgctgtacaggtttggagcctgggagagatagactataccaccttatagcctaggtgaagtaggctataccatctaggtttgtgcaagtcactctatgatgttctcacaacagtgaattacaacaatgcgtttctcagactgtatctcaccattaagtgacatattactgtataaacttgcttctctcaagaacatcactttcatttaggggaagtcagataaacacaccatcaaagaataaggttattttaatatattttgtgactatatatttgaaaaaatccagtataatgtacttgctaagcaagtatgaattttaaaataaattaaatttgcttgagattgaagaatccacatggtttagttttagccattctgactgggctgagatactgagtccatgctctctgtctgctgtatcctgagtaatttgtgtcaccagagtagtatttcttgtgctactgaccttgagaaacttcttattttgtggtgaaagaatatatgaagcctttagagagcagtgactccggtgtgtaagcaagtgttaaatgggatggtgtagatttataaagacaagactgtgagacttgaagtcatgaagaggcatgaaaactggaaagtgttttcttggagtggttgaactaggccgctgatactagtgtgatccccagaccagtaacatgaacatcacctgggaactagttagaaatgtcatgggtcgggtctcaccccagacttgctaaatcagaacctctggtggaggagc

SEQ ID NO: 41189 - DNA, 1112 bp, Homo sapiens
cagcaacatggatggaactagaaaccattatcttaaatgaaataactcagaaatggaaatcacatattgtatgttctcacttataagtaggagttaaataatatgtacacatggacatagagagtggaataatagatcttgcatatgtggaagggtggaagattgggaggagagtaaggaattagaatttacttaatgggtacaggttacagtatttaggcgatggctacactaaaatcccagacctcaccactgtgcagtgtatctgtgtaacaaaactacacatgtatcatatatatatatatatattttaaaaggcagattcccggggtttcttttgtaggtattgtaaatgggattgctttctcgatttcatttttagattgtttgctttcgacatatagaaatgctacagattatcatatgttgattttgtatcctgcaactttactgaattcgtgtatcagttcaaatagcttgtttgctaaagtctttatgttttttgaaatacaagatcgtgtcatctgaaaaccaggacagcttgacttcttcctttccaattagatactctttatttctttctcttgtgtaattgctctggctgggacttccagtactatattgaataagttgtgaaagcaggcatctttgtcttgttagatcttacaggaaaggcttcagtttttccctgttcagtgtcatgctagctataggtttgttgtatatggcctttattgttttgaggtatgtttcttctatagccagtttgctgagcgtttttatcataaaggaatgttgaattttattgaatgctttttcagcatctattcaaatgatcatatgctttctgtctcattctattaatgtgatatatcatatttattgatttgcatatgttgaaaccatctttacatgtttagatatgaatcccgcttaattatgatgaatggatttttaatgtattacagaatttagttttttagtattttgttgaagattttttcatcatgttcattagtgatactggcctgtaattttctttttgctgttgtgtttttgtctggttttggaatcaggataatgctggcctcatagaatgagtttgaaagtat

SEQ ID NO: 41190 - DNA, 1044 bp, Homo sapiens
gatgggaagcaaaataattttttcctcaaactgaatgtatattaatatattggattgtttgatttgaatattgcataatttttattttgtttcaaatggatttatatttggctaaacttatttctgtgaatattgtttttattgtgacaattttatatgtgtttttgactgttcaactttttttaaattatactttaagctctgggatacatgtacagaactaggaggtttgttgtataacttttatattaaaaacacaaagatactatttgggggaaactttattagtgtaaaaaggtgttatcttaaagttctaaaatgtctaatagcaatgaataaaaatgtataattgttattaaaatgttatggtgttagaagtataggtaatttttctcactaatttttaaagtttctgaaattttgttttgcattttttatagtggtaatgttttttaaatgagggcttttgtgctgaaatatgaagtagtttttaaagtaagtgtatgtgaatgtgtttgtatgtgtatgcctgtaagtgtggattgagagggaggggagaagagaaataataaatcagaaacaggcattgtcttctcaatcttggcatttaatatcaagactaaccttaaagaaagcttgacatagcataatttagtttttataagcctcaaacatttgaaaacagtttaaatgtttgacactttcaaaagtgtggctgagctttgcttaagcacttgataaaaaaagatgcaaatttcagcttgctatataatgagggataatagtgtagtgtaagaatatatggtctttgtgggatatgaaattgagtacaggtcctagaacctattgtagtgctaccataaaaactaactcttgaattttcataaacattgtcagtgtgtcatttcctacctcccaaatctttgttttctatattaatcaaataatactttattgaacacatgtacagaagagttaaataattgttaagaccagcagtgtgtaactgaaactctactcagttattctcctcctcacttaact

SEQ ID NO: 41191 - DNA, 1059 bp, Homo sapiens
caacttgacaactgtcagcagttacagtttttgcttaactggttaagggtgacatagtttggaaaatacgtttctttttacttaactggattaataataaaagtaattcaatttttagaatttactttagaaaagtaaaggtttattagttttctgttgtctcataacaaattaccacaaatttagtgacttaaaccaacacccgtttactggctcacagttctgtagaccctgtgtaactatttgatttgctcagaatatcgcaagactgaaataaaggtgttggcgttacttagttctcttctggaggctctggggaaagctccactcccaaactgattcttgccattggcagaatttagtttcttgtagttgtaggactgaaggtccccttttcttactggctgtgagcttgaggtctctttagctcctaggtgttggttacatttcttagcatatggctctccatcttcaagccagcaatgagtcttcaaatctttcttgtgctttgaatcatgaactctgccaccaacagaaaaaaaatatctgctcttaaaggactcatttggttaggccaggcccagttggataatcttcctattttaggaccaacctgtagcataacatgtcctattgtggaagtaaaatacatcctcacagtgccggagatcatgcagagtgtgcatatcagggaaaagtcttggggactgtattaattcgttttcacactgctgataaagacatacctgagactgggaagaaaaagaggcttaatggactcacagtttcacatgtctggggaggcctcacaatcatagcagaaggtgaaaggcactttttacatggcggcggcaagagagaatgaaagagaagcgaaagcagaaatcccttataaaaccatcacatcttgtaagacatagtcactaccacgagaacagtactagggaaactggccccaagattcagttatctcccaccaggtccctcccgcaacacgtgggaattatgggagctacaattcaagatgagatgtgggtggggacacagagccaaaccata

SEQ ID NO: 41192 - DNA, 1694 bp, Homo sapiens
attttttcatatttcacttactagagttgagtttcctttttaaaaatatgattatgatcatgtcactgtcatgcctaagcaaagccctttagcagctgttggttgcctttagaacagagcaactcatgacttatcaggcactttgtgatttgtcctggctttgctctatctacacctttatctccagaatcttctccttggtatcatgttccgcagtgtaattgagttacttggagatttcctgtcctatgttttctggcgttcatttccagacattgacccacactgttacctttgccagagctgccgaactgtcttccagagtaccatttcacattcgcacaaacagtgaatgagatcctgttgttccacattcttgctggcatttggtgttgtcagtgttctggattttggccatttaaataggtatgtaatggtatctcactgttgtttgaatttgcatttccctcatgatatataatgtagagcatcttttcatttgctcatctgtatgtcttttttgatgacgtatgtgttaatgttttggacttttaataatcaggttgtttgttttcttattaatgagctttagagttctttgtctattctgggttaagtctttatctgatatgtgttttgcacatattttctcccaatctgtggcttgtctttttattctcttggcagtttcttttgcagagcagaaaatcttaattttactgaagtacaacttatcaattctttctttcatggatcttgtctttgtgttgcttctaaaaagtaaatgacatgcccaggttcatctatattttctcctatgttattttctaggggttttatcattttgtgttttacatttaagtctatgatccatttttatttaatttctgtgactggtttgaggtgtgtgtctatattcattttctatcatgaggctgtccggctgttcctgacactatttgttgaaaagagtattttttctctactgtattgcatttgctcctttgtcaaagatcagttttatatatttatttgggtctgtttataggctctctgttttattccattgatccacgtatccattatttccctaataaccacactgttttgattattgtagccttattgtatgtcttgaagttgggtattgtcagtcctcgaactttgttgttctcttacaatattgtgctggctattgtgagacttttgtctctcaatataaactttaatcagttttccagtaaccacaaaataacttcctgggatttctattttgattgcactgagtgtagaactaacatcttgacaatattgagtcttcctatccattaacatggaatatgtatccacttatttagttgtttgagtttttttcatcagagttttgtagcttttctcatatagagtttgtatctattttgttagatttatacccaagtatttcattttttgagtgctagtgcaaatgatattgtgcctttaatttcaaaatctacttgttcattcctggaatataggaaagatactgatttttgtgttttaactcatattctgaaaatctcatataatcacttattagttccaagaagcttttgttgatttttaaaaaaatttttctatatagacagtcatgtcatctgtgaacagttttatttcttccttcccaaactgtaaacctttagttctctattctt

SEQ ID NO: 41193 - DNA, 1067 bp, Homo sapiens
aatttttctaacttaatgtgctaaaaattatataatttaacaagtcaaaaattgaacttaccatcttctttctcactgggtaggagacttaccatcttctttctcattgggttggagacttaccatcttctttctcatcgggtaggagacttaccatcttctttctcttctcatcgggtaggagacttaccatcttctttctcgttgggtaggagacttaccgtcttctttctcattgggtgggagacttaccatcttctttctcattgggtaggagacttactatcttctttgtcttctcattgggtaggacacttaccatcttctttctcattacaccatatatatgtgagtttgaaaggtggtacttatctttattctcattcaccactctctccatattcagtccattaaataagtcctgctggttatgtttttaaaatatctctcaactacatcaccattaccttatatatgcacattactttttccttaaaactaattgtcctcactaacggctgatcgatgtttcagaaactcacagtaaacttacttgagctggaatataatcaggacctttcactaattgacaaaaaccagcctcatttctacctctttttctcttatttaagctctggcaacatcaaactgtttgtagtcccatgcccttcttgcatcactaccttctcatgctgtcatctctggaaattccagagcacttagttgctcacttaatttcttctcattaaggctcagctcaggtttcatttctagaagacatacccgacccattcctcctcatgactctctcctgaccccaagtattgggttcatttattcaaacattcattaatttaaatatgtattgagcacctgctattgagcaggcactgttctaagtgcttgtgatatatcagtgaacaaaacggaagagccctgtccttgtgaattcatatattctagtaaaataaatggacagcaaataaaagtaaattatgtaggatattcgaaagtttagagtgccacaggaaaaatgatgtagaacagagtgaggagggtcaggagtt

SEQ ID NO: 41194 - DNA, 2546 bp, Homo sapiens
caatgctgctaagtcacataaaacacggcatagtacacagcaggcactgaataaatgttagcaaattatgtgtaatataaaactgtaaaaaatgtaattgttatatttgggtagctagagaaaaaaatacttcagtcatatcatattagtccattttcacactgctgataaagacatacccgagactgggaagaaagagaggtttaattggactttcagttccacgtggctgaggaggcctcagaatcatggcaggaggtgaaagacacttcttacatggtggcagcaaaaggaaaaatgaggaagaagcaaaagtggaaacccctggtaacccatcagatttcatgagacttattctctatcatgagagtagcacgggaaagaccaactcccatgattcaattaccacccccctgggtcccacccacaaacttgggaattctgggagatacaattcaagttgagatttgggtggggacgtagccaaaccatgtaacatatttaaacctttgaccactggacttagctaatcttgcttccaacatcagatatgtttaaagaatttggtgcttatttgtgagtcaggaatggagggaagagtgcaggaacaatttttgaaaataccactgtctgacttgatacaatcatgtcagagtagttaaaaggagtttagcaggtccttcaggtcctgctgagggcaattactttgtgtccttgacaaagcagtctcaaggccgttatacaacacatactgtgggagtgaaaggctgatgaggaaagctgcaaatgtaaatctgccggtagggaagatcactgagacacagagagaaacatcaagtgaggaagtcaatgccggaaaggtgactagatgctgctggggttaaagggagagaggaagaggcttggctgtgcaacagtgaacctggaagaaatatatgctaccctggacgtgaaaggacacgtcagaacatttacatgtgtatgtgtatgtgcgtgcacagccacacacacacaatttggtttcttgaacagaaagaagcaagcgtcctcaaaagacaacccactttctcattgggttcagttggaactctgagcttcaaacctgactttacagagaactcattcactccattttcctggacaatcgtccttcagagccctgccctggctggccactctccctctcccgggtggtaagcatcttggaagggctgcaggctgttttggcagtgtgtccccagcatgcagccctgaaaaacgagtgcgtctttctgtggtttgtgggatcctcggaggaggagtgaaggtgattataatgtgtcagattctcatttggggtgggaagtgttgatttgacagagatgaaagcctttggctggggaggggtgtgtgaggtgcggtgtggcgaggattccccggtcggactgtgatgtcagtggccccggagggaacagcttgcactcagccttgagcagttggaatctgttgggagggcagttggccaatcctaggcctgagagttgggcaatgggagaccccatcagtgtgtcacctttgcctccgggtagaaagaaagcaatctaaggatgtgtgcaagactgcgttcctaggcgagtctgtgtaactgatgccaaaccggggaggaaggctgtggaggaggccgtggaggcccgctcaccagctctgtactgttggtcagagacgcactcctgctcctgcctgtgacccagcagttgacggttaactggtatggcaacattatatggtgaggagggtgcttgcttgctcacatgataataacaaaaatatttattaaattcttactgttacgaggtattctgttaagcctgtttaaagaccctgaggctgtctaagaagttttatgatactaaaatgtaattgaggcataccttatattttcctaattgtcctgggttaagtgatggcaacagtgactctaggggttcctttgacttttcattactccaagaagtcagaagagagactggtgagaaaatgaaaactaacactgaaatgtatcagaaggaagcttggaaagggtagtactgaagaagagaaaactatacgggcactctgcctttgtgcaacagagaaagagtcatacctattgcgagggagtgagttgaattgagcaaggactgtgcataaaggtttgtttgccttataaaggtgaaggcttacgttttgtgtctgcttctttgtgttctttgtgtttgcttgttttagtatgcttttgttttcagcaaagcatttactatttgccagaaatgctggcagtcacagtagtggaggagttggcatgcaattcattaggattatttcctttaaaattccttcacaaccgtcttagggcaattctgaaattacctttgggagatagattagaatatatgagaatgtctagcttacagttaaggctgatctggaagtactaatagtaggacagcttctcacctcttctgaaggactggagaggcagtctgcgtagggtagaaaagagaaaagagagcattccatagagagaa

SEQ ID NO: 41195 - DNA, 1029 bp, Homo sapiens
actcagaagccttttatatagctatttcctatgttttcactacagtgcctttcagctacaaaatgagttgttagaagtgtcatttttgctgttaaatattatttctgtgattctatgttttcactgtttcctgcttactaacatgtgtgttacagtggccttgaccttatatcactaaaggacagtgctaaaataacgataaagcaccagtgagattttaaggagttgctaggggatacaactgcagacgtctcttgcaggggttcctcaacatggctggatggcagaattgtatggaggagcttcatggcccctattgtacgtttactcatgcagagtctttggacaatatattttctaaaagatgcccgtggcttgccaaagttggtttcagatatatttgaaaaggaggtgcatcattagtaactacttttgctattttttaaaaaataaaatttatttttacttcttattttccctcttctaaaatttaacctaattttgctttcgtattgtggggaaaagaactctgatgttacatgaagaaaatgtaatacaaactaggttagattttatgtagtctgtctagcatagaacaataattattgccaacaggacagaatgggatgaaatgttgtggtggtagatgaggctcttcagtgataggactctttggttttaaggactttgagaggtggccgtcttcttataaactatcatcaagtaggtaggcatgaggtgtgagaccctcctgagcctcacacctgtacaaggtatgatttaggaccactggatttttgtgggacttgatctttttatcatatgggtgccctgtttatggaaaataatacaaaagtacctttttcaaatttcacaaaaatgtgataatgtgaactcatcaccgaggtcattcccaggaccttggaaggggcctgtacacatgctgggccctgaaacttcatggtatatctgcttcatggtatatagcttcatggtatatctgcctattctcctgcccagaaatgttgt

SEQ ID NO: 41196 - DNA, 1745 bp, Homo sapiens
aatcctgtgtgttttcagttactaagatcctgggatagtttattatctcagcaacacttagccctgacggactgacacatgcccctcttatgagcttctctttcctcagtgttattgtaattgttggtagcatttttgagaacttactgtgccctagactgtgtgcctggtgctttatttctgttttttttttttttttcgcttgttcgtaatgttaataatttgctcaaggtcagactgtgtgactcctaatgactgcgctctccccagctcccttgcctgcgttactcaacaaacatccccacgcacctgctgcgtgcccagctctgtactaggtctgaggatcaaaagatgaatcagaaataatccctgtccatgagaaaataaggatattatagggagaaacagaaattcaagccagtgcgtatgatgacatattaataaaggttgtacagcacagtgggtgctagaaagatttagaatcaaaacctgtctctttcattatgtggtcttggacaagtgtctctctccccactctccaacctttctgacttctattccaaaaatggggacatttgtaacttttataagatgtcgatggccacctacctgaaaacagtagtagcattgcatgcgccgaagcatttgaagccacaggcactcaacagcctgccacaaatgacagtttgtgtgtggtttccgtgttgcttcagtggaagattcaccgagagcacaaaggaaggagccagaaacttgcttgagggaaaaggagcagaaaagttatatggaggaggaggtggtgtttgacttgagttcttaaacagaagtaattttaactctgattggaggacaagggcaatacattccaggataagggaaatagcatgaacaaactgtgaaacattgggaactacaggaaacttatttttagaacagtgcagagcacagttggagaaatggtgggagaagtgctgtgcaggtgccacgggcagtcccagccccctgaatgcgactgcacaggccattcggaacgagtggaagggctcattctgagctgtgacttgttggttttttttgtttgtttgttttttgttttgttttttaatatgggttctggaaacacggaagcaatgtcaaggattgccaggagtcacagatgaaaggaaggaagccaactggtggaccgctgtagagagagatgatgaaggcttaaattcaggcagaggagatggaaagagaacaggtatgagcaaaatgaagcaatgaaatttgataaagacatattccggtggtaaaatgtaaagagtgaggcaaagaagggggttcaggagagctaccacacttctaatgtggtgactggagggttgtttgtaatagagcttgagagtagagaaagtttatttttttagtttttgttttttaactgtcaagttttctgtgtaggaattattcactttaaaaactcaaacaatgtggaaaatcttcaaagtaagctaagaaattccactacccacatatgaccctgttagcttttttcttctacactgaaatccacatgtatgtgtaatgatcatcttaaacagaatggtacctttagcagcttccttttgtatttagtaacatagcgcaagcagccctccagctttccactgaagtacctaagagatctgctttacgccttagtgtaaaaggataagtagtatcccattccatgtaggatgtttccggttatttctttatatcta

SEQ ID NO: 41197 - DNA, 1085 bp, Homo sapiens
gtgaggactgttttaaaagtgtatgggattaaggagcagagcattcctgatgtttgcttatattttgttgggttggggaagggaatgaaagaaaagatcctcccctagggttgccatagtttggagtaataggagaataacaaatgttttccatcaaaaacagactttctcttattctctgagcaatatatatctcatttggtctagataacatttatgaaagtcaatttagcatggatgggcttctgtagatacttgtcgttaataatgattgttcactatacagtgatgttttttaaaccctaagtgaaatttgagttgtcttttgcatgtgggtaacatatgtgtttcagcacaagggagatgaggatgtatgaagtgtgtaaaagaagcagggaaaggtagtgtccaatactggcaaccagtgaagttgtttgaggttattactgatgacagtatacttttcaaattgaatttggtaaattgcttcactggctgaataagagagttgattctgaacgaaggagatcaaacctgaacagtacattatcttcattatacttatggttgtatgcaataaacataacttttctaatccaaatattgtggcagactatcttacagaaaattgtatttgtgtatatgaaggattttcctatgtgttttgaaggaaatgaaaatgtgtaatggctacagcagtgatactgataggctagcaggcaattgattgctcagaggttaagttgagagagagagaattctctggaccatagtcattattccttattcacactccattcagctttccccgccccttctgggcacagcctcagatcttgtgccgttttggaaggcacacggtgtggccctggtacatgcttgtatccactcattgaggtctgggattccaccatggtaaggctcatcagagcccttcctcaggactggcaggaggacacccagagaagcagttctaacatttcactgtggttggtaagcaggggaggacatgttttcagtcctggttggaagtcagcttatcagtcaggacaggtgaggttctaattcagtaacaagtgctatga

SEQ ID NO: 41198 - DNA, 1083 bp, Homo sapiens
tcccaaagggttgggattacccagccttctctatcctttttgtctggagagacagacacaatttctctgctgttttaatctgctctagaaccaaaggtagagtccagaagagttctgggctcttccatgatccttgccaccaggtgaagcagtggcctgccttcctcttcctctgcctttggccaccccacagtgcacccatccatttacttattgatcgttttctctcttcccttagccttcagtggctctgcacaatgtttcaccatttcctcggctgtttctaaagaagggaacagctaggttttccacagtgacctgactgcagattccctggtatgctttgtagcctctctaagtgcaaggctggtgggaaattgctcaggttcgacatgtctcaagatattttactcagatacttacgagaagcatctctttggccatttctacccccccatcatcaccttctcatgcacagtgcagatactgcctggccagggtgggggtgggagagagacacaaaagaaaacaaaaaattgctttatttgatgttatcctcctgtgagcatatagactggttctgggtattgcaaaatgtatcgtggcccggaagtggagtggcttgtcaagtttttctttattagctaaaggacaggaattgacagggaaataatacaattaatggagaagagtgaagcatgtaagtagggaaagacagaaatgtggtctcagcttcttgaaacacagtcttctctgtagaaatctagattactgtaggttgagacttttaagtttactacagggtctctaagagtcagttattagaagttaacattgactgggtgccattaaatatctcatctcatctgatgtttatagctgcccgatcatgtagccattataaatggcagcaagtggaagcagcttgtccccggtgctctatgtgagtgagggcccggggttgtctgattcctgagatgacacaccaatcactacactagactatgctacactagtctacactacactagactacactgcactagactacactacactacactggactacactacactacac

SEQ ID NO: 41199 - DNA, 1077 bp, Homo sapiens
ataaagaaacacctgaggctgggtgtggtggctcacgcctgtaatcccagcactttgggaggacatggcaggcagatcacttgaggccaggggctcaagaccaggctggacgacatggcgaaaccctgtctctactaaaaatcagccgggcatggtggccggtgcctgtaatcccagctactcgggaggctgaggcaggagaatcacgtgaacccaggaggtggaggttgcagtgagctgagatcgtgccactccagcctgggtgaccctgtctcaaaaaataaataaacacctgagactgggtgatttataaataaaagaggtttaattggctcatgggtctgcagactgtacaggacacatgatgctggcatctgctcagcttctgggtgggcctcaggaagtttacactcatggcagaaggtgaagcgggagcaggtgcgtcacctgcaagagcaggagtaagggtggggggaggagccacacacttttaaatgaccagatctcactagaactcactatcatgaagacagcacaaagtcatgagggatcctctcccatggtccaaacacctcccacggggccccacctccagcattggggattacaattcagcatgagatttccaaactctgtcaaaggcagagcacaagacagtatcccttggcatctaaattgattataaaggaagtttctttctttacagggtttctttctagcatgaacttttacatagaacatgttttctgatggccccactttgtgtgtgtgtgtgcatgtctacatacacaatcacccactatataaggatgttttggtaaacaacagacccacatatatgatggtggtcacataagattataataccatatttttactgtagctttcctatgtttagatatgtttagatacacaaatccttagcattgtgttacagttgtctacagtattccgtacagtaccatgctgtacagtctgtggcctggaagcagtagtctatagcataaagccttggtatgtagtaggctggaccatatgggtttgtgtaagtccactctgtgatgttcacacaacaat

SEQ ID NO: 41200 - DNA, 1027 bp, Homo sapiens
aatcagaccaagatcaaaagctgtttcttttttttcttttttcttttcttttttttttttgacacggtgacttttctttcttctcagaagtatggtatgctatttccagaagttgtgaaggaatctcttccagcatattgagttgctgaaaaatacacaggtgatggtgatgctttaatcatgccccctccattgggagggacgccttgtgaatttcagctagaactgggatcccatcttggcaaatctgcgtaattcttgggtatacagctctaataggcaaaatgatctcccacagatgtcagtaggaaatgtcctgtagctggtgttccctgagaagttcatgtgcccaaaggaacactcattcccatacttgtgatgaaaggtattggattcgactggtctgttgtgatctggtttctccacggccgcttcacccctcatggttgtatcattggggcagaaattcgctgaccaagatttaccaatttgtggatcaaagtcatagtctctttttttgttagattattttgaactgcagggattgcagtaagtcctgttctcccagctgcttgttgcctggtaggattcagagcatagctctgctttttcaggcatctcatgctcaaaacagtgcatttcacaatgattccctgaagtctaagatgttggtagagattacagcctaaagaaacttctcagtggagagagaaggtctcactgtttgtcctcaggggttttctgtgtggctgttatttgatgtttgctgtcacagtctcatacctgagctttcttaacagcttgaagctcaaactagaatttaatttcctatgattcaagaccaagacggcttctgtggcttcctcctggtgaagggtggtgttcattccgtttcctgtaatctcagactcagtatcttttttttttttttttttttttgagatggactctccctcttatcactcaggctggagtgcagtggcgcaatcttggctcactgcaacctccgcctcctgggttcaagtga

SEQ ID NO: 41201 - DNA, 1052 bp, Homo sapiens
ggagtagtagtccaaccacttcccaggcaacatagagcgatggtcgctatataaatgcttaaatgaacacaggccagggacccatggagccacctggaccatgccatgtggaactagccagtgtgaagcatgggttctggggacatcagaatgagattgtgtctacagaaagtttgttaggaaagactgacacttggggcacgtgcacattgtcttagtaccaggagtaccgttctgtttttccagaacaagtggttactttctttctgtgggcactgagttttgtaaactacgagttcaaattttcaccttgtcagtttacagtcaaatttatggcttctccgtagcctgtgtgtcacttttgtggcgtgtgttttgtgttatctcctttcctgcttctgttttacttccctacctcttgtttgctttcttctttttcatttcagtttaatgcatgctatctttgtctcgctgtagtttgtgtatatttgaaaactttcttaaatgttctctggaacaaggtgaggtaagtaatcttcatttatttggtatcgaatacaatcctgagtgtgttacctttgttttacataaggggaaccagccacacagctaataaagttgcaggactcaggttcagcttgaggtttctcctagaaagcccaggctcactctcccagctgtgccctgttctctcaagaaaccaacagatacactccgcacactcctcaacaacccatgacgctccacacacacacacacgatcttcagtgggcaccgctgcagacacatgcattccacaaaccctgcagatccgctgatcggaggcattgattctcaaagcacatggcctgaaattatactaaaaacgcaaattcctgggccctaccccagacgcactgaaacagaagccgtgagggaggggcccgcagcttgtcagtcatcgcgaggtgattctgttgcactcttgactttcagaaccactcaggagattacacactttggaaaaaaaagaattgtttttctgataggactttcttaaatagcagacccta

SEQ ID NO: 41202 - DNA, 1044 bp, Homo sapiens
tggtaattgtgtgttctaggttcttaaagactctagttttcccttagtatagtagttaactttctattgttgtttgaataatctattttagattgctaggtaggcaactaaatacatagcttattatgcaatgtgggtgttgtgtgggcgacttaaccttgggatgacgaacttaacttttaccagttttggttagtatatattttaatgatgaagtttaagatttcatagtatatccttttttaaaattttattttctttgcatttatctgtgtagtgatgtggcaatataaaatataaagtttgaatgttctagctcaaaaaccagtgcaaattagatggtctgaagacaggaatgtgtattacatgcgtcctttcagaacacaacacaatggcaagaattggtataagaaaattaaatcatttttattttaaagctatatttgctttgatataaaacgactccttccaccctctctctctgtctcttgccttccttctcgtccttcctctttgttaactccatttgtagttggcttttatttgcgtttagttttgactcttactgtgctttaaaagttatctgaagtataaagtgaaaataaaaaggaaggtgaatgtgttgcatagtagaatcatcgccaaacagaaagggttaaaatactttttcttttcttttttggtggggggagggtggtgggaagtaagaggctttccaatgaggcatttcacaaaggcataatctttgaatctgattagataccatgttgagttggcctctttcacccagcacagagaatttctgacccatttaaaaagagatgttactgacaacatctgctaacggcaggcgagggctggctggaggaaaggaggagatgggaaatggaataaaaacctatgggagatgggattgtggtgaatgaaggctacaaagcgttttctcatttcaagagataaagacaaggcatattttgagaaattatcttttggctctggggaaaatcaagccagattttgccttctgctttggcgttctgccct

SEQ ID NO: 41203 - DNA, 1121 bp, Homo sapiens
aataacaggttattacataagagctcttcttaatttttatgttcattttctttgagccaaaatgttaactgttttctttcccattttggagttacctgagtaagcttatttaaattttgtaatcttgctgataaagtaacatgaaatttttacttttaaactttgcagaccaagaatatacttgtttaatatacctgtttgctgaataaataatgtattgtgataggtgatttgaaaatggtaaaaaaaattttaatatgtatctaataagtaaacagaaacagaaaggcaggcaatttttaaaaaatttttaaaacactggtaaatagaaaccattagaatctttatgttttgaaagcctttcagcagttaaaaatttcacattaattaagtctgcatttcctataccctaatgggaaagagttacatgcatgcaacttaaagacctttagtcgattcaaggttgtatagatttttttttttttttctggtgacagaatcttgctccatggcccaggcttgagtgcagtggtgcgatcacagctcactgcagcctcaacctcctgggctcaggtgatcatcctgcctgagcctcctgagtcgtcgggaccacaggtgtgcaccaccacacctggctcatttttaaaattctctatagaagacaaggtctccctatgttgcccagactggtcaagaactcctgggctcaagcagtcctccctccttggcctcccaaagtgttgggattacaggcgtgagccactccacctggccatagattgatttttatgtctctctctcttttttttttttttttttttgggacagagtcttgctctgttgcctaggctggagtgcaatggtgcaacctcggctccttgtaacctctaccactcatgttcaaggaattctcttgcttcagcctcccaagtagctgggattacaggcatccatcaccatgcctggctgattttttgtatttttagtagagatgggattttgccatgttggccaggctggtcttgaactcctgacctcaggtgatccacatgcctcagcctcccaaagtgctgggattacaggtgtgagccactgcatcctgccctctcttcattttttat

SEQ ID NO: 41204 - DNA, 1866 bp, Homo sapiens
ctgtgccccgggatggagacggaggtccctctgcgctcctgtggagctctcaggccctgcagctctctggcctttctgctctgtctctctccacttcctcagtgtgattcagcgcatggctggtgcttctgccctgtgtcatggtatcctcctgactgggagtctttcctcttggttgccaccagtgccctggaaccctttttccctgcatcttcctaggcttcgtcatggtccgctcatccgtgcttccatccttgctggtgcttacagttgtctgctttcgtgtttgtctcccattagccaaagtgttccttgcgggtaggaagcatgtttcattcattttcctaacctcagtgccgagcatgttgccaagcaaaataagttgaatgaatgaataaatagtgaaggtgcttaagtgagggaatatgactgaaatcgtcctttaaaatattaattttcctaaagggaaagaaataatgaaatacataatgtgattgtaaaatttcactggcatgacttgaaacttcatttttgtttcatttataatattttcatgtaatccaaatacactagttggcaccagtgacccagggcttctgagctactgtgaacacagcgtgtccatatgcccgagctggtggggcatggcttggcgtggagcagccaccctgagttgatgggaaggagggagataagtgtttagagcgttctggatgcctcagcttcatttcctggggcagtgataaaaagctttttactttgatgaaaacatttctacacagcaaagtgaaagtgttgcttatgaagggctgacgtgtttgaatatgatgaattatttacaaaaatacaagcgtatttggccctttaaaagttggtaagtactgtgtaagaagcggctttgcataaagagcagtttactctgttggaaaaaaagagactaacaggtaactgcagagttgcagtccagggatgggtggaggctggtgcagaatgggaaaaaacagcatggtaatatagaattcaagttgtagttattgtataggatgtaatttgtgtttctgtattatagttttagtagcttctgaaataaacatctaaagtgttatccaaaagggcttgaaggctgggcgaggtggctcttgccggtaatcctagcactttgggaggcttaggtgggagcactgcttgagcccgggagttctagatcagcctgggcaacatagtgagaccttgtttctaaaaaaaaaaaaaatagcccgggaggttgaggctgcagtgagccatgatcacaccattgcactgtagcctgggcaacagagggagaccctgcctcaaaagacaaaatgaacaacaacaaaaaagagcttagttactatggcttcttggatgtgctaattacatattgtattggtgtctcagggttatatacatttcaaattttcttggtgtcccaggaccagaagttgtctaatcagtcatcataactttttaggactatactctgcttctcagggttaaatatatctaatttttaaaggcagattaaagatctacttataaaacctcagtaatgaagacaagtggtactggcatgtggataggtagacaaattaatgcaacagaacagaaaagtgttaacaaacccagacacgtggcagaatctaaaggatgatataagtgtcatttcatttaggagaagcaaagatagactactgaatacatgatttgaggatactaggtagtcatctagaaaaaaataaaaatagattattccatgcagagcacctccaggatagattccaaatggattacatatgtacatatataggtatatttatgtgtatatttaaatgcaaaaaggaaatc

SEQ ID NO: 41205 - DNA, 1088 bp, Homo sapiens
ctccgcatgaaagcagaggctttggggaggttttgagcagtgggtgatccatggtttatgatctcagaagctcattctggctgcagtttggtgaatgaatgaagggagatgtcgtggatacagggagtccatggatgctactgtcatagtcaagacaagagcaatggtaacttggatcacggcgatgatggtagaagcaaaatgccgcggtggttcaggaggtgtttggaggtggcgtgtataagacctgcaggtgggttggatatggggacgtcaagggagagagaggaatcaagaatccatgcctgggtttttggctggaaagattgggtaaatggtggggctgttcactgggattgggatgggaagcctggaggaggagcacgtggggtgcgcaaggaatcaggcgtggcgtttggtggtgttcagcctgagatgcatatgctaggaaggcagttggataaacaaagcctgggaggatttgatccaaaggatcgttcaagactgcagcatagaaactgcagtcacagcatctaaaatcatgggattggatgccccaaggacagtatatagatgcctcagtgacattttgactctgagggaaatacagacggagttggttaatcaaccatagctgggtgcaatgtaagtgcctggctgaagtttgacacgcgaacggacggcccgctggaattctgtgctatgagccggagtagaaagagagatttggactctgcaacaccaaggtagtcgttgaagccacagtcgtgaatggagaccaggagtgaatagtgggagtgagcagaagtcggaggataggacagaagaaggcagagccatggagcaccctggagaggtgtgacccggcaagatcctgagatggaaggtagcacggcctggagttcagaagcggagcctcaagagggaagaagccagatgctccagagagcaggtgagttccagcagccaggaggtcgtccgtggcctcggtcgggagattgcggtggagtggcatggataatacctgatgccagtgtggtgaggatggcagacggggccttttgaatctcagctgtgggcaggtagat

SEQ ID NO: 41206 - DNA, 1599 bp, Homo sapiens
tttccttttaaaatgtaaattaggctcctccagctgatcatttctctaagtctgtctaaaggaaaactccacagtgacagaggaactcataatcttgcaaggaaatcagaaggtatccagtactcttgtgttctttgtagcactcaccacttgctgaaattatcttgctcacttactggcttatcagtttattgcctgctttccctctctggaaaggaagctccatgagagcctgagggcagtgtcttttttggttgtttccctgagactgttaacagtggctgacacacatagagaaggtactcaaatacttgtgttggaaattcaaagatgaaagccaaaataaatctaaacagaacaaaacatggtgcctgtcttcaagaaacctagaaatcgatgagcactctttgaaagcttcctttgtatgagcctctgttctgtggactcaggattccaaggtgtatgagacaaaatcagttatttcgaggagcacacagatcacagaagagatggacaagagttcacagacacgctcacccacagacaggctgtagggcgctctgcagacagtgagaaccagacggcctctgactgggaggtcctggaaaggtttcacaaggtgtgaagaggcagtgccttcgctttgcgagaagcctgggaaggaccttctgaggccaagggaaagggatcttctgaggttgcagggtggaaaacagcctggacaggtggtaggttggggacccgggtgataagacaggagagaggattacttaggctaagctaaggatactttacaatgacccctcagacgagtgtatagaaacagctatggaagacaggtagaaagaatcccctctgtgctggagctgggattctgtgtgactgcagggagagggctgatcttggtggcagagtcctcggcacacgagaagaggtaggagctggaccagagatggggccatgcacatgaatggtcgggagagatacaagcaggaggtagcagttaatagtcacacatccaggtggctggttggataaggcaggagacatctgactccttagtttctggattggaaaggtgtgtgtgtgtgtgtgtgtgtgtgtgtgtgtgtgtgtgagagagagagagagagagagagttggggttggaatgggagtagttccatgcccagagaaaagagatatcagaatgggaagtatgagaattgagcccctactatgtgttaagcagcctccttggtagtagggatcgtctctgcttgtatggtgcccacactctggtggtgcagacaagaaccagccagggaaacaaaaaataccaagagagctgcacagcgaatgcacacggagagtggcctgtgcagctgtgtggctccttgccttgttctgtgcaggtctctcttcacaggggcagtagaaatggcctctgagtgacaaggtgtcatcggccatgcagttatctggggaaaagcaccctaggcagagggggctcacaaggcagaggagcggggtgacggccgtgctggagctgagcccaccaggcagtggcaagtgaagtggcaaatgggccggatgaaggctttgtcagtcagaggaaaa

SEQ ID NO: 41207 - DNA, 1083 bp, Homo sapiens
gaaaaagcccgcggtcctgaaatgatggggcttctgttggtgctgctgaaactgctgttggctcgtgtgttcagggccctgctggatgttgtggaggggaagaaagatcgcagctctggatagagggtggagtcctctcgggattcgtagcaggctctccctttaggaacacaatacctggagaggagaagggtctactctgcagaaaggcccagctaggagaagctggtgcatcagagaaaccagactcatcagggaactttcaagaaaggccccctcgccccacaccttgccctgagcagtagctttggccttgaacaggagcaaaaggttagaacagtcttatttgggacatgactgaggtagtaaacaagaagatacttttaaacaaaattatcagacccacttcactcaagcttgggaaggggatagattattaaaagagagtagccaatttctgctctgacactctttactttttgggtctttgtttctgtctgttgctgcctgacaagccactggtctgaattgctaaagtactgaagtttgacagatttttctgatatgtatcgtttaaaaaatcagtcttttgaaaaagaatttctagattctttaaaaattttagaatggccaaatgcatacaaatgtgtctaattgttgagtgtcattccttttttttttctttcagtttgatcttctgttggtctgatatgcaagttgtcacgtaaaggctgttttgtccagttactgtttgtatgaatgctggttttatttttattaccatcgaaagcaaatcatgtgtagagggtatgatatgccagctccgcttctgtccattttagctctgcgttttggctcttcacactgaccggctggttcgctcactcatgcaccaaacaacacttagtaagagctaccgccaggacccaggacccaggccccagagacagaaagaaagaaagaagcctagtagaagctacgaagctgctgtgggagcttcccactctgccatccagtaatagagacagagtcccctagaagcacgtttgaagttaatgcccaggggtcagtggccaccatgcc

SEQ ID NO: 41208 - DNA, 1087 bp, Homo sapiens
agtaagtggcctgctccccgttccccggaggtggggcggctcctcatcccctgggggcaggtggggggcttggcctgctgggtgggaagcgggtgtcgagcgaggtgcccgtgcccgggcgtggagcgcccagggggcttctctggaggggcaggagccggtgcccctggcggagcgcgggagcgttcggccgcgcagggacgccggggtttcccaggctccgcgagcgctcgggggaagggcggctcgggagggcggcgggagcttggacgttgcgagcgggacctgccgcctccttctccgcccctcgtgccgtttctggccacacttgtccggcgcgtatttatactcaactttgtgaccacttaggttcctccctcttgagcctgtggccacttggctggagcagatgcgcttccttccacttgggggtccagcccaccgggtccctgtagccggggtgagggaggccagggcctcagaaccccgcgcttccaactgtgatggcaccgccgttctccaggactcggagtgggcgcccggcctcccaccccgcgcagtgaccggcatccagagcatggactggcggggtggaaacggttgcacctccacccaggggacgcacccccaccccgggccgcgtcctgttggtcccgggcttctctggggtccggggtggtagagaaaagggaaggacaataggtcgctagggtggaagagaaaggcgccgccgcctccgactcgcaggatgcgcccccgggcccactgtggcgtggccactcctcctcgccacccgcgggcgcggggccgagagcgcgctgaggcagaggtggcagaaaggcatgtcacgggggtgggggacaagattgagcagaaaagtcaaggcaggggttcgctagaaggaagcaggcaggcgggagacagtgaggaaagaggaggcgcccggtgcgcagaggaggggggcgtcgcggtcgcggatggagggggagcagggtgaggacgggaagaccgcggcggggccgggtaggagcacctccgggtgcaggaggtcgcgcccatgggcccccgcccgactccggcgccagtc

SEQ ID NO: 41209 - DNA, 1033 bp, Homo sapiens
gccacagacatcgtggacagccagtacgacgccgcagcccaaggccgcctcatagcctcatggacacctgtgtcgccaccttccatgtgaagcagcaaggcccaggtcccgaaagatgcagtgactttttgtcgtggcagccagtggtgactggattgacctactaggtacccagtggcagtctcaggttaagaaggaaatgcagcctcagtaacttccttttcaaagcagtggaggagcacacggcacctttccccagagccccagcatcccttgctcacacctgcagtagcggtgctgtcccaggtggcttacagatgaacccaactgtggagatgatgcagttggcccaacctcactgacggtgaaaaaatgtttgccagggtccagaaactttttttggtttatttctcatacagtgtattggcaactttggcacaccagaatttgtaaactccaccagtcctactttagtgagataaaaagcacactcttaatcttcttccttgttgctttcaagtagttagagttgagctgttaaggacagaataaaatcatagttgaggacagcaggttttagttgaattgaaaatttgactgctctgccccctagaatgtgtgtattttaagcatatgtagctaatctcttgtgttgttaaactataactgtttcatatttttcttttgacaaagtagccaaagacaatcagcagaaagcattttctgcaaaataaacgcaatatgcaaaatgtgattcgtccagttattagtgaagcccctccttttgtgagtatttactgtttattgtagctggtggtaaagaccttatccccaaaaagcattttaatctattaagaactttaatattgtatctaattagttgcaaaactggaagtgaaatttgcatagacttagtgctaattgccacagcaacttaaaagatgttaagtaatttttaagagatttactcaacattgaatcatggatgatgtggataaagacagaacctagaacatactgatgtcatcaagat

SEQ ID NO: 41210 - DNA, 1065 bp, Homo sapiens
aattccgtttacttcttgatctcctgattctacatcatatttttctattgtactcaacctatttcccaaatgggtttgaagcagttcttgaactatcaacaagaaaagtcccattttaaagaagaaagggtagatattttagaatgctatcagaaatattccagttttttttttattttgatgatgtaaggacaggactttagttatatgagattgatttacgtgtcatttcttaatgataaaagaatattcttaacttgcacctctctatagaaccttgatttttggttttggaattgcctgtttacttataaacagtagattgaagataaataagtaaaaaagcactgatggacaaggaattctgaaaatattttaaaacaaccatggaaactgtttatattattccagaagatcacaataaaatacaattttccttcaaaatatcactcaaggagcaaatgggaatgagtaaaataagtaaatttcacatggggcatacagatctcagtgggattttacatgtcgattctagataagttaacattgactttaaagacctaaccacctttaaaagtctaatgttttcagtctatgcacaattgtttcagtaacgtttatttaaagtcatatattttgcagtatttaaattaatggatatagttttagaaaggaaatgtattttttgggttttaaagtttcagatcaactgtatcttaaatttatcacactaaaatttaataaagataaatgaagccatcatctacatttttgaaagacaagaattaagtttgattgagaaagatgtttttaaaactttgaaactcataattgctctgtttttgctgttgttagtggcataagaagggactggctgtgttattctgcatattgcagttcttgtcaatgacctggtaagtctttccttaccctagtgaagtgttaaaattgcctgagacgtgacgagcattttgtttgggacctgtgaagccctagcatttcgtctggtgttttggagccagacaggccctgcagggtcagaggaggggaggtctgcgatgagtc

SEQ ID NO: 41211 - DNA, 2068 bp, Homo sapiens
tttactggtaagcacaaagttttgttatggctcatttatatatgctagtgcaaataggaagaagattcaagttagtgtataacattgaaaattaactattttttctgtgtaatcagactagactgtctacaagcagatttgtatttaaacatattacataatattggtattgtattactgcagtagcacgtttatattttaaccattaaaatcataaaattattttaaaataactataatatcttaacttagggaactggattgctgtggcttccgggcggcataaagctttttgcagtgttttataccctcggcaatcttgctgcgttagccaggtacgtttggcttctcaaaatatcttgtttgctcttgctaccaaatttacctttctaataagcactttcccagtaggatgtttatgtagttctgtacatactgtgaattcagccacaggatttacattcattaaataaatatgtattgactgctgctgtatgccgtctcccataacagacggtattagtgctaggaatagccagcctttgtggggcacttaatgtgtgtctgggactgttctaagtgttttgtatgtattatgacgagcttgtgaggtaggcagtattatcatccccgtttataactggagataatagcacagagcaggggagtcagtgctgcccatggcgatgaacctaaatcatggctgaggtgggaatcctgcaggcagtgggaatccggaggtgggatcccaccatggctgaggtgggaatccggagcccaggcttggagctgctgcactctaggctttgttcttgtggagcttacattttaatgaagaagatgttcacatgataagccagaaaaagatgggatggcattggtgctgtgcagagaattaaaacagggtgtggcagtagtgacagagggctactttatattgggagtatgagaatccctctttgagaatctttgtcgcatctttgggttgttgtttgtcttagccctttttatgctgcagtaacagaatactgtagactgggcgacttaggaagaatagaaatttttctcacagttggaggcctgaagtccaaggttaaggcacatccatcctgctgatagatgcatcccccaaggggaagatccctgtgtcctcccagggcagaagaggaaagagcaacccccaggcagcctctcctccaagggcctttgatccctttcaaagggaggagttctcacagcctagtccggtcttcatactaacacactgaagacacttacattttggagaagacaccttcacaccatagcatgtctattggtatagttgtaaagtttctttataaagttaaggaaaaaaaaaattttagtgagagattttaattaaataaagcaacagggcttcttttttaaaaaagtagtttatttttgcataaccagataaattagtagacctgtacctcagtcactttatttgtttcaaatagtacatgctttttaatgggacctgtgaagcaactgaagaaaatgtttgaagcaacaagattgcttgcaacaattgttatgcttgtaagtaaataatacatttttaaaacttttattgaagtattctttgcactgttattttacgaataattgcctgttatgtatgtatacttctttttttatttttatttttttttattattatactttaagtttcagggttgtatgtatacttcttgtgttgaatataataattatatccggccgggcacggtggctcacgtctgtaatcccagcactttggggggccaaggtgggcggatcacctgatggcaggagttcaagaccagcctgaccaatataatgaaaccccgtctctactaaaaatacaaaaattagcccggtgaggtggcatgcacctgtaatcccagctacttgggaggctgagacagaatcacttgaacctgggaggtggaggttgcagtgagccaagatcacaccattgcactccagactggccaacaagagtgaagctccatctaaaaaccaaaaaaaaaatatatcctatgtggttatagagttcaga

SEQ ID NO: 41212 - DNA, 1643 bp, Homo sapiens
acaggcgtgagccacagtgcctggcctatggtatttttggtgtagcagccagcacatagatttttaaccaggagctggatcccttacccagcacttagaacaggcacatagcagcactcagtatttattgagccagttagtggatggatggatggatggatgaatggatgtatgagtgtacagaggctggaaggtgaagtgaagtaagctttctgtttaagatggaagggacttcatgtttaaaagttgatggatgcattttcagagagtgagaacatgttcactagaggaaaaagcccaatagcatcaattccctgagcaggtaaggggttggctgtaaagcagggtggacaggtggatctcagctctgtgggaaccaggaaaggacaagagcatgggtgttcttagttggtgtgtttggtggtttggtggtttggtggcagcaggaaggtaagggagttcacactgatggctttgggtttctgtgtgtgaagtaggggaagttgtctgctaagaatggaagtgtggggcaggaagtggaggtttgaagtggtttagagtaaaatggacgttgagataaagcaagaagccttagattgccaggcagcaatgtgcaggccatggggggctgatgaggactggctcaggacccccctgccctgtgcctgactccacccagcagtgctcagctcagcacctcctggagcaggaggagggaaagctgcactccggtgggattttaccaggtggaggcagcggaaagggaatttgaatgtcctgttgaagccgctgaaaaaacggagaagggccggatgaggagttcaggaggccaaggagtcagcacggtggggccgaggaaccagcctgctgccagaagaaacgggtcggagagcggcagccggaattttggcgatggtgtaatttcgagcaggaagactgccctgggctgggtcactgagtggagtggaggggaaaggccagtggagatcaggggatgctgcacagaaaggccaggctgcccacgcacacgtggaacccgtgccgcatgctgcaaggatctggataggccccgcgatcaagagtcctgaatgagaaggagaaagtgtggaccccagcagcgggtgtggggagcgggcggttctgcctggaatgggcctgagggtctgcggatgtctgtttctttttctcacttgtctgcacaactttgactttttatacccactgctattttgaaaaaggagtgggaggaatactggattcagtgtcatcattagtggaaagccacaagtgtttcctatgtttagatggcagaagcccaggggcaaggctcaggtccttccagctgtgctgtctcctggcgatccgtggattagagctgttcctcagcttctccgtcacttaaaggggtgggtttcggctgtgctgtgggagccactcattcagccttcatgttgttgctgctaggactacattttcctctattatgtttctcacctgcttttgtaaaaaattaatgaatgaagttctagttgcaagcagtgctgtgcttactgtggcgggaataggggagcagcccctcctcaagggcctgtattctcttggcttcctcttcctctggtagcagataagtaaaatgatggatg

SEQ ID NO: 41213 - DNA, 1031 bp, Homo sapiens
ccatctggccttctgacttaggaatccgctaacgtctgccctcgctttcccaaataatccatcgctcccacgtactatttggttttctgagcctggtgcggggtctggcctcgggctgtgcagcgtaagtagctatgcagggcatttatcctgcaagctgcagtgagccgagaccctaaagcttgttgcatctgtttgtctttggaggtaaaggtggtgttatgtgtgtgtttgctggggggtggtcttttggaaatagggagactggaggaaaaataaacaggacattggtaagtgaaataatattgaattaaaatttttctgttaaggcagtgagccctggtaagagatttttttttttttcttaataaaagcccttgtgtctgcgccttaccagcgagacttgataagggttacttcctccagcaagaaggttaaaagtagcagtggagcaggaactgcggtgtaagtttttttgttattgcatgcgattatattgcacgttattgtgtgctgtcgcagaagttggacgtttaaaattgaattgtatttcataaggatcttctatttgtctctcctgacttccttgtcattatacttactcagcacttggtgtgggtagagttctgggctacagttttgggttcagagagtgtaagacaagtatctgttctcattgcactctgtaactctgtatattaccacagccacatgtggccaatgaattttttttttttttttttttagatggagtcttgctttgtcgctcaggcctggagtgcagtggcgtgatctcgactcgctgcaacctctgcctcccgggttcaagcaattctcctgcctcagcctcctgagtagctgggattacaggcacctgccaccatgccctgctaattattttgtgtttttagtagagatgggggtttcaccatgttggtcaggctggtctcgaactcctgacctcaagtgatccgcccaccttgacctcccaaagtgcttggatgacaggcttgagccactgcgcctggagc

SEQ ID NO: 41214 - DNA, 1046 bp, Homo sapiens
agaactgctgattcctacaggaacacttggacaatccaatacctaaatgttaaccatcaattaacccagtaaacctgcaagatggaaacgaagatttgttctcacgagtttcacgtgattatttaaagtaagggaaatttcagctgtttatagttctgtcttaactttttcctctcttcattcttttcctctcattttttgtagcacttctggggcccagtagccaactggggtcttcccattgctgccatcaatgatatgaaaaagtctccagagattatcagtgggcggatgacatttggtaagaatgcagatttggataattgggaggactttcaacatagtagagctcctgcttgcatttcaagattgtagcactagatgttacagtcactattagaaagtcacatacagaatgtgatggcatggaagagtgttacttctctatgtcagtaagaaacaagattaattagaaatatttatctaggaagtagtaacatcttatttgcctttcagatttagcacactgaactgaagactgtgtcatctgaatcattctaatagtcactttaatgatttatattgtgaacttttttgggggaaactgtcattaaactgacttgaaaccctgatatttgaacataaaactattgtggagggaataaataacaattctttcagataatgaatggattataagcaactccaggagacaaaaaaagtgtctagaacaaatttcagcctactcttgctcggaaatatgttccttaaatgtttaaataattaacaaaaatgcatagcagtacagtaaatttttttatgagcttcctattgatacaggcatttaagtaacaacttttatctgtcaaaggctttcgcagaagaggttcttttttgatcagggcaatggaactgttcatctctgtggtcctatcaaccctctcagttttctaagttattgattgtctttgctctgctatttttggcagccctctgttgctattctttgacattcatgagatttgcctacaaggtacagcctcgga

SEQ ID NO: 41215 - DNA, 1061 bp, Homo sapiens
ccttcccggccagagtggcagtggggacctggagggacgaaagcgacggcgctcctcaggacagggtgaccatggggacgcctctcccggcaggggtgacagtgggcgcccctcagggcagggtgacccggcaggggtgacagaggctcgttcctctcccatggttggcagtgggcacgtccctccgggccagttgacagtggctcgctcctccgggcgggagtggtttcctggccggtttctaccagatcctcggagtgggtcgccggtcacctgcggccgtccaggtgtgccagaggcggcgacctgggtgtggggtggggagacgccagcgggaggcgctgctgagagcgcggcgcggcgctgttggagcggagcttcgggtgcgcccagcgcgcttctgggacagcggaaataaaatgtgctggccttgggttcgcctttcggttttctcattctaaggactttaagcttgggaggaagtacaatttaagatgtttttatatacgaaattctgtcaaccaaagtaaagtgacgtgtctctaaggtcatactttttcttcttgttctattttctgttaactcctcctttccagttagaaacaaagagcattcgcggttggaaagcctgaaaatacactttctataatttatttgcacctctcatcttggggcgcttgcttttatttcaaaatattgaatataactttgaagcagttttaggttatttaggagtgtaattttagttagtttttcagtgtatgattttaaaacctaggtacgtgtacagctgcggttttttttcggtagttaatagtgtggtcaagaggtaaagagatgaaagctgaggaggaataaatcctgttataaccacacaaaagggatagtatgaaggcaacttgattttagcaataaaaaagttttaaatcctgaattttattgcaaatactgtttacttctacttttatagagcagtagggtaggaaaaataattcagtctgccatatggtaaacttgtaaacagaagcttcacttctgactttcaaaaaaagacatttcta

SEQ ID NO: 41216 - DNA, 1049 bp, Homo sapiens
acaggctcccacccaccagccaaaacttggctctcaactctcccactgcaaacctctccccggtctttcaacacaggctagtttcctattgtttaggaatgcaacacattaccccacatctagtggcttaaaacaacctgagcttattgtcttccagctctggatgtcagaattctgaaatctgtctcactgggctaaagtccagtgtccccaaggctggttccttccgcgggctctgggggctgagagtggatacacagcagatggtggccaggctgggtgcccgacagaagtctgacccacacctgcagccagcccctttatctacaatacatagctcgggaggccagcagctgtgtcaggcttgcaggaagccagattgctatctctagtgacagcccaggaagctgaactataaattctgtgacagtcagccccacatggccaggacttgatgaatgactgacagcttcctaagttctgtccctgcttccaagtcaggaccaaccagagaacacaaatatgcacccaaagcccacaggatgccctgattttagttccccgcctccatcttttgcagccagcagcccccctcacccacatcatcttccctatggcacgttccccctgcatgggttgttcactgtctgtgtgcacggccctgtgagggcagccactccagggcaacaaaggctttgcttttgctatagttccagcacctcaacaaagtcgggcacatggcaggagctcactcaatttcagcacacaatgaaggggctccttatcttcatttagcataaatatttggtagtgaaaggctaagtgttgattaaaagaaaaatatatggccgggcacggtggctcatgcctgtaatcccagcacattgaaaggccaaggcagttggatcacctgaggtcaggagttcgagaccagcctggccaacatggcgaagccccgtctctactaaaaatacaaaaattagccaggcatggtggcgcgtgcctgtaatccgaactactcaggaggctgaggcaggagaatcatctga

SEQ ID NO: 41217 - DNA, 1047 bp, Homo sapiens
aaacaccacatataagtcaaaaccaactggacttagttttgtgaggtttctggggggacagggggaggggagatttgatagtcttctgtttcttctattaaggcaacagatcataaaacctatctcataatataaaatatatatttaattttttttcttttttttctttttattttttaattttttattgttttttgagatggagtctcattctgtcaccaggctggagtgcagtgttgcaatctcagctcactgcaacctccgcctcctgggttcaagccattctcctgcctcagcctcccaagtagctgcgactacaggcacccgccacacccagctaattttttttgcattttagtagagacagggtttcatcgtgttgcccaggttggtcttgaacccccaagctcaggcagtctgccagcctcggcctccagaagtgctagggttgcaggcgtgagccaccacgcccagttcttctggtcttaatcactgcaaaccgaaaagacaaatggagaagctgaaagaaaaagaaataggagaacagaagagacagaagaggaatgatccaaagatggagacacgacgaggggccagaagaagaggaaatgagaccacgtcgggctcgccttgctccagcaaactccccccggtccccttccaccatcagccctaagacagaagcaccactcccagtggcctttgctgaccctggccgggttggtggctctggctggtggctctggcttcggtgtcttctcagcactcctggcttgccactgctctaacgtctgccatcttttattgtcgttgtctgtctctgtgagtgtctcctggcacgtggagtttcttaaacaccagtcaccttacccaagatgccccagcacagacaaaagtgcctgcacctggccaggcctccaagggacccatgagggagtgaagacaacagggtggaagcagagaggcactcacacccagacccagtgcccggcagccttcacccatcctggagtccccaccctccctgtccctggagtgtgaagaaga

SEQ ID NO: 41218 - DNA, 1035 bp, Homo sapiens
ggcccatctcaacctggattttattataacttcaaattttataataacatgacattttatcataatggcactcaaaaaaagctgaatgcagaaaatagaatacaactatagattgttttctaaacagcataaacggatacttgtctaagatcacaaacccctttggcagatacggccaggcggtggctcggggctgtcttgactgacacgccttctcattccggcttgtttttcatgatccactgatcctccgttttccatgctgctcgacatcagacttactgtttccttctaacctgggccttctcactaaatgtgaaatatagaatgcagaggctttttggtctctctgagtgcagttgagtcaaggtgggttttaaatgcagaatctcataaactgcgtttctaagctgtgacgttcctgtccctcacatatctctgcacagatcccatcaatatcctgggccaattgacacttttctctgtgtagaaaatgcacgaggcgcatggtggaagacctcggagctgagcccagacactctgattgagtaggcctgctccagcacagtgatcctggcacggtgactcctgtgagcagccctgctggtccagacactgctgtcacctgaggatcaggtttacaaaacctcgctctctagattggagcatgctggccaggattagtttttaagccatcatttgttaaagaaagagctgtgttattgtcatcagtagtatctgtgggatgcttgctttcttctgcattatttaacactgttaaacttcacagccctaaggccaaagcactcatctctgctttgcaaaagtgaacagcaaagtgccggagggctaaggtgcttgcccctggtcacccagctcctacataatgatgcccggacccaaatcccacctgttcacctccagcattgaggcctcttaactgctcctactatcccactacttcctagggccacccaattataagctcaaggacagtacatgtaggtgtgcagcagcaggacagcccccagtcca

SEQ ID NO: 41219 - DNA, 1048 bp, Homo sapiens
ttaagatcatttaacattagactggattctctccttagaaacatgaaatgtgtttgtttgactcacatcactgaggggctgagattcctaaggttactaatgcataaaaatatgtgtctgcctgtcagtggcaaaatagaaccagctgtgactgcagcaccttttgaaatttcagagaggaaaaagggcttccaatcacaagcatatctggggattgaagtcccagtggacagccgcagtctgtgcgggtggaggatacaaccgcttccctgggcagctttgctgtcgttgaacttggctttttgggaattatgaaatagcatcatagagctttagggtacaaaattgcattcaaagtttattcgttttggctgggcacggtggctcatgcctgtaatcccaacactttgggaggccgaggcaggcagatcacttgaggtcaggagttcgagaccagcgtggccagcatgacgaaacccagtctctactaaaatacaaaacattagccggacgtggtggtatgtgcctgtaatcccagctactcaggaggctgaaacatgaaaatcgcttgaacttgggaggtagaggttgcagtgagctgagatcctgccatcacactccagcctggatgacagaatgagactctgtctcaaaaaaaaacaaaaaaaaattattcatttcaacttctttgtttatttgggtgagaaaaccaagaccaagaactttggcttaggtcacagaaccagttaatttcaagactaatgttagaatcccagacccagtttccagatctccttccattatgttattttgcctcttttatctttttacttcttttgtttctttgcatctcagtaaatactggatggaaagaactttggtgttctgagaaccttatagcagaaaagcactatgaaagtgatagtttaggacagatctttgaaaaatctgtgtgtttgggctgggcgcagtggctcacgcctgtaatcccagcactttgggaggccgaggcgggcggatcacgaggtcaggagatcgagaccatcct

SEQ ID NO: 41220 - DNA, 1041 bp, Homo sapiens
gaggaaaactgggtatcttccatagacttccatgggtgtgccccagaaaggtgtcaggtctcagtgaccgcaagaccctcatccccaagagagctctgctttcagggcattgacagtattgcctaagaaccacgacacattgctgggcagagtaacctgcatctcattcaacagtccacttcatagatgaggaaaggggacactggcccatttgctaagctggagttaccgtcacctggctgggataggataccctctgagtgtctggcctatgagtcactgcacttatctacaaaatacgttacccatgccagttgcctaatgagctaaggtggctttgagagcaaggaaatgcaccaccctcaccgtcctaacttagcagaaccataggtccactgagctgaaaggaatcttctccccactcaacctttccacacgccagtagagcctcagaagatgggatgtggaacctccaaagcttagtttgtatttcttccaacagggaatgtacatttaaactaattaaaagtgagattattaactcaagacttccaccaacttgctaaaggtgtcaatatgcaaagtcatttcatttaggaagcagttattagtttggagttaccaaagccagagggttctctttggtgacctattatttgagctatttcagctgtaactggcatttctcctgaaagacagtagggagtgaatgaggaagacaaaatgcgagactctacctgggatattgctagtgatgaactgctgagtggaaggagaatttcgttttatttatctatttgctcaattgttcatacactcaaaagattttagcacatactgtgtgcattgtgctaagcaactgggacataaaaataggatccctgccctcagtgagcttaatgtctaacaatagaggcaaacaagtcaaaagaagcttgctatcagggtataagtgctgtgaaattattggcagctttggatttaaatggtctgattagatcaattgtcaatttatttctatttctggtggtcacagatcat

SEQ ID NO: 41221 - DNA, 1060 bp, Homo sapiens
tttcctgctttcttactatcatttgaaatttttttcttgttctatactttgacctctattagtttggcaattacacattggatttatattcctttaattgattgctttggaaactttagcatgtatgcttaaccaatctattgaatttttgtctaaaggtaatcaagcctctttatcttcagaaaaatatgaaaacattagaaggttttaactgatcactgtcccgtatatgctatttttaaatagcatatttaagacatcaattccaacttaagtccacaaattatacaatacacaaatgatttactttcatgcagctcgtgtgtgtctagctttacccacacaatttcactggaagtgagaattttcttcgattgtttacttggaaatgtctttgttttgtccttgtttgtgaaagattttttttttgtaggacagagaattcaaggttaaagttattttctcttagcacatcgcatatattattccactctctcagcttccaatattgctgttgagatggtagctgacagtaattaacattcatttgtagaaaagttgtcttttcttctggttgctctggagagattttttttttcggtttttggtatttcaaatatttaatatgatgtatttaggtatcattttcttttcattgaatcctcctggggattttgggggtctttataaatatgaagatcggtatattttatctactctgaaaaattctgcagtattgcctcacctctttgaatagtgcttttctgtttttctttgtttcttctgtctcattctaatagtcagaggcatgctggatttttctccttctatcttccatatttcctaacccccctttcatatttcctgtatttctgtctttctctcaattatcatcagatccaacgtctcttttaccaactctttgttggactttgcccaaactgctgttaattgatctattgaatttttttttttttttttttttttttttttttttttttttttttttgtgacagagtctcactcttttacccaggctggagtgcagtggtgtgatctc

SEQ ID NO: 41222 - DNA, 1173 bp, Homo sapiens
aatcggggctgcttcatatggtctttccatccatcttcgcatcccagagaccagggctggaggcggaggcagagtcacgggagcacctgccgggcccacctgccgaggccctgctggaggggaatggctgttcctcattcaggaggcacaggcctgtggggagatgcccctgtgtccgagccacaccactcaggcagggcaggggaggcccctggggtgaaccgagttccacccccgcccaacccttcacagaggaagacgcctttgggttggggcgaagagcatttcccagaccatcgtcctgcccactccctctcttgtttctctcctcccccttcttcttcttccctgcctctcccctccctccctttcatctcctctcagagaccgctaacgccagacccctctgtcaatgatttccttgttttctttatatctttacccatgtagcattttctaagcaataagctgtgttttacctgtttttgaggcttatgtaaataagaagctctcggtgagcttccaccgtgtctctcttcctttgttcacggttctaggcgtgagcttcccctgtgtttagaggtgtgtgctgtgcacactcaggcagcccatgctcactgttgtgtagtgttctgccacgtgtatctaccgcagggcgcctgttccttccaccattgctagagattgtggtgacttctggcgtgtggctatcctgcaaagacagctacaggtattcctgggcgtgtctccgagtgcacctgctggggctctgctccatgtagtcctgaggtggagtcgctgagccgtgggcctgcacatcttcaacctgatgagattgttgttttccaaactggtggcgcccgttcacactctcgccagcccagtgtgggagtcctggctgcttcatgtgtttccaaccttttatagtcagtaagatcttactagctatgagatattttgaattataacaagaaagacatatgcatcttggttctgatggagagttttaattttttatttggtaccttatgtgaagctagaacctttccagcctggtcttcagttacccgccctgctctgtctcagatccaccagccaggtgtgtagcctccagcccaggctgtggcagaatcctctgcagaccggcctgagttggcagccactggagataca

SEQ ID NO: 41223 - DNA, 1052 bp, Homo sapiens
gccctcatctctggatgccctggaaaggctgcagttctgaacctgcaagagggaggagcaaccctcaacccacagtggttgcccctggcaactcctccataggacttcccgggccccacgtgggttcctccttgctatcacacctgcaggagggtggctaccctcaaaccatagtaggtctccccataggccctggcctaccctggacctcggtaggaatcaccagtgaggaatgaggagggggtgaggcagggagcagccagaatcttgtctttcacccactgggatgaagcatcacaggcatgagctgataaaccaagagcaaacgcggtgggtcaggctggagagtgagctggcaggggatggggaggagcagggatcccagaggcagcaacagggctttggccacacccagaaggcagcgagacttggaagtgcaggctactagacagtcttgcagccaacggtgctgggccccgtgcaattccagcactcaagggagactctttggagccatcatgaaaacgcagtaggacctgacttggggcaggttctcaacccccaacagaggcgagggtgaggcagaatccaggaacatgaatttgggatcagacagtgtgttgactacatagctgtcctctctcagctccaaacccaccctctacacatggcctgggggagcagatgggctgggagcctcgtccatgttccatgtccactgccccatgcaccctgtgaatagagggtgccagagagacaggcagcccgggggaaggagcaggtgctgatcccccagctctgcctcatattcctgtcactgtccccattaagacctcctaatgctggccaggcacgggggctcatgcctgtaatcccagcactttgggaggctgaagtgggcggatcacttgaggccaggagctcaagaccagcctgggcaacatggtgaaaccccgtctcaaccaaaaaatacaaaaattagccagatatggtgaggcacacacctgtggtcccagcttcttgggaggctgaggtgggaggatcacttgagc

SEQ ID NO: 41224 - DNA, 1025 bp, Homo sapiens
cctggttacaagttctacatggagattaggtgagatctgatcatggctgacttcaaatcaagaggaatcttcccgtgtaatagggagccgagccgctagagggtgaggcgtggaatcacagggtggacttgcgcttccggagatcaaccggccacactttctaggggagaccggcctggggcagggccagcccttcaggagaagagaagtggataaggcagttgtgcaggctgcacctcccaggacattttttttttttttttttgagacagagtcttaagtctgttgcataggctggagtgcagtggcatgatcttggttcactgcaacctccgcctcctggtttcaagtgattctcctgcctcagcctcctgagtagctgggattacaggtgtatgccaccacggccagctaatttttgtgtttttggtagagacaaggtttcatcatgttggccaggctggtctccaacgcctgacctcaagtgatccatcccccctcggcctcccaaagtgctgggatgacaggtatgagccaccgcacccggcctcccaggacttttcattggcgagccagtgaatcccttacggcgaagcctgtttacactcaactttctgttatgacgattgacagcttccttacctgcccagagaaaagcaaacaaatggtgacctcagaagcagcatatagaactcagggaacagagacctttaaaaacctagagagactgtgaagatatgacacaatagccaaaaaacaaacaggatgaaacaaataaggaataactggaaaagtgaaagcattcctcccgatttaaaataggagtgctaaaacacaaaaacaaatattgggacagtgttgaggaattctagtgagtggaactggaaacaggcacaaaataggattgaaatgagaggaaactttactagatcttcatatttcctattggtgagttccttatgtcttaacccaccgagaaggaaggagcctgcatgttgtccatggctgtggaggggaccacccag

SEQ ID NO: 41225 - DNA, 1031 bp, Homo sapiens
tcccctgacctccgtccctgtgttagcagggtctcagtttggtccagtatctgaaccctgcctccagagtcaagtcccgtctcctacctcactggggaggttgggccctgttttctgatctctgtccccagctacatctagatgacaacacctccttatagactcctccagttatcttgggttcctacaagagcgtgtctgggatagggtccaagatgaactcctgcacggtagccccttgctgctgcctggtgagctctgggtcctgagaagggaaggggaggtgccgtggctgttgtaggcctgcctgggggctggaaccttagggaccacagctgccgaacaccccaaggacctctcgctagctgctctctcctgtatctccaggctgtcccagcctcacccaccatgtggtcggacgagattcagctaccagcgtatcagcggtggagtgaggccctggatgcgaaaagctccagatgtgtttcccttctgtgttctcagtctgatgtgctctgacatatttgcgcctacctagttatccagagacattgatttccttggcggggaagcacgttgggaaaaggaacatttactgattaatggaaggaaatatttgagtcacacattgtccttagatgaatcattgatttattcccagtaaaatctgacttatttaaatggccacacaagtaactaataaagtaatttaaaatcataatttaaactaatgagatactttaaaaacatatttctaggtctctagagtggaaggaatgtggtctgtagattataattgatcatggggagcaaacactttgcttcctgtttactcactgcttgcttggaaatacattggtacatttctggctcttgccaaaatgtaactctgagttaggagagcatcacttcatgtaattgataaagttaaaactttgtgcacttttggacatctgcaatatgcaatactctccaacacagaggcacacgtaggtatgagttgtcgtggaaatgcatgtgtttccatggtt

SEQ ID NO: 41226 - DNA, 1025 bp, Homo sapiens
ccgaaacaagagcaccagggctcagctctgagtcaaatgccttttctgtgtttctcatgagaacccaagcacaattcaagctgttgtctctgtgtgagaatgtgttctgtgtttcaaaccagtagcacagaaagaacactggcctgcacctcttcccatccccacagcgtgctgggggtaaccctgcctgataccctgtgggctgggattaggctcgaagtcacaggaaggaataattcatcactgatggctggccaggagatggacatggttggaacagggtgtggggaagcctaacccaactgggctgttggcataaacccatagggaaaggcgggatcagggaggccattgtggaagctgaggtatgaagcactgggacttggaactgggtgatggcagcagcgataggttaacgtgggtgacagggtgtggtgaccgctgactatgaggggcgcactaacaagcctgtcagcttcctccacgacggaacttcacaccatgaccccagtcgtctctgcagataacgtggccagtgctgaccccaggacatcacaggcagcactttcctcctctgcttccctccggatatttcacaaagcgcagttttgtgttttttacttgctagaataataaagctgaataaatggctgcattaggcaggaatggttttgcttccagaacacataaatcgtgcatctgtgtttgttcttcatgtgttttcagccagtcatggatatttctattctttattttctctccatatcatgcgtgaatgtttttgtatttctccccagggctgtgacccagatatctacgcactggtcctttaaaaggagaacagagaaaaaatcagtagctgtgtcctataatttttgtgcactgtctatctgcatagatatcccaccaactgttcacaacaatctgctctttcttctccctcacaattccttaaatttacttttctctcattttatttaatcaagcatgactttattaaaacaaaacaaaacaaaacaaaatga

SEQ ID NO: 41227 - DNA, 1026 bp, Homo sapiens
tgtaatcccagctacgtgggaggctgacgcaggagaatcgcctgaaccaggaggtggaggttacagttagctgagatcgtgccattgcactccagcctgggcaacaagagcaaaaactccgtctaaaaaaaaaaaagaaagaaaagaagaaaaaagaaaaatgacaaataataaaacaatcatcggcgaaaaatctataacaaatgggcttgcctcaagtacagttaattgtgagaggcacccctggtaaaatttctgggtcatttcagcatgctgacctgtgtttctggtgcactctggatcttagagagatatgcactaccactggaatctaaaactcgccctggatggaacgtgtgctgtgcaccccactcccttccaaccccacgctgctccaacttcacccgcgggatctgtcactgccagtggtctgctgagctcttccctgttaacatcccagtttccttggaaccccagctctcctcacctggctcccacttgcaaaattccctggccttcttcccattctcagggtggcagagcagagctgggagagactcctggtgccagtgtgtgcccagcgccagcctctttggcaaccattcctccaggctgtggctggtctttggttcctgttctcttccatctcctacagcgcacctgggccattctgcagctctctgttgcggggaatacacagcaatgatcccagatgttcactgtttttggtaacctctttgcaatgctctgctccttgttcccagcaatggcgatgcctccacccccttgcaaaacctgagcctcagacgaactcagactcctcttccttacctgctagttgcccacagacacactccacctccttccctctgttgcagaggtgagcgcgtggcctccactcgcagcctgtgtcctgatctccctcccacatgtgtcccagcagcccattctccatcctcactccctgctccttctggctccggatcctcctacacagccatgagcaaggtccttgttctcttcctc

SEQ ID NO: 41228 - DNA, 1028 bp, Homo sapiens
ataaatgtcatgtgcttgaatcatcctgaaactgtcccccaccctcatccatggaaaattatctgccacaaaaccagtccctggtgccaaaaagattggggactgctgccctaaatggagactagtccgccatgagagtattgtcaattcctactatagatgttcacgttgtttcagttttttgttttgttttgtgtcacgttgtttgcttttgcaaataattgctataaacatatttccttgttgatgggtgcagaagtttctctgcagcacagcctgaagcggagtggctgggcaggaggatgccccttccagctcttcttatcctgccaaagcttctccagcatggacacgcttagggccttctcagagttctccaagtttgatggaaacttaatccaagatggtctttttgtgaatgatataattcagaaattggatctaaattcagtggcagtgcaaggctatagacataaaggtttacagtttctaaactgagacttctttctgactgaataatgtttcactgattgccataacaagaggataggaactttcaaaatctgtgatattttctcattctgtatgtgaaaacactgtcatggtaaaggtgaggatgtttaacattttatgagacaaatttataaaatatttaagtacccccaaaggaggaagtgatttataaataaagcagggcactgcttagcaccagttccatggtcttaggtatgccagcctcagccacacacgctccctctcatgttgaataaggcacattgtcacagggaaaatcagcacgcccccagtgactcttgcagtgcttcaggccccacagacctgtgcttaaattcattgactttcttaacacccctaatgaacaatggctgagtgtcttaattgggacatgaaagaaatgattgccgggaacctcctaattacttcaccaatatcagccgctgcttgtgagcacagagtaattatataccattggatggtaagatggtgatggcttgctgatagcttacgtt

SEQ ID NO: 41229 - DNA, 1898 bp, Homo sapiens
tgctccggttataccagctggggactggggtgaaaccatgaacaagatagatggagccctacatctggcttaagtctggcaggacagccagcccctttgctctaggtaaaccacacacttcctacagaaacagggtcaccagcaaagaggagtttgtttttaatgccccataaagggagtggtatcttgtttctgccctctgcagtgactaaacccacagaataaattgcttatagtcggtaggaatgggccctgcgtttcacagcaaataaatccaggtgcagagttaggggacaaaaatatttacctactcagcagagtatacaaggcttaacacagtggttagggagtgggccaccattaccccaagagtatccatctacttgatgcagattttaccaagaaaccagcaacaacaagcacaaaactatggggagagtcagggggagaggctaacaaccacataaaatggtgtggggaccgcaggtgggagaaccaggttgtgatccgtgcttttccttgggagaaatcaattaactctgttagtctcagtctttctttcttttaaaatacaagggtttgagtaaatgatctctaacaccaagaatcatccttttctataataaccttaatcatcattatgggtctatcatctctgaattaaattaaatatttaataacccattaatgttcttagctaatgtcagcttttgaagtgactgtattcctatatttttactaattataaaataagattttgaaaaatctctctctgcctttctgtctcttaaggtttctctttccattcattctaaattgcctctctagacttcagtgtgtccgctcgctgttgaatgtgaagctgaggttggtaaaggatgtgtactctggtcttgctctgcggtgactgtggacgcgcttcacagccctacgtttcagaggctgttcactctgtgtgatgtcttcatcatactcacagaggacctgggttgtggctataccgcccattggctaggccggcccatctggaagatcacaggttattaatgactaaaatagttagaaacgatgtctttatttaaaataataagcattgattttatctaatttctaacaaatgcacatgagacattgaatacccaggtacaaatggacctggtgtcgcctttgaggtctcaggtactccttggctggcctgtgctggcccctttgtcttctggggcccctttctccaaggagtctggcttctgtgctccacggagtctggcctctgtgctccatggagtctggcctctgtgttccacagcgtctggcttctgtgctccacggagtctggcctctgtgctccatgctgtccttggtccacagggcctgaccttgaatcgtcatgaagacatgttctgctcattctgtagatttcctagagtctgtgccactgtttggctttgcatagaatccccaaatcggctgactattggacttcactaggatgcgaatggtgcaaagtttgatccaactggctgtggtggaaaatggaaacttgtggggcttcgagcagaaaatttgggaataccttgattccaagctcagacacttagacccctctttccacggctccagtggcggcccagccgttccagacacctaggccagcagagaagccaagcctcaagcccctgtcgccatctgttatctgccttgggctggccggcctgcacctcctccacgccctgcggtgcagctttgcctcccctgaggggttacaggctctgctcagctgcctcctgctgcagagcagaccacagcccagctggctgactcagggccaactcaggggaagccctcctgtgactgtgcgtttgacgggaccctggcagctgccgtccctggaactcatc

SEQ ID NO: 41230 - DNA, 1768 bp, Homo sapiens
tgttctgtatttggaattaaggtttattagacaagttcatttttaaagacatttttctgggctggctgagccaggctgccactcctgtgttcatatttagttctgctccatgatgattagcaaaataaaaggagactgttcaccacagaaggacttaaaatgtactgtgatatcagctttccatactgtaagtggattggaggagtcactgttcctaactcaattttctcaaataacaagaaacacccataaatgattgttgaaaaaggatatctgaattgtatggttttctggtcacatttgtcagaaccccttttttcttagatttttaaaaagaaaataaaaccaaatgttatttaattgattattatctgctatttttattattattttgttagatttcattattgaccttctagaacaaaaaggaagaaaggtaaaaaatctttttggcaataccttgtctttatactaacatgtcctaaaaacatatttgaatgacttaagtctcatataaataagatcgttgtagtaaaatcattgagtgctttatagaaacaagatgcctggaagcaaattgtggtgcttaagaatacgggcttggactcagctaagtctgacttcaaatgctggctctgcaactactagcttgtgactttggataaattatttaaccttgttcagtcttaggttcaacagctgaaaaacggtgttcatgttgctcagattctcgtaaggaccacgtgagtggagctctcgaaccaggagcaccatgcctggcgtggagcaaccttgaacttagtcgctatctttcaggtgttttctggtccattgtctatggaaagtaattacttaaaaaataataaaccctcaagtaagtagaagaaaggagcaacagctcccataaactgaaagagccaataatccctgccctatacacatcttttcaaacctggagccagcgacctagggaggagactgaggccggcagaactgggtgacctgccttggcagcctagtggggggtggcacatgaggggtgaagagaagaagcgccaagtccctcccctgctttccggggaatgtcccagacaggcagaggcttacatcaagaattcggaagattgtcttatttcagaatgagactgcctttacaagcaaatgggattgtactagtcagtgctctccaaagaaacagatctaaaaagatgcagacagataggtagacgcaaacacagaaagatttacacatatacagacacgtgtatacagagagtgaccaatagctacaacctgctctaagaaggacctgacagccagggcaagctggggattttcctgacatcagaaccatcctcccagccccagctcagcccgtgtacaacagaagccaggaagcacatgcaaagtgaggcaaacagggattattcatcacaaatgcactcatcaagccaaacttattcataaatttactcggtagaatgcttcctctgtcctggatgagacatggagaccactgcgggacttctctggtctcatgtatagacatgcatacataggtatatatgtggttatagataggtgtgcacgtgtgcatatgtggttatgcataggtgtgcacgtgtatatatgtggtatagataggtgtgcacatgtgtatatgtggttctgcataggtgtgcacgtgtgtatatgtggttctgcataggtgtgcacgtgtgcatatgtggttctgcataggtgtgcacgtgtgcatatgtggttctgc

SEQ ID NO: 41231 - DNA, 1074 bp, Homo sapiens
acattttttccttcatttcaactttggtgaatctgacaattatgtgtcttggagttgctcttctcgaggagtatctttgtggcattctctgtatttcctgaatctgaatgttggcctgccttgctagattggggaagttctcctggataatatcctgcagagtgttttccaacttggttccattctccccatcactttcaggtacacctatctgatgtagatttggtcttttcacgtagtcccatatttcttggaagctttgttcatttctttttatacttttttctctaaacttcctttctcacttcatttcattcatttcgtcttccatcacagataccctttcttccagttgatcgcatcggctcctgaggcttctgcattcttcacgtaattctcgacccttgactttcagctccatcagctcctttaaggacttctctgcattggttattctagttatccattcgtctaatttttttttcaaagtttttaacttctttgccattggtgtgaatttccttctgtagctcagagtagtttgatcgtccaaagccttcttctctcaactcgtcaaagtcattctccgtccagctttgttccattgctggtgaggagctgcattcctttggaggaggagaggcgctctgctttttagagtttccagttttctgctctgttttttccccatctttgtggttttatctacttttggtctttgatgatggtgatgtacagatgggtttttggtgtggatgtcctttctgtttgttagttttccttctaacagacaggaccctcagttgaaggtctgttggactttgctagaggtccactccagaccctgtttgcctgggtatcaggagtggtggctgcagaacagcggatattggtgacccacaaatgctgctgcctgatcgttcctctggaagttttgtctcagaggagtacccggccgtgtgaggtgtcagtctgcccctactggggggtgtctcccagttaagctgctcgggggtcagggacccacttgaggaggcagtctgcctgttctcagatctccagctgcatgctggg

SEQ ID NO: 41232 - DNA, 1035 bp, Homo sapiens
attttggaaaattttgagcaattgcagaagttgagggaataacactaggaactttcttgctcccactgtgcaacaaatatcactcacagaaaattttgttccactttaaactccatctcttcccctaagcccacatccaccagactatttttgaagaagtttattatcacattatttcagctacaagtatttcaagaagtgtctctaaagataaggtcaccctttacacacacacacacacacacacacacacacacacacacactgcaaaaccaatacagtgcataacaatttaataataattttttagtatcatcaaatgtcaggtctttgactttcaccagttatctgatctgtaatagtttgtgtgagtcaggctctaagagaggctcatataccgtggttggttgacacacctcttaagtctcatttaatatgtggtctccttctacatcttgcatatttcttgccttgttaaagaaactggaccactgtcctgcagtgttctgggcattctggatctttctgcctgcttcttcattgcatccttgaacatggtcccctgtctcatgtagctcctgtcttttgtcagttgggtctagagtctcaccaatattcaggtggggtcgtctgccctttggatgtctggttgtctttttcttcagttttggtgattgccaagatccaataactcactaggagtgatcaaagagtgataccctcattctagcacttcttcattgatgaactggaatacttccttaaaagaaacttgtcattctaccaagaaaaagttatgactgaggaaccacaacattctgtctaaaaatccacttacatggctccttatggaaagtccttagatctggcaacatgggattgcattcattcattcattcattcattcattggaaaacacgtgctgagcccctatgtgtgaggcactgctttaggggatagacctttgcctgaacagggcagacaaatccacatctttgtcctgattttctgctggatggagacagacacataaat

SEQ ID NO: 41233 - DNA, 1079 bp, Homo sapiens
aggggaaagcgatgaagataagtcacatggctgtgtttagaaaccttcagaagtgataccagaggtgaagtattctgtaatgagctgattaatacattgggcacagaagtggaaaaaaatcagaaaacttggaggtagaaaaatagaaaataattaacatgtatatttactcactgtatagtcttatatttattaaaggtttttaatttgttgttaaaaacccccacaaggaagttttcagactaattgaattcactagtgaattctatcgaacatttaaggaagaaatattaccaattctacacaaatatgtccagaaaataaaagaggaggaagtattttatgaagccaaaattaccccgatactaaaacccgtgcaaagacattacaagaaaaacaaaaacaaaaacagaaaactataggaccatgtctctcctaaatatacacttaaaaaataatatatattttccttaggaaaatattagcaaattgaatccagcaacatacaaaaagaataatgcatcataaaaaagtagaacttattccagcaagtgcaaatttggtttaatatttgaaaataaatgcatggaatttaccatattaacagactaaagagaaaaaccacatgatcatcttaatagatgcataaaaatcacttgagaaaactcgaaatctatttctcctaaaattctaaaaattatggataaaaaagaaacatcctcaatatgatacagtgcttctacaaaaagctgacagccagcatcacacctaatgtgaaagatggaaggcttttgccttcagatgaggacattgcaccactcccattcaacattatactgaaaattattggtagtgcaagaaggtaaaaaagaaatgtaagttatacaaattggaaaggaagaaagcaagctgcatttattttcatacaacattactatttacctagaagattccaaattatctgcaaaagcagctattaagactcacgtgtttaggatggttgcaggacgtaaggtaaatatgccaaagtcaattttttatttctttataaaggaaacaaaaatgagaaattgaaatta

SEQ ID NO: 41234 - DNA, 1034 bp, Homo sapiens
aataataaagcaatgctggatattgtcaaatgctttttctgcatctattgggatgatcacgtgatttttgtttttaattctgtttatgtgctatatcacatttattgacttgtggatgttaaaccatccctgcattcctggtatgaaacccacttgatcatggtggattatctttttgatatgctgttggattcagttagctagtattttgttggggatttttgcatctatgttcatcagggatattggtctatagttttctttttttttatgtccttccctgattttggtatgggggtgataatggcttcatagaatgatttaagaaggattccctccttctctatcctgtggaatagtgtcaataggcttggttccaattcttctttgaatgtctgatagaattcaactgtgaatacatctggttctggactttttttttgttggcaatttaaaaattaccacttcaatcttgctgcttgttattggtctgttcagagtttctatatcttcctggtttaatctaggagggttgtatattttgaggaatttatccatctcctctagattttctagtttatgctcataaatgtgttcatagtagccttgaaaaatcttttgcatttctatggtatccagttgtaatatctcccattttgtttctaattgagtttatttggattttctctttttttcttggttaatctcgctaatgatctattgattttatttatcatttcaaagaaccagctttttgtttcatttaatttttgtattttctttttgtttctatttcatttaggtctgctctgatctttatttcttttcttctgctgggtttgggttttgattgttcttgtttctccagttccttgaggtgtgaccttagattgtctatttgtgctcttttagactttttgatgtagatatttaatgctatgaacttcccccttagcactgcatttgctgtatcccagaggttttgacaagttgtgtcactattattgttcagctcaaataattttttaatttcc

SEQ ID NO: 41235 - DNA, 1093 bp, Homo sapiens
tgtgtagtcatgaattctggacttctagcatagccattaccagaacagtgaccacagaacccaacatgtgatttttcatcctcgcccccactcccacgctcccaccttttgtagcccagtgtttactcttccccctctatgttcacgtgtgctcattctttagtcccacttataagtgagaacatgcggcatttctgagttacttcacttaggataatggcctccggttccaaccacgttgctgctaaaggcatgatttcattcttttttatggctgaatagtattccatgatgtatctgtatcacattttcttgattgaattcttcgatgttggacacttatgttgattccatggctatgctattgtgaattgtactgtgataaacagataagtgaaggtgtcttttttatataataatttctttttcttagggtagatacctagtagtgggattatggatcaaatggtagttctgtttttagttttctgaaaagttttcatatgtcttttgtagaggttgtgctgatttacattcccaccaacagtgtataagcgttccctttctctgcatccttgccaacatctgttgttattttgaaaaagaaagaaattttgtggcaactaaactgataaacgtttcatgcctcttgccagtctgaacatatatgataaaaagtcatcttatttaggaaaaaaatcattcaagtcagcagcagttttcccattcatttattcagccaagaatatttattgataatctgtaggccaggcattatggttcatggaaaagaataaaaaggtgagcgaggcttgccctggaggagcgcaggaggtgctgtgatcactccaacttgtgagtactttcactgatatgagtttcgtggagtagacttctcacatagtttttgaagtgtagaaggcatttgggatagctcacataggatatctaggcatgtgattcctcacgttacggttctgtgcagcttccaagaaggtgagttctggtgaaggtcccgtgtgaagcttgggtgtaagacaagatgtctgttcttgagcttgggtgttactgcaatacacctttattcaccatt

SEQ ID NO: 41236 - DNA, 1045 bp, Homo sapiens
tgcaagtggcaagaatttggagccgagttgactgatggtctgccctgccttgccagccccaggagagggcagatggtaaaggttttgaggaaaattggatacattaaatagctcttgaagcaaaataaatttttttcaggcttcttagctgaattttttcaggagagcacagctggtggagtatggacagtgttaaattcctatttacttggaacccagaaaaccagagttctttctatagaaaaatgaaagcttaaatattaaccatgaggtacttcaagtttctgaggaaatttccaaatccacaaaatcctctgtgttttggaattcacagtctgaatttcctctctagttttgtccatgttttatgttgcatggtattaaaataactcacatatcaagaaatgtggcagagctatatggagcatatctggcctctgaactccaagttaaatgccctaaaacccttgcaggaggagcctgcatgcttttctcatcggaaaatctgctaagagattttagtgcttattttttagtgatttagtttagattttattgctttagttccttgctgttatgcaaatgtgacaggactgatgattggatttccagggactagaatcagcattcctggattcatgttttgctctaaccaccttttcaagctgctatcctttctggcctgttttctcatctgtagtctgagagaaccgaactgaactgggtctgaggtccattgtactagagaacactaaatacagtttataaaaattgtagaccaggggagattcatctgactgtccagggaaagtctttgtggttctctgtgttgttctgagatatttcagatatataattaacccataaatgggtgtgttgacaaggcaacgtgctcattaagagccagaacctccagaaaaccccggcagaatctagcatgaaaaagaaacatgtagtatttcatgaattatgttctggcaagttgaaggcacatctcaaacacaggacttttcaatcattgctttcagcggggttacagcagcca

SEQ ID NO: 41237 - DNA, 1420 bp, Homo sapiens
gggagaagtattagaaaaaaataaagggttcctttataacaagtaatatatcattacaagaaatacttcttactttattccctaaattagtataagaattcaaggttaggttgaactattgtcaagaaatactaatattaaagagacattttaaaaaatgttctcctgccgcgcacggtggctcacgcctgtaatcccagcacttggggaggccgaggtgggaggatcacaagatcaggagttcgagaccagcctgaccaacatggtgaaaccccgtctctgctaaaaatacaaaaattagccaggtgtggtggcacgtgcctgtaatcccagctacaggggagactcaggcaggagaattacttgaacccaggaggcagaggttggaggttgcagtgagccaagatctcgccactgccctctagcctgggagacagagccagactccttctcaaaaaaaaaaagtcctgctatgaaatttctttaccagtgttcttgttaatataatccatgttcatcttgtagaattttcatttaaaactagaaaaaaaaaagtcactcttctgccccgtaacagtttgacaaaacgaattatcactgcattcgtactgggaagtcagttcctctgggtcttatccactgtgtttatggcctacctctaccccgggagcggagggcttccaacccttcaaagcctccaacattcctttgtttggcagaatcttgtccaaagactgaatgtggactaagccctctgcttggccctgttgagacatcaggaactcacaggagccctccccatctcaagacgcccccatgggttgtggtcactgcaacactttcttttgtttggatgattgaagaactcagtcaaaagggctagtgaggactggaaaattctgtaatttaatttttttttcaggaaatcaatgggttatccttacacacatgtacagacacacacagatacacacatcgttttgctgattctttaaaaaattccctcagcaactaatcagttgtcatttatcaagcacctaatgtgcgttcagccctgcacagcgtggtcagcgccgcacagcttgttctctggggtttatcaatgctccgctttatgttgagaaacgtaagcacagttctcagcacaccgcggggcaccttccaccctctgactgggcgcagcctgtcgtttggttcacagctagtgcgactctggccaggctggtctttgagacggcccttcctcattgccgtaccgacgcctggcgtccagcccccggaggacctctctctggctctgtctgcttctgtggtgacctgatcttccacgcctgtgctttctgactcacctcttcatagaaggaattttaacgcccctttgagatcaaacaggacaggtgaagataaaatactgggtttg

SEQ ID NO: 41238 - DNA, 1049 bp, Homo sapiens
tgggaccgcccccaccagccaggcacaggatataatctcctcgtgtgccttttgctaaggccattggaaaagcacagtattagggtgggagtgtcctgaatttccaggcaccatctgtcacggcttccctttgctaggaaagggaattccccaaccccttgcgcttcctgggtgaggcaatgccccgccctgctccatgggctacacccactgtctgacaagccccagtgaaatgaacccaataccttagttggaaatgcagaaatcacccgtcttctgcgtcgcttacgctggtagctgcagactggagctgttcctatttggccatcttggaacctctatgcttgtatttctttacctcgccctattgcactgtctagaatcactcggagaatgttgggtagacacggtaagaagaagcatccttgccttttccttgacttaaggggaagcatataataatttacgtttcagctgtttttacttataacatttctgacaccaaggtatggggtttttgcttcataccaaccaattctctgattctctggacaccaactgtgagttcaacaatccaattcaattctgacattaaccccttggagttagtgcagaccccacagctcaaaggctcgatccgcttccccccacttcagatgccagtcacaggttgagggcttcctgaacttctgattgaccaggtagaaattgaggattcccatgactccttctgcaggtttgataatttggtggaaattaccagttattataaagaatacacctcaggaactgccaaatgaaagagctgcacagggcagggtatggaggaaggggcaggagcttccatgttccctctggatgcgccaccctcccagcaccttgatgtgttcaccaacctggaaaccctcccaactgtcatttagggttttaatggagtcttcattatgtaggtatgattgattaaatcatcagccaatggtgattcgcacagtctccaaccccttttccctttctataggttgagagacaggcctgagagttctaagctt

SEQ ID NO: 41239 - DNA, 1036 bp, Homo sapiens
cttaatcctgcgttctagtttgattgcactgtggtctgagagacagtttgttataatttctgttcttttacatttgctgaggagtgctttacttccaactatgtggtcaattttggaataaatgtgatgtggtgctgagaagaatgtatattctgttgatttggggtggagagttctgtagatgtctattaggtccgcttggtgcagagctgagttcaattcctggatatccttgttaaatttctgtctctttgacttgtctaatgttaacagtggggtgttaaagtctcccattattattgtgtgggagtctaagtctctttgtaggtctctaaggacttgctttgtgaatctgggtgctcctgtattgggtgcatatatatttaggatagttagctcttcttgttgaattgatccctttaccattatgtaatggccttcattgtctcttttgatctttgctggtttaaagtctgttttatcagagactaggattgcgacccttgcttttttgtgtgttttccatttgcttggtagatcttcctccatccctttattttgagcctatgtgtgtctctgcacgtgagatggttctcctgaatacagcacactgatgggtcttgactctttatcgaatttgccagtctgtgtcttttaattggagcatttagcccatttacgtttaaggttaatattgttatgtgtgaatttgatcctgtcattatgatgttagctggttattttgctcattagttgatgcagtttcttcctagcattggtggtctttagaatttggcatgtttttgcagtggctgatatctgctgttcctttccatgtttagtgcttccttcaggagctcttgtaaggcagacctggtggtgacaaaatctctcagcatttgtttgtctgtaaagaattttatttctccttcacttatgaagcgtagtttggctggatatgaaattctgggttggaaagtcttttctttcagaatgttgaatattggcccccactgtcttctggcttgtagagttt

SEQ ID NO: 41240 - DNA, 1055 bp, Homo sapiens
gttagccatttagaatgtttattttttgccttcagactatactcagagtgttcattttaacccagggaggatgatcaaacaaattactcagctagatgcatagaacaaaagtaagttcaccaggaaagacatgcctcgcagacagaatataaattctgtggaaatcagggtactcaaatcagaaagattcttgtttttataccagaaatgacttgccagaaaagacaaaaagtcttttatcatctccaggaaggatgtcagatcctttattaagacagccttgtaaccaaacaaaatcctgaataatataaaaaattctctaccaaaaagaaggaggcttggcctgagagacaatgcaccagggcagagaaagtgagccctggaagcagagcattcaatgggctcaagtgagtagttcacaccaggtccaagaatcactggtgctttctgatggtctttttcaaggtcgcacttctgacaccatttatgtcaccctaaataacacatagacatgggcgctctaaagaaaaatgatatttatttgaagatgggcattgcaatgggaatacatgtgccatagtaaactatgggcatatttgggaaactaaaataagacaaaggtttttaaaggaaaaatgcaggagaatgacataattgttttgcaataattatccttgggtacaaaggatcaataataaagatgatgctattctgagactggaaaggcagttgctgggcagatgtcctcacagaagcattttttgtgtaagtttgtgatggctctgtgcaaggttttgttttagtagtcttttgtgacagttttgttaccaggcctgcaagcatgagaaccccttcatatccttccccagatcaatttgtcagggttctgtttttgtttttgttgttttacacaaatgacttcattttgattctgaaaacttttacaaggtacagtttgatcaggggtccaggttaattgtttcccaggacgctgggctctgtcctgctttatattatggcttttctcttagcctgtcttccatgtgaaacaaaat

SEQ ID NO: 41241 - DNA, 1050 bp, Homo sapiens
ctgcaaagatgaataacaaggatgatgccagtccagggcgggatgggcagtggctggtcaaatgcccttgcagaagtatgttttcctgtaacatggtggtggcctttgtgcaaggttgtgttttttgtagtcctttttgttatcaggcatcgaggcgtgagaacccactctttatggccttccctggtgctttgtgaaagttccttttgttggtttgtttaatgccagttactccattttgattctgacaactttcacatttcctttttgagcaacaagggaggtttgaagtgggtgactctcaggctaagcctcctggaagtccactactgagttcaatcttgtctctcctgcagtcttttgctattatctctattatctcaaagtgctggaccaacattattttgttaggagttatacttctgaaaaaatttaacaaacaacagatactaagtttaaaaaggtaaaatacaaagcaagattaatactaatatgaccgtctcagtttgcgtaatggttttgcataatagacctaagtttgaaaggcaaccaatagaataaatcaaataaccatggggaattaggtgagacctgttgtagccatgtgacctatcttcttattttgtataactttcccagagaaatttatccaggtacagcatgtgatattaacaatagtacagacattttaaaatgtaaccagtagatactaaggatttcttgggtcaggttctgtcaaattataatagaagttactaattgtgaaatttcaattataccattatcctgccaagtgaaaaaggtggatattaagagagataagtctcatatgatgtggagtctcattctgatgtcatgtctacagcatgaaaaacatcagcttatccaagtttactgtttgcgtgtcactgggttatagcatcgagcagtttggtgcactttctatggctcatatatcagactttcagaacaaagcagtttccatttatagtaattctgtggaggacagtgagattggaggaatctaaaggaattcagatctagtttagc

SEQ ID NO: 41242 - DNA, 1660 bp, Homo sapiens
ctcacttccttcttatcagagggtagccaggtccctgcactggtatctatttagaaatgtacatggagcccccagcgaaatgtgcctacattgtgtgttccagaaccggaggtacccttaccttctagatatgtgatgacatggctctcacgtcaggcagactgctgcacccacgctctcggcctgccgtgcagggatttcactcgtggagtgaggcatctgggggctgtgcagtgaggagctttccatgtgttgttaagacaacctgttagcattgtcttctcccgcgtctcctggcctcttctctctttaaatccttttctctgtttgtcttaatcacattaacgtcctatttatgttttattcaatatacatttaaaatagaacttactatgtgccaggcattgtgttcaacacgtgaaatatttaatccttagaataaccatattgtcagcataatttacaaaaaaaaaaaaaacagctgtatcaatgcctgtgaatattcggctttactcgcccatttaaagaagagattttcaaattggctcaaaccaaaacctcacttcatggtgtctacaagacagtctgaaatgcagaatgttcagagagagacaaaggtttaccaggcagatgggacggtgagaaagtaggtgtcgcagtcctgatcctagactcagtggcctctgcgtcccccgcaggcattaaaggagacacaggacggcctctggccctctggaaacaagctctgcagtaagagcctgagacaggcagcacccagccaggcctgacagcttctgcagacagacagagtgagatgatgggggatttgatggaagcagtccctgtattttgtctcttctgtaatggaggagctgagccctcttctgcaagctgtggggaaggctagcggagcccaagggtccagggtccccaccttgtcattgtccctcggcccttctctgagctcatttctgtctccagtgtttttctgttggcttggcagggcaggatttgtttctgtcgggaactgatgatttgtgttttgatgcctgtgagagggacaagatctgatttgttttgcacctggaagggcgtgatttcctgcatttgctctgcgtcctcagggagtgggtgtactttagagttggactcttaagcctcagagtcctttaaatgatgtcaattctttttttttttttttttttttttgagtcattttgcgaacacagggatcaaggcttgggttttatcttcattattcccagaggagctggtgaatttgaacagacttcctattcaaattgcatttattttatagccttggggggtcaaggaaagcagctcttcagaggctgtctgcagtcggctggcctttgcggtttttaaagaagccattcttttttttaagtagcgtgtatttattatatgagtgtgagcatttgagagcggatggggacgccaacaaggtagcatcctggtgggaggcatgggctgcggagtgctggtttcctgccattgtcacgtcagctaaatggaagaaggcactggtgaggggctggatggttcaaaacatgagcacaagcaaatgcttggctctcttaatattcctattttggcctagagctcaggagcaggtagaacatgagcgtttgataacctg

SEQ ID NO: 41243 - DNA, 1105 bp, Homo sapiens
gtgtgtgcatgttctctgtgtgaacatgcatgtgggcatgtgtgtgcatgtgtgaatgtgtgcatgcatgtgaacgtgctgtgtgggcatgtgcgtgtgtgtgtgtgtgtacatgcatgtgggtatgtgctgtgtgtgtgcatgggcctgtgcctctgtgtgaatgtgcatatgaacatgttcatgtactgtgtgtatgtgtgcacatatgggcatgttctgcatgtgtgcacaggcctgcacatctgtgtatgtgagcatgcatgtgtgtctgtgtgagcatgtgctgtgtgtgagcaagcatggtttcttgacagcatgctaggacagggtttgtcttcttgcttatctttaacaagaatatacctgttcttttagcaatagggtactgttgcccttttggcctacaaaagccatttcttctcctaatatcttgatagatatgttgagtgctgttgtatctgtgtgtaactttgttaattttctctaacataaaagcagaggcttttcaccagggcaccaggctggcctctggtggtgaccaggggatccaacccccaagcccagctccactgcccacaggcgagtcacctggggccactccttccaatttagtgcacagcagccttctgctcaatgaaggggtccgttcttggaacctagaacctgtggtgtggagcctctgcttttgttatcttctaaaagttctaaaagttcatgatcttaagaccttgatgataatccaagatctgaattctaaagcgtctttcattgtttacttttaggatgaggaagtacagacaattggtcagatagaactgtgcctcactaagcaagaccagcagctgcaaaactgcaccgagccgggggagcagccgtcccccaagcaggaagtctggctggcaaatggggccgccgagagccggggtctgagagtctgtgaagatggcccagtcttctatcccccacctaaaaagaccaagcattgatgcccaagttttggaaatattctgttttaaaaagcaagagaaattcacaaactgcagctttctaaaaaacaactccaaagtgaagtctgtttattttgctgtttcccctccatgcc

SEQ ID NO: 41244 - DNA, 1108 bp, Homo sapiens
gcttggtgccccccaaagccagagtacgaggctgagaggatgcaggtgtcctcctaggaggtttgagtcagaaggcacgaggcagaagcagtgggggaggactccctcagtagagcgaggaggaggcccctcatccaagaggaggttggagcacaggggggtctaggtttgcagtttcgggaccggtagctgaggggtcccagggcctttcttctgtgaaggagaatgtgtccaccgtggggagggggtcgggagagagagatacttcagagtggacagggctgagaaagctttatgggccgcgaaaggcagagtagttgttggtggatgagggtggctgtggcaggtggcgtttcaggtgagacagctcggggcccagaaagacactgggaggaggagagctctgctctccagagaaacaggagcagagaggaaaacagagccgcagcgagcggcttgtggtctggggatgaagcccaggttgacagcatcctctgcttcgctggtggaggtgggggcatcattctcacacctgtgctgggtcctgtccctgccagccaagggagaccaggaccctgccactgttgcgctcaggatagtccagaactgtcagatcttttctgttgaagtttaatttctaatacacttgtatttaaaatcaggttgcagattttaaagatgcccttgccagagtatatggagtgatacccaaaatccagtgccttccaccaagccaggttagacagttatgttttgtcttcctttttttctcaagaagacaggttctacttttctgatggccttgtcttcaccatgcagttccctggggcagacttgtatttgtgcatttgtgtctgtatatgtgggcatgtggtgtgtgtgtgcatgtgtgtgtgtacatgcatgtgtgcatgtgctgtgtgtgcatgtgtgtgtacatgcatgtgggcatgtgctatgtgtgcatgtgtgtgtacatgcatgtgggcatgtgctatgtgtgcatgtgtgtgcatgtcctgtgtgtgcatgtgtgtacattatgtgggcatgtgctgtgtgtgcatgtacatgcatgtgtgcatgtgctgtatgcgcatgagtatac

SEQ ID NO: 41245 - DNA, 1048 bp, Homo sapiens
cccaccaccacacctggctaatttttgtatttttagtagagacagggtttcacaggttggccaggatggtctcgatctcctgacctcatgatctgcccacctccgcctcccaaagtgctgagattacaggcgtgagccactgtgcccagccttttttttttttttttttttttggagacacggtttttttcttgtcacctaggctggagtgcaatggcatgatctcggctcactgagttcaagcaattctcctgcctcagcctcctgagtagtagtgactattagcgcctgccaccacgcccagctaattttgtatttttagtagagatggggtttcaccaggttggccaggctggtctggaactcctgacctcaggtgatctacccgccttggcctcccaaagtgctgggattacaggcattagtcactgcgcctggcccataaaaacacctgtttctgttaagtcaaatatttgaggaatggcttaacaaaaatggctgtttctgttaagtcagttgtttgacgtttggcttagaacatccagccctagtgtagcttcctcatggatgtgttgttgtaagcaatgtattgtgaagtagccctggctttagcttgtgttattagtgcagtacctgtatctcgttggcatatgttgcaactagctgctaaatgtattttaatagggttcctaagtgtatttgaataaacaaagagccaatcattttcttgttatattttctccctagaaaattcaaaacgactgtagagaccctccggattactggacaatacatggactatggcaagtgtctcacacaattaaatcttaggcagaagaggcttgctgactgggaaccctagcttgaatgtggtcttaatatttattcttgttttttatttttaggagtttatccaatagactagattcttatttaaaaatatctttagtctttctagcagaaccctgattctcttgttctttaattctgtcttcatagaacaataacactttttttttttttttctgagacagagtcttactctgtt

SEQ ID NO: 41246 - DNA, 1006 bp, Homo sapiens
tttcttctttgactttctttagcttctccattactttctccgtgaataggggaggggggcatctgtgtgggagggggtctcctgcagtcacatcactctgcctggttttagatggagagtttgttacaaacgtctgagtcttggtagttttgttgtaagcatattgatagtctcatcttcctgggtgttgctaagctttccagcctcaggttccgactatgtaaaataaggtttttcacccaagggtaaaaaatgctttaccagctccaattctcaccctgcagctcatcctttttttttttttttgagacagggtctggctgtgtagcccaggttggagtgcagtgatgtgatctgggctcactgcatcttccacctcctgggcttaagctatcctcttgcctcagcgccttccaagtagctgggactacaggttcatgccaccacacctggctaatttttgtagagacagggtttcaccatgttgcccaggctggtcttgaactcctgagctcaagcaatcctcctgcctctgcctcccaaagtgctgggattataggtgtgagccaccacgcttgaacccttttttccttttatactgagagcttgcataattagttccaatgtacaactaagttttcataccatcttaactgtaaattctatacaaattcaacaggactcaattatttacaaaagctaatgtgtgacaacttgatcttcttacttggaatcttcccttctaaaatttgatttatcctgaagtgtctgcttgacttatatcctgtgttgctgctggctttttccatgtgcattttttgcaagctgctctttttacttcagtctcgttaagtcttgcagttctggctagaggcctactgccatgaataagctgccgctccacagtggcttctttgaagtcttagagtcagatgagtttcacggtgttcaggtttgtgatccagtgtggccccaggttctgggtaacacgtgtgatgcagtgctg

SEQ ID NO: 41247 - DNA, 2144 bp, Homo sapiens
agaaaaaaagaaagaaaaagaaaaaaaaccataaatagaacaaatgagcaaacaaaatttatttcctagctctatctgctgaaaagtgttagaaacaaggaccaacccaggggcaataagcaacccttgggccaggactatgacctctaaatacaaatttcaactaaaaagagccagggttccctttaacaaaataaggcaggagtagcaatatgtgtattaactgatatggaatttgaggccaaatgtatgacagtacaaaacaggactttaatgacaaaaagatgaattttataaagaaaatcaaaagaaattgtatcaagaaaaataaaatgttataaagaatgtcatggccaggcacagtgactcatgcttgtgatcctttgggaggctgaggtgggtggattgcttcagctcaggagtttgagaccagcctggacaacaaagtgagatcctatctttattttttttgaaaggcacagagtgcaagttggattgaaaaaacaagacctatccgagtgctgacttcaaaagactcatctcatacataatgacacccataggctcaaagtaaaggattggataaatatttattatgcaaatggaaaacaaaacaaaaaaaagagccagagtcactattcttatatcagataaaatagactttaaaccaacaaaagtagaaaaggacaaagaagggcattaaataatgataaagatttcagttaaacaagaagacttaactatcctaaatatatatgcacccaacattggagcacccagattcataaaacaagtacttctagacctatgaaaagacctagacagccataaaatagtagcggaggttttcgacaccccattagaaaggtcattgaggcagaaaactaacaaagaaattctggacttaaattggacacaaccagctggacctaattgacacctacagaacactccactgatcaaccactcttctcatctgcacacagaacatacatcaagattgatcactagcttagccataaagcaagtctcaataaattcaaaaaatcaagatcataccaaccacaatcttgggccacggtggaataaaatagaaatcaataccaagaagatctctgaaaaccacacaattacatggaaattaaaaaacttactcctgaatgacttttgagcaaacaataaagttaaggcagaaattaaaaaattattttaaataaatgaaaacaaagatacaacataccaaaatctctgggatgcagcaaaagcagtgttaagaggaaagtttatagcacttaacgcctacctcaaaaagttagaaagatctcaaattaaccatctaatataattcctagaagaactagaaaaacaacaacaaactaaacctaaaactaacagaataaaataagtaactaaaatcagagcagaactaaaccaaattgagatgcaaaaatccatacacagaatcaacaaaaccaataactggttatttgaaaagataaacaagactggcagaccactagctagagtaacaaagaaaacgagagagacaaaagatccaaataagcacaatgagaaatgacaaaggcaatattgcaaccaataccacagaaatacaaaaggtcctcagagactattatcaacacctctatgtgcacaaactagaaaatctagaggaaatggatacatttctggaagcacacaacctcccaagattgaatcaggaagaaattgaaaccctgaacagaacaatatcaagttccaaacttgaatcagtaataaaaaacctaccaaacaaaaaaagccctggtccagatggatgcacagctgaattctaccagatgttcaaagaagagctagtaccaatcctagctcttcgattgattcttggaatcatttttggaaatgattccaaaaaatcaagcaggagaaactcctccctaattcatcctacaaagccagaatcaccctaataccaaaacctggcaaagacacaacaaaaaaagagaaaatcacaggctaatatccctgatgaacacagacagaaaaatcctcaacaaaatactagcaaaccaaatccagcagcaacatacacaaatcaacaaatgtaatgcatcacataaacagaactaaagacaaaaaccata

SEQ ID NO: 41248 - DNA, 1001 bp, Homo sapiens
ggggggatgctgttaaggtgttcatgagaactccgcgccgtgatccaatcacctcccaccaggccccatctccaatactggggattccaattccccatgagatttggtcggggtacacagatccaaactgaagcagaaaaatagggtctggaagcagggaacataaggccgattcacacttcagctattacaggaaatatcctctccacagggtgcacaccgagtaaaagactgtgtatctttacttcatcctcttcatttacacagggtgcacccaaagtaaccaatggaatataacctctagagggtatctaaactcccagaaattctgtaacggggccttagagcccctctgttcagccctgctcccacactgtggagtgtactttcattttcttttcttttttttcttttttttgagacagagtcttgccctgtcacccaggctggagtacagtggtctgatctcggctcactgcaacctctgcctcccaggttcaagcaattctctgcctcagcctcccgaatagttgggattacaggcgcccgccatctcacccagctaatttttgtatttttagtagacacggggtttcaccatcttggccagtctggtcttgaactcctgacatcagggtgatccacccacctcggcctcccaaagtgctgggattacaggcttgagccactgcgcccagctgtgtactttgattttcaataaatcccttcattccttccttattttgtttgtgccttttgtctaattctttgttcaagacaccaagaaactggacaccctccaccggtaacatattttggcgagccagccaggagaaggtaggcccaaagtttgggatttatttttctcctttccccttttacatacagggagatttttctctgtctgtctgttcctttccacctcgggacccttggtgggaagcgcagaaacatggaagcaactgcaggtttctggctgtgaccagtgaaataaggggttt

SEQ ID NO: 41249 - DNA, 1050 bp, Homo sapiens
atagaaatagaaaggaatgctgtaaaaatacctaaggatgaaaaattcagagaggaatttctatttgtcctgcaaaacagtgcctgggagatatacacgaatgggcgtgcacatgcgtatatacacctaccccacacccccataagcatatacacatatatgtgtatgctgaccgaaaagaaaatatttctcaacatcatagcactgcagtcatttcaccaatctattaactcaacaaattcgtttcctactctaagccaggcattcatttcagggaaataagaaaaggaattgccagatatcaaagcattaaaagaaaggcgggctgggcgcggaggctcacgcctgcaatcccagcactttgggaggcgggcggatcacaaggtcaggagtttgagaccaacctggccaatatggtgaaaccctatctttactaaaaatacaaaaattagctgggtgtggaattagctgggcgtggtgtctggtgcctgtaatctcagcaactcagggggctgaggtaggagaatcgcttgaaaccagacgacagaggttgcggtgagccgagatcgcatcactgcactccaacctgggtaaaagagtgaaattctgtctcaaaaaaaaaaaaaaaaaaaacaaagataaagaaaggcgatgcccccagctactgagcagagtgaggtgatgtcctatgactcgaggaggctggaaaacggctggagtgctgattccctggaggcccgtcttgggaagatttttctcagaatccagctgctacttcagaaggatcccagagatcccccccatgctgaggggactctggtggaggggaggacacatggggggactcttgtggggggggggacacatggggggctctgagggatgagaggccacatgggggtggggctctgtttgaccgtctcagctgggcctgtctttccaccatcccagcccagtgccccatgtgggaggaagggctcacccagtatgcgcactctccagccccagctgtctcagggcccagccatttgaacaaattgaaaccaagtg

SEQ ID NO: 41250 - DNA, 1036 bp, Homo sapiens
tggagtgagggagatatcaaatttcattttttcacacatatataaccaattatttcagcatctcttatattgaggagttgcttctttacccagatagctacaatgctgacactaacataaatcagcttgatatatgtcagtttttttcctgggttctccattctgtttcatttgtatgtgtttccataactacactaataacagtgttaaattattaaaactgtataatatgttttgacatctgatagggcaatctttcatttattcttctctttcaggaattctttggctattcttaggccttttctcatccagataagatactgaatcagcttatcaagggccaacttattgaattgttattgaatttgagatgaatcaataaagagaaaggagagccatgaaattagaaaaactaccctaattaagtcttcccttctaaaagtcaggaaaactagcattacttgaaaatgagtaccaaaaaaactaaggtcaaatcccatacaaagtcattatgaagaaaaaaagagaataaaacataatttctttagaaaataaattatgacagaaagccatggcttcaaaacagatgaaaactaaaatattttaaaataagttaataaacatctaaaatgacattagatatgaaaaaatgacgtgtcagatttagaaatatacagaaaggagatgacaaactcagaaaagaagtaaaaattttaaaaacatttcagaaatgaagagagaaagaaacacgagcaaataaacagaactgataatgcattaaaagaaaagatgaaaaaatatgaggctataaaagagacgtgtggtacaggataacggtcacccaaagatgtccccatcctaatctccagaacctgtgcctgtgtcacctgacatggcaaagtgacagcaaatgtgactaccttatggatctcaagagagaagcctgatcctggatcatctggctgagtccagcctaattgcatgggtccttaacagtggagagtcgactgcagtggtatgaaggaaatgcagc

SEQ ID NO: 41251 - DNA, 2706 bp, Homo sapiens
tgattgaatgaagagatgcagaaggcaagagatagcaaaggtcattctgggctgggcatggtggctcacacctgtaatcccagcactttgggaggcctaggcgggtggatcatctgaggtcgggagttcaagaccaccctggccaacatggtgaaacacccccgtctgctaaaaatacaaaaattagctgggtgtggtggcaggcgcctgtaattgcagctactcgggaagctgaggcaggagaatcgcttgaactggggaggtggaagttgcagtgagccgagatgtgccattgcactccagcctgggcagtaagagcgaaactccgtctcaaagcaaaaaaaagaaaagctacctttaccaaagacagttaaaatgatggccaccaaggggcagtgtgcagcaggcagagaaggtggctttttaaattatttttcactgcctgctgagacaaagatgttacaccagaatatgccaccctaacatatgcttctttggcataaggattattttgagctgaagacgattgagaagaaacaaataaaagaaaaactctgccttccctttctttgcctaaaggcaggacatgctagttaatgatcaacccctgacctaatcggttatgttacctatagattacagacattttatagaaaaagaaaaacacggtgaaaatccctgtcctgttctgttccattgtaattaccagtgcatgcagcccccaatcacatacccactgcttgctcaatcgatcatgacactctcatgtggacccccttagagttgtaagcccttaagagggaaaggaattgctcacttggggagctcggtttttggagacgtgagtctgctgatgctcccagctgaataaagcccttccttctacaactcggtgtctgaggggttttgtctgtggctacaaacctgtctttggccagtctaatttacaggacctcagccagagaactaagatgggtagaggcaatacaggagatagaaataatttaggtaggtagatagggtgaaagagtccctgacaaaagcttttcttctgacaaaaaacagctcagaaattacttccattctaaccacaggcagtccaaataaatcacttctcttttaacaaagagcagcctggaagattggactgtataatgtagataagcatctccggcacagagggagagtttcttgggtagtcaccaaacttacataaatgggtcccagtaaaaacagtaggctttaatgagcacattcctttccccttttttggacagggacacactaaggttagctagaagcttgcatggtggggtgggggaaatgcctgcagctgcaaggaggtacccaggacaaggcatggaaactccccctattcttgttagcacatgcaaggtggaaggagaaaggcagtgtggagtcgcccaagctaagagcctgcctgcatgataaaagaatggggtaggggctgccagagattccactctatacagatgacacacctggtcctaaccaggttttcatgccctatgtagataagatacccgctccctactagctcgttgataaaaaccctccattttactgcagcacggcaacccgtctgggacctctctctgtgagagagagctgtccttttccttttgcctattacacttctctaacttcaccctttgtgtgtctgcattcttcatttctgtggccatgagacaaaaaacctcagctgatatcccagacaacaaggctgctttagagggaaaacggatagctaatattatcagttaattggctatgttaattgataccttcaaattaggtgttttaaaataaatgctgagaacaatatgaaagtgtttttcttttactaattctctgaggattttgttatttatttagctttacaatgcctagccccctttataaatgtaattattgtgttgctaagtgcatgtatacaaaaaattcattggttcaaaagccataggcctggtaccatagccatatatggtacgttcaaaccttggaaatgcacattctcagtgtgtcggaagctctgtactgctccttcttgaagaactactttgatttgtggttaactcgctgttttgactcactgttttaactcccattacttcagtatctgacattcagcctcagaatctggccagtgtatcagggctggaattaattgattaacaccattagatggcagtactatttaaattccaaaaatggttataaactcattctctaaaatgtgtgtcaaatagaatatttgactgataataactctaagagcacaaaaggattaaacacacacacaagacaaagtttgggatatacccattggaaaaacccttggtctctttaaattttttttcatatgtatgtatattgcacatattgccggcctctttatctcttttttccttttttttttttttttttttgagaaggagtcttactctgtcacccaggctggagcacagtagtgcaaacatgactcactgcagccttgaactcctgggctcaagcgaccttgtcaccttagccactgtgaccagccttcttttcccttttgactttgttatatcacactgactctagaaatgtggttctttattggggcgattttgccctcccccggggacatctgacaaggtctggagacattttgattgtgggtagggggagggacactctgct

SEQ ID NO: 41252 - DNA, 1088 bp, Homo sapiens
tgatatggagggccaactgtatatattgaaaacaatttgcatataagtagacccacactggttcagacccctgttgttcagggtcagctctatatctttccaactttgtgcattgattgaaaaaccaacaacagtatgatattagggctataacagatctgttaggccaagcccacatgcccctgaacagaacattctgcacattgggccaacttccaactgccggcacctgaagttatttgcattatcagctatctttgtccaccagagcctgctctgcctgcattttgggaagacctaaagtgccaaggaattaacacaccctgcaagtatgctcaattgaaggcaatgaatagaaaaagacccctgactccttcacccctggatttcagggaggtaaatccaagatgtatgctaaggaggtgacacttaatgtcagacacacacacctgttatgagagtttcctgattgaataagaaagaggcattccaggcagaagtacccgaacatacaagagtgcaagaccaagaggctaaggcagattgctctgtgcaagaagtggcaggtagtgtggcgtggctggagatgaagaaatgactggattgggaaggactttatccaccaatctaatgaatttgactttcatcttgaaggtgtgaaatagcgtgctaaacaagtttaaaagcaaaatgtcattagcctatttgtatttagaaagagcactccagaagcaaggaggggatgggtgaattggatgtactgacactggaacaaggaaattattccaatagtccaggaaagaagaaggacatcaactaaaattgcacaagtgaacatggaaaaaagaggatgcgtctgagaaatataaatattggccggggcggtggctcacacctgtaatcccaacacttcgggagggtgaggtgggcagattgcttgaactcaggagttcaaaaccagcctgggtaacatggcaaaacccctctctacacaaaatacaaaaattagccaagcgtgatggcatggcctgtagtcccagttactcaggaggctgaggtgggaggatcacttgagcctgggaggttga

SEQ ID NO: 41253 - DNA, 1017 bp, Homo sapiens
gtttgtcaccctgggtcaggccaacctcgccctcttcccctacgtcacccttctccactgcggttccctttgcagctggtcaccaggacaaagacacgaccttcgaccttttcagtatcagcaacatcaaccgcaagaccattggcgccaagcagttccgcgggcccgaccccggcgtgccggcttaccgcttcgtgcgctttgactacatcccaccggtgaacgcagatgacctcagcaagatcaccaagatcatgcggcagaaggagggcttcttcctcacggcccagctcaagcaggacggcaagtccaggggcacgctgttggctctggagggccccggtctctcccagaggcagttcgagatcgtctccaacggccccgcggacacgctggatctcacctactggattgacggcacccggcatgtggtctccctggaggacgtcggcctggctgactcgcagtggaagaacgtcaccgtgcaggtggctggcgagacctacagcttgcacgtgggctgcgacctcatagacagcttcgctctggacgagcccttctacgagcacctgcaggcggaaaagagccggatgtacgtggccaaaggctctgccagagagagtcacttcagggtacgctctgcagggaggtggccgccgtgagggaggaaagagcttagctgggaactgatctgctaatgcgtctggtgatgcgatgcttgagcaggcagagcctggccttagagaagcacactgcacatcccggcatgtgctcacacacatgcgtgcacacaccacatgcacatgcacacactgcccaccacacgcagccacaggcatgtgcacacatgcacacacaccacacacacacacaaacacacatgctcacaaacacatgaacacacatccaaagacatatacacaaacactgcatatgcactcacactcgcatatgtatatacatcacacatgtacacacaccacgcaacacacacacacagacacgcacacacacacc

SEQ ID NO: 41254 - DNA, 1013 bp, Homo sapiens
ctattgttatgagtggactgaacaccacaattatagtagtagagcattttgggtttgtctaatgcactaaattgtatcagtgggtttaataccttgaaatgctttcttcttgcatgttaagtgttttttatttttttctttagattgaagacctttctttagcatttcttatagacaggtctcctggtggtgaattatctcagcttttgtttatctgggaaagaccttgtctcttcttcatattcgaaagatagctttatggagacaatattcttggatataagttattttttttttctttcagcactttgaaaatgtcatcctactcactcctggcatgtacagtttccactgagaagtctgttgccagatgaatcggatctcctttacattttatttacttttctcttgctgcttttaggattatctctctttccttgaggtttaagagtttgattattatgtgccttttggtagctttatttgagtgaaatcggtttgatgttctctgaccttcccttacctggatatttatctctttctcaaagtttggcaagttttctgttaatatgtctttgaataagctttctacctccttgttcttgttcaacttgttcaacttgaacactaataattcttagattttatcttttgaggtagttttccatgtcttataggcattcttcattgcttttcatttttttcctttttttctctttctgtatttcaggtaacctgtctttgaactcactgattctttcctctgcttgatccattctactgttgagagcctctcatgatttttttcagttcagcaaatgtatttctcagttccaagattttctctttaatcgctttgttaattttttctgataaatttctgaattgcttttctgtgttaccttgaagatcaccaagtttccttaaaactgctactttgcattcttggtgagagagttcacattatcatcatcttgtgagagtcagtcactggttcccagctttgtatgttt

SEQ ID NO: 41255 - DNA, 1091 bp, Homo sapiens
attcttttatgtgggtgcaccataatttatctgattcatgttctattgtacattcaggtagcttccaatttgtgttgtaaatataaacaacgctatgataagcatctctgtgaacacattttcatactagggtgagtattttctcttaatactttttaggagtgtaactgctgagtcagtgtcttcactgtttaatagctgttgatacatattgccaaattttctccaaaaagtttgggccaacatgtgtatcttctaatagactgtgagcaaactatttgtctacatcaaacaataaaaattattttaggccaggtgtgatggctcatacctgcaatcctaacactttgggaggctgaagcgggcggatcacttgaggccgggagttcgagacctgcctggccaacatggtgaaaccccgtctctactaaaaatataaaaattagccaggcctgttggcccatgcctgtaatcccagctatttgggaggtcaaggcacaagaatctcttgaacctgagaggcagaggttgcagtgagccaagattgtgccactgcactccagcctgggtgacagagcaaaactctgtctcaaagaatgtatatattattttaaagatgtttgttaacacaaatcacagttgtttgcccaggctggatgggcctaggagggaaagtgacttatacttccccttcttatggatggagccactcacttcctgcctgaaaaacccaaagtagggacttctctggatcagaaagggtttcagttgttagaccgcaaaaaatggaaccatatttagtatactgggcatttgtatttcagtttttgtttatccactgtttaagtaacttttttcattgaaatactcttttttcagtaatgcctttccatatgagaataatttttcagttcgtgatattgtaaaaagtccttagatctatttttattattagatgtagaagaactttattaatatgtttctaactttacattgcacatttatgtaatttgttcttacatattttaaattttatttggaacttaatccttgtggattatatttgcatgtatggtattgtgtaaggctgt

SEQ ID NO: 41256 - DNA, 1052 bp, Homo sapiens
ttggtaaaatccatgtctgctttcttttttgcaattagaaataaatgaagtaaacttatttgagaagattttctattttgattgctttttgattcccatttttagtattttctatttctattaatgtctcatcttgtactcattctcagtgactccaagtattaaaaaataagggaattatgtgaagtataaaaatgttaaatgtttttccctgaaaaaatataagtttgaaaaagttaagaaatttaaaaaattgaaggttatatgtcttcaaataattattcaaaaattttcacttgtattaaaattaaaaatgtacaatgataagtatataatttgttgtatctaaactttaaatacagctgaaatgttttagtttatttaagactttaaagatacttttattgggaaaaaagaaaattacaatagaaccttcaagatctgcctttgccactgtaaagagtagtaattaacacatcacactggttacatccaaagacaaagctacatggagaataaaggccgagacaggcggatcacgaggagtttgagaccatcgtcgccaacatggtgaaaccccatctctactaaaaatacaaaaattagccaggcatggtggtgggtgcctgtaatcccagctacttgggaggctgaggcaggaaaatcgcttgaaaccagaaggtggaggttgcagtgagctgagatcgcaccactgcactccagcctgggcaaaaaagtgacactccatttcaaaaaaaaaaaaaaaacaaactgtttaatgttgcagaattctcctcacctgccctgtgcacctgctgtgatttcatgtcgattgcagaccatgagaccatgagtagagcaggtaacactcagcgagctggatgctggggtgcttctgggaaacaagctctattctgcaggagtctgctgcccatctgctctctgccaggaagtatttgacaagttactactgaattgtctttctcttatccaaatgtttctgttcctcagatggattggaagcagtgtttgctccccaatgtccacgggat

SEQ ID NO: 41257 - DNA, 1025 bp, Homo sapiens
ttaaagagcagttttaggttcacagcaaaattgtgaggaaagtatggagatttcccttgtgcctcctggccccctgtccctatcttccaccagagtggtacgtttgttactgttaccattgttgatgaacctacattgacacatcatcatcaccaaagtccacagtttatcagcattcactcttggtggtgtgccttctatgggttctgacaggcctataatggcatcatccaccatgacagcatcatagtgtatgttctctacatactgtagttccactgccttaagaatctgcctattcatccctctctccttcctaactcctgtcaaccactggtttctttactgtctccatagtgttgccttttccaggagatcatagagttggaatcacacagcatgcagcctattcagattggcatctttctctgcatagcatgtgtttaagcttcctctgtgtcttttcatggcttgcttgctcacttctttttagtgctggatcacactctgtcatctggatgcaccacagttttatttatcagttcacctactgaagcacgtctttgtagctttcatattttgcaattatgaataaagctgctgtaaacatccatgtgcaatttttgtgtgatgaacaattttcagcttattttggtaaataccaaggagtacagtttctgaatcatatggtaagtgtatgtttagttctgtgggaaactgccaaattgtcttccaaaaaggctgcaccattttgcactcccaccagcaatgaatgggagttcctgttgctccacatcctcaccagcatttggtgttttccatgttctggactttagccattctcataggtgtgcaaataatctcattgttgtttaaatgtgcattttcctgatgatgtgatgtggagtatttttatatgcttatttgccatcggtatgtccctctttggtgaggcatctgttgacatctttggcccaattttttatcgggttattttcttttgtatatattagatagcagttctt

SEQ ID NO: 41258 - DNA, 1014 bp, Homo sapiens
ttgactagaactcagttccaaatcaacatttcaaaaaagtttcttatttctgtgagaggcaacatatattatatttctactaatgtggcattaatgcttgtttttttcttttttagtccctgagtggtttcaaatgtgtgttttcatgtacaatttatagttctgaagagtgtgtcatttccagatatttcctgactgtctcatcaatgcccacatcattaaagttaatttcatgcctaaggaatctacactaccttccatttggaaaatgttctgcagattctagcaaagtcaacagccaaaccgtgaatgtaaaggctgccgtacagactacagaagtaggcagcttgccattgccacgctacctactttacattcaagtgatttatataagagccaaaaaaatgtgctccacatagtattgatctttcactgccatgcagggatgagctgtccagatgataaattaagacaatgagaacataagggattggcttcaagatttgtggttgccgacggaatttcttcagcagaaagagaaggaaactgaactacggaactggtaggatattattatttttactgtaaacgatccaagcctgtcaggcctgtaacttccaagtgcaatgtattatgatctacagtgtaaaacaaaagattctgaatttgagtcagtaatagctggtttattccaggattcaaatgtaagtaacttactctcaccaacagtagtcaaaatgagaagcctgctatgctgtggatttatggctcatggactctggatgagttctgcatttatcttcgtggagtgacgaataattgaattggaaaatcatggcatccagaatggaactgcataaaaatctgctggagtgtttccgaaaaaatgaagacctctgggcccttatcccagactttctatttcagtggtccatggaagagcctgcaagcttggcttttccatctcaggacttagctgcagggtctcagggcacactgcagagactcgtcatc

SEQ ID NO: 41259 - DNA, 1023 bp, Homo sapiens
tcctagcagcatggaagacactcctgccctcaagagggctaagtccagtaaaacccaaccaacaggagatagttgggcaggaagactcattctgagtgtagatggctctgggttttgtgagagggtgaaatctttggtcgttaaacaattctagctgccctagaatggtaaccccaagtcacttcagactggaaaagattttagtggctagaattaaatgtagagatggcaaaatacaccaaagccacagcattaatagacttgcatgaatttaggaataacctggaataattaatatttaaggcatttgcaatgctttaaggatgttgatattttaaaagatctgattctaatttgacatctgtattgaccttggacttgtgacttcttagttgagaaaaaaaggaaaatattactaagtttataagtatttaaatttttaagagaacttaaaattcaccatatttatgtttgctttgttagatttttaataattgattaagaactcaggaccatcttacattttatttttgtcatttaagtattcaagaaaatcttatatagtacatttaaaatgaagcttaacaattttaaaatactttaacaaagttgtaactttaactcattgcctgagggatttaatctgttcattgtgagttaactgaacatgaatcaaaggctactttgcatgtgattgttaaaatatactagatttctaaatgtaataaaaaatattaaataggattaaaggcttagagactagggttttaaaacgttaagtgtttaatgaattgaattttaaatttataaacatcaaaataaaccataaataattttcctgtgtacaaaaccatcttggtgcatcagaaactcatgctgcagtagcatcacggtcccacggttgtgtgttggctgtttgcttgccactccaacctctgtgcattcctgctgtctttgtggaattgtttgctgcgttctctgttgatggaagaggggcttcaaagcttttgggtgggcggcgtc

SEQ ID NO: 41260 - DNA, 1050 bp, Homo sapiens
cagggcgccggcccccaccacacactcaccgagtcctggaagctggcaccctctccatgacttcaggctcatgaacgcacttcgtgaaagatctggcactgcaggatgagcttcccacctctcgctgggaccgaggctggcacgttctgggaaccctgctttcgagtgtgtcacctggggcggatgtggcactcaccgatcttgtttcagggaactcacatcacttttgaaaagcgggagacagattccatgacttgtttttgttttgttttaatacattttaattgtgagaacgattatcccctttccaaaactaaagttttgagcctctcagagtaaatttctagatacgcttaaaaaaaagtaatgtttttcatcactgttactgctcagttgtcaaaataagacttgtgagtctttgggaagaagaggattatacttgtacttacaaaattattctaacaatgcctgtggctaagaggaccctcaaaatgagtaaggaactgtaacagctcacaagggaccacaggctctgcagagtggcttcggaatccaagactctgaagcacacctgggtgtcctgccaggaactgcagctgcgcgccacatgcgccctgtcagatgtgacttagggatgcgttgtcagcttcagtttgttggacatctgaggacagtggtatatttgccataagatatcagtgtagctgtttaactgcttaggatgggaacacaaattcaagaagctccatagttaaattatcctggctgagatggtagccaagcaagacttatttccagcaaaaaactagcaaggcagaagtatctcaaaccacagatgcaaaagacgaaagaaagctgtgatgtaactgatgggtccctgagtgtgaaagtgtgggctgcagagggagcctactgttcacacagggagttcaggaagaacaggaagcgtgcaggttaagtatggagaaagctgcttcacacgcggatacacagagatataatttattggaatggatagcagagtcacaaatatcacattaccttatatta

SEQ ID NO: 41261 - DNA, 1034 bp, Homo sapiens
tggaggagcagagtgcaggaggagcaggtctatgtctatgtctggaggagcagagtacaggaggtggactgtgtggtgaagccggtggaggggtggacctcgagccccttgttaaatcaaaatatctaagacaggtctcggtcagtttagaaagtttatttcaccaaggttaaggatgcacccatgacatagcatcaggagttcctgacgatggtggtcggggcaccgcttggttttatacattttagggagacatgagatatcaatcaatatgtgtaccatgtactttggttcagtcaggtaaagtgggatttgaggcgagggcttccaggtcatgagtagataagaggcaaaaggttacattcttttgagtccttgatcagctttccactgaatacacaatttagtctagctcagtgaatcatcatttttacataaacaataggggagaggaagcaatgagatacgcatttgtttcagggaagcctcggagggatgtctttgagttctgactgtcctttgtccacaaggaatttccttgtgggcaaattgtgagggaggtctgtagcttcttatctttgtagctatcttacttaggaatagaatgggaggcaggttttgcctgaggcagttcccagcttgactttacccttggcttagtgatttgggggtcccaagattcattttcttgtcacattcctgatggacatctggacaagctggctccctgagacagcatccctgcaggtaaggtgtgtcctaaaggggtgaggactaggctctgattaaggggtctgaggagtcatgctttaaaaaccatcaattctcgtcagatgggttttatttaaccttatgtatcatgacttattttccaacctggctctggcataacattacaagacaaggaagaaaataaaaatatttcactccaaaacatgtgtctttgccatatgtcgaaatggccctgcaaagctgtcctttgtgtgggaaaaccagttcagtcacattagtcatgcatctgtgaagaatctcta

SEQ ID NO: 41262 - DNA, 1053 bp, Homo sapiens
tggtcattgcaaagccaattataatttatttttggtgtttggaaaatggtctgtcagcatttccattataaatccctattttctttctctttttgttcttttctttctggggtttatgacagagccataaaacttggtctagattaaaacttggcctgttagagcttaggctgagattttttttcaatttagttcccaaatttttaaaaattgtttcagatgtttaggttgcaaatgcaaaatataatttcggagtttttaatgctttctaatttataacttaaaaaataacatgcaaggtttaagataatggtaaagataattcttttaactttagctaaccaattttctaatattttcaagagaattattttggaaaatgatatgatgctatttggtgtgattttgtaattttatttcctttcctctctgttcccacttcataatagaagagtttctaaccttttgcatatataaagcttttctctgttaaagggttaaatgtatgtaaatctcttagtatgtgctaagtccattaagtgaaagctatttttctaatttttaaaatatgaatttgtggaggcagatgggtactgctttagaaaactcttacgttccacatgcaactactctcacacagttcttttgttcctgtgagttttagggataaatgcacaagaatttctccacctgcagcagcagatcagaagctgagttagatatggtttcagtgttcaaagaaatacaaggcagaaggtggtagtcacgggtggaataacattcgcacaaggctgactgttctaagcactataaaatgatgtggaatcgctgccagagagtagggatgggaacagccatcctgtcctgggaggatgagagaaggctgcatctgaactggcattacccattctcacatactgttagataaaacttttggttttacgaggagtttaaaggcacataaaatggagaaatagaaagattgaataaacttgttttacctcctgtgtggtcagcaagtttgcactgaaagccgtgtggtgtcctggtctc

SEQ ID NO: 41263 - DNA, 1075 bp, Homo sapiens
aaccccagcaccacacagtacccagcaccacgcagtacccggcaccacgcagtacccagcaccacgcagtacacgctccacacagtacccagcaccacgcagtacacgccccacacagtacccagcaccacacagtaccgagcaccacatggtacacgctccacactgcctggccgaggcgttcactcacaccccaaaccctagcaccacacagtacccagcaccacgcagtacccagcaccacgcagtatccagcaccacgcagtacccagcactgcacagtacccagcaccatgcagtacacgctcctaacaaacccacacctgcacctcctgaatctaaaataaaagttgaaaaaatggaacgtgaggctttagagcaactgccttcagaagccacactgagtctctactgaagggagatggtgcaccctgcctcaggctctgcagcctcactgtggcgaggagaagcctcctggcgcgcccctaattacttgaaaaatgctgttccagttgtgttgtatgaaagtaccagataagtagcactcagtcaaaactgatattaatagtagaaatagtaaccttctgtggtcattcctgttaggtcacgacggggcagtgaatgccgtgtgctggagccaggaccggaggtggctgctctctgcggcccgggacgggaccctgcgaatgtggtcggctcgtggggcagagctcgcactgcttctggtaatggacagtcatctctgccatgggcagtcatttccaaaggagctgagagcttctcaaaagtctcattcttttaccttaacaggagatgaggaaagggacgtaagccaagagtttgctttaatgcaataaaagttactgattaaaagttattgcttcaatgcaataacagttattgattagtttctttttttttttttttttttttttttttttgagacggagtctcgctctgtcgcccaggtcggactgcggactgcagtggcgcaatctcggctcactgcaagctccgcttcccgggttcacgccattctcctgcctcagcctcccgagtagctgggactacaggc

SEQ ID NO: 41264 - DNA, 1026 bp, Homo sapiens
ttacaaaaacttgctctgtttctgtgggcgggggggaagggccacatttaaccatctcaactgcacaagccacatcgtttcactttgggtgtgtaacgtttaatagtggcatcgctcaacgttgaaaatatgactggtctctcagcacctgcccagaacacagaaaaatgagtgtctttatttccattatgatctgtgacaaataagtataaattcaaattctctcctggagagttcaggggcctctgagcatacagtcaggtagcacatcccagcttgaaaaccactgagagcaaccgtatttaatttaataaaggagttatgtgtttctgctttagatttcagaatttttcctatcaaaaattgtgtctagtccaaagacaggtacttgagtcccaggccttccgccgagcatgtgcctggcacagagtagattctcagcgatacgggatggcggcttctgagcgcgctgcgcgggagagctgcgtcatctgtgacgcgccctggagctagcggtgatcgttgtgaagttctggggtcaggcatttcggaagattaaatctaaaattccattacagatagtggaactgtataaaaacgagaaatctttgtccaagtatgaagtgaagatgcgcatctctcctggtcccgagctcttggttggctcgagctgcgccgagtggcttctgctctgctccttctcggagcggggactgcccacgccggcctccatgctgcttatgtccccacacccttgactgcttccccagcgcggggtccatgtccaggggaagtctaggtccagaggtctaaaaccctgacctaggtagggttttagaatccttttcactctgtttctgaagcttctcatctcatcacactcaccacaggggaaactggccaactgaaaagaggagggaggccttccgtaccgtgaggagatcgtggggagagagaggaagaggcacccatgtggtcccccatgggcaccttgcttcgtggggattggctcccgagggcccggcc

SEQ ID NO: 41265 - DNA, 1054 bp, Homo sapiens
ttaaaattcttttaacaggagatgggcagtggctggcctgtgggttggccaaccatctgttactcgtttttgatgccagcctgactgggacacctgctgtgttttcaggtaaaacatgtcttaatttcagtcagtatgaacttaaggatgggtctcacttaggtcctggttatcagttgctaaaggacacttttgtttccttcaggacatcagcaaaccaaagccatggcttgaattggagtctaaactagatttactgagatcttcaaccaaacagggcaaacataactcatgagaacagcgtggcagcactttcgtggctgttgccctggaggccaagagccattcatttgtagagttttaggggagtgaatgaagtcaaatcctaaataattgaaatatatttaattaatgtaatcaaaaggcatacagttgaaatatattttgaaatttagtggggtttgtacatagacatttttataaatgtaacaaagcaaacaatttttttttaaaaaaagtagatctgagagcaacagtgttaaaattatgaccatttcaactcataactgggacatatatttgattcctaattctaatcccataaaacctgccagctcttcattaggatcctgatatggcttgctttagaacttacacttggtagatattttaacagaagcacagaaacaacacaaaatatctcactagtccttctgtttttatacaggttgagcatccgtaatccaaaattctgaaatccaaatacccccaaatccagaacactttgagtgctgacataacatcaaggagatgctcgttgaagcatctcagatttcagatttttggattagggttgcttacctgccataatgcaaatactccaaaatctgaaaaaatgggaactccaaaacacctctaatcccaagcattgcgaatatgggacacacagcctgtcgcgtgaccaccccaagggcagtcattaggaaacgcggaggtggggcctggtggggctgagttggggacagagacagtgggaagcaggcctaggcaaggc

SEQ ID NO: 41266 - DNA, 1270 bp, Homo sapiens
ttctacagtgtgactcctgtgaactaggcttttctacagtgtgacttctgtgaactaggcttttctacagtgtgaccctgtgaactaggcttttctacagtgtgactcatatgaactaggattttctacagtgtgaccctgtgaactaggattttctacagtgtgactcatatgaactaggcttttctacagtgtgaccctgtgaactaggcttttctacagtgggactcctgcgaactagggtcttctacagcgtgactcgtgtgaactaggaatttctacagtgtgactcgtatgaactaggattttctacagtgtgaccctgtgaactaggcttttctacagtgagactcatacgaactaggattttctacagcgtgactcctgtgaactaggcttttctgtagtgtgactcctgtgaactaggcttttctacagtgggactcctgcgaactaggcttttctacagcgtaactcgtgtgaactaggaatttctacagtgtgactcgtatgaactaggattttctacagtatgacccggtgaactaggcttttctacagtgagactcatacgaactaggattttctacagtgtgactcctgtgaactaggcttttctatagtgtgactcctgtgaactaggcttttctacagtgtgactcctacgaattaggcttttctacagtgtgagtcctatgaactaggatttcctacagtgggactcctgcgaactaggcttttctacagcgtgactcgtgtgaactaggattttcttttttttttttttttttttttattttttttttttattttttttttttttgagacggagtctcgctctgtcactcaggctggagtgcagtggcgggatctcggctcactgcaagctccgcctcccgggttcacgccattctcctgcctcagcctcccaagtagctgggactacaggcgcccgccactacgcccggctaattttttgtatttttagtagagacggggtttcaccgttttagccgggatggtctcgatctcctgacctcgtgatccgcccgcctcggcctcccaaagtgctgggattacaggcgtgagccaccgcgcccggcctaggattttctacagtgtgactcgtatgaactaggattttctacagtgtgactcatatgaactaggcttttccacagtgtgactcctgtgaactaggcttttcgacagtgtgactcctgtgaactagggttttccacagtgtgactcctgtgaactaggcttttcg

SEQ ID NO: 41267 - DNA, 1510 bp, Homo sapiens
caccgagaagtctttcatcacaatgaatcttctcatatgtctaatctgggggctgtttatatgtagagtaatattctttcttaagtgcgttcttttctgatttgtctttttcacttcgtgtctgtgagatttgcttcagttgctatacagcgttctgttgtctggatatactgcggtttatgtacccacgatttattcagtattaacagacgtttggcttgtcccaggctgctgttgtgagcagtctttgcagcaccctgctgtaccctggagccgggagggctgccctgatcttctgtgcgggcagctgctgggctcggggttccccacatggcaggtcgatggcagacgatggcaagggtcttcccaggtggctggccagaggttactccagcagcacacgccgcctctcctgcccggagctcttgccatggctgcatgtcgctggacgctggaatttctgcttacccagtgtgagacaagaatagcactgggtggtcacaggaggacggaaaacccaggcaacagcgaagacaggaacgtggcaaagtaaccacagggcggcagaaaacccaaagcgagggagagagaaggcgaacccaccagcgtgatgtgtcctctgttctcccgggaaaacccgagtaagagacaacgaggctgtgttgggggttacctaaaaatcccctcctttcccagaatacctgatgatgatcccgcactgtcactaaagaaacacccgcaaaagaacacaaactcctctgtgcgcgcttccttctgaacggggctcctcctcctgagcgagccgcctccttctgagcgcccctcctcctcctgagcgcgcctccgtctcctgaacgcgcctccttctgctgtgcgcgccgcctaaccctgtgcgcgcctcctcctgtgcgcgcctccttctcctgtgcgcgcctcctcctcagctcgcctggcttctcacttaggcgtgtgctttcgctttgcagcaaaagctgctgcttttcgcatctaaattcttgctctgaaggtgccaagaacctggaaaccggctgggagtggggtctcaccagcctttggagaccctcctgagccgtctggcaaccagtgacgatacagaggtgtcttatgatttcgtttgcgttttcctggttaaacatgaggtggttattgcttgtgtttaatcagatacgctttactgtcataagcctaatttgcatttattatctcttcgctattattttgtacaggatcttttggattcatgttcttgcgtgattgatttctcaggaactttctgagtttggttttggtgtgccagctccacagaatgagctagggagagctttctctgtttctatacctgaatgcttggtgtaatattttaaattaggtatatgattgattttgagtataaaaccagccttgtatgtcagggataaatcccatgatgtatactctttttgttgtgttgttgaatttggtttgctaatattttattgaggagttttgc

SEQ ID NO: 41268 - DNA, 1980 bp, Homo sapiens
tagcaaggccataataaattattcttgattgccttgacaatatttcctattggtttgttctgagcagcagccaaacaaatccacatgttgcatctttcaaatatgtataaattaactttcactttaagatggtaaacgtcattatgttccctttctttcaaggctcactgataattcttttttcccttcagtgaccagtctaaccctttaattggtcttgtgaaacctactggacctcatttgaaaaacggaggcatttccgcagccgcctttcaccttctgcctggtagctgcctgactgctgggcctcacctcccagaagggccatctccccggccagcgacctggcgaccccacccttgggcctctccccgggccgggctcggctaggctgggctagggttcctgcgtcagtccgtcctcagacatgggctgtgtccttcatgctcccacgcagcccttgagcttgacttcggggacttctggcctctcccttccctaccagactttttgaaatcaggcctcgaacaccttctgtgccattcctgggtctcactgactgtgtggttctgacccgccttgcagatcggggagagctttcaggtggaaggcggggactcagagctgagcctggggctggagctgtttgcttgttcgtcctgccatggcggtccctgctgctgggggtttccagcaggtcccccattcctccgccctgtttccatgaaagacccactgtcggtgtgaactgcccgtctcctgccggtttatgctctgctgccgtcccatcaccatggggacagttctgagaaattgtgagaatgaaggccggggggaggcggccaggctcagccagcattgcagcctctgggccaagctgactcctcggctgggagtggcctctgacctccttcctcctcattaagtcatggaacttctgccttgtaaggaggtgctaattattcaccattgaaaaggcatcttaaattgcaaaagacactatagcagagaagacaacagcaagtgggtgtgaagatggctgagaagagaatgcccctgggctgctgcggcctaatgcggagctgggagctgtcggagctgggagctgtcgcctcctcctgggccatcccagcctcctcctcctgggccctcctgggccttcttggctccttcctcctgggccctccaggcctcctcacgtgatccctcccggcctcctcgttctcagccccccgaacctcttcgtcttcctggaccccacaagccgcctcacatgctttccccccaccccgcctggtctctcttggccctgtcagtctcacctcctaccattcatccttaacaattgacagcagcagaagtcagataaacctccaggtggacacaggcaggtccccagggaaacccaacctccaaaccaaagacagcttcacgtctgaaagccaaaccacatgtctcggatgaatccacagacgggattgagaacctcttttcctgtttggcatgctttcctctgattggcccccacccttcacctattttacatattcccactcctccctaattggtttttgacactgctgtgcccatctttgagttgtaccttttttttttaaccttttttgcatagtcacaaaccaatcaacatgcactcccccattctgagtccataaaagccccaaactcagccacactgggggaccacctgactgagggtagggggctgccctctccgggtcccctctctgctgagagctgtcactcaataaaactctccagctgggtgcagtggctcacgcctgtaatcgcagcactttgggaggccgaggcaggcggatcacgaggtcaggagattgagaccatcatggctaacacgctgaaaccccgtctctactaaaaatacaagaaaaattagctgggcgtggttggcgggcgcctgtagtcccagctactcaggaggctgaggcaggagaatcgctt

SEQ ID NO: 41269 - DNA, 1091 bp, Homo sapiens
ggcccacgctctccactcctgcggagagctcacagccaggccagggggcgcacgtggggcccaacgcccacgctccccactcctgcggagagctcacagccaggccaaggggcgcacgtggggcccaacgcccacgctccccactcctgcggagagctcacagccaggccagggggcgcacgtggggcccaacgcccacactccccactcctgcggagagctcacagccaggccagggggcgcacgtggggcccaaccttcaggaataagattattgtgtattcttttctttttttccttaaatcagtctttcttctgagaacacccgatgtgtgtggatcggaagctcagtgggcttattcgtatttaacctggcaaacctggaagtggaagctgctttgtattacaagggtaagatctttgatttcaacgccatgtaactgtaatgttttcctttgactggtatgtggggtagtgtaagtgtttgtggagaaggccttgccgtgtgaatctgaggatgagatgcttcagtcacaactcagcattgagcacgtgagcacctctgtgctgctggatccgaaggacgagggcccttcccggaccctcgggcactcagccctggagccactccttgcctacatctgccaggccctcgcctggcactccaggccgcccgggccccagcagcgtggaacacctgcaggaacacccttgggaagcccctggattctccaccatccttagagagcctcccagagccccaggctcgcacagcgtaaacccggccgaggcgcactcctctccaaccctggctcccttccccagtttctgccagctccagaaatgtaggaatagtcacctccacccccaccccctcccccaagacccccatctcatccccccacccctcctaactccatggatgccaccagccgcactctttctgcccaggagcccaggcgacttctgaaaagcaggctggattccgtccctctcctccactgcagcagggcctcctcggcggcctcccgggcactgctcctctcggtgcctcctttctagccctgaacgctcagacctctgtggggctg

SEQ ID NO: 41270 - DNA, 1654 bp, Homo sapiens
tcccccgtgcccgcacgctgcccgcgccccggagaggcgccctggacggctcctgtgtggcatcccccgtgcttcttgtgctcccctttcctgtcatctttacacactgttgaaaaacctgaagatgttggcctttttcaaaacattttttaggtgagccttttaagttcatttcacaaagcctggataaagttgctgtttttataatttgaaaaagataattttgaaaacttagattttttttttccttttgacaaagttgaccgctgttgccttgtcttctcacccagggcatgtgggacgtgctcttggctgtgaagctgtggggtgtgtgcagagagcctggggcctggggttcccagaggagcatcttggggaggcctgcacagtaggatcctgcccatgtgccctgagctgatgtgccagccgtgtgaaagtgctctgacaccgtgggccgtacggagggcctccagaggggatgttgaaggcaggagacagctgtgccgggagcctctgcaggccgtggagggcccgtcctgtgacgtgtctgccctccctgctccacctctggtgttgctgcttctgcgtcaggacccttgctgcagcgccatgtctgcatcttctttgcttttgtagctttggatcttcagtttgatggatggacaccattatcgtcgtgtggcacgggttgacctaaggaagaagacagagactttctccacaagaagggttaagtctgggctgtgcagccagccaggtgggttgctcagaccctccctcaggcctcccacttggcccagatctttcaccaggcgccatgtcaagggccctaggtcacacaggggagagagagatcccaatgtaggagaagccaagggctgcaacctcagaaaaccactgaggccctgcaggtcatgtgaggggtgggccatcagcagatggaggcacctggtgtgggtggggacgggggtgagaggctttggtgaacagaagagcagaggcaccaaggcagcagctttgcagctatgggttgctttcctgcagtgggtgaccaaggagggcaggtcatgctgatcagaaaggtacactgcatgactcagatgccacctgcacctacccagcaccctccacgtccccacctggcctgtgaatcttagacgccacctacacctgcccagcaccctcacatcctcacctggtctcctgcgcatcacagatgccacctgcacccgcccagcaccctcgtactcacctggtctcctgcgcattgcagatgccacatgcacccacccagcaaccttgtcctcacctggtctctggctgtccagagttgcttcctgttgacgacagctctcctcaggtgcgctttttatctcctgtactgtcacaaaggagctgaccctctcctggaagaaaatgttgattttacttttcaatccaggggccacctctttcattggtgtgtgcagctgacgtttcatattacagaaatcatctctgggctcacagcctacactctcttcctcattctggttactcattctttcttttaggttgtgtttttttgtagatgactttaaactatttcttttcatattaggtctgaaattacttttatccagtataccaattttttcctgatgttttaaacctt

SEQ ID NO: 41271 - DNA, 1115 bp, Homo sapiens
cttgaggaggaaagggtaactcatgagcgcctattgccgcaccgtcttgtcttgtaggaagccctaggtggagaacagatgctgagggattgggaaggcagagcagtacattctgagttacaggcggggagcctcagggcagatgcatggggcagccggtggggagacaggattcctgaggagacgccagcttcctaattcgctcagggttagctccagtcagtgtcggcttttaacactgctgagactgtgcctgtcgcctgagctttcctcttagctcagacacctgacttttcacccttggtttatatacagagaattccagcttgaacagaggaataatttgggctttattttaatagcagcgattttctgtgacatacatagaacgtcctgatgttaataaccgccacaaagtcccaccaccgaccttcctgcacacattctctcagactcaggctgttcgggccgagctgcagggccacctgggcccggtgactgcggtggagttctgtccctggcgagcaggcaccctcatctcggcgtctgaggacagaggctttaaggtgagggatggacgctggatggcgttcccgcgtggcacgtgctgtggaaagaactgtggtgacgggagctgtgcggttgcttcacggccacggccgcctgagtgatgttgtttctacctcacttctgcaaggcgcccgctatcctgatttccacagaaacgccaagcccggatgttttgccggggccgctggctgggcttggattcctgacaggacggttctgcggccccggatttcccacaactgcattcagggcctgggagcgcccaggcacgaattcttctccacggcattcccaggcccagagcagaagagccagtcccagggtgtggagggttcagtcggcacaaaatgaggctctagaagaaaatggaatgcgaattcagtttttatccagctgacatcagtgtgcgcctgacagtgtagacctgaccagcgagtgtgcacctgacctgacagggtgtagactgctacagtttccgcttggtgcctctatcttggcagcgttgaccaagtgcctgggaactgtttttcaccttgtttcatttt

SEQ ID NO: 41272 - DNA, 1664 bp, Homo sapiens
actttagagaaacatgttctgcaaaactattatttctcagatattccctgattgtaggcatccttcctagcatagcgcttttgtttatatcttttatcaaaatgttcttttcatcaagaatcagacttttcccaccagggttagttaaaggaaatgtgtcacctcttcctgcctgtgtgatttcgacctcgtgtgtgactagaacagtcagctgccccattgcaatgttagaaagcagtgttagaaatcaggaagtgggaatctaagggaacacgaaggaggacttttgtttcctctgaattgttgctctgcccaagcctgattttgtaggtgaccccaggcctggggtcgttttgtcaacatggctcacaaagctgttggcctgaatagcttttcttttgatagccacttaataaacgtaggcgaggaaggatgttcggcatggaatgtgaattggttctcatgggcctcatgtgtaataggcgttttgggagagaagacatttatgtcttcagactatttttggactaattatgaaattaaggctcataaatttaaaaagttcacatcatgagttaagccacagagagatgatgggaagtatctaggagttaggtaaagggcttcacactatttctagtctgtctgtgaaagctttctggatatgttggtgtttgagctgtatttcatgttttgttgtaaacatcctgtgatagattaacattaggccaccccaccatttataacaaaactaccattaatgtgcaaagaattaacattgttgtgtcaggaaaaggaaaaccaaagtgaattaggaagaagcagaaaactgttagtgtttgaaggaagatactgggtcccagatggagagaaccatcagcctggggtcaggttggagccacacccctgagtcaggcacatagcaggtgagtaagcaggtgcctgctgcagatgtgtgtgcagcccgtgagatcctccccacgcttccttagcagcaggcgtgtcaactgaaagacacttcactcggggagaatgactttcagacatgaggaatggttgtcacgtgagtccgtgaagtgctcacattcttttaacagcatactcaacaagtcaacagtttataccatttgattttaaagatttcaaatgaatactgagcatttcctggtaaaaggcactttttaatcaacataaaatgtcaaaaggaaataacttaaatatttttcaggatatgatgttattcatatcatagacaatggactagctttattttatagaaactggagaaaatggaaatgtatatttcataacactcagtgtcataactctccctattcctacacaggttatagtcttgccttttatttttaacaatctgatggtaactggcataatgtactcagtattctaagttgtatttgttgatggcgatatgtcgtattactaaagaaagtcttccagagttaaatgtctgtttgtaagttaagtcaccatatatatacatgtttattttttctgcatgtatattaagggatatttgtcttatttagatggagtgctgtaaaattcaagaacagtgcccagcacttcgtgcctggagttccctggggatattctcagggcgatgactgaccattaggaacccccgatgctctcactactcc

SEQ ID NO: 41273 - DNA, 1027 bp, Homo sapiens
cgtttcttacccatgccttgttttcccagggacctcattgctcccctcattcctctccttattcttcagttttcagctcagctgttacctcttctggcatgtggtggagacatgttctatatttgattaactaataagtgataaatggaagaacgaggtagcctgtatctttttattagtgtgtgtgacagtgaatagcagtgaaatggttaacttgagagaataatttagtagtacatagcagggattttaacaaatgaattaacaatgaatatgtaagataaatgtatttgaaaaactcaatcttttaatttcttaggtttgaagttatgttgttatactcttatttttaaatgtctgtgatctgtgttttatttttgttaattttcccagcttctaatcctacgaggacaccatcagccaattactgctatggcttttggaaataaagtgaacccacttctaatctgctcagcatcactggattatgttataatgtggaacctggatgaatgtagagagaaagtacttcaaggtaaatgaaaatctaaaacatgtttttaaaaacctgcaaaaggaataactcatccttcagtatacttggtaccacccaaggggtgtttcccttgggtaacagcagtccctcggggggtttgggataattttgtactctctttaccttgaacccaggcatgcaagcaggcgctttatatgggaagggccccaggccattcagacttacggacctttgctgtctgttatgctgatcttataggctcattggttttgatcttatgtccctttttattttaagaactgtccattttgtatcaacctgaaaacatgtaggaaagttgaaatattctttccttgcacagcaaggggtcttgagcacctgtaatatttcaggctggagacacagtggtgaataggaagggcttggtcccaaatcctgtggaagtcacagctcagagtttgagagagacactgtgtaagccagcgactgagtggctgtgaattgtgagtg

SEQ ID NO: 41274 - DNA, 1049 bp, Homo sapiens
agggatggcttccctggactggagctggagactaggagtgcctacaaggctcttctcactgctgcttctacttttatatttcgcttggctgcctaaatatgcttcagctctaggtaaggttacatccttctcctgtgatattgatttttagattccccagtgggggtgtttggaggcagttttcccccctctcacattttgggaactcacagttttttgcctgtctcatggaatttgcagtggcctgctgcttctttaaaaggatctgtgaattctttcattttttttggtacattcctgcagtggttcttggaacaaaacttcacagtatgagtatccacatgcctttcagtccatcctagtgggagatgcacattagtcctgtctcctagctgccgtcttcttgcctaaccactttaaagggtcactgtaataatgataatctatgtactcatatatagaaacctgcttattaatgtctacagaagtggtttgtaaactgcaaattggcatacaagtactattatttgtaaaatgctgctgaattctataggaattacagaagagaataagataattatactacaacaaaagtttatgttgaagaaaaagatggaactcaatcacaatttgatgagtgtattattagcatttttgaaacaactataattttttatgtattcttcatctgtctccgaagatgttttatgttttgggaagcagtggatctggtgacagcaggttcgtattgttcccttaggacacatctgcccagcacctactgccatgctcaagttacagagtctactgagtaactgtggtagctttggaaggtgtagctattttcatatgacactcaaagtatctttgcaaatattaaaaaaaaagtgagataaaaattgtgaattggagacaaatttgctttaaaataatgtacacatgcttttattttgtttttctccaaatattgagaattttcaagcctttaaaaattacgtttttttaaaatttaatttaatttaatttttttgagacagagtctcgctctg

SEQ ID NO: 41275 - DNA, 1377 bp, Homo sapiens
tgttttactccttttggcttttgttttgtaaagaatctcctgtgaggagttctgtttttagaatttaatattgtttggttacttccctgactttagtgaaagatattagagtatttactatgccagtatctaacttaaactattagtattaaataagtatatcttttacatttagtacaggtaccataaccaagagatttcttagttttgatggattaagagagagcattctgctgtatattatggcaggtacagatatgatcataactgaaccagaatttggattatagaagtgcacttcctagctgttttttatttaggtataggaacacacaatgagaaccttatgtttagaatgtagcagtaacaacagagggtaactacactgcaagacttaaatggtttgagcatgtgacactatccttttgttggggggagcagggtataaaaatatacatacaggagattagtttaatagtaaagttttatatgtatgtttaacttccatgatatttattattttgtagagacatttgtgattgtttagagttcttgtttttattctatttatgtataaggttgactttttttaaataaataagccaaaaattctttttgaatgcctctgtcatcttttgcaaagaaagataatttaaaaagtacaaaacttaagaacaaattgtttaggtctaacaggttatgaaggtggcagtgagacatttcaaagctggaatatatacaacgtttgagttttgtttaggttcctctttggttcagtaaattaggaaagggatgcatttggcagggtgggaataaagcagaaatgaaacaattctacttaaaataattattttcccagttcatctacgtgtgtgtgtgtgtgtgtgtgtgtgtgtgtgtgtgtgtgtgtgtgtgtgtgtatgtatgtatgtatgtccccttaccccatttcattcttggcccatgcttgctcttccttttttaccactgttatttacttatttctatagcatgagtgaacgtcattttgtaacagtcaagaccgtgacgttcggatgccctccctcccctggtaattttaagtgcagtgaaccctttttcctttgtcatttccatgtgtaaccaaatatgtctaaaattcagacaccttcactggaccatgcatgtttttaatctgaaagatcagtagtactcagagtgttcgtgtattttttaagtgactgcaatttttttttgcttgtctgaaaacttatttttcccttttataattttacattttatagtgaatctttctaagtatagattcttttattagacatgcaaagagaataatcacacaactaagttttccacaaacgtttatgtacacgccaatgt

SEQ ID NO: 41276 - DNA, 1023 bp, Homo sapiens
gtggatatactgttagactaagttgcattttttttagtgcctttcattaagaaagatctgggtttaatctaaggattatttgatccatatgctaaatttagctaactctgggatagaaaataataaaacctgttacttacattgtagtgatttttagcataaccttggtaaagagcctatatgattctatggcaagaattaaaacatacttgttaacttgttgatctgattatcctcagagtaaaggagtaggttgtcagcaactattattatattttgaacttttcctccctctgtctgcccctcccttttcttctgaagaaaaggtgaggtgagagatgagtagccttatttgcatatagggatttaagaatatcataaaaggaagaattagctgtacagtttcatatttgggatggtggtagtaaaatagactaccttttgattcttttggtctgaaatgtattagaacatgcttttattgcacttatgaaggtgtattgaaggaaaattttagagtaagctgatgagaaagttttgccaagtgaaattgttaaacaccttgtatgtcagaactgtgattgtggtaaataattcacaagaacaggctgaagtaagtcacctttccctcaaactaactagaacacgttctaacatgttcatttacctttcttcaagtaaaaaaagcgacattaagttagtgtatttcatattttattaggaaatgcttttatgtaattaacttaaaaattcttttttttttttgtagcctatagcaagcaaattttaagcttaattcagcaagggttggcttccaagggtggctgcaataggctgcagctatgtgatttttgtacttgtttttacatatatagcttatgtaatttctttatataaattaatgcttaataactgaaagcaagtgagctccaaagatgaaatttcagaagcagtatacatgaatgagtgtgttctactggtctgctaagagctttaaatggaagtggccgctcaaagcacagt

SEQ ID NO: 41277 - DNA, 1099 bp, Homo sapiens
cttttactttttaggatagtttcaacttaggatgggtttatcatatgtaaccccattgcaagtcaaggatcaacctctattctataacagagtataattgtctaatttttctcttttttttaacacagagtctctctctgttgtccaggctggcatgcagtggcgcgatcttagctcactgcaacctccatctcccgggttcaaggaattctccctcagcctaccgagtagctggtactacaggcgcatgtcatcacagccatctaatttttgtatttttattagagacggggttttaccatgttggccaggctggtctccaacttctgaccttgtgatccacccaccttggtctcccaaagtgctgggattacaggcatgagccaccatgcccagcccttgtctaataatttttacagagttttcagagtgtttgtattttttgtacaaagcttgtacaatatatttttttaagttgcaggttctttgctaagtgcatggtgtgtgcgtgtggtcccagctacttgggaggctgagggaggaggatcactggaacacaggactttggggttgtagtgtgctgtgatcatgtctgtgaatagccactgcactccagcctgggcaagatggcgagaccacatctctaaaatgcaaaaaggcaaattttcttcaatttttagttctgtataattatgtccgtgctttatttgtaatctttttttcacaaacattttaatgcaacatggctactttttatataaattcttgggaatgcattttagcaattggtgaaatctgatactgtgagttttgaaaattgtctccatggtgtgtgtgtgtgtgctgatgtttttggtgaaattttaattgattgtaatatttcttgtgtatggaatttgaagactgggaactataatatgttgaatttttttttattcatctagtattctgtagtacttgttagtagttagtgcatttcattatttaacagttgtttccaactaaagggatatatgttcaaagcacatagaatcttaaaaataaacttgtttggttgaaaaattgatatatttgccttttgcaagataatcttttgatt

SEQ ID NO: 41278 - DNA, 1114 bp, Homo sapiens
atccatacatttttttccccctgagcttgggtaggagagtttgctttaatcctagagtgatgcagcagtttgatatgtttatgaagagcagaaaccaaagcagatttgcatttacgggttcattgaaaatgttcttatttggattggattgaagatcagttttaaattttattccaggtcttgctcatgccaaactcttggacccttttaattataatatgaagttaatacttgtatgactagttgtccttagacagtctttcatttattgagacttactgttcttttattctttctctaattattatttttgaatcttttaaatgtataggatgataatgaagataattcaaatgatgggacccagccatccaaaaggaggcgaatgggctcaggagatagttctaggagttgtgaaacttcaagtcaagatcttgggtactgtcattttatcggttattaatattttttgtgatgttcctctttgccttaacatcctcttccctttcccccagctctggcaaaggcaattattaaaaattgtagaatattttcttcctgttctataatgtgccatcaaagttggtcttgctactgagtgtaattaaaaagcaattttatgatagtaaaatacatacatacataaaattaatcattttaacaatttttaagtgtgaaattcattggcatcagttacattcacagtgttgtgcagccattaccaccatccatttccaaaactttcactaccccaaactttataaccattaagcaataacctccctttctccctctatttagcgccttgcaaccatcattctactttctatttccgtgaatacgactacttagttacttcatataagtggaaccataaaatatttgtccttttgtggctggcttatttctcttagaactttgaatatcttcaaggttcatctttgtagcatatgtcagactttttttctgtttttaaggctgaataatactccattttatgtatatactgattttgtttatccattcagatgttgatgggcatttgggtttccaccttctggccaaggtgaataatgctgcagtgagcattggtgttcagagtttgtgttttcag

SEQ ID NO: 41279 - DNA, 1045 bp, Homo sapiens
gaatggtcatccttcccctccctccctcccctgttgtcagtgcctgctcctctcacttgctgtgtaactgtgggcaaggacaccctcgttaagcctcagtttccccatctgaaacctgggtcgagtggcacatgctcttgcccggctgttgtggcgactaatgcagccaccagagtgttctgcacagcgcctgtccagatgctggccgtgtggtttctgacttgtagagctagacctggacacctctcgtatttgaggtcctaaaccatgtcaccttgcgctgtggactcattcaggccacagactgtctttggtttgtctggtttctacagtgtcagacagatagatgcttcagagtgactttttggtgaacaaacctacgaggagacacgtgatgttcatgtccctgtgttccaggtgccaagtgtgtggacctcggtgatgcctacctgtgccgctgccaggccggcttctcggggaggcactgtgacgacaacgtggacgactgcgcctcctccccgtgcgccaacgggggcacctgccgggatggcgtgaacgacttctcctgcacctgcccgcctggctacacgggcaggaactgcagtgcccccgtcagcaggtgcgagcacgcaccctgccacaatggggccacctgccacgagaggggccaccgctatgtgtgcgagtgtgcccgaggctacgggggtcccaactgccagttcctgctccccgagctgcccccgggcccagcggtggtggacctcactgagaagctagagggccagggcgggccattcccctgggtggccgtgtgcgccggggtcatccttgtcctcatgctgctgctgggctgtgccgctgtggtggtctgcgtccggctgaggctgcagaagcaccggcccccagccgacccctgccggggggagacggagaccatgaacaacctggccaactgccagcgtgagaaggacatctcagtcagcatcatcggggccacgcagatcaagaacaccaacaagaaggcggacttccacggggaccacag

SEQ ID NO: 41280 - DNA, 1077 bp, Homo sapiens
gagagggagaggaggaaggaagggaggaacacagagagagcttgtgtgtcaggggcaccatttcaacccgagttcccagtgctggaacagcatcacactgggaaacgttccattttctctctggagctggtgtgcttgacctctctggagcaaacgcctttccggatactccctgtgacacgcactgtctatgctggccagagagcaggctttcactcctgtgggctgctgaggccaggtctccaaggcctgtgtgggcgaggggtgcacagccccgtctggcttgaatgctcaggcagcaccttgtctggagaagcaatgtcttcccaatagtgacagaggctctacctgcctcttattaggtattgatgtgtcaatgtcatggcaggcaggtgactagggcagggttggggccgtgctggctcctggttctggctcatggggacctcaggagccctctctccagctgactgaggcctcgcctgcacgcctggccgtcccagcccattggtaccggatttctctacagctggggattgggtaggtcctggagctgcccagaaactccagggaactgtcattctccttccttggaactggacaaccttggagaggggctctgggaggcccagaacctctggcaggagctgggtagtgcctggggttgagggtgggtcttcccattcactgagtgccttgatgtccttgctccttagcttcccaaattccctccggaacttactgagctccttctaagctttgccttggcctgaactggttctggggaaaaacaaaaaaacaaaaaacaacttgtggagctgcttgttaatgagtttcataaccaggcagcaagagccagctccaagcctcaagcccactgtctactccctgccctgcgggagcctctggccagtctgctgcctcccacccttcctccctgcctctcttcaccacagggtagccagaaacttaaacttttttcttcaaacactgaagtctctccccgcccccagctcgcgcgtgccatagattagatctctccggggataggcgcagggacacccgccggctcccatt

SEQ ID NO: 41281 - DNA, 1037 bp, Homo sapiens
ggaaaagtcaaatattacttcaaggtctctttcctgggagactacaagaaaagttgcatgcagaaatcagtgtaacaagagcaagaagagttacgtaggattatccacatcctgcttcacctcctgcttcatagctcaggcaagcacttccctgtgctctgctgtgcacagccagtttatcagtgtgggaaaaaatctataaataggatggaggtttacataaaagagaaacataggaaaagaaaggggaataaaaaagaaactgtagagcgaatttgggggttaatgcagaggaaaaagctaaagtgagagacatcacatcagctgtgagagagaaacccagaaaatgaatggcaggggcatctgggacaggtttctcttggtaacaagttgaccctttaaatagactgcaagatgtatttgcagtttttatttggatgctgaatgaaatttcttttgagtataacaaccacatgagctcaagattttatttgggcaatgatatggtttggctgtgtccccacccaaatctcatcttgaactgtagttcctataatctccacatgtcatgggaaggacctggtgggaggtaattgaatcatgggggcggttacctccatgctgttctcttgatagtgattgagttctcatgagacctgatggttttataaggggcttttcccctgcgtcactccacatttctccttgctgctgccaggtgaagaaggacttgtttgcttccccttccaacacgattgtaagtttcctgaggcctccctaaccatgctgaactgtgagtcaattaaacctctttcctttataaatcacccagtctcaggtatgtctttattagcagtgtgagaatggactaatacagcaaattggtaccaggtagtgaggtgctgttgtaaagatacccaaaaatgtggaagtgactttggaatggggtaacaggcagaggttggaacagttgggagggctcagtagaagataggaaaatgtgggaaagtttgaaacctcctagagacttggagggc

SEQ ID NO: 41282 - DNA, 1035 bp, Homo sapiens
cctccgtccgcctgcatcacctgctcgtatgcatccacctctctcctcttctctttatcctggagagcccttgggagacttttcaggtccttattaaatgcaaccagccacaaagccagccctgggccttggtcattcactgtcgtggtgtaaaatggaattacattacaaagtgagggctttcccacacctagcagagggggtgatggaaagtaaacgaagtgttggggaagattggaactttgatagaagagaaaagaggctgaggtgggagcaggttaccacttctgtctgggacagaaggacggaggatgtgggtggcacaagggggccaaaggcctgcccttcccagaagctacccccaggtgggagggcctgtggtaggaggaggatggctgggtgaaacacagatgtccagttgcatctgaatttcaggtaggataaacacgtcccagatacagcatggcaatacgtatactgagcatgagctcttctttatctgaaattcaaactgtaacaactggccatcctgctgaatgttttctgttcatgtttggctgttttgctaaatttctggcaaccgtaggtgaggctgcctagggggtgtgtgaggtcacctgacctatgggaatcacggaacctccctctgggtggctccgtgagtgtttcagggcaccatggccaggcgcagggtggttcactcttgcctctttctccctgcactccgagtgccctcagtggggactgttttcgaggtttgtttaagagagaggctcaggacttcgaagagaggtttcctcggctcagagtgcagagagggagggtttgaattgtgatgtctgtggtgagggtggctaggcagacagtgcatgaggacctggtgtcctcctggaaaggacacgccggccatctcggggtctttctgcttctgagtgtctgggaggtgcgctgggaggaaggaggtgactttcctcagtgcctggctggtgggaacacaggaccaacacctcccgcctaccgtgcagcaggcccttt

SEQ ID NO: 41283 - DNA, 1024 bp, Homo sapiens
tccgggtcatgtgcttctcaagagtgggagctttgccagggaatcgttgtcagatttctgatgtgtgtaattcatccaggtctggaagggtctttattcagtctgaaggacattttaattttgtgtagtattttcatcacaaatcctcgtacacatgagggtattggaagaaacttgaacctttcctttgtgctcactgtcacatgacatctcacccaagtttcatgtcccaccaggttggttttaagaacatgcagaatgtggagcatgttccgctgtccttggacagagccatgcggctggtgaaagatgtcttcatttctgcggctgagagagatgtgtacactggggacgcactccggatctgcatagtgaccaaagagggcatcagggaggaaactgtttccttaaggaaggactgatctgtgtgctcttatcaccaatcagttcagacctggttgattttgtactttggaactgtaccttggatggttttgtttattaaaagagaaacctgaagtactcattttgctataacttgtcttctctaagcaggacagatataggaagtagaatttcttttaattttcttcatttttcccacccttttctatttttctgagattttttttttttttttttttttttttttgcattttaagtaatgaaaacaggtcatgttaattttcccttacactaatgaggtaggaatttctctgtaaaagttgaccttttgagcaaacttatcttatgaagagggctctggtgtttacgcagccagcttgcctgaagggacctttaaaccatccagaagggagagtatttactagggttttattaagactctaatggttataaatgaaatatcttaagatttttcacttctgggactgttaagccatctggaatagctattttggagaaaaatcttcaaccaaaataaaactgtaaaaaaaaaaaaataggcctttatacaagctgtagccagaaatctgggataatttttacaagcactttagtaatg

SEQ ID NO: 41284 - DNA, 1027 bp, Homo sapiens
taagtaagcagcattttcttcagatgaagaatttctttaatcttttttcctgaggtgaggtgggactacaggaagagaagcccggttggcagctttttaggcctcagaggaggaagggggctgaaggtctgtgttttgtttacatcaactttccatttcatgtgttttgctcctaccctttgccactctagagcctggtcccctaagtccagagcctctgctaatgtctcaggagacttcctttactgtcttctgtgttggtggatgcagggacctggagagcagtgctccatattgaaaccttcaggacagcaaggtccacagctctttcccttggtgtcaaccgctgtctgcactaacctctctgtctttaatctcttagctgctctcatgccttttaaaaatttttctcccaaattaaaagtggctttagtttttctgtagtgaaaacaatcagtacatgtttatacatacactcatgcagttttatgtaagtaggactttggtatctgtttttctgtaactatacattatgtattatcaaggagatctaagctatatgcataatgatttttgtatttaattaacaaaaaatttttttgtcttctgtttttgctgctgtaatacatagcatcatttacctaaccagtcctctaaagggcattttggcttcctgttttcttaatataaacactatgatgaacatccttgtacatacatttttgtgtacttccccaattatgcttgtcttgctagaataaacttcgagtagttgaagtattgggtcagataaatttttttttgtattttgttgagtatactctttctgaaggatacgccagtaccctgagtacccgattttatataaccttcccagtattagaattaacacattttgaaacatctttttgcctattgaacagtttattattttcatttatatatattcttgggcatgttttcatatgtttattgactttataaatttcctctttggagactgattcatatattaactgttgcccat

SEQ ID NO: 41285 - DNA, 1047 bp, Homo sapiens
aagggctcacatttgttgggtgtcctgtgatgtgctgggcagtcctaagcccttgaccattctgttattttgaagctttaaggagatgcactaaatggaagtccatataatagagttggatggagtacctggaaattcagatggtccaacttgaatgagtgaataaatagggaaagctatctgattaaaagtgggtcccctctccatgtgtgaattgtcaagttgtggggattactcctgtttttcataatagttacgttgatttttcaggtgaagcacttgaggaagaactggattccatggcaaaacatgaatccagggaagataaaatttttcagaagtttaaaactcagatagcccttgaaccagaacaggtaaagtggagctcatagctcctcatcgtgttctcttcaggccatgttttatgagtataatctgtaagaaataacttcatagtaacattagtctgttccttaggagcctataaaagcaggcttttgttatcttgttagaggagttcctcacacagatgggccatgtagaaaggtgttttgcagtgctgatccatttaatagttactaaaagactaaaggttatactgtttatcatacagggttcattttctaaagcaagcatcagggatgggagatgaatgagatgttgcctaaggtacatgaggtttaggcaccattggcccccccgccagaaagaaaaaaggttatttttgcccatttccaacaggtaactttggcttgtaaaatgtgacatgttaacatttttctccttaacctcccctaccataaacgtaaatcacgaaagaaaactaaactcccataaaccagtcactggttcaaataaatacacaggaagaatagatctaggtcttaaacactaaggcagtttttagcaatgcatatgcttttagacaaaatacagaaaaccactcagttgctgtaggaagcttattacagtgaaatttacttatgtttgtagtagttttcaaaacactatgtttcacttggtatttgtccctcctaaaatttttta

SEQ ID NO: 41286 - DNA, 1086 bp, Homo sapiens
tcatacattccaaaacatgttttgagtcttactctgtgcctgaccttgtgcttgataacagggatataatgggaagcaacactccagtggtcagatgctcacagtcttatggaggagcccaaataatatctggggaagttaaagtccatataatgactgataagagtacaatacaggtgccatgggaacacgtgacatcactgaagactgcctggaaggggccgcgcgtgtgttcatgcctatacgataaacatgatacataatgaaaatgcttatctttaggagaaaggagagcctagagtagcaggatcaaggatgaaagctggacttcaaatatgccttgttagtgtaaatgtgactgtggaactgtatgagtattttaagattatggagtaaagtaagttttaaaaagcagtccctaatcatcaaaagtaaaaaactcttgatgtagtcatataaccacactaagaactcttccaggtgacttcaaaacataggacagtacatctctagtagaatatgccctgagaatgaaaagaatgtaacagtgttagtattttgaataaacatgttattactagactgttgcttttattttgagatggttgtgtgtgtattggggggaaaggaaacgagtaattatgttggtgttactgagaactgagatgttgggcgtaggaggaagataatgttgattgtgtctacgtaccatttctctctaaaaggaactccaggctctttggagaggtggttgattccagaactaggtcaggaaacgttcatataatgtgggaacatggtcatatcaaagattaaggataaggattactagggccatgtcagaactcaagcaacatgaaaaggctcctgcttgcaaaagatggacagtttgaacatccacaaggacgctaactgcatcagatatgtttaatgggttcaaaatgatactttaaaaaaactcagtaatcatctttataggatacttgggaacagactcattttcaaattggtaaataaaaggaaagagtttgccttcgaggggtacataacttaattatgaatgaagtgatatgtgtggaatttact

SEQ ID NO: 41287 - DNA, 1042 bp, Homo sapiens
tgtcttctgtctaaacacactggctgtttggaagcctctgagccttgcctgctggtcaggttcaaggaaatgcttggaaatttgagaaccagagcattggcctgggctgtggctctcggcagggagagacggccgcccagagcagcgagtggccaggaagtgtatcctagccccccaccccgcccccgtgtccaccgcaggacagagcttcggcagaaagcacctcagctttaggtgaattcgagctaggacaagttccgcgtttccctccagcccagcaggcagacggagggtctgtccctcctccagaacggtcccttgaccccagagatgtgaggacaggctgcgtgggcggcgggtcctccatgggagcctgggctggagagagtgctgcctccttcctctctccccacccaaggctgctctcattaaaatcaaatttagcctcttgcatcattgtgcccctggttgttggaacaaaagcagagagctggggaaggttcctgacagactgggcgtgtctgtgagtttcatgcagcctgtggtcaatggtaggttctcccctctactccaggggagggccacagcccctcgcaccctcagctgaggtcatggttgggccatttcggtgaccctgggacagacgtggcggggatggcagggcagcgctgacgtcctggaattagttttgctgtagttagagctgtctgtggtgtctccagagggtgagtaagaattacaggcctttcaccgtgttattagttggcagccgagcggccacagaagaaagcgcagacgttgcagggccctctttaagcagaggcgccttcaacacatctgcacttgcttgaacccaaagttaaaaacactggcgtcggtgccctctccccgtcatccgactcacgggcctgttctttccatgctgatgttcgtcctcgctgctccctgcaggccgcatgcgggtgctgaaggtgcagaattcctctcccccggggaggcggccgtggactcctatcccaactggctcaagttccacattggt

SEQ ID NO: 41288 - DNA, 1030 bp, Homo sapiens
gtcttggcagggagaggaatgagagagccgtgcacaccagccagggcgttcgggaggagcagcacgcaagttagaaagtccccagtgccgctgtccgtatgagcttctctccagctcattttccccatctgtccagtgggatctcgctgcgtgggaccaatgcaaggataggatgagatgtgcatgtgagcaagcttgttaaatattaactagtactttgtgcgtggccttccacaacagtcccctcgtgtgcacaggcagggtctgagcagagggagggctttgtggattccaaaggccaccaggcccttggcaggcaactgcagctcgccacctccctcaccgaccggtcagctttccaacaccaacactgaagaggtgtgggagttctgtgccaggagctcccagagcagcttcagggagagtgtggggccccctgggacctggggcatctttgcccaccttaggagtgctttgtccatctggacaagctaggcttggctcactgccacccctctttggtccagctgtcccggggcagtggtgcccaggctgcctgacattgcaggggtgtggacagagcccttgccagggaatccctaccccaggattctggtgtggcctccgcctgggtgtgtcctggttaattcctgtgcctactgaaggcctgccccagctgatctcgctcgctcgcctcctagaccatgctggccacattggttctcatccagtcttctggggtggggacccgtccaaggacaggctggctgctcagtcattctgcagggccaagcagggcctgcaaggacgatgggcagacacagccgcatcacccaggcaggacagcaggctctggcccaggagatctgggggtgaatcctggctctgccagccattagccagagtggaagtgggcaaatggattaacgcctccagcacctggtttctcaccgagaacacagagaaggttataatctggacctggtataatctggactctgacttacaaatctgaatgccaagcaaaacc

SEQ ID NO: 41289 - DNA, 1071 bp, Homo sapiens
cagagcaggtgcaggctcccagctcttccagccccttacctcgcagtaggttcccacagttctagcctccttgatgccagccccagggtgcccactgctggccaactatgtccttttcctcaaaaccaggtccctcggtgcccagggtgaatgggtatatgagcctgggtgtgggcacccggggtctgggacaccgagcagacctctctggcttggagatgtgtgcggtgggaagaacagggtgacctgagctctcccggtgtcacattctccacatctgagccctctttgggtgaggccctacttccagcacacacagctgtccccattcgtcttcaggaataactgacccttgaggccagacagtggctgtgaagagcagggggaccgcctgaccgtgacccccaaggacagacgctggccctcttgacggacgagatgaccagggccaaaggcggcaacatgggggcccacgctgacggcagcatctcacacctggatgtgtttctgtggtccacaggtctgtaggaggtggaactggttaatttaaagtcaggttggggttgttgttagaaagggttcctgctcccacgagaaaccaaggatgagtggtggctgcacccagtctccatccccatgagcaccctgcggggtgttgggacccccaggcccgggccacacacctctctctttcagggccgtctctccctgtctctccagacctgctctgggttcttccttctagagcttcccagtgggttgccggagctgtctggggttatgtggcttgcctaaggccacaccgattggggcctggcaccaaagtccattagtatttctgtgacagcagccatctttctatgtaagacgcttatttcataagaaatgccagcatctcttggagtccttctgaggaggcaactgcatacgaacatcgcctctgtctcgtgctgtgacccggggagagactgtgggcaaaacccagtggcgtccgagggtctgtgtggccccgaactcttagtgctgacagcaacatgaaataatgaaggcacagggcactctgttcgtgca

SEQ ID NO: 41290 - DNA, 1050 bp, Homo sapiens
tgttagcaggacgtgtgaggccaggagtggtggggtaggggttggacgctcaggcctgctgcctgtgggctggctctcgaacttccccgggcctcagcctcctcgtctgtgaaacggggtcacacgagctgccaggcaggccacagcgttcacccggcagctcaagcccagccacaaccacactggctgcttttctcaatgaagcaaagtatttaggtgttcaccacgtggctgtggggcctttccggcagctcctcgccctgcaggcctgggctcagcacttcctggcagccggggcccctttccggtgctcccgtcctggagggtccctccgtgtgtcctgcggggcctccgtccagtgccgcgctgcgtgctgcctcctcagttcacccgcactgaccctcgggtgtggcccctctgacgggactgcacgacctgctcaatgtcctggtaagctcgtggcccagccggggagctgaagggaggccgggacgccaagctccaagcctggtcagagggagggcggggcagggtctgagtgacaagtgtgtgggcatcgttgtgcggcctcaccaccgctctgacgcctcctggctctctggacatgacccgtgtccaccacgtggcccagccgaggacagggctggtcactcctccatcccagggctcactcagccaatgcttattgattagtatagactgggaaaccgaggtgggagaggtgacaggagctgacacaggcccaggacgcacagatcactcccgtccggccgggagctgacacgggcccaggacgcacagatcactccggtccggccgggagctgacacgggcccaggacgcacagatcactcctgtccggccgggagctgacacgggcccaggacgcacagatcactcccgtccggccgggagctgacacgggcccaggacggacagatcactctggtccagcccaaacccagtggcatggacgggacttgctcagaacctgttagtggctcagacaggacataaagtgagggttccccagtgctccccaccgcacag

SEQ ID NO: 41291 - DNA, 1044 bp, Homo sapiens
aaaacagcaaaaccctcagagagtgcggttctgggccctgcacccactttaccgatggggaagctgaggcccgtccctgcagccgtccaagcccacactggcaccctcccctcggctgttccgattaggccttctcagcctccccaggccgtccgaccctggccgactgaggatgtgtgtttccgtggggtctcctggaaaagattaccccatttgttgaaaatcaaggaaagtcattttttttttccaaaagcattccccagaacggcaatatcgagggtctttttgtattttctccagttatgacggtcgccggggtgccgctagtgtgtgggccatcgttctaattgtcacgaaagggagggaagattaaaaggacgggaaagaaaatatggccttcattttcctcgtactggggacgaaaatggaagccaggggatttcattcaaaagcagtttgctcaggtctggttgtttttaatgccaaaaaaggaaactgcagatttaagatctccttagacaagcagagaacgggctcaaacactagcccctaactatgcatttagtttatttttcttactgatgttttttttaaacatctagggctccacggaggaaaaacaagattgtaacagtaaccttggtgctcaatatttaatcctggtttagtagttagtagcagcttacccttttattactttgaaatgaaaggaagcatcacaagggtttcataggaaagatgtctgcacctgtgttttcaggctaccggggagcccgcgttcatttccagtctagtcgtacttccctgagtcctgtccatgaatactggatgagccgacagtagcgtgtttaaaactacagtgggtctgagactttcaagcaattctttttccccgtttgcttttgaaataaagtctaaaccatcgcaattgttttcaagtggaaatgacttcagacttttacagttgcaaatcactgaatcattttaaaatggattttcattaaattgaccgtaagaggttgaagagcctcttctgagatgatt

SEQ ID NO: 41292 - DNA, 1636 bp, Homo sapiens
tagtagaactagtgttctgtggaatgagttttgctcaaagccaatccttccaagttgaaaacaacgaaggctttttaacctcaaaaatatccaacactccagaatttaccacccctggaactgcgggctgactgcagcggaccatttggtttgacctttagtgttttagaaaaatgaaatccatttgccagcgcttaaaacccgggagattccacaaggtctagattctttctcttgaacctcaggatcccggccagtctgggcctcggctctgcagggcgaccctggcgggcagcatgttcagtttgccgccatacctgccactgccctgccctgcaccccaaccctcctttgctgctggtttcagaagtgcacagagatagcaatggccacagacccagtggggttatgaagcaaatgtgaccttcaggcgccagcccaccatccgcattttatttttaagtagctcctggaatcctcatctggccttgcgcctacccagggccctgtcaaggcgaatattatgtgggatcgtggaaagtggtctgttctcagagtttctagcagcagagactagttcttaaaaaggccgtgggtggtacacatctttaaccccccataagaaacgttccgggaacacggagaattgtggccacagctttctgagaacagcgtgggaggacgggagccacgggctggtgtgtaattgacggcctgtgacccagacgtggtccccccgaagggacgtggacatgacatacaggacctgtgccccaccccgctgttcgtgtggcgatgatgtcggcccgtggcagggccaggatgctcccaggagttgggcggacctccgctgcgtatatggaaggaaggacccggccggggaagccgagggctgggaaagtgaccggggcggcgtctgtagtctgcattgctggagtgttggagcccagacggaacacagtctgccctgagtgggaggtgtgggctgcagggcgtgcgagctggggattcccgccagctctggtttccagcacctggaaaggtcaccagagtttgaatctggtaaattcttcctggattgggggctgagttccctccctgggcctggcatgggaggacatcctgggacgggctctccttccagtggaggcaggggccagccttggtggaggaagcctgggttggaggctgagttccctccctgggcctggcctgggtggacgccctgggacaggctctccctccagtggaggcaggggccggccttggtgggggaagcatggcaggggccggccttggtggaggaagcatgcttacacgcttacacgcttacgcgcttacacacttatgctcagacacgaccttgacaattcctccacgtttccaccatgaccacatcggtcaaacacttgcgtggaccggcacctcacagggccctgcggctaggctccccttcccctggagtattggcctgagatacaggagccctatggtgtttacagaatggcactgacctttcataaacagccccacctgtggcctcctgtcccttggccagggtggagggacagggcggtgcccacattgcccttcttgggctcttactgtgggaggcgtccacggcagagccaagggg

SEQ ID NO: 41293 - DNA, 1293 bp, Homo sapiens
aggccccaaccaggagggagggccgccccgggagtgggacctccgaggcacaggaatgctgcagaccaagtcccggcagagctggtgttacctgggaaacggaggccaggagaggctgctggtaggaagagcaggaccgtgcagaatagatgggcctctgcctgcacgcggtacctggagccagccagcgggggataggcggcctctgcggccgctgctggcctgccacggggggtcttgggcggcgctgtgagaccctggttaccagggagggtgacccctaataagcaaagcatggaggcgagtaactcgggcaggaggacgtccattcccaggctcggaggcctcagagagatggactttgggcacttcaatagctaaactgtgggctgacgctccctggagccatctcaactcggctgcccaggacccttccccaggccagaggccaggaccccacatacagggctggggacaggcggggtggacccactgcctggggtgctggagatgggcagggtggacccactgcccggggtgctggagatgggctgggtggacccactgcccggggtgctggagatgggcagggtggacccactgcctggggtgctggagatggggctgggtggacccactgcccaggatgctggagatgggctgggtggacacactgcctggggtgctggagatgcccggggtggacccactgcctgaggtgctggagataggcagtgtggacccactgcctggggtgctggagatggggctgggtggacccactgcccgggtgctggagataggcagtgtggacccactgcctggggtgctggagatggggctgggtggacccactgcccggggtgttggagataggcggggtggacccactgactggggtgctggagataggcagggtggacccactgcctgaggtgctggagataggcagggtggacccactgactggggtgctggagatgggtggggtggacccactgcctgaggtgctggagataggcagggtggacccactgcctggggtgctggagatgggtgggatggacccactgcccggggtgctggagatgggcagggtggacccactgcctgaggtgctggagatgggcagggtggacccactgcccgggatgctggagatgggtggggtggacccactgcctggggtgctggagatgggtgggatggacccactgcctggggtgctggagatgggtgggatggacccactgcccggggtgctggagatgggctgggtggacccactgcctg

SEQ ID NO: 41294 - DNA, 1081 bp, Homo sapiens
gccccaaagcaccccgcccggccccctcctcccaccaccactgcttcccctgcctcacgtcccgccaccaacgcgcccttcagctgctcccttgtcctctacccccatgtacctgtttcctgcgctgccacgtgctccttgccccgtgacccctgttcctgcttggccctcactcacctcactcccctgtccccttgctccccgcctccaccctccacgccccaagccccgccccccacctgcctgctccctgtgccccctccacctgcctatcctgtgccatcctcctccttgcacgccgccctcccgcgaccctcacctcccaccctcctccctgcctgagccccctccaccccacccgggcccacgagccagcgcttctgtccagatacctggaaaccaccgcagaaattcctgttaggcggtttggggtggggtgtgccctgatagctgccccctttccttccctcgggggcttgcaggacttgcacctggttgagggcacgcgctttgagactctgctctggtcatttcactttctgtcccattcatcctactcccctgcctttccgctctggcttggaccactgtcctaagtggaaggaggccgcttctcccctccactttataacgttccccatcttttttagagctctgatctgatccggtcgttccctttccttagctggccattcctgcagggtcttgccctttccctcccctggctgggatgtggaatgatagcaggcgcctgcttcctgctggcgggaaggctttccgaaggagggaacactgatgctataaatccgtgggcggtagggagcaggaaagcagtgagggatctggccagctcaggccgtcccagtgatgtcccagtgatggtctgaatgtagtgggaagtgcagggggtgtcaatagaagtgatagacccgagttcaggttgttaaaagatcactgcagctgcgtggagaatagattccagaagtagaggaagagctggacttggggaaatgccgagatttccacgttggttaactttggatttcacatggtccagaactcctgtggagcttggggaaga

SEQ ID NO: 41295 - DNA, 1026 bp, Homo sapiens
tgacctctgatctttctgtctctgagttacctgtcatcgtagtcagacatgtgatcttttgtgtctggcctcttcactgtgcatggttccaggtttcagccttgaagaggtaggtttcctgatgagaaatggcttgaaggtggtgagttgaagagtcactcggggtattctggggccaggatggaagccctgactcgctccctcgtctgtgctgctggggtccacccgtagggccggctccaggtgtgacatagcacctgctcaggacacccctgctttgcctccatggccaggcttcattctccggctctctccctccagcagcagagtggctgcctaggggctgtgcgcagagacacagggggaccctttcccaccaggagcctttgttcaccccccttggtctcatcaggccagcggaagttgagtcaccatgtacgctggccggcccctcctggagctggcgtgggttcggcaccaggcagcacagagggcccctgaggacatcaggctctgcccagtggggagaaagtgggcagagtgcggggtcagtgtccatgctgcccggcacttgcagcaggcacttctggcactggctaaatatttgggctgcggagggcagttcaaggggccagggcaagaacagagcccagcaagaagtgcaggcggccggctggtttttctctcccaccttccttaagcctgaggcagagcatggcccacaaggaaagtggagtctgtgtcatgggccaagtcttactcctcaaaacagtgtgatgactctgtatggagagctctgtgtgaatactgaagctccatagctgatagctgtcggtgtaagcctactgtcactgtctaaaaataaccatcactgtctaaaaataccgtcactgtctaaaaataccatcactgtatcgatagctgtctgtaaatactggaactctgtggagcacgctctgtaaatactggaactctattgctagctgtaaacggtgtaactcagtataactataccgtaactctaaa

SEQ ID NO: 41296 - DNA, 1021 bp, Homo sapiens
tggacaatattgattcttccagtccatggagtatgttaccattttttgtgtgtgtcctcttcagttttctcatgtcagtggtttatagttttctttcttttttttgagacagtctcgctctgtcatccagggtggagtgcagtggtgcgatctctgcttactgcaagctccgcctcccaggttcacgccattctccttcctcagcctcccgagtagctgggactacaggtgcctgccaccgcacctggctaattttttgtgtttttagtagagacagtttcaccatgttagccaggatggtctcaatctcctgacttcgtgatccgactgcctcagcctcccaaagtgctgggattacaggtgtgagccactgcgcctggccttatagttttcattgtagagatctttcacttctttggttaagttaattcctaggtatcttattttgtttgtagctattgtaaatggaattactttcttgatttctttttcagatttgttaactgttggcatgtagaaatgctactggggcttttttggtgattttgtatcctgcaactttactgaatttgtttatctgttctaataggttttttgtggaatctttaggtttttccaaatgtaagattatatcatctgcaaacaagaataattatcttccttttcaatttggattccctttatttttcttgtctaattgttctagctagagcttccagtactgtgttaactaacagtggtgaaagcgagcatccttgtcttgctccagatttagaagaaaggctttcaatttttccccattcagtgtggtactagctgtgagtcttgtatatggcttttattgtactgaggtgtgttccttctatacccagttttttgaagatttttatcatgtagggatgttgaattttatcaatacttttcagcatcacttgaaataatcacgtagttcttgtccttcattctgccgatatgatgtgtcacattgatggatttgtgtatgttgagccatccttgcatt

SEQ ID NO: 41297 - DNA, 1042 bp, Homo sapiens
ctcccagattcaggcaactactgtcctgcctcagcctcccgagtagctgtgattacagacgcgcaccaccgcacctggataatttttgtgtttttagtagagacagggtttcaccatatcagtcaggctggtctccaactcctggcctcaggtgatccacccgccttggcctcccaaagtgctaggattacaggtgtgagccacggtgcccagcctatgtctgctataatattaagtatagaaaaacaggcttcagaaccatgttcagaagcatgtgctgagtaacagcgtttgagtccataaggaccacgtggaggagggtggtcccctctgatagtaacattgtgtttctcctttttctgtgtttggaaacactcactcactgtctgtgctacagtttctgcgtgttgagtgcagtcacctgctgcacaggttcgtggcctaggagcctcacaggctatatcgcacagcccaggcatcgcacagccaggcacgtaggaggctgcgccatctaggcttgtgtacgtcactgtagtacgttcacacggcaacgaaatcacccaatgacgtgtttcccagaacgcaccccccaccgttcagcaacgcttgactgtaccagcggtcccctgccattttggcaccagggactggttttgtggaagacaatttttccatgggtggggcagggagcagggtggtttcaggttgaaattgttctacctcagatcatgaggcattcaattctcataaggagcacgtaacccaggtccctcacacgcacagttcacaggagggtttgccctcccctgagaatctcatgccgccactgatctgacaggaggtggagctcaggcggtcacactccttcaccatctgctcacctcctgctgtggggcccagttcctaacaggccttaaaccagtcccagcctgtgtccaggccttgcgtacccctgcccagcaccggccagtatttctttggaaacacccagaagcccaggtgcccacaaagctctgttcagctgtcagcagacccctccccg

SEQ ID NO: 41298 - DNA, 1503 bp, Homo sapiens
ggaggtctggtctgctgggcttaactctttaagccacttgcccgcccctctctgctcctcaccacctcagaggagccctgcctgcccaggcggacaccacgtccgtgtaagccccaggaccacctgtgctgtgtgcatcccagtgtgcacagtgcctgcttcatgattcgctgcagagacggcgttggtgtgaacgggatcagggtctcgccctgcacccgcggctctcgctctcctgcaccctgggcggggctccctgtggcagcctccctcccgattatcctggcaggcccggcctgtgtggttcttacgcgtgagggggatagtgagtcccagcaggcaggcaggcttgagccctgagtgttggaattgtctcagtctctgacttgtaacctccaggcacaggagacgatggactcactggccatggtggagggtgtcagcagctgccaggacctctaccgcaagcacattggtcccctcctggagcgggtgaccgcgtcgcaccttgactggaccgcacactcgccggagctcctgcagttcagtgtcatcgtcgcacagtcaggtgagccgtcccgacagctggcgtgccgtgcctggccccactcaggctacacacctgctcccccaggtgctcagcaggtaccagcgccgaccagctgagctgtggttcactgaagcgtgttgttaaaagtacccaatagtcactcttgcctggggagaagcagcattttaaggagcatcgcattgaagactgtgggacgcagctcttccacttggcccgggcacacgctttcatgtgaaaccttcaaagtgtgcttttccgtggcctgttttgtagcctggcttcttaaatacgtctggattttgttgcagaatctagatgtctagccgcatgggtgctgtgtgtgtgacatgggggccttagccccagcccctctgagaccagcatttctgtggttctctttgagcctgcggatcagccacttttcctgggatggacagtgtggcccagtggggcttcagcgcggggcaagatccactgcagaaccctaaggagacgtccgctcagcagccatagtgccttgggacacacggcccgcgctgctccacgggccgtgaactcgccgcggtagctcttcctcgtttgcctccccggccctcccgctcccgcctgcagctccgagtgcccccgcctcctgttggatgtgtgcaccagggtggtcgtgctctgcatctgaggatgctaagatcgttcttacacaatctctgtgcctggtagggactcaccttttttttcctgagacttggaaaaatacccaaaattgttctttgtcagttgcattcaaaactgtttccaaattagaaaagaaaatactggctgggcgtggtggctcacgcctgtaatcccagcactttgggaggctgaagtgggaggatcacttgagctcaggagttcgagaccagcctggccaacacggcaagagctcatctctacaa

SEQ ID NO: 41299 - DNA, 1127 bp, Homo sapiens
ttggaacacacatctctttgggcccacatctcctgtcattcactgaaaggcaggaagactgcagtatgccgttcagtgtcaagagctgggtataaaactgtatgggtttttttgttttttgttttttgagacggtctcacgctgtcacccaggctggagtgcagtggtacgatcacagctcactgtagcctcaaacttccgggatcaagtgatttttctgccttagcctcctgagtagatgggattgtaggcatacgccacctggctacttctgtatgtttttctagaaatggggtcatatatgctgccaggctagtcttgaactcctgggctcaagcgatcctcctgcctcagcctcctgagtagctgggaccacaggcacccactaccacgcctggctaatttttgtattttttgtagacatggggtctctttatgttgcccaggctgacctcaaactcctaggctcgaacagtcttcccacctcaccctcccaaagtgctgggattaacaggcataagccaccatgcctggtttaaaactgcatttcccaatgatgattatgttctctgagccccatctgagcgcacacatgtgtggtgctcttgggagtcgggggcacagcctcaaatataatacaatatttccaacatcgtgtccttggaatacagatgatttttattttcttctttatttttttctatgtttttctaagctttctctaatgagcatgcactactgtaataaacagaagacaaaaggattaaaacaattttttaataggagaaatttttaaatttctcatttacaaaagttctatgggaagataccttttaaattttaattattttaaacatacagaaagggataatttctaaactttgagaggatgggggatctacaaagacattgatttgactatatacatttgaaccaaaataaaaggaacatagacttaggaaaatatttgcaataaggatgacagtgtgagatctttgttacataaagctgacacaaaatgagaacaaaagcattaagagttgggcacggtggctcacgcctataatctcagcactctgagtccataaccgagcagcctgctctgatgatagaggctgaggcaagga

SEQ ID NO: 41300 - DNA, 1432 bp, Homo sapiens
tcctgcctcagcctcccaagtagctagggctacaggcgcccaccaccatgcccaaatgatttttgtatttttagtagagatggggtttcaccacattggccaggctggtctcaaactcctgacctcaaatgattcacccacctgggcctcccaaaatgctggcattacaggcgtgagccaccgcgcccagccttttaaaagcattttaagaggtctcaggcagtgcctttcacagagaggaggctgcagcctccacgcaggcctcaccctctccgccttcttcctttgacctcggcatgtccttgatgttgtacccaagggtctgtgccgctctcctgtgactcttcttacaagcaaatgatggctccaggagctggcctggaccctgaggcctagaacctgccccaaggggaaaagcacctgctcatttgtgtttaggcatttactcaacgcttctcttaatgtcttggaaagtgtcacttaggagacaaggcagtgctcactcttggctgacaacaaggtaactgtagacagaagaatctattattaggcgtctccatgttctcttcctagctcattgctggcactgtcatccttacgttagtttccttatattttgttttcttttcttttttcttttccttttttttttttttctggagacgagagtcttgctctgttgcccagtctgcagtgcagggatccgggtccaggggatgtctctgagcccccaatcctttacggggccttttcctggggtccctgtgggctccatcccgggatgcaggacagagatgtgggatgcggaagggttccccgcagggatccaggtccgggggcaggaggagcccagagggtggcaccatcacgcaaaggcctccagaggcgtggcccgggacaagcacagcgccagccgcctgcgctgccagggcagggtccacacccacagactgtaacctggacccgggcagggcggggtccacacccacagactgtaacctggacccaggtggggtccacacccgcggactgtaacctggacctgggcagggcagggtccacacccgcggactgtaacctggacccgggcagggcggggtccacacccttggactgtaacctggacccgggcagggcggggtccgcacccgcggactgtaacctggacccgggcagggcggggtccgcacccgcggactctaacctggacccaggcagggcagggtccatccacacccacagaatctaacctggactggggcagggcctaaacccagggactctaacctggacccgggcaggggaagggtccacacccgcagactctaacctggaccagagcctgggagggtccacacccgcagaatctaacctggacctgggcagggcagggtccacacccacagagtctgtctaatctgcagaggacaag

SEQ ID NO: 41301 - DNA, 1063 bp, Homo sapiens
ctcccgaagcgctcggatcacaggcgtgagccaccgcgcccggctgatagtcgtattttttgtagggttgtggtctctccatgctgcccaggtcggactcctaggctcaagcgatcccctcgccccagcctgcctggaggcgcgcgcgtggtctccgcgccctgttgcgccttcaaagtgcccagaatggtgtctggtgcaaaataagcagcggcggggaacaccttgccactgtcaccgtcatggggaggatttctcccggctccccagggctccccaggacaggtgggcggtgcggtccgaggtctctgctctcgctttgcagcttgtggttgctgcgtctggctctgattccgggtgggaagctgcccataattgtgtcttctaagcttcagtcatagtattgcccatgaagtgcttgcggctctaattgctaaagctttgtatgaaggcttttgtgtgtaatctgtttttactccctacatctccactgtggagaaacaccgtgtgttttggtttatctcatctgttgttggacacttgatagttttttgaagcctttagttttctcaaattatttctctaataatttccttttctttgtttaccctttttttctgactgttctggaaatactactgtttgggctggaaggcttgggctggctttataattttcttgtctttctcccatttaatgtttgttctactttctagatttcctctttttcttccagtatatctatttagcattttagtttggccatggtattttaaatttcccagagctgtttttttttcctcctttaaaatttgtaatatgttcttacttcataaatggagtatcctctcattcacctgctttttgtttttgattgtgctaaaatacacgtaacgtaaaacaacatcaccacctagttacataactttttcatcatcccagatggaaaccctatacctgttaagcagccactgcccattcttccgtctccccaggccccggcaacggctaatctgctttctgtctctctgaattgggctgttctggacatttcatgtaaatg

SEQ ID NO: 41302 - DNA, 1092 bp, Homo sapiens
tgggattacaggtgcctgccaccacacccggctaattttgtatttttagtagagatggggtttctccatgttggtcaggctggtctcaaactcccgacctcaggtgatctgcccgcctcgccctcccaaagtgctgggatgacaggtgtgagccaccgtgcctggcctctttctccgtttttaaattgggttgcctctttttttttttttttgagttgtcagaattctttattctgtatactagaccctcattagacatatgattaataaatactttctcccagtctttggattgtctcttcactctcttgttggtgtcctttgatgcacaaattgatgaactctaaattgattaactctaatttttctgttttttcttttgttgctcatgcttttgatgtcatacctaagaactctgcaaaatccaaggtcaggaggatttgtcctgtgttttcctttaagagtttatcattttagctcttgtatttaggtttttgatccattttgagttcattcttgtgtatgatgtgtggtaggttctgacttcgttcttttgcacgtggattttgttcaagcatcatttgtgacaagactgctttttccctattgagtggtcttggcacccttgtcaaaatcaattgattagatgtgtgggtttatttttggacccagttctgttctgcaggtctgtatgtttttatgccaatgccaccctttttttttttttttttgagatggaatcttgccctgtcgcccaggctggagtgcagtggcgtgatctcggctcactgcaacctccgcctcccaggttcaaacgcttctcccgcctcagcctcccaagtagctgggattacaggcgcccgccaccacacacagctaatttttgtatttttagtagagacagggtttcaccttgttggctggctggccttgaactcctgacctcatgatctgcccacctcggcctcccagtgccatactattttgtagtaagttttgaagctaggaagtcggggtcctccaactttgcttttcttctggaagattttttactatttgggacccattgcagttccatatgaatttaaagat

SEQ ID NO: 41303 - DNA, 1034 bp, Homo sapiens
cggagaacacgggctacacgtatgcgctcaggtgagtgtgcacctgcacgtggggtcctggccttgcaatgcccactcgctgtcgcggtggcgtggaccttaacaggaactccatagtactaccgactacatgctgtattttgaaggtgaaaaaaaataataaactgtatcttatggctttagaggtggttttttcttacggctttaaggtaaactgaatctgttcatcctggtgactgggtggttagtcatcgcacatggcttgctggcttcgaccccacccaggtggttgtgatgttgagaagatgtctctgtggtgatgcctggtgtttgtgagaacgtatcagtggcttggtatttttaagttaacagaaataacctggaaaattatttcccatttcaaaggaaacatcatagaacagcgttgaagctcagggttttgagaacacaacttttgtctgaggcggagttttctgcttttattcatattccgatccactgaaccaagacattggagtctgaagaggcgctgccctgccccttctgctttcagttttccaagtagaaagagcgactgaaacgaagtttgcgtttgatgacattacgggtcagcagcaagggaaggtacacagctagacgggcccggatttgatcagcaggttggaaaacttgtgcacccagcagatgtttaaggcaccaggaaaatgcttgtgtaatttttttcagtggcttatccttttttttttttttcgtttttttggagacagagtctcaccgtcgcccaggctagagtgcagtggtgcaatctcggctcactgcaacatccgcctcccagattcaagcagttcttctgcctcagcctctggagtagctgggattacagacgtgcgccaccacgcccagctaatttttgtatttttaatagagatggggtttcaccatgtggaccaggccaatctcgagctcctgacctcaggtgatccacccacctcggcctcccaaagtgctgggattccaggcgtgagccaccgtgc

SEQ ID NO: 41304 - DNA, 1043 bp, Homo sapiens
gtggctggagtcggtgtcagggcacagccgtcacactctgagcagcggtctgaagcacgtcagtctcagacacgtggactgtgccgcttttggtccggctcccctgagctgagttaacctcgtgtgcctttgtcgggcaggtgctgtgggtccagggatgcttggtatctgtctctggttttcaattggagtcaatttttttcaatcttttgatacaaagtacatctaaataacacatttttaaaagaacagtgcataactaatcagagagagacgttaaggcctagtggtcttaaaggtgagatctcttatcttcagagtttttgtcagtcttgtctccttgttctgttacttaattctctctaatcctagactggagacctccgtttgaaattttatgttcccccaaacattgcagaaaaggtaataaagtgctttaatacgatagcctactgggctgtgttgattcctgggatggtgctgggccagcatccgtgtcctcctgtctccactggacactggtgtcctcctgcagggctctgggcatacctgtctgtaggaaccatgttatggatggtggctgggttcacaggttttcttaaactagaatcacaattgtgtaaaatattctgctagaaacaaacccttcttgagatgacactgaaattctgtctggcttcataacagtcatcagcattcaacatagcttagtgcagtctctctcttgtccccacctcagcctctaagttaaagaagaacctctttcttaaattgtgtgtagtgactcaaagcagtttgtattaacttactgttggtcatgaacgtatgacagggtctagctctgttgcccaggctgaagtgcagtggcacagtcatagctcactgcagcctcaaactcccaggctcacgcaatcctcctgcctaggcctccctaagtgctgggattgcaggcgtgaaccactgtgcctggctcatctttttatttaattacattagttgaataattatatggaaggtattggaagtgactgtcttttggtcac

SEQ ID NO: 41305 - DNA, 1079 bp, Homo sapiens
ttagaagatccagattagttccagagatcacatgtgctaattttgggaagccttggtattggtgtttgttctgttttgctcagctagtgagagtggttaccaggcaacagagaggcatctgctgctgctgaggcttgtgccttgctgagcgggctgtgagaagatagatgggctttcctctccttccctcatgttctgctttcctccttaggccaggtgctgtgtgtgctgccgtctgtctgtattttcttcaaggataagctttcaccttcagtcagaagatggtatctgcatatatctggaggcattttaggaaataaactgtgaccagtgccataatgctgatttattaaccattgtaacctttacattttttaatgggttttgttcttatttgataagctgagctcaacagcaaaaatgtgtgtgtgtgtgtgtttttttttttaggtcttgatgatgatggtgatcttaaaggtaattattttagtccttttatcttcatatacttttcaaaatagaagttttagttaaatatctgcagactgtgataaacaggttccatctactgtttgaaaactttaggtggaaataaagctgccattcagggaaacggggatgtgggagccgccgccgccaccgcgcacaacggcttctcctgcagcaactgcagcatgctgtccgagcgcaaggacgtgctcacggcgcaccccgcggcccccgggcccgtgtcgagagtttattctagggacaggaatcaaaaatgtaagtctcagtcctttaaaactcagaaaaaggtgtgttttccaaatttaatatttcctttctgtaagtctcagtgtctgcactatttgtcttggagacttaaaattatcccttgaaagcataagaagtacaccccaaaccagctttgtccttcctgtcctcttctagtttacattttatgtggttagtaattttgtacctaaaagtatttgaaattctataaatttggacttgacgtgagcaaaagaaaatttctacgtaagcgaaactaataaaactacagtcactttcagatgcacacctttatttttata

SEQ ID NO: 41306 - DNA, 1122 bp, Homo sapiens
gggggttaccccgcagcgccctctctgggatctcctgggggttactccgcagtccagtctccgggatcccctgggggttactctgcagtccagtctccgggatcccctgggggttaccccgcagcgccctctctgggatctcctgggggttactccgcagtaccctctccgggatcccctgggggttactccgcagtccagtctccaggatcccctgggggttactctgcagcaccctctccgggatcccctgggggttactctgcagtccagtcttcggggtaccctgggggttgctccgcagcaccctctccagggtcccctgtccactgccagctgggctcttccccaagtgattatctttggtgtccattctaaaagtgcctgaaatgaataatttggctacctgacttatcaggaagtagatattggctttatgggaagaaataacgcatgttcatggttttttaataggcggtgcgtctttctacgtgaataggattttgtggctggccagatacactgcatcatctttttcatcatttttagttcaactttttcaagtggttttaatgaagctcagttatgaatcagaaaattacaaattgaaaactcatgaatcaaaagattgtgaatccgaaagctataagtcaaaaagccatgaatcaaaaggtatttaaatattttttccctcctttttccaccaatcacactttcgcagtggagaaagtgctgtgactttcctcgccaggcgcctccctcgctgcctcctcctgtggtcttggtgctggctctctcctggcttccccctctggatcttgcatccctgggagcttgtggaacttttcgtttgttctgtgtgtggtttggttccctcagagctgatcagtgttgaaacatctttaaagttatttcttaaacaaaaagttaatgtgctcaacttttgatttttattacctttttaaagcaaaaactttacctgagtggtatttagaacctgttttttcagaactttttttctttttgagacggagtttcactcttgttgcccaggctggagtgcagtggtgtgatctcggctcaccgcaacctccgcctcctgggttcaagcgattctcctgc

SEQ ID NO: 41307 - DNA, 1080 bp, Homo sapiens
gcggagtctcactctgttgcccaggctggagtgcagtggtgcaatcttggctcactgcagcctccacctccagagttcaagcaattctcctgccacagcctcctgagtagctgggactacaggcgcacaccaccacacccagataatttttttgtatttttagtagagacagggtttcactgtgttagccaggatggtctcgatttcctgacctagtgatctgcctgcctcggcctcccaaagtgctgttggcatcttaaaaaaaaagttagtttcaaaaataattgtctcacctgctaatgaataaacataaagccattgatttttcttttaaattctcataagccatatttctttgcatgtcaaccatgttgtaattacatagttgcaggaattcacaagcaggtgttaagtcactgtgaggagatagccacccacagtgagaactggaacaaaacttactttgggaggctgaggcgggtggatcacttgaggccgggagttcaagaccagcctggccaatgtagcaaaaccctgtctcttaaattaaaaaaaaaaaaaaacaaaaaaaaactggaacaaaacagatttcatgagcagtttcctgctttttgtaatgtgaggtttgatactaagttgattgtggcacattccgtcatccggcagtgctgtgttaccattctgaaacactgtttcactagaaaatattagcctttagaataatgttagttttggtcttaattatttcctcgcctagcacatatgaactgcaggtgtctatggaatttcaatctgctttaaaatatggtatgatcttcccaatataaattgtgctggcaccaatggccaatatttgtagggcggcttccaacctccgccccctggggtttttaggagatatctgcattttacacctgaagtatctgcaggcagaagtgagtgaaaactattaaaaaatagaactgagcttttcaaatggtcatgtcagtgcaatattgccagcacttacaagagttatttggcttttcatattttttgaggagactcttgacccaccgatgcaggctttggtgaagtgtg

SEQ ID NO: 41308 - DNA, 1037 bp, Homo sapiens
ttatattcttatttttcaaaccaacctgtgagataagaaaagcagatatcattaaggaaaacaaatgtgcagaggtgaggcagctgggagggcctgggcaggatgggggacccaggtccaggcttctgccctgctgcagttcccagtggcatcagtcacctcagaaggctgtgatccgaaggggcagcgactcagggtagctcaggccattcccacagcaccagagagttggtaacgtaggtctcaaagacaccattttacatgaaggttctcctgaaggcatcagaagccttgtagataaaaccgtaactgcttttctaatactgggggggtggattttgcacaaaattatctagagggggaaaacagattggtgaaccctgactttcattttttctaagtcaaaggttttcattgttactcccaggtgccttcgaaacatctgcaagtttttagtcttgctcatcccactcttccttttactaggtaagtcaaatctggctgagttgcctccgatggctaagcggtacacacatatgtgtaacttagtggaaaaaaatgagcgtgtaagtccatgttttgagaagcgtggtgtacctgtgtgtgtgtggtggctcttctcttttagcaggtctctccttacggggccagggcaatttcttttcgttcttgcccgtgttgaactgggcaagcatgcatagaacacagcgggtggatgacccccaggacgtgtttaaacccacgacttctcgcctgaagcagcctctgcaggtaagagggtagaaaggcctctcagctggcactgcacatgtgaggtcttcagggacgttccacactgctgtgagccaggcacttcagttgggtgtcctgttgtaagaagtatttttaaatgtcagataagcaagtctttggagctccttaagtgttctaggatagttcaaatgcacatttaaagtactctcatgattcagttagttttaattttaaaaacataatagtattcatcactgtacaaagtacagaaagtatagagaaga

SEQ ID NO: 41309 - DNA, 1040 bp, Homo sapiens
tgttttttatggctgaatagtactccattgtgtatatgtacgccattttcctcatgcattcatctgttaatggacattgaggttgcttccagatgtgagctactgtaaacaagcagtgctgcacaaagatagaagtgcaggtctgccttcagtagactgccttcctttctgtcgggggtgcacccaggagtggcattgccagatcatatggtagctctgtttttagttttcttggggacctccaaaccactctccatggtggttgtactaatttccatcccaccaacagtgcgtgagggttccctttctccacatcctcgccagcatttgttactgcctgtctttaggatagaagccattgtaactggggggagaagagatctaattgtagtttttacttgcatttctctgaatatcagtgatgtcgagcacttttcttggaaacattttaataaatcctgaagtggtgcagtactattgcttccaaaatggtggaactggacactgagaccgatctgaactttgctttaaggtggcagcatcttgagtactcgctgttctgaaacttacgaaaccaaaacggcgctgatgagtctgtttgggatcccgctgtggtacttctcgcagtccccgcgcgtggtcatccaggtgagtggccgccggtggccggagctgctcctcttcagcatggactcggttagtgttcacgggtcgtaggtccacagctccatggaacttcgtaagatgaacacgtctgtggaactggtaccacaagaagtggcagcgttcccacaccgaggagtccccggtgtccccgtgtagcctccacgctacacatctgttggcttgggtttagcgtcacacagatgggaccgtgtggcacatgctggtcctgtcagccttcctccctccctcttttgggtgttccagccatggtgttgtgagtggcagctgttcctgctcgggccgtgggtcttccgtcacgagagtggcagctgtgctttctcaggtgttgagagacaataggtggggaggcccta

SEQ ID NO: 41310 - DNA, 1030 bp, Homo sapiens
ggctcaccagcactttgctcctgagggcacagccggagcccctcctcactgcaggcagacgcagcctctgctgccacgaagccacacagccctgcgcttggcatgcggctgctttttctgtgccagctcacgagtgccaccggcacagtctgtgtcacctggcagggccaacaggttttctgcacagggttgccacagtgttcctgcatggcggtcctgctcctggccataacatccttctcacagggcttggtgatcctgaccctcccagaggagctcactggcctgcagtgttgtcagtgtgatgctggtggggatctggtggtgagagcacagcatggcttcagtgtcttagagactgagggagagggtggagctcagccctcccctggcacagttctctctcagaaggaagtgcacggtcactggaggggcagacttcatataaatcaccaatcactgtgctgggactggactgagaaactgtcggctcctgggaagtaaagagaatgtttacagaacatagggatagcagatataagggaccagctcccaccccaggaccaaggtggagcctcgccagagcgtctctccagaccgttgggcggagggtgtggcccagctcactgaacgtcagggaggttgctgtggtgccacacggtggaatgtaccagcatgctgggaaagcctgtgcacaacagggtgactcaccgggcgtttggctgcaacacccccaagaggggtaccagggaacctcagtgtccacccagcaccctgagctggcaagggctaggctttgggctggcaaagggagagcagttcaaggctcagctccgtcttcacagcgcggtagaagacggcttgggggctgaggggcagtaaatccacagctggcatagaggagaagccggcgggtacgtgcccatcgttcaccatctcttctaaacacgaatgaaatgcgtgtgtcgtcctcacacactgaaggcaggctgcgtgcacggtctcctcctccgttgcgcacagcaacgtg

SEQ ID NO: 41311 - DNA, 1049 bp, Homo sapiens
tgtaaataataatcatgtgtcattctgttacagacatactttccattgttgctcttaattttgtattaacactcagatgccctgagtctttcagaggtttttattttttgagaccgagtctcgctctgtcaccaggctggagtgcagtggcacgatctcagttcactgcaatgtccgcctcccgggttcaagcgattctcctgcctcagcctcccgagtagccgggaccacaggcgcccgccaccacacctggctaactttttgtagtttttagtagagacagggtttcaccatgttggccaggatggtctcaatctcctgaccttctgatccacccacctcggcctcccaaagtgctgggattacaggcgtgagccactgtgccccaccccgtatttttatttcactggtgattatcagaggcagtagttacatctactcactcgctggaacttcttccatagcatttcttatccctagaagtcctttcccatttcaaaatagatatgcaaatagtcccttgtgtcttctgctagttctctgactcggataaaagataagatagagcttactgttctaataagtgcacagtccagtggcgttaagcccagtcacactgttgtgcagccatcaccactgtcatctccagagctgctccatcttctagtctgaatctctgtccccattgaaccctgactccccacaccccagcttaggccggcactcgctcccttctgcctgctctcttcccaaagtcggtcttctgtggcccctcctcctgctggtgaggcctcatctccccgggctcagcaggtgctccagagcttccactgtgagtgctgagggcagcagctgagcatggtctgtgtgtccggcggggtcacttctctgccactcattagtgtgtcctgttttggcctcagttttcctaatgtgtataacggggaatcgtgctgacctcaggacatgtcgtgggttacatgaagccctcaacaaaacacaccccttccttccagggaaggcctcgtgactgccatggaggaatgacc

SEQ ID NO: 41312 - DNA, 1051 bp, Homo sapiens
tactaaaaatacaaaaatgagctgggcgtggtggcgcacgcctgtaatcccagctactcaggaggctgaggcaggagaatcgcttgagcccgggaggtggagcttgcagtgagctgagatcgtgccattgtactccagcctgggtgacagggcaagactctgtctcaacaacaacaacaaaaggttaatttccaactcagctgcttcctgtcagacgtcatatttggggaagtgattggacttggggttattaatatgaaatacatgtgtgtgtttttcccaccttgatttcagaaaagacccgacgacacagctttccaaatagtggaacttcggattttttctaactggggccatcctgagtatacctgtctgtatcggttcagagttcatggcgaacctgtcaagtgaagacactactcattatttttgtacatttttgtatatactgggacagcgtgaaacactggaatccttcatggacgagggcatatacaatgatgggacagtgccacactccttcaataaacgtggctgctggccagaggacgtgagcgtgtgacgggcgccttggcgccacctgttgggtgctcactgcctctgcaggtgcagaggggtcagcagcaggagaagcgtgttgaacacgtggctctcagacactccttgtttttaacgggaagctctttgcatttgcatttcctcaacaaaggagcaaagcagaggaagctgagagtctggcgtgttcttgacgctttggtcttcagccttgcactggctcttctaaaggacttttggagggcagataatttcatctgttaaatccaacacacatttctttcagggaaaaacaatgtcaccaaattttcagagttctaaactcctttccttcaagccggaattttccttttttcagcaccagtaggtactaagtctccagatggggaaataactaaaatgtgtttttctgctttgttcgctcttacttctgaggaaggtttccagtcaggactcgctgtaccaatatccatggaggaatatgggagcgtttcgc

SEQ ID NO: 41313 - DNA, 1058 bp, Homo sapiens
tagctggaattactggcgcgcaccaccacccccggctaatttttgtatttttactagagacggggtttcaccatgttggccaggctggtctcgaactcctgacctcgcgatccgcccacctcggccacccaaagtgctgggattacaggcgtgagccacggcgcccggccagtagactttactttttagagcagtttttggtttatagcaaaatggagtgtggtgtgtcctgaattccccctttggacagcctcctgccccacagacacccccccccgagtagagtccctcagggacccatcactcacatcggggtgcatgcctggtgtgtggggggatgaggaaccccatgagagcatcacgcagtgcagctccactccctgaagaccctctgctgggcctagattttaaatattttctttccatagcaagtggaattgttacctggaaaactctggaggtgccactttggttgtagtttgctagttcatgtttgaattaaacaccgtctgtcacgcccaacctgtgcctgcgccccgctggctggaatgtagcctgggtaagcgagtggccggcacgccgcggtgccacgtgctggtgagcccaagcgaaggtggactcagcagccccagccacggagtggatgccatttcgttgcttaaaacacttgtttgtgccaggaaatgagaaaagaggagtgtttgtgtcggtagttgtcaatcttagctgacctgaacgggctgggatgaggtcctggcatctgtgtttagtgttcacattgtttgtacggacctactgagcagcccgggctcaggacagtgcatgtgggcccctgatcgtggcttatgaggagacatcttacatgacctgaagggcagccttgtttccagaattttctattaacctcaacatagtataaatacacaccagccaggctacatcgcattttactgttgtgttgtagatgcttttcttctttgaaaactgagctgtttaattggtttagaaagagattcgcgttcctccttagatggaactactaattttatctctggaag

SEQ ID NO: 41314 - DNA, 1113 bp, Homo sapiens
ggccaatagtgcgcagcatgcagagccgggccgggagaaggcccggccatgcccagctgccccccactctccccggcctcgggcttgagagggtacctgtcctggcttagtcacctggaaaccaaaatccttcgcagcttccagaattctccagtacaggaggagaagccgtccacgttcagagccgccttagacggtttgcctgtcaccggcattcctggacctggaaacgggtgcccccagccaggccggggaccactgtgtgcccagaattctcctcccgtcctttttccccttgcccggctcccagctgcccagggaagaagggagccggctgcaaggcgcagtccaaaccaggccgggggccgtgaccatcggcagtgccccccagagcaggctcctcgtgcaggaatatgggtcactgccttccagggagtcctttttttcttctggtttctaagtcgccacctcttgctttacctcagatagaagcatccagaacgctgtagtatcggcaaagcagaagctggtgtggtgcttgctcagggtcggtgcatgcggttctgcccgtggccccactggcggcatcgtgaggccaggcgtgtctgggagcttgtttttccagagtgccctgtgccagacggctcccggcctcctctgagtcagtcatgtccctgcaggactggaactaggacggccggtcacagagtcagtggtcctgtcgaggctcctgctgtggtgttggggtgggtctccctccagaaccttcactgtgcggggagcacagcaaaaccggaggcctgccaacggcctgcaggctgacgggggtgcgggggcactttctctcttgggtgcgggcttttccctcctggtgccctgcctctgtgcagcacgaagcggtctcctgtggggggagggcctgtgtgccaggctaatgagatgcccggatgtggcggggctgtctgtgtttggggtccctggctgtggtgccttctgaagaggagcccttttctgtggttaactgagcatccaaccctttgcgttctcggctggccttcccgtcctggcaacaccaaggtcattctggtcctcagtggcgttgctgtggctctt

SEQ ID NO: 41315 - DNA, 1051 bp, Homo sapiens
atctgccatccggaccccaggctctgggcgcgccgggacgcctttgttccaggtggcgagatatcgtccccttgccgcgggcccgcttcgcgctcgcctgctggggaagagtggaggggtgggggttctggggctcggcccctcacggacagcggggtgggtaactgccccccaaaagcctgggcggcttgagaagggccggcggcagcacccgagtcaccagaacagcggctgcgtccgaaccgggaagcggcgtggtgggttggcggaggccgggccaagtgaggtctccaggcaggggcgaggaggggaggaggggccggcttggctccgacccggaggagagagggaaggggacccccccccgcccccgcaccgcctcaaccttccgcgcgaggctctgtcacccagcctggagcgaacgagtctgtttaccttgcgcctgcaaaatattcagatggaaacatgtatttattcatcgctttgcagaagggaacagctgaggaaggggaggcagaagcttaaacagttaacacattgagaaagtgggagaaaaaaaggtgtctgaatttttaataataaccccggtctcatctttttcttacgactgttttcccgtaaatttgctatcatttggagatggctgatggtattgttttaaaaatacagtgtcagcttggtggattaaaaattccaagatgatttgtgcataattaaatgtttccctggagcaaagaaatcctctttttctgcggtgggtgcggtgtggggtccaggtctgtggtgcggtgtgcggttgtgggtgctaggcgttgaggcagacgctggcaaaacgcctgtttatcaccaatagctttgtctaaaaaggtgtgtttgtcctgcgcttggacctcctctcatgacctcttctgcttggaaatcctttcatccaatttgttctaagtgtcttaagtgaagtcaagacccctccatgtctcccctaatacgataatgactaattcttacaggcaaggcagtccggaattcgcaccaaaaaaaaaaaaaaaaaaag

SEQ ID NO: 41316 - DNA, 1070 bp, Homo sapiens
gcccaggccagtttcggggccttctcggggcccggcggcgccccggactcggccttcgcgcgtcgcagccccgacgccgtcgcctccccgggggccccagccccggccccggcgcctttccgggacctcgcctcggcagcggctaccgagggcggcggcggggactgcgcggacgcggggaccgccggccccgcgcccccgccgcccgcgccgtcgcccaggcccggccctcggcctcccagccccgccgaggagccggccacctgcggggttcccgagcctggcgcggcggccggacccagcccgccggagggcgaggagctggacatggactgaggccgcggcggccgggagaggcgcgtagccggcccgcggccgctcgctcaggctccgactcacgcaacgaatcaggtgatcggctctagaaacactgctttcccttcttttcttttgttttctttcttttattattttttttaagagtaaacgaaagtgctgtatgaattcggacccaggcagcaaccacaggactgggggtgagaccctcctcctcccaagagagcaaaaaggacccatggcccccaaaaaaccccacaacgagaatcctcagccttgtaaaatgcaaaaatgtctaagaatatttatatatgtaccatttttgataaataaagctggtcaaacgcaagttttcaggtccatctttttaaatttgccaagcgcccagccccgccgcccttcccacctttccacgcctctctccgcgggtggggcccggagggggccccgcacttcccgggggtctgcgcttaatgcgtccttttgtgtgcgtgtgtgtctgtgttttctgattcaacacatttatgcatctgcggctcccggtccccgcccgccccggcgctccccctcctaccccgcgccgcacacgcacgctcacatccgccgcgcgcccccgcgcgcactggcacacgccggggcgcgcggcgcggggtgacggagccgggggctgcgagggccgggccgctgggctcctgcagagttttgatatgaaagtaattattttccggtggctg

SEQ ID NO: 41317 - DNA, 1046 bp, Homo sapiens
cccccgcggcgtggcacggcctgggcgttggatgcagcagtgaacgggacccacgcggggactcagggtatgacgggcagaggggtaggtggggtgggggcaggtgaggcgggggtgcccagcggtcagggaggggctctcgggaggtgacattcggccgagaccgagtgacggtgtggaacccgggcgcactgggaggcacgatccaggcggagggagcagccgtgccagggccctgaggtgggaggggccgggcggcctcaggctcagcgaggggctgaggggccaacgtggccggagtggagtgggcgaggggagggagcgctggccaggagagacaaccacgagccacacttggggctgttaattttctgggaaccacattcaaaaggtaaagaagaaacaggtgacattcatttttggccgggatacagcgtcttgctatggggcccaggctggtctccacctcctgggctcaagcgacctcccacctcagcctccaagtaggtggaacaataggaaatgaattttaataatgtatgttatttaaccagatattaatacatcaaaaacatggtcacttaaacgtatcgtcaatataaaaaatatccacgagacattttacagttttttttttttagagacagggtcttactcaggtgctgaggctggattgcagtggtgcaatcatggctcactgcagagtccagctcccgggctcaagcgatcctcccacttcaaactcctcaatagctaggacttcaggctcgtgtcaccatgcctagctaattttttattttttatagagacagggtctcactatgttgcccaggttggtcttcaactcctggcctcaagcgatcctcctgcctcagcctccccaaagtgctgggattacaggcgtgagccatggtgcccagcctgcttcagttttaaaatttgtatataaaataataaagttaaatacaacggaaagttcatttccttagttgcgtgggctgtgttttaggtgcccagggggtcacagacggccgggggacgggagg

SEQ ID NO: 41318 - DNA, 1001 bp, Homo sapiens
catgtttccgctttcctacagtttcaggaaactgggagtgtcgtcttaaaatcatagagttttagagcaggtacaagcgaacttgagtggccacatgccccaccccccgaccagctgctgtagatgaggaagcccaggccatgaggtctgctggcctgtcccacaggccggtggggtctggtgtagagccttcctgcttctccgcactgtgcgtcgggtgtcctggggaaggtattggggtggagactgccctctccctgccctcccatgcggggccggctcatctcgtacagcgggggctagtgtggggtgtagggaagaccttctccctgcttgcaaggagctcaccatgccttggggaggccccctgtccccagaaggatctagaaccaggccttggtagagggtgcttgcctacgcgaggaggagagcagtggggagtgtttctggaagaagcagggcagggaaccacgtgctctctgcagatggtgatcagaaacctgaaacggcattggggtgggggagtcggggtttgggaggaacccccaagacttttgactgcctgtggggctgtgtggggggcaccaggatcagggtgagggcatcccatttggcaaagctgtggtccagacaggagacgctggaggccggagcctgggcaggtgctgtgggttcaggcgggtgatgcttgagggctgggatcaagcctggttggcgcgtggatgaggaaaagagagaggggcaggggcaactccggtgaatgatgcggttgggggctggggggcatctgggccccccggaatgcccctgactggacttagaggctgggagcggattgaagccccagggcggccgggggagaacaggatgctgatggggagctggaggccgaggacaggaggatggtgtggtgggagccagggcggggactggagggggtgtggtgtgttctgcagtctgctctctgctgctgcagctgcctgagtcacctctggatgtag

SEQ ID NO: 41319 - DNA, 3205 bp, Homo sapiens
tgaggcaggaggatcgcttgagctcaggaggtctgcagtgagctgtgatttcaccactgcactccagcctgggtgacagagtgacaccttgtctctaaaatgaaaattaaaagggaaaacatgatcctccagaagctgaggtggctgcctggggatcacctgctcctgaaagcacagttctggacgactgaccctgggctgcctgccctgccggggggagcccagggctctgatcctcaccctctgcaaggtgccttcctgggcggagccgccctgccctgcgctttatggagcccaggccctcagtctggatcctggaaaggggcgcccggcgtcctggctccgtcactcatccccagctgcagccgcaggaattgcctctgtctgaggctgctggcagttccttttccttgagaggaagtgatgcccccgctgagccttgtttagttctgcgtcacgtcgaggtgtctggccttgggttgaaaaccctgcctcttccatccgaaaaccagttacctgagagctgttccaagttataggtggtgccggagaactttgctgcccggcgctgctcccgggacgtggggcgtgagcgctgcacccttacttacgtcggctgctggggccccacagcggaaactcagacccgcccacccaggcccccgctgtggcgctgaacactgcacttctctggtgaccaccgaaactcagaggagctcggggtgtcgggtgcttgtgcgtggcgatgctggtgttttgttagctgctgggcgtaagacacaatgcgaggacgtcgttcctcgggggctgctggaggggagcttggctgcagtgctgaccaggtgctaatgcagtagcccctgccttgggcccggggtagtgcacgggcgtctctgcgaccccaggcacgctttccccctggatgacaccctaaggctgcgtctctggccctggggtgggagcgctttctacatgtgctctggcggccctggaggccatgtgaggtcggacagttcacaaaaccccatttagggcagtcgtcatttttagatcagttgctttacaaactttttttgtgcatacaaaactcttctctgaatgtccttccaaaagcaagctgtcatctttcttgcctctgatgtttaaagcgacattaggttaaggctacttggatttattctgtgcatggtggggagagggaggcgccagcaccatcccatcccgtgctgggttcctgagagaagctttgctgcttggctgggccgtcccgctgcgtcgtctctccaggcgcgtggctggtccaggcttcctcggcagagcagagtcgtgacctgcccaaggaggtggggggcaggcttgcgagcacagcgtgggggccgcctgggagccctgcgtccgccaggtcctcattcttcagagggccccagtgcaggtgtgcctcgaagtactggggttggagcggggcacaggcgtgcttcagtagccctggcaaccttgacctcctggaagtagtcagccacccctcctggggcgcccccggctaccgtgtgcctccgcagtgtcacagggcatcgcggaggcatctttttagtggaaagatccccacgctgaactctgcccctggcatctggccgagccccacacgtcaccgtgggtctggccagacggtcctgtcccccggaccttccttttccgcccggctgtgctgccacggcgggcagtgggcccgggggcccaggagcgggtccttgctgggtgggaggcccgggtgtgtgggaatgcgcgcggctctgtaaacatctggtgactcaccgcatagctatgtcgtggccggcctgtgcactgacgtgctcgcagtggagctggaagcggtgcccgcggcccctccctctgacatggaaaagtttctcatggtgctcccagccgccggcatttgcaggtccccacggtggcggaggcagctgggccccagcctctccactgtcaccctcaccccaggacgtggtgcgaaggagcctggagcccacctggccgtccccgggaccggctggtgccatcctgtgccatctacgtcagcgccctgagatcagctggccttggcaggggcagcggactcggcagcctggcgcaggaccctgtctcacctgtgcggccctcttgttgtgggggtttgtgggttgcgggggtggggcccccatcggaggcagggctggagggtggagggatttgggcccgagggctccctggcccagggtgtggggagggtcctgggctggcagggaggacgggatgcggtcacccgcccccatgatgcccatgtccagtggaggtgctgaccaaggacaccccccaccgccgtgtgctgctctgatgttcctgtgggaacctgtgtctggtatttggggtatgggagtgggtgctgtgaacccctgtcccgcgagctgcccggcgccttctgcccgcccgtcccggccgccgggtgcaaatgggtttgttgactgcctgccggcctcgtgatgtctgtgcaacctgacctgaagtcaggatcgcgtttgggcttctcggtttccatgacaaccgtgggggctggctcggtcccaaggtcgccatggcaactatcggagggctcatgccggggatgctttggctgggtttttcatgaatgattagaatgtgtgacacaatgcagacgtgaggacggcgggggcggcggcggggacgactcccgccagacggtcaaatgctcggcagggcggcggctcccccacctccctggtctctggctgcggcccccggacctgccgcccctcaggaaccccacacccccttgggccgcagggtcctcgctcgggggcagcttaggtggaggtggtgatgtcacagccgcagcggccagggccgtggtaggtgtcccgtggcctgtggggagggcggggcgggagggcggctgggcctccacccaggcccaccgtgggggatggcgatgtcaggggctccccagaggccccctctcggggatccaggctgggtccggagcaccggagcctttgccagtgtagggtcgctgtccagcggggccccacactcctcggggccggcacagctgtcttgagggagggaggttttgccaccagtcactttggtcctcggtacggggcaccttgtgctgtgcaggtgcagacgtcttctctgacctcagggagag

SEQ ID NO: 41320 - DNA, 1056 bp, Homo sapiens
agagcaaaggcctgcgtgttcccaaacagccgttgcccccgtggccgtggtaggtaatccatattggatgtcataaggaccagggggatatttaaagagagaaacagaaaatatatagagatataaaattatattcacagtttatctacagatttttcgtaacaatctttcttttccagtttgatactgtaaatctatcagagcagagccgggggcacgggcacaggtgggagttgggagcaaagcggaggcccgggctgcccgccgtcccccttcatctccccacggactgtaccaggcagctgggccccgcaggacaggccgcagcgggtggccggttctgtcccgtcttggggttcttggtgtccacgtcttgtgggccgtgggcttctacctgcccttggcctgcagtgctttgctggagaagggactccctggtccccagggtggacggagccgctgtcaccgcccagagctgggccggggaagcacggtgtgttctgcttttcttttcagattgttgaaatttcattgtcatgatttaatatatggatttttttatttaagaaaaagacgagggactctttgtcacgtgggtttgttttctgtctccgtgcctccggcttcccaaagagatccaggtctttgcgtttccagggcgtggggaccccggccccctatgccgccacgccgccacaccgcctcaccctggcttctgtgctacttggcagttccatttcattatttattttttgtgctgctttttatcatgatataaattattgaaaacagatcacatgtgggcccgtgtctggccgccgccgccctgccccgtccctgcggccaccacctaatttattgccgtgcgtcctgctgctgtgactgcttttgtacctttgcaataaagaattttctggtttcagaccctttcgttgcgtagctggtgctttcagctggggctttcttgggccaagaaccacaccccccccccaatcccaggggaccctgcctgtccctcaccggggtcaggatccgggcactacgtgtaagtggctt

SEQ ID NO: 41321 - DNA, 1025 bp, Homo sapiens
gagcaacttgcctcagtttctcagcttaaaaatgaagatgaaaaatgagggtgcctgtcttgtgggatttagaggggcagccaacacacagcagcaattcgctggaacgttatatgttcattattttatctttttttttttttttttttgagatggagtttcgctcttgttgcccaggcttgagtgcagtggcgctatttccggcttattgcaacctccacttcctgggttcaagcgattctcctgcctcagcctcccaagtagctgggactacaggcatgtgccaccacatgtggctgattttgtgtttttcatagagacggggtttcttcatgttggtcaggctggtcttgaactcccattctcacgtgatccatccacctcagcctcccaaagtgctgggatgacaggcgtgagccacggagcccagccaagctttggagttttatgtgaactgaagtatttcgtttaacaccacacagtaaacacaaaggaaacccaccgttgctgggccgccttccatcatggcgcagaattgagagtcgagcacgtcgctttgttttctgccaaacttagccaagctccggtcttaaaatcttttcgttcctagcgtgaggctttctgtctttgttgcaaatattgaaacctgccacgtcacctcttgcactatttgtttagttctttaagaaatgaaaccttaatccatgtacaatttctaaaagcctttatttcaatattttaagaagttatttcccctggcaaagaagccgccctgttgcccggtgtggagctcgatgacaaagctcatcagcctgagtggaagctcattcattattgctgcgttttcgctcttccaggagagaacggagagccagtgtgctgtgtgtcacggtccctggatgaacgtttgtggaactggattgaattaaacaagacgtgcaaagcaagtggttcacgaggtagtgtgggggtgtagggatggggactgacccgggaggcaggacacagcccaagccctgccttgg

SEQ ID NO: 41322 - DNA, 1024 bp, Homo sapiens
ttgaggtaacactaacctttgcctccctgaaccctggggaggggctttgcatgcgggaggtgctgcacaccggcggaccgtcgaggaaacaggagcttttctctgttgcacacttgtagggtgttcctgctcttgggggcagggcagggggagccctgcagcttccatgagtcgtgtggatggcccaaggtcacatggtaaggtcgtcaggcactcggcaccgttcccatagccccttgaccttccccagcactcaccgagtcctcacacagtggggacgtggtgcaggcagcagtcccctccgttctactccccagcccggcctcctggagggcaaggcggaggtcaggggcctgctagacccaaccctgcggccatgtccccaggagccagccccgccgagtcagccctcccagccctggccttgcctgcaacccccgccagcctcccctggacaataggatgggagcagggagcggaagagaggactgggtctgggggagccatgagggagcccccagagctggtgagatccctcaatgggcccccctctgtgggcaccaggtccggcaactgtgctgaaggaaaacccacatatgtccagcgtgcggctccatctcccatactgccttgcactcaccttccctcccctactgaggaggaaatgagtgtctactgggcacccccttgtacccagcatcatgccaggagccttcagtaactggtgatgcatcccccaccacaaccctgggaggcggacaccgtgatgatctctgtttgacagatgaggggactgaggctaagagaggttaagtgacatgcccaaggtcacacagcaggcgcacggcagagccaacaccatctcctggcccacgatggttctgtgtcccctgacgcagcaggtgcacaggcgggccccccacctgctcctagctgggccgggtcaccgtggcaggccttgcggctcgaggcccaactgccctgatatgcctatcacagcctcatgggctctgcggcagagccc

SEQ ID NO: 41323 - DNA, 1022 bp, Homo sapiens
ctggctaacacggtgaaaccccgtctctactaaaaataaaaaaaaattagccgggcgtggtggcgggcacctggatttcccagctactctggaggctgaggcaggagaatggtgtgaacctgggaggcggagcttgcagtgagccgagatcctgccactgcactccatcctgggcgacagagcaagactccgtctcaaaaaaaaaaaaaaaagaaaaagaaaaaaaggttatcagaaatacaagtcagccaggtgtgctggtgcacacctgtagtctcaggtacttgggaggctgaggcacgagaatcactttaacccaggaggtggaggttgcagtgagcctagatcccaccactgcctgggcgacagagtgagaccctgtctcaaaaagtgaaaaattaaaaaataaaaacgctgtcagttactgtgaccattactatattacacttttttttttcataaaagacattttagcatgaaaagcaggaaggacaccacaaactaaagactttgggaacatctagtctacgcccctcagtcctgaggaaacttgtccctgaaggtggagtaggctgctgagaattcccagtgggtctatactgcttggcccaccagactctcctgctcagaacagtgttctttctaacgcttcaattgttattatggtttaaaaatcaaaacttttggtttaatgattattttgagcccttggatattctgctacttttttaaaaagcattatttgagcccatcgaattcacagatttctaatacgtagattacttctggaattgggaagagtcagaggatgctaatatgacgacagggttggccaggctgggtgacggctgtgggtcctcagcgggcccacgtggccctgaaggtgcagtgttggccagagtgacaggtgaggcatctggtcctgaggactaaggctcaggaagccgactttgtcatggccctcctggttgtggtaacgcaggttttgtgctttatgagaagagctgcccttcagggtcatt

SEQ ID NO: 41324 - DNA, 1085 bp, Homo sapiens
ttaaatatttacttgtttgctaaaatcttctgtaaaaagtcagttttcattgacattgggatgggattctgcctgcctagatgttgcaacaaacctttcaaaatctaggcatctctggaagatctaatagtggatattcttgagatggtcttcttcatttgcattgtgcattgttaaaagcttttcactgttattctcctgtagtctttggttattaccagaacttaattgacctgtcttgactgtttacatttccatcaaagggagagaggagagttccagtccccccagctgtcatgtttaaaatctgaaacaagctagggttaggatttcttttgctcacagtgaaagcatttagacaattcattgtctcttcttgaagacttgtttagtgtgctcagttaatgtattaatgtttttcttggtaaaaatgatcatttgaaaaatctctcttgttcagaattactgggagatgtactcaaagatcggccccaggaagcagatggaatcgattcggtgattgtagtggacaatgtccctcaggtgggacccgaccgacttgagaaactcaaaaatgtcatccacaagatcttttccaagtttgggaaaatcacaaatgatttttatcctgaagaggatgggaagacaaaagggtgagtgttctcctgttggagaagtatcatctgtgtctggcacgtcatgatgagggagtgttgcaggagatccttactaacacagctcctgccttgcccaggcacgtgggccgttcacttcttcaggccgccctcagctggaagctatccagagcagtgaatgagaagatgataaagtttgtttttttaagttaaggttttaaagtttttaaaattatctagaataggccagcatggtggcttatgcataaactcccaacactcttgaagcctgaggccaggagttggaggctgcagtgagctatgataacgtagctgtactccagtctgggtgacagagcaagactctgtctctaaaataaataaataaagtaaaaactaactagaatagttttagtttctagaattatcaaatacaggtaatgctgctgc

SEQ ID NO: 41325 - DNA, 1052 bp, Homo sapiens
ggtgtgagccactgcgcccagccgtatttttttaacttgttagtctttattaaacatgggtaaagatagagttccacactgcgccaccctctggatcacttagcagccttgtgtgggatcggtgagatcttctgtgctgatcttggagaaaccggagcgcctgcagcgtattgacaccagaatgaacaagcgccgctgcttcccgcttccgcttgggtctcttggggccgggcagtgtggggtttggggagagagctggttccgcgagttctgacggcgtgttctggccgcacagacagactgtgatcctctcgtgagaggaggatagtgtacagtgttgcccttctcttctaggtacctggtgacctttagccccctgatggacacgcaggatgaccctcaggccataatcatctgggacatccttacggggcacaagaagaggggttttcactgtgagagctcagcccattggcctatttttaagtaagtggaccattgtaacgagctctgtagcctttgtcttttcatgggaataccctggcacttttgtttttcttaggtggagccatgatggcaaattctttgccagaatgaccctggatacgcttagcatctatgaaactcctgtaagtggcctcagtgatggcaaacgccccgtccggtccttgcttgtaaccggggtgtggtgcctttccttatttgtgctagaagaggaggaggaggtttcacagatgcataggaaaggcctgtctcctgtgcctttttaactgcccctgctctgggcagagctcttcagtcactcctgcccacctggcgcagccgtgggaagtcctggatgggagttaatgcagtgggcttcagaactgcagttctgggtggcgggtgggtggatgggttcactgtcacgctctgtgtgcactgccccctaggcaaactcacatcagactcttgtttccttttgtaaaaagttaggtgtgtttctgagacactgacatgatttgactcaactgcagccttccttttttttgggcagtctatgggtcttttgg

SEQ ID NO: 41326 - DNA, 1860 bp, Homo sapiens
ccccattggtgtgcctttagggccctcaggaccctggcctgcagcctgcagtgtggaccctgggactgcttgtgcccaagtgtggcgggcagggcggctcctggaggtgggatctgggtcagagttacttcatgcatgtccagtggcttccagtagacgtggtgccggcagttctccagccttagaaccgtcttccatcctgagggctgtggctttcatcactgcacatgctcgtgtgtgaaccaggcatgcacactgaatctttcattgtgacgttgatctttgatttaaaccttttctcatattttcactgtccagaatgtcaccccttcccccttttttttaaacagggtgttgtcacaaattttgaaattttccgaatgagggagaaacaggtacctgtggatgtggtcgagatgaaaggcaagttgtattttagtcactttgaggcgaatggggcctacgtgctgttttactcttggctttaacacttccatgcgaggggttgtctgagcagctgagtcaggactgtgagccctcaccatgaatagtcatctccaggtcacagaacgtgtttagagcctgggcaacatagtgagaccctctctgtacaaaaaacaaataaaaaaaattagccaggtgtggtggtgcgcaccgatagtcccagctgtttgagacgctgaagcgggaggatcacttgagcccaggagcagaggttgcagtgaactgagattgcgcccctgcactccagcctgggtgacggagcaagaccctgtctaaaaaaaagagaaaagagattgagcctgtgttcttgtttggctttttgttttgccatggagaaaaggaggaaggaagggttaaaaataggtgagaaaatgggaaacatggccgcccttccaggcagggagaccggaggtcaggatcccactgtaggtgcacactgggtgcgagggaagcggcatccacagctgctgacaatgtcgggctcctgcggtcctgctgtgggtgtcctgctctcaggaagggagcagtttcacgtaggtcactccacacaagtggaagcagctgtctctgaaactccaggaatgtgcacctttcctgctgttgcttgctctcccgtccttttaatgaacttttacacgtcgggggatatttctctgtggttgaatagtgaacattttaactgatcaagagcactatgttctgaattgaccaaaaagggaggggtctgttttgtgcattttagaaaccatcatagcctttgcctgggaaccaaatggaagtaagtttgctgtgctgcacggagaggctccgcggatatctgtgtctttctaccacgtcaaaaacaacgggaagattgaactcatcagtaagtaacctggtccctttcctcttctgagtaggtcagcacagatgatgacccagtcgctgcccaacagtgagcatttgactggcctaggaccactgctgggcaggccgggactcgcctatgaatggggtgtggcctcggctgatggaagtgagcgatggcctggaggtgccgcctccttgcagggtgtctctctgagccccgttgagccctcacgtttaagcgagtatttccaaggcttccattctctgccatcatctcaagtgaagctttttctcttctggctgtagctgctgtccctgggcttggggtcacttcctgtggacatactcctgccagtccccagtctgggtcaggtgcctttgaccagggtgcgcagagctgttgcacacagctgtactctgcccccgtgcacccggttccaggggtgccacactgcacccacctggggctcgctcctcacagtggtgcgtgggccctcgcctgtctca

SEQ ID NO: 41327 - DNA, 1025 bp, Homo sapiens
gtgggaagggtattcgttacacagctgtgaggctgccttacctttgtggttggtgtcacggtgtcggtctcagctgtgttccagcagtgtgtcgaaatcatggagaagcttccagctttctgctctgagttaaaagaatacccttttgttgctgctctcccttgcttcattgtccacacttgctactgtatttttggaggcttacttagcctcagataacatttccagtaaaaataatatgatggcagtcatatgtaatactcactgcacactctgcatctgtgatttggtaagtctcacagcggccaccagaggctgttgctgtgcttgtttccatgttaacgccgaggctggctccctggggaccccatgccgcagcacctctcaggagtgggatgccaggaggtatgcgtctccatgaagcctgacggtcctgtctgtctttgcagtatgaacggtgccttagcgtttgtggacacttcggactgcacggtcatgaacatcgcagagcactacatggcttccgacgtcgaatgggatcctactgggcgctacgtcgtcacctctgtgtcctggtggagccataaggtgcaggcctgtggggcatagttttgactgtggatagaagcagggagtgctggctagctgctgactctggtgctgtcctgggacctcagggaaggggcaccaagcctctgtgttgaacagaagccttggctggtgttagtggcaggaggaggaggattctgggttgtagaagaggtggcgccgagtgcaggagcagcccctgctcatggttgcggggaggtggggggtcttaccctgggcccagggacccctgaaaaggagtgagaatgtctgcagagaggagtcgtttcctttgaagtctgaacagagttccataaccgcagacattaagatctgttttggggtcagtggttgagtccagctgccgcgttacccacaactcgtattccaaaactgctggttaagtttgtcaaggactttcagtatttagtgacttg

SEQ ID NO: 41328 - DNA, 1025 bp, Homo sapiens
gtgcacggctgtgactgtggtttcagcagttctgagacaagagccttccaagtcgggggctggggagcagagtgcgggagctcctgagtcctgggggcctccgcgcctcacagcatgggcacatgtgggacagaaggcctaatggggtgcctgagggtggcctggttgctgtccccccagggtgggaccatgagcgagtaggggtggcacacgggctcagctctctgtggccggggtggctcctcttgcgggactcaacgtcagccccaaggcgatgttcagggggtccctcagccttttgaggtggtgccgtttagggccgccatgcctgtctatccaggggacggactccgcctgctgttcccgcgctgagctacaggactcccgagtgtgagccgcggttcctctgttgcagcgcagccgtgtgtgctgtggagccgaggccgtcctgcaggaagccgcgtgactcccgcctcctccctgtgctctctggctctggactgtgactgcgcctggattctgccattgcgacacatttttgtgcctttcagcccctggtgtctgcagtgggggatttaaggcacccgcttccacttctttcttgtttggagttttctgttggaaccgccggcgttggctccgaagacttagcgacgccactggcggcaccttctcctgcgcccagtgatgtttccacggtgcctgtacacagccgagcagcatttccgttgaaggacttgcatccccattgcgggcagtgctggacgtgtcccggagacccaccgggagggcgccgccatgccttgtacccccaccgtgcaggttgtggccggttttctccgcaggttgaacatggaaataaaagcaaacttgtatgaaaaaccggtctttctcctctctttgaatgtagatagagaccttgaacttggtgcctgcctccctccccagtggcaagggcctgcttgccaagccagacctctgcagggcgctgtcccgtccggtcgtcacgcacactcggccaccct

SEQ ID NO: 41329 - DNA, 1035 bp, Homo sapiens
actgttggccaggctggagtgcagtggggcaatcttgactcactgcaacctccacctcctgggttcaagcaattgtctctgcctcagcctctcaagtagctgggatgataggtgccagccaccacacccagctactttttgtatttagtagagacagggttttgccatgttggccaggctggtctcctgacctcaggtgatccacccagcttggcttcccaaagtgctgggattacaggcgtgagccactgtgcccagccacgaattgatttaactcttaagtcagttgagtcaagtgagttatcgtttggattctagagtcaaatacctatgcaacaaatatttgagccttatgaggaatacagaaggtacatgagatatgatccctgtcttctaagaacttgaaacccagtttgggaatattggactggtatacgtgcgtggatttcctgtctacctgggaagggccaacagagggcttagagacgggaaggaagagaacagggtgagctgatagcctctgtgctctaggaccggctctgcagggaagttactttacttcaaaggctaagtttgggctcagttttcattcaggtctcctgggatataaatcaacattccattctcatcaatgtgaccgttaattacatatttttatttggatatactgtcagatatagttaactgaacacaaatgaagtaattgtataagcaaataaaccatagtcctggaggtaccgcgtgaaaatgtgtctcacgatggaggttttaatgtagtaccactgtgtgtaagttccaggcagcccaggacatgcagagagcaaatattgacaccaggaacagaaactttccacatttttgttgactacagcgatgggaactgcagtgaattatttgccttatatagtgtctgtaaagctggaaaagaagtaggtagtttctggtctttgtgtcagtagcataaataaataaacttgaaacattcttgcgcttcttattgaaggtcatgtcacttgatttagtgctcaagagctt

SEQ ID NO: 41330 - DNA, 1002 bp, Homo sapiens
gggaggccgaggtgggtggatcacgaggtcaggagatcaagaccatcctggataacatggtgaaaccccgtctctactaaaatacaaaaaaattagccgggcgtggtggtgggcgcctgtagtcccagctactcgggaggctgaggcaggagaatggcgtgaacccgggaggcggagcttgcagtgagcggagattggcgccactacactccagcctgggcgacagagcgagactccgtctcaaaaaaaaatttttttttttggtagatacggggtcttgctttgtcacccaggctggtctcaaactcctgagctcgagtgctccttctgcctcagcctcccaaagtgctgggattacaggcgtgggctgctgtgcccagcaggaataatttctcagtgcatctctgatggggaggctaatgaagaaaggacacctggtttgaaggcttctctgtgtctgtccgtgggcgctactgatctgagccaagcaccattccgcaggcatgcctgaaatgactcccatggctgtcatggtgccatctggagagcatttgctcactgtaatggtcccgtcacacttgtctgatgaggatctgttggttgactttgacagtgataaacgaacacagcctatctgggtgttttttgcacttatagtttgggggtttgaagtactggctagaagctggcggggtgtgtgtgtgcaggtgtgcgagtgcatgtgcaagtgtgcgtgcaagtgtgagtctgcacttgtgtgcaagagaatgtgtgtgtgtgtgtgtttggagatttggacttgaaaattctagctcaggtctttggggtagtgtttgacctgaactctgaaaggcagagggtcccagactttcctgggatgatgggaactgggcaccccagatgaggctcggttgtgagtaggagcggggtgggccaccgaagagaagacagagtgggcctgtagggccagcccgaggtacccacagtggagggtctacaggc

SEQ ID NO: 41331 - DNA, 1045 bp, Homo sapiens
gaattgtggtggtggtaatggttttaactggtgttaatttcagttcttttaaaagttgtggtaagatacatgcaacataaaatgtgccctcttccccatttttaagtgaacagttcagtggcattaagcacattcagtttgcctgccaccgttaccaccatccatctccaaaattctctccatttacaaaactgaaactctgtccctattaaacactagctccccattccccactgtgccgcccccccaaagcccctggcaccaaccattctacttcctgtctctgagtttgactagggacctcctgtaagtggatttgtacaatatttgtccttttgtgtctggcttcttcatgtagtataatgtcttcaaggttcattcatgttgtagtcaggatcaccttccttttaaaggttgaacgatatcccgttgtatggacagaccacattttatccattcacccagggatggacacctgggttgcttccatctctcggctcttgtgaataatgctgctgtgaacacgggtgtgcagatacctgttcaagtccctgctgttttcttttgagacggagtctcgctctgtctcccaggctggagtgcggtggcaccatctcagctcactgcaagctccgcctcccaggttcaggccattctcctgcctcagcctcccgagtagctgggactacaggtgcccaccaccacgcctggctaattttttgtatttttagtagagacggagtttcaccatgttagccaggatgctctggatctcctgacctcgtgatccacccacctcggcctcccaaactgctgggattacaggcatgagacaccacgccccgccgagtccctgcttttaattctttggggcagggatccccaaccccctggtgatggaccaatactggcctgcggccccttaggaactggactgcacagcaggaggtgagcggcaggtgagcgtgcattcccgccggagccccgcctcccgtcagatcagcggcggcattagattctcataggagcgggaaccctcctgtga

SEQ ID NO: 41332 - DNA, 1033 bp, Homo sapiens
cattggtcactggcgcatctttgtggcggctgccctaagtctgtggcgggattccaatgtccaggccatctcagtgttgacattatggcttgtttttcttcattcaggttgagctattcttggttcttagtataaaaagtgatttccttgaaaccaggacgctctgagtgtttcatcgcgagactctgactcttgctcaatcctgtgttgtggcaggcctcctttcacgctgccctgtaggtcaagggggtaccacctcgttatcacccgcgagggtggaggtccagttcccactcagccatcatcgacacctgcaccgggaggggctcctcattcccactgggcagggtgggagttcaggcccctcactcagcctctgctgatgccgccctagctaggagggaaggtgctgacaccgccctagctgggagggaagggccacctgtactgctcctgctcagcctttgctgatgcagggatggccttgttgccgccaggtaatgatggtcccgactctgcccgacctcctctggagccccaccagtgcgggaggggagggtactgggtgcagccgggcaagggtgagtgtctgggctccccacacagcctgtgctgtggggaggactgtggtgttttccgtggtctgcctggggtagagcggttcctgcctgtcggtttctgccttgtcggtctgctcctctccctgacctctggctggagagaagaggctttgcgtgggtttttatggtctgcacccattggcttttttaggcagttggtttctccagcatccagctcagatgaggcagaaagaaaactgaaggagctccctgccgtgtcgatcgctggccccccggctcccggcccatccgcctccttctccacctttccagtcttaggttgcattacacatggagcgcaggtgttgagtggtactgacaggaggaattgggaggagtgaatctgcttcacgctcttggaagcggcagtcccgttactagagctcccatcttccttgactgctgggccttcg

SEQ ID NO: 41333 - DNA, 1069 bp, Homo sapiens
tgcgtggctgtgcgcgcggggacctgtgtgcggcgtatacgcattggcgtgtgcgtggctgtgcgcgcggggacgtgtgtgcggcgtgcgcgcattggcgtgtgcgtggctgtgcgcgcggggacgtgtgtgcggcgtgcccgcagtgtcgtgtgcgtggctgtgcgcgcggggacgtgtgtgcggcgtgcccgcagtgtcgtgtgcgtggctgtgcgcgcggggacgtgtgtgcggcgtgtgcgcattggcgtgtacttggctgtgcgcgcggggacgtgtgtgcggcgtgtgcgcattggcgtgtgcgtggctgtgtgcgcggggacgtgtgtgcggcgtgcgcgcagtggcgtgtgcgtggctgtgcgcgtggggacgtgtgtgcggcgtgcccgcattggcgtgtgcgtggctgtgtgcgcggggacgtgtgtgcggcgtgtgcgcagcttcgtgtggatggctgtgcatggcccttgttttcttcagtcattgcacgtgcagaagagcgacgtggacctgatgagaacgaagctccggcgcctggaggaggaaaacagcaggaaggaccggcagatagagcagctcctggatcccagccgcgtaagctcctggcgcttcacggacggggcaaggggagggtcctcggggcagcatctgccagccagccctgctgggggctacaccgaaggccgtcttcatgtctcaatctgcttaccacagggcacggattttgttcggactctggcagagaaaaggcccgatgccagttgggtgagtatggtgtgtgcaggacagagcctttccccagacgctagttactggggacagccacagagggacgcctttccctgcagcacccacgcgtgaagagcagcaggcaggggggaggctgcggacccccaaacccttctccactgacacctggggacaccacggggaggggggccagcaggctcaccacagaggccaagcaagacactgtaggaaaaacccatcacaacgggcgacttccccctcacacctgagaaaatacattaagcttaacaagcgctcccagcgcttt

SEQ ID NO: 41334 - DNA, 1019 bp, Homo sapiens
ccactcacccccgactggggaatcccactgccaggcttccagtgggtgaatggcctgggccgccgccagccctctgtggccggtaatgaccccctgcttggcggtcaggctgtgggatgtacacagggtgccgtgtgtggccgtgggagaccaggctgcctgtagcccccgggggagggaggcccggcggccaggaagcaccgtgggcctcaggcagggaggctggaagcggctgagcccaggcagacctggggggcggctgggggccctttgcagccctctcccaggggagcccttagcctggcatcatgccaggccccagcaccacccccatcgccaagctactgtcatttgagtgcggggcaggggaccaagctgtgggcatttccttcctgcctagagatccggattccagaagccccgtgaccagggtccctggtcacccggagtttctctctggacggatcatggcagagccccatggtggggtggggatggctttgcttatcaaaatggcttgggaatccggtattccgcgggcagcctagcacctggactcttcagaactgcgttgtctgtggcctcccgcatccagaggagggaggcggaagtggaggagcagggcacctgggagcccactgctcccagcctcgcgctcacttgcacccaggccccccagccgagccgatgacgtttcctaacagatgaggaagggggcgagggatcggcccaggcacgcccagacacagcagggaggagggaggcggaaggattggtataaaatctcacgcctgcgttctagaagcccagccctgggggaccgttcagtgtgggggcaatgcacattcaggaacttctggaacttattccatgctgatggctttgccacttgtccctggaggactctgttgaagctgcaaggagggtgtgcttcactttggaaagttctctgccctgagggtttggcccatttgtcagttcttaagctccggggcagccctggggcgtggggggcggct

SEQ ID NO: 41335 - DNA, 1048 bp, Homo sapiens
tgtggcgtgagctggtcctggcgtgcgtcctgcccctgcccttccaatactggtgcttttcggcaactgcttggtgtctctgagccttcattgcctcatcctgaatctgggctggccgtgcctcctgtgtagggtcacccctgggaggcaagggccaggagcccccttcctgggagaatgggcagtgggtgggcctgggctgtggcaggcgccccttcctgcctcccctggtgaggagttgctggctgtagtggggggtggacccctcacccatcctgactgagggctccctcttagctgtctctgtgctgccccaacctgggctgtgccctgctggggagtgggcatctgccccgtggttatgggggcggggggatggaggggaggtggggcctggggttgggagttgggggtgtggcacgggggactggcctttgtcctttgctatttctggcccccgtggtctgctgttgggaaccctggtgaaacccccggagggaccagggccaggtcctgtttcaaggccctgcgtgggactgcctgtcactagtcacttttcccacagccccaggaggtggggagagttgtccattgtacagattagcaaactgaggctccgaatcacatagtgagtaagtggtggggccgcagccctgctgtaggtccctcgtccggccccccgaggagccggggtcagcctggagtcgcaggctccccggattcccccacggctgccttgccgctgggggtgtgaccgtgggattagaagctgatgggggctgagggagctgtgagagggcagggggtggaggggcatctggggtcggctctgtgcagctccccagccagtgactgtcgagaggggctcccgtgctgcctgagcatctgagtgaatggggggctgttgttcacaggagggatttggaggcccacaggaggcctgagactccctggtggccctgcagctgagctggcagggctgggcctgaggcctctggcgtggcccggggccagtcagtgctgcatagtgagtcctgaatgtcaagtg

SEQ ID NO: 41336 - DNA, 1642 bp, Homo sapiens
tatctcgctctgcctccgttttctcatctggcaagtgggagtgggtggctctggcgccgctgaggaagtgatctggacctggaagccctttgatgtacgctgatgccccgagctctgggtggacatgccaggccggtggctgcggaggtcacacctgtttaggctctgcgtaatgcgtgtctgggattgacctgctcttccagtccccagctcctcaccccaggaggagtttccctgcgaggctgtgagtcccagatgtggggtgcagtacagacaggccctcctagagtcatgtcccaccggagcacagggtcgggggagcgagggtgactccagccagggactggggaggcctctgcaagtggagagcagagggagggctcgctggaggagtctgaccagcccggggccaagatgcggctggttgacatggcccccaggccatgggagcccaggggaggccctgtggatggaagtgcagacgtgggcatgggtcctgtggagctctggtcccggggggcatggtcagctgcccctacaggtctgttctgccgttggcctctgagctataaggagggtactggcagggcctgcagtcacagccggtggggtcagcacctccactccattcccagccccacacaggcaagggcagacccagggagccccagagcgtggcttttccaagctccctaacgtttatagacaacccactgagcacagagcatgggtaccgtgctgggactgttaatatgaggccctgccaagtgactggactgtctccgcctccctgtgtgatcttgggtaagccctactgggccctgaggacccctctgtgacatgagctccctgggaccatgagaccgccctgagctgattcagtttcagtggctctggtgccagccctgggtcctgcccctggagggtgggggtgcagggcccagcagtcctcctgccattgcaggggcggtaggcacttgtgcatggctgaaggagtgggagggtgcccgcccctgatgctctgcagtgcccagattgctggctgctgggcagccgtggacacaccggtgtggctttggaccatggcggctcatttctgggtgtgccgggctggtcagcacctccctggctgggtggaggtggaaaggccgccttcgggtgtggacgtcggccggcttcctggagggcaggacacggcatcctcccactgcctggcaaccgtctcctgggagatccagcagcaatcccattgcccactgtggctgagcctctcatcccaagggggggccaggcaggggaccatctgccccagcagctcccaaggctggggtcccaagagggccacactgctgaagcattgagatgtggggagagaggcgtttctctgcagtagtgccaatgagggcagcgcaggtgtgcctggtggccaccccacaacactgagggccccagctgctgacaccccccagggcacccccaagttagcctctaggtggtccctggccccatgatgaggcgcagccctgtatcagctccccatccctcccccggcacaggaagtgtgtggaggttctggagggctgagccgggggcagggctatgctgaatccagggacctggggttgcagggcctgtgtgcttt

SEQ ID NO: 41337 - DNA, 1059 bp, Homo sapiens
cggtgctgagtgggggtgagtctgtgtccacggccgtgtcccagcgggttccccagggttgggctgagccaaaagagtggggtagctgaggccgagacacccctgccctgtgggtccatggtctcagggagacaggtcccaggccaagatgctagtgagcaaacaggaccacctttcccaagtgggaggctctgcaaagaatgacaggaactatgtggggtggcgggtgcccgcgtggcagggggagcggcaggtgacccagggctgcttcgagtagatgcccaggggaggccaaatgggtggcattaaagtacagccagaggtctgggtgcagtggctcacacctgtaatcctagcactttgggaggccgaggcgggtggatcacctgaggtcaggagttcaagagcagtctggccaacatagcaaaaccctgtctctactaaaaatacacaaatgagctgggtgtggtcgtgggtgcctgtaatcccagctactccggagactgaggcacgagaattgcctgaacccaggaggtggaggttgcaatgagccgagatcgcaccactgcattccagcctgggcaacaagagtgaaactccatctcaaaaaaaaaaagtagagccagaaggacgctgcatctcttctaagagccccgaggcaggaggcagacccgaggggagaatggagggtgggaggccagtggggctgagtctctgtggcaagcttcgctttattccagggggaggccattggagggagggaggcaggggagagatttgacccatgattgaaggtccctttcaaagcttcctcaggcctcaagggttacaagagtgggtgaggaggatacctcaagcaggagacagcaggggcttgaataaatggagcaaaaggtggacagggatgggctttgagggcggagctggcaggacttcccggtcagttggatgtagggagcgagagggacggagcaggagttggcgtccctggtttcagcagctctgtgctgcgggaccataagctgtactgtgggtgggggagcaggtctggaggtgggg

SEQ ID NO: 41338 - DNA, 1091 bp, Homo sapiens
cggggagggctggtgaccgctcagtgctacccaccactgtccttggccccggtgctatcatcctggtccctccaggtccctactgtagccggcggcctttggggggatctcatcaagtatgagcagcgccccctacacgtgtacatgtacacacgtaagtgtgagctccagcctgcgggccagacagcccctcccagaaggcagcaaggccagccacgctggcttcactgcacaggcggccacagtgatgcctggtgctctcctatgttgttaaatactttcatcattttttgaacttttaaaatgtttttttttaatgttcttttataattggaagaactgaacttgtaaagagttcggaaggtggaacccaggcaaggggcagtgtgtggggactctggcttgatgggagcccagaccccactgccacacacacagacataggcatgtgtgtaaatgcatgcagacacacatgcgaagacatgtacacacagacatgcacacatataaacacacagacacatgcacaccggcacacgtgcacacgaaacgtgcacagagacacatgcacgtgtaagtaaacatgcagacacatgcacatgtgtaaacaggtgcacacagacacacatgcacacatgtaaacatgcacgcagatgccctgaagatatgcgtgcagacacaggcagacgtgcacgcagtctcacagggacagctgttgcagctcagccttccctgatgtctctccgcagacatcctgcagtactacctggcctgctcgccccgcgccgccaaccccttccagcaggtgagagcctgggaggccgggactgggcttcaggagagtctgaagcacattgctgtgtgtggaggggcccagcaggcctggcgcctggctcctcagcctgcaggactggggaactgggggagggagctggacaaaggctgtgtggatgtcaccaacagcccctggggttaccatgccggtgacctggtgacctggctgagagcctttcggggggacctgctcaatgcacccgcatcgctgggactgcttttgctccttggattggccttggtgggggaaggaggag

SEQ ID NO: 41339 - DNA, 1050 bp, Homo sapiens
gcacacacgtaagcaccggtgagcacacggacacattacaggactgcgctcactctgcatggagagttttgtcagtcagtatgagactcttcccttgtctttagctgttccttgaaataatactttcaaaagcagagcaggtccgtgtcagtagacacgtgggggttcgctgtttctcccattacaataaagggaggtctgtcttcacgtagtggcgaccacactggacaggcgcttctgggtcctcatgtccttggtagaccccacgggtctgaggaggggcctggggtcaccatttctcaaggcccagagtccttgtcctcaggacctgcactgagaccccagggtggggggtatctcagtcgaagattatgggctggagggagacctgggggcttcccagatggggcgaggctggctcgaggtcccccgtccaaatgaagtgctgaccatctgcggtgcgtgccccccaggaccccctcctccgcgtccaggaggtgctgaatggcacggaggtgaacctgcagcacctcaccgccctggtggactgccgcagcctgcatctggtgagaggcagggcctgggacagggccatggcagcttgtagggtgggaacaggggagcagctgttcgggaggatggggaccctcagcagacagtgggtcctcagccctgcctctggggggcggtccaggccgccgtggctgggctgaaggtctcacgctgccccctccaccctccctgtctctggatcctgccatctcatcccacggcctcaggactacgtgcaagcgctgaccggcttctgctatgacggcgtggagggcctcatctacctggccctcttctccttcgtcacagccctcatgttcagctccatcgtctgcagcgtcccgcacacctggcagcaaaagaggtgaggggccctggggggtcgcaggagcttgccccaggccacatggcatgcgggacacttcaggggcatgcctttatggacacccatgtgccagtcccagaggtgagggacagacacctcctcacctcgtgacc

SEQ ID NO: 41340 - DNA, 1025 bp, Homo sapiens
agcatttattaagtcattttgtacagtgggatctgtagattgttagagcaaccaggttcaagtgaagaaatctaaatcacttaggatgacctttaaaataatgtgtttattaagttttctttttttaaacagtgacttgcattttgcactaagacctgtacgttcatacatttgaagattggtgcacagactgaaatggtggggaaaaaatctgccagtggctttgttttgaagtatattacatagatttcaagtttttatcagttgcactttgaaggttgtgtaaagcattgcattttaacaactgaaatgttaatgaaaatacattttaaaaatatattaaggcaacaaccgaactttgttaggaatattttattcctttttggcagtaaaaacattggtacctgttttacatttatatggcttatgaaagtgtacagatcttttagtgtaaaatttcagataggttgtcacaaattttaagttcattgacgggtttctgttctctttgctctgtgaaatgtgtaatatatccatctttttttatatcgtattgaaaattcatattacagaggagatgtcaccatttgacaaaagctcatgtatcttgaaaatgaaaattctggtgctgttataagagatttctgatgggatgatgagttggtcatatgtgcaggagtgcattctcttgaatcttatcagatgtaacattctaaatggaatagttaccactacgttggagcgcctcctaagtaccatattattacattgtagctaggtgaagctatgactaatttctctgcacctcatgtaagtaggctaggtcgtgtattttgagaaaaaacgtgcgacattgatcagtaaaagttacatttttataacctaggttacagaccctctatgtaactgatcatgatgggaaccgccaggttcaggtcttccaaatgtaactttaatatgccctggagtttcttctttctatgcggtgatgagaatttctgagttgtatgctctgcttattgctg

SEQ ID NO: 41341 - DNA, 1829 bp, Homo sapiens
ttcagtgaatccctgaaatgcaaaagtctgtcacagttagatacctacctgccagttattgatcctatacctgagatctgttctggagaggttactactcttagagcttcattatgtgaacagtgttgccactaaatccaaatacaaaaatcatgattattatgggagcattgctgtagggaacccttgtttatgtatgtgcaattctagtgtttaggtggttggcttcctgacagaaagctccaaagccagaaactcattccatcagcctgataccaatctcctgtgggtattgtgggaatgaaagcagtttttataaagctttcctagaaacatggatatagtaaatggaaaagacattgggctaagtatcagtaggcctcgtttatacttcattctgtaactactgtgcaatatgaggaagtctattagtctctctgagtctgttttctcacctataaaaggagggattagactagatgttcagaattgttctactctgattctctgatcttctatatgttgtcttcctttctgcccttcactagagtctgcatgtgtctcctgtctggggattctgtaactccatatgtcttagcttagaacctaattttcttcattttacttttctcagagtatttacaatgttgaagacaactaagatgcaatgtagtatttctccttaggtgctgccgtctaacacatgatatatttactctagcctaaaaatggttcatgttcaaaattttaggttctgtaaaacaaattggtgccataatttatcagtataagcctgaaatttggagaaataaattttcttaaaatgtgagatgcttatttatatacatggctggaagaaggggcaaggctaacaaatctggaggtaattaatgcagtgagaaacttaaaaagatatgagaaaatggcgatggatgagaatgtttatatttactgtacagtgaccatcagtaatgaaagagattagtagatgtctgtttttgtgcttaacataatgttatgttggtttaattgtcttcattaggggcttttagtaaaacaaagggtctttaaaattaacacagtaatttttcactttaacaggcttaactggcactttattgatatacagacaatgtctagtgaagataacagctatcaattaaatagtccaatttcttgaaaacagatagtcaggtaaatctatttctgatttttggagattaggtagatgaacatgggtaagactatagtttctgcagtgtttttggctttggttcattttcaaaaaaattttttttaaatggataaggctaggctttagagttgtgggttcaaagaatgggctagaccctggggtccatattattacgtagaattagtctttgtgcagtgtttggttgccttttctcctttctataactctccatggtattctagacctaattctttaccttgagggggttggaagctctcaagtgtgtaagcttaattttacaacgatgaatagtctttccaatgagaaaaaaatagagggagataaccacgtaatgactatggtgatttggggaggaatatggaaacttggggagctctggtagttgcctttattaagaatagttggtagcaggaattttagcaacccaagcaggctaattagaatatatttcagttttagagtaaggagggattttgtatcataaaggtataacctatcatacttaactaagggtgctgatttccacaggtggtagtatttgtgagtccctctctctggtgtgatccttaatttattttgtgtgtttgtgagcctgttttcaaagtgaaggtca

SEQ ID NO: 41342 - DNA, 1101 bp, Homo sapiens
agggagcaagtttccagggatgcaactttgatttatattattgtatagtcatgcttttacttctgattttttttattcagcatttattcagctcttacagtaagctgtaatgatttgcagaacataaaagaaaacatggctgttaccctaaagcattttatgtaacacctttaaaaggaagagatacatgagttcacaaacattaagcatatttatgtatttgccggccaaaggtatttttactctatgtagaatttgttttatttttgccttgtaggcatattccctttttctaagcgtgctgtcttggctcttctaaaatggttgtcttagctaaaactcctggttgcaagctagaaactcagtctgaactacttaagaaaaaaaggattttattgtaggagtcctggggtatcacagtataattaggagaatttctttacatttggcaagtttagtattcacttccacctagggaataactagagccacatgctcaaaagctcccgggtactgtccttttggccatcatctctcagtttgcttctgtgtctgtgctggcatcattctggattcactggaaattgctttctttttgtggctgaaacccagctgtcaccactctttgcattcctattgcttcagaccctcaaagatagacttaaagctttggtgctgagtccaaaatctgtgaaatgatcagatttgtattttaaagtcatcttgagtggggggaataaaccattatttttgttgcaaaattgagaatgggttggaagaaaccagaatgaatgactgtagatgtgttggactgtaacaacaattgaggtgagagaaagtagcagcttgggctaggtggtggtgctggagatggagagaggtagatgcactagagagggatttaagaggcaaaaaatacatgggatttggtcatgggttgggtatggaaggtgaatgagaaaacatcaaaggtgacgtccaggtttctggcttgcatgactagttggctagtataaccattcactgaggttggaccacctctgggcagcatgatcattagtttggttttgaatttattaatgtgagggacctttgaggcat

SEQ ID NO: 41343 - DNA, 1025 bp, Homo sapiens
cccagaaatgcttgtggagggtcttgtaaggggttgagtgcctgtaagagcatctgggggcttagaccggtggccctcaaggtattaattccttatcagtgtgttcccatctacacccatggctggtgtggcctaaccaagctggcttaccttttagaagtttctttttattatctcctcaagagtacatgctctggcttcttggcctggcaggctttcattacttacatgatacatatatgtactctttgataatcttatgtttttgtcccttgtaagtttctgcaattgtatactgcattgatgaaggagggtctgctctcctctcccagggtgtctagtgatggcctgcatgtctctggtctgtttattgccaactcaagtaccttttttgccattccatcgtgaaagaaatcaaaatatagcattttgaaatacatttgaaatgttctgtttaaggatttcactttagttatactgtttctactttatattacaaatctggtttcctcttccatttgcctatatctaacccattcttagtctttttttttttttttttgcatttgcttttctgaaaatttgagcattgaaagggagggcagcttgatcatggaccagggctttctgagaatgcgaaaaaatgaatttcaccttgccaaatagaattgcctggatgtggtggagggatatgatgaggcagaatcacaattcttctacacttttgaaattgttctccccaatttattccccctttcctcattctcttctgatgtatgggtttaggaagctccggatgactgtttcacacacgcactcccctctcattctctcctgcccgtccttcccaccgcacacatgcgctgaaggaggtgagcattctggagacctgagtctcatttccagatatctttgccatcgtttgcagttacagctttttttttctatttttttccccctatctcttgtaagttctcatattatacatactttgaactgtggagatagccacaagtaaaataaaa

SEQ ID NO: 41344 - DNA, 1050 bp, Homo sapiens
tcagtgtcagagttccctgttaaaaaattagccttaatattgatttcctcctgctcccaccttggttggtatatgaaaaccctaaagatgaagcatttttaactaatttttgttctttacacataatcagaaatcaaactaaatccatctgtgatgttagcttatggtctttctagattttagccaaagatcttgtatattttaagcagttgccctgttttaatattaatcatggccatcccagaataagtcctgcttgacacagggcatttgttcaactagttatctttgttaaaaaagaaaataccataagaccagtcatattttgctgcatctagagtgagaccaaactttataatatagtgataagcttgaccaaaaaaatgtttaacaattttggtatgtttcaggaattggagaaattagtatgttggtactgtaaggaaaaatgtgggttaaaaaaaaaatccagctaggactcagcagtcttaatttaaaccttgtgcttgacaaaaattgaatgttgcctgtatactccagacacaatcgtgaagctcagtttctgtatttttcttctgaaatttaacttctgctaatataacataggatatgtggatgtcttgcaatcctaaaattttaagatatttcagggcttatcaactgaaggctcttgaaatgaaaactactacatgtattcatcatacgtgaaataaaatctttttgaaactaaaaatcctttaaaaaattcacaagcaagatgatactatagaatttcttttgacagattccttagaaacgtcaaaatcaaagtgaaaacaagttggaaaatcctctttgattttgctgggtcacttaatttgagttgatttcttcagagcacataacgtttcttaaagtacagtactaatgacagagtcccaggtggccagccttgtgagctgcgaactttgtcctgttgtactacctctggctctagagactcagcctaggaatgtgaattggtgagaatatgtcagaacctggcttcctattgtaggaactcagtgcact

SEQ ID NO: 41345 - DNA, 2110 bp, Homo sapiens
tcaaacagtcctcccacctcagccttccaagtagctgggatcacaggtgtgtgccgccacacctggctcatttttgtttttgtttttgttttgccatgttgccgaggctcgtctcaaactcctggacccaagcaagctgcccatctcggcctcctagagtgctgaaattacaggcgtgaaccaatgcaccagaccaggttttgcccttttgtttgcaggtccctttaactgtgatgctgtctcctagcccccttcccccactcgaccgagggccaggcaaattccaactcatttgctgagtttcagtcttcaccaagtctgtgaacttcaaaagacgttattcattgttacattccctgcatccggcacagtacctgatgtctgatgggaacccaatacatgtttgagtgaatgaatatgttgtataattcttttttctttatcacgattgctgctggtgccgattgaatttccagagcttgctgtaaaagataggaagaaaatatgtggtaacattggccagtgtttgggccataagatgtgtagaggttctaaggaaaaatacacttccaaactcattcacattgctggtcatgttcagttcctgtggctgtaggactgaggctcctgttttcttgctggcagtcagctggggccacacactgcttctagaggtcaacttgaattccttttcgtgtgccccactccatcttcaaaccagcaatggtgtgtcaggtcctttgtatgctttgagtatttctgacttacgtttttagttggagaaactctgggttcatgtacctagatcaggtccaccttaattatttccctgccttcaggttaaatgtgctgtagaatatgacattgtcacagaagtgagatctcatctttagttacaggttccagagtatggggcagaacatttttgaattctgcctagcacagtgtttatagtttattgatctgtagataggttgggtaaaggttcttcttcagccagtaaaatgtcatcttctctgtcttttgattgcagggtttctattacctatgtccatttctttaagccgtttggtctcatattcctctgtgtgttacaagaattgtatcatgttatctatttcatgtagaagtaagcatgagagaaatgagtgtaaatgggctgttggccctcacagtaaaatctggtatctattctagggagatactcatgtttttctcctttttcacattgctgtcgtagggtcagattcatttttcatggtcatttttctggttctcttttagcatttgaaattgagtagattgttttgattgtaagaatgttttttaaaagtaaatttttattaaaatgtatatatggaaaggaagacaaatagtatattgcttgataaattttcacaaagagacatgcacatgtaattaatacccaaatcaaagcattagaatatttactagtaccctagaagccttacctactcaatagctcccttaaaggcagttttttgcttgcctgttaatttgatgaactttcagcctttgaaaagtcgttacaaaaagccgatgtgtaaaatgtttggaggataggataagaataggaggtggctcttggaagtttgtttgctcctgagtatgggacctagtgatcaaagatgaagtggaactagatactttatcttccctgtaataggaaatacactcccattgtataactgtaatttttactcataaaaatgggttttgcactcaaagcaaaagtaggctcttacttttactgttaaaatagaaactggaaaactgttctttagaaaagtcatcctaatgggttcaatttgaggtagttgctggtttttatatttttatttttttgaccagtgctttaagtttttctcctgtaattttattaaacctatgcccaggaaaaagtaaacggcaagatttcagaatctgaaagtttcttacgtttgaaagaaagtcctcccatgcttcatttttcctaacagaaggtaaactttccatgctgaacttgtctctatttttaacagaggacaagctttaggaaactgtattcaagccacatatagtgtggtagattctggtggtggagcagcta

SEQ ID NO: 41346 - DNA, 1079 bp, Homo sapiens
ttaagttttacaataaaatgtaaccttgcaatgtagctttgcattttatggtaaacattagttactgcttactttacaggtactaaaaatcaactacttcaatttcagaatgtaactttctcatgccttattttatttcgaccagtattaagcctctttatgcttagaagatggtgttgaatctgtttcaggttaaaaaatactttattcaaactattattttcttaaaagttaatatgtctaaagtttttgaaagacactgatcactgagatgtttggagatttaaactggtttatttttggttatccatggaaaactttaaaaaatttctttattgaattatagttttaagtctccttattttattctcgatgattaatgtacagggcgtggcttacttataagtgtgactaaagttgtgcaaattaatcctagcagggctccatcctttaatgtcagtgccgtcagttgttctccccttattcctattattctggcattatatcttatctgtatgtaaattcttattctgtgggtgaaaagggatatggttcaacaggatccaagaacttaaaaattgccctttttcacatttctcataagtagtaagtctcctaaagcgaagtcagagtcattataaaggcatgataatggagtctgttatctatttggaaaaacaacttttattgccatttataataaatgtaaatggcctgccatttattttagaattactctgtttctaggccctagaaaggctctgcattttataattaaagttagtagaggctagaagaacttataggaatgtcataatgtgctgtaggggacagtgatacttttaaaggttctgacattcagccagtaaggtgcttctagttccagataacttcttttccccccaggaatagatacagaaaatatttttggtaaatctgccaagttttttatgtgattctcattatgttaaattttattatcagtgcctaaataatgctaacattttaagttaaacagttattcagcttaccactttgacattaccactgattagaattgaaggctaagttgagcctgg

SEQ ID NO: 41347 - DNA, 1033 bp, Homo sapiens
gagtgacataaacctaaatcatgtctttccactgctcacttagattataaatactattgcacttagaatacaatttaaaatccttgctgtggcctacaaggttctgtgtggatggtcccagttatctttctttatttaccccctaagcattatccacctggcttaccaagttacttccaagctgtctcctgattgttctctatttaaaacaactgctttattaacttactgggataagatacataatggtacttatcttttttttttttttctgttccccagtagactataagcttcataggtaggaatgttattttgcttcttgtgttatcttttcttcacctggtacatagtaggtgctcaaatatttgccaaatggaagatggggacagggaaattattctacaggtcttgtcttaattggaagattgaaggataagagggtctttgtggagaaagtagtctgtaagaaatagtagtaaaatatgggactgatcactactgccaggaagaggaaagtaagcactagaactttcaaattcacagaagcaaaaatgaaatgaatagtaatccaaccagaccagtgggagtcaggaaaggaaaagtagaaactgcaagatagaaaagaaagatgaagaaatgggaatgggccagagatttactgtcttaccaaggtggagcagccccatttctctctaccctcttaggactcaaaatccctggacttcatataacaaagaagcataggaagatgctgaaaggtggagagaagactgtggccactctagagtcctggggacttgagaaatgacaagggtgtcagttcccctccttactatctcccacatgtctagtacagggcactgcagaagcctccatccctgaaccaccagtaggcacagacagcaaaactctgagaagagcctgttccccatagccagaggacaggggaagggagggtggtctaacaaaacagagcttttgtcagtactcactctgctccagctaaaccaaggaaactgccctcctccct

SEQ ID NO: 41348 - DNA, 1087 bp, Homo sapiens
cgaagagcagaagtcagtgaaattgaaaagaggaaaaagaaaaatcataaaaatcataaaaagttatttctttgaaaagatcaatgaaatttagcaagactgacacagataaaaaggaataagacccaaatcagtgaacaggaatgaaatagaggatatcactacagaggctgcagccattgaaaggataattaggaaatcccacagataactttgtgctcataaatttgacaatgtagaggaaatatctttagttttaattagctttttattttagtttttctcaaaaactaaaacttaataaaactcaaccaagacaaaatagacaatcagaatgtaggcatacctcagagatgtggcggatttggtttcagactactgcaataaaccaaatatggcaataaaaggagtcacagaaagtggtttcccagtgtatatatataaaagttacatttactctatgaagtgcaataacattttgtctaaaaatacacacagtaattgttgctagaaaatgctgacacaaagtgagcacatgctgttggaaaaatggtgctgatagacttgctgaaagcagcgttgtcactaatcttcaatttgtaaaaaaacaagtaaaattaaaaaaattggccaggtatggtggctcacgcctgtaatcccagcactttgggaggccaaggtgggtggctcacgagctcaggagatcgagaccatcctggctaacacggtgaaaccccgtctctactaaaaataccaaaaaaatagcggggcatggtggcaggcgcctgtagtcccagctactcaggaggctgaggcaggagaatggcatgaacctgggaggtggagcttgcagtgagctgagattggaccactgcactccctggagcctgggaaacagagcaagaccccgtctcaaaaaaaaaaaaaaaatcatctatgaagcacaataaagtgcaataaaacaaggtatactgtaatgttaaagccattaaagaaattgaattcttaattgaaatgctcccttaaaaaagaaaaaatctctgggtccagatggtttcactggacaatttaccaacatttaaagaag

SEQ ID NO: 41349 - DNA, 2610 bp, Homo sapiens
ctagaaaaaaaacttcttgaactgaggagttcaacatagttgctgcatacaggatcaacacaaaaaccatgtttctataccctaacaaaaaatatgcagaaactgaaattaaaaacacaatgccatttatgttctaaaaattgtgaaaaagatacaaacttcaacatgtgtaggatatttgtgctgaaaattacaaaactgatgaaacaaatcagaggacccaaatgttgccacaaaccatattgacatactggaatattcaacacggtaaatgtgtcagttctccctgaattatcgtagcttttatgcagttcctatataaaatcccagcaaagatttttggtagatacataaaaaggttattgaaaaacctgtatggaaaggcataggccccagaataactaaaacgatctagtaaaagaataaagcagttggaatcactctactgatattaaagctttcccttatagtgatagtaatcaagatacacagatcaatgcggtggaacagagaactaaaaaaatacataaatatgccaaattaatttttgacaaaggtgaaaaagcaattcactgatagattattcttctcaacaaatggtgttggagcagaaattggacatccatagacgaaatgatcaaccttgatctaaattttatattttatacaaaattaactcaaaatagattatggacataaatgtaaaattgtaaaactcttaggcaaaaaaggagaaagttagccaggtgcggtggctcatgcctgtaatcccagaactttgggaggccgaagtgggtggatcacctgaggtcgggagtttgagatcagcctgaccgacatggagaaacaccgtctctactaaaaatacaaaatcagccaggtgtggtggcacatgcctgtaatcccagttactcaggaggctgaggcaggagactcgcttgaacccaggaggtggaggttgcggtgagccgagatcgcatcgttgcactccagcctaggcaacaagagcgaaactccatctcaaaaaaaagaaaaaaaaaaggaagtcttcagaatccagaactaagcaataagttcttagtctttacaccaaaatcacaatccataaaagaaaaacttggtaagttagaaccagttaaagactttttctccatgaaagagcatattaagaggatggaaagacaaggtacatactagtagaaaatattttcatctgtctgccaagagactaatacctagaatatgtaaagaactttcaaaattcaataggaaaaaacaatccagttggaaaatggacaaaagacatcaacagacttttcaccaaagaggatatttaagtggcaaataatcacagaaaaagacatacattcagtattactagccattagggaaatggaaattaaagccatagggagaaaacttctgctaaatggctgaaaaaaaaaaaaaagcaccaaatgttggtgaagatgcagagaaacattgctcatacattgctagtgggaatgtaaaatggtacagccactctagaaaacagtttggcggtttcttataaaactaaacgtagaactatgatacaacttggcaagtgtactcttggatagttatctcagagaaatgaacacataatcatgcaaaaacctgtacaccaatgcttagagaagctttatttataataaatacccctacacaggaaacagcccagatgtccttcagtgaacgcattattgaaccacagtacttctgtatcatgattacttctcacaataaaaagggccaaagtattgatgcacctactgtgaatctccacatcgagtgataaaaagcctattctaaaaggttatatgttgtataattccattgatgtaatatttatgaaatgacaaaattctagaactggattagtggcttccagtggctaaagagcagaagagagtaggacggacatggatgtggctaatgaaagagtgacatgtgggatccttgtggtggtggaaatactctatcttggctgtatcgatgtcaataatctgtatgtggtattgcactagctgttcaaagtgtcattgttgtgggaaacttggtcaagggtgaatgggatctctgtagtatttcttacaactgcttgtgaatctgtaattatctcttaataaaaagttaaatatgaatggactgacttctattagaagacaagattggaaagtgccttaaaatacaggtgataacaagtaactcttcaattgttaaaggggaagatgaaagtgaagagatgggcaaaaagataccatacaaacaaaaaacagaatggcagtgttgatatcagatcagttgagactaacagttgaaagcagtaaacatattacggacatattattgataaaagacatttatgaagaggataaactgtgaaggtgtacagacactaaaccatagttgctaaacacatacaaccaaaaaaaaaaaaaaaaaactagaaatgcatgtatattttcactaagtttagttagatcaaacaaagcaataaaaggaatattttgtaccaaagcctatggacacagtgaaaactgtgtgcaggggaaaaaatctacagaattaaatgtcttcaggatt

SEQ ID NO: 41350 - DNA, 1048 bp, Homo sapiens
aataacaaaaggtcatgctattggtgatgggtgggtaaggtacctactaacagtaagtttagcttagggagaggtaagccattttaagtctatcagtatataatggatcacagaaggagagagtgggagacactcagtctatcagaaaacataggatggatgtgccacagaggaagaagttgtcacttaacaatgagtgtggaaaaaaacaaagtttatcagtgtctgtgtgggcgttatttatttggggacagcatcctaaggcaggcatattcccacagtggaaatggatgtggtgtgatgccatgaacttgtgaagcaagtgagtccctttgttgtgattccaaatttactcagcacataactgattattatctgctccccagtgtagttgtagtgggacagattacattgcccagaagagttcagtattcagtcttcttggtggttattttgttgtaaattaataatactgatagtatgtcattttgctttttataattgattgtctttaactttgccctgaggcatttttcctaatcaactctagaccatgatagagcctttgggccacaagactaacagtcttaccttgaaccaccagtcagtgaggtgtttgggaaaaccttttcctggtgatgtctcatcttttccttctacagtcaccaatgtcatatttactgtgttaagatgctaggctttgtactggcttgtttacttctcacgatttatcttgcagtatgatagtttgtgtgacactgaaaaaaattagtaggactgttaaaatagttttttccccccattaaaagtagaatgacaccgttttgcttctgaagaatttggctttaactggtttatattttgagctgggtattaaaggagaattatggtagggtaaacacaattagtgacatctggttgccccaagaatcaataatatctgatactacatacataaatagatatctatgttgtgataatatatcttagtttcactgggtaaaactagaagaataaaaaatttgaaaacagcttggttactgactaa

SEQ ID NO: 41351 - DNA, 1054 bp, Homo sapiens
taaatagactagaggattctgctaaaagacacgtcagattggattaaaaacatctgagatactaggtttacaagaagcatatctaaaaacaaagatacagaaggcaaaataatggaaaattttatttcaggctcactttaagcaaaataaagctggtataacatgttgatatcagacaacatagaaatcaaggcaaaaggcattagagatgaagaggatcactgcacagtggtaaaaggttcagttcagatataggtacatattatataaagcaaaaatatacagaaacaagaaaaatagctgaatgcacaatcctagtgggaagttaacatacctttctgaatagtacaacttgcagacagaaatcttaggatatggaagacttaaagaacatgatcaatgaacaaatctgacctcatggacattcatagaatgttacagttcctgtataatccattcttttcaagcacatggagcatctgacattgattacatataggaatataaagcaagtattgataaatttcaaatgattgaaatcatgtagagtatttttcttacggaattatagaaggaatcaaccaaaagataacaggaaaatccttgtatgtcaataaattaagaagtatatttcttataatgtataatatataattttataaatatataaatatatatttataaaagtttcatttaaaaagttttacaaaatggaaaaatctgtcacttaaatacaaaatcactgtacttctgaccctactaaatgtaaaaattgtcaggatttgggaggttttttttttgatgtccaaatacttgatacacgttccagagatccccaatatttttgtgaattcttcttaggaggctagtgatcatgtatgtgggattaggaaagtaattgtttgagctaaatgggggaagagatcattcctgctggtagcagggagggtgtgccacgacgagagatctgtggatttactgaaaacacgagatttacatccagagcttagttcacaggctgtggctcctgtttttattcatttagaggctgata

SEQ ID NO: 41352 - DNA, 1028 bp, Homo sapiens
caaaacaaaaaagtaaattggagtgcctcatacaggagtagattgtttgctagagaatggtggtagtggacatgtgtctcaattgtattcattttcagtttgagtgagtcacttttcatcttgtgcttttctaacacctggaacctcttttccaagaaactctggttccttttaggggagaataatttgaaaaccaagattctgggtaccattgcaataggaggccattacttcagaactctttcagtggtcggaactaagaaataaaaataattgagtttgtatcaatgttttcaattcaaatttagcagaaaaattcttccccttaacttatttcattatatatttctattcattttctcttacactgaaaatagtgatttcttaatgatatcaacttatttgctttatcttactatacacataaatgttttaaaattgctgtattaaaattaaaactattgaataaaatttaagatttccttgcaggtttttttgaagggcatagtcctttcaatatatactgctgaggatgtagagacagaacactgactttagaagtctcttcaagtcttttttccaggctgggcgtggtggctcatgcctgtagtcccagcactttgggaggccgaggtgggtgtatcacctgaggtcagtcaggagtttgagaccagcctggccaacatggtgaaactctgtctctactaaaaatacaaaaaaattagctaggcgtggtggcgggcaccggtaatcccagccacttgggaggctgaggcaggagaattgcttgaacctgcgaggcagaggttgcaatgagccgagattgtgccattgcactccagcttgggcgacaagaatgaaattctgtctcaaaaaaaaaaaaaagtctcttcatatattttttctgtgtagatattttaccgattcgatgttaatagtggtttatttctgtttctctaattctgagttttcaatttctggattaattctttccatataaataggtttgaagtcaaaattaaataaaa

SEQ ID NO: 41353 - DNA, 1034 bp, Homo sapiens
tatttttatttttattttttgccaggaatgagttttaaagaatgtatcttttttatatttgtaatttgtcatcgttgtaatttcatgtgatctggatctttaggtacatgtttcacaatggatggaatagaaaagttaggaattttgtgtaggaaagcaaggaatagaatagaaaataaaatagaaaagttaggaattactttttatgtttgcattctctagctgctcactttttttgactatatttcaagccaactgtcacagggcatcattccaggtcctattttggtttctttcctcagtcaatactagaaaaccacagagtgccattcccggcatttcatctatcccatacttgtcatttgtaaaacaagtgcctagtgatgttaattatttctgtagagttgcatttatgctcttttaatttttctgtatttgtgctgaatttccatagtctgtggacagatttgctctgggtgctatagtcagctgagttggagtctagaccatttataacttaactcttcgacctatttaactgtctgcttccttgctcttagtttgagttactcaaattccagttgccttaactgtaaaattggctagtagagccatgtacctccagggaattcagtgtattgtttagatgatgattaggtcttatttatgttttcatataagctattataacaaaattgcagtttaaaatgaatatataggaaaatgttttctttagaaacttagaataaaccagaacattcttaaatttccacttattgcatgttgatggagcttgactctcttccctgtaaggatgaacattgcagaaagactgtgaaaaagtggtgccatcacatcatcagatctcttattgcagaagttataattctaagagaaaacaatctgcaataaggagttctatcatatttttgtaagtatattattgacttccaattaaaattagtcctagtaataatggcatctgtgaataaggaaatctgaaaccaataacgtgtaaaattgagttaaatatt

SEQ ID NO: 41354 - DNA, 1065 bp, Homo sapiens
ttctccgttccccagacagaatctgctgggttcctgctattgacatcaaagttacttgttctcccattaggctgctgttaaaacgaacacttaaaaattatcttttgtccatcatacttttgtgggaaacatttttctccaatggatttcaaatcccatatctcttactatggtatttccatccaattttcatggttttgaagcagagcaatcagtatggagtagggggatggagtgaaaatgataactttataattaaaatcggcacggaagggtttggatcacgggatggtgggattaaaggtgtaacctgtgaggacagtaacagaggagacccactggaaacattgtaggacttggagagcctgtcgggtgagtgccctggggatctttatgtgcccatttgtcattttcacttctagaagtgagaagcatcaggacactgtctgtgccacctctgtcttcccactctattccaaacctcctgggctggtaggagggctgaatgagataacacaaagcacttagaaccgtgtgtgacatgtattaggaactgaagaagagttagctattacacataacatttgattggtattaaataatataaacattgcttcctgtactctctattatataaataaagagcaaggaatggtgtgtaattctgtgaaactgtgtagtctcagatttggatctgtctttgcatgtgctgcttcctcctgccccagttagtaagtgtcaataatcatgtaaattcttttttttctttccttttcttttttcttttttttctttttgagacagagtcttgctctgttggccaggctggtgtgcaatggtgtgatattggctcactgcaacctctgcctcccaggctcaagcaattgtcatgcctcagtttccttagtagctgggattacaggtgtgtgctaccatgcttggctgattttttgtatttttagtagagacggggtttcaccatgttggcgaggctggtctcaaactccttaagcagtccacctgcctcggcctcccaaagtgctgggattacagacgtgacccagt

SEQ ID NO: 41355 - DNA, 2305 bp, Homo sapiens
gggcaagcttgccaactcttacatacagagtgttctgatccaaggaaaaagtaataaaaagtacccaattatagagcagcttcctgaaatcaacatttgttctttcttttacatctcctattgaagaataggatgttgtatataagaggatagcacaaaatgtttcctcaagttttcatttatgtcactgaagagttgactttaaagaattattataaattaataaaatgtaaccatttggaataagctatgtaaatgaatttgaaagtttgaagttgttgcttttctttagtaatgaaaaactaacccatgaaatgtgtggtagatttttcacttattaagagtaaatatgcgcatttatggcgtgcagtgtttcacttaagaaagtgggtatttcagggcagcacctagccactgctggtgtacagtgcggactgggagcacagtgccctaggcacaggcagcctgtgagtatccgtggcagttcgtttctaactagcaaaggaaaaggacttctaaaatcaatactggttttaaaatgtatcattactgttatttggctcagttggattcagagccataataaatagtatgaacatcggcctaagttaaagtttgcatttagacctgattgtgaatggaaagatgtacatatgacttgagagagtatggttttgacagagtggttgttaatgcctcagaactaaagaggtttcatgaatacataggttttcagtacagtctccttaccggcaggggaatatcagacaagtggtgtttttcagacagtgaagcagatggctctttctcttcagtacagggtgtaccaacaaagagagacagttacacaaatgttaacccctgagggagagagaaaacaattgcagtcagttgttctttataagtctgtatcttgacttcacagtggtgtgaaaaagtaatttcttcttttataaaaagcattaaatgcacaggagcagcctgtaatctgagtccaactaaaatggtggaagatgatgtaatcacttaaaaaggaaacagactgttatgtttgacatttctggagtaacgtggtggtggactacttgggcccgatataccgcttccaaattctcgttaaaacgtccagcagttgtgctataaagcaaattgccatatgccaagatctgggcagaatgttcttcaatatggctggtgaaacagattgcgaatggtcttggactatatagcacatgttctattctctgaactagaacaagacaaatgccccacgctgggtaggacatgttttaaaattcatgtacacagtgtgcatagctttgggaggccttgggtcatgctgagtggtccaagtttgtcattcccagtctgtggagccagtcatacctgggtccctcacctgctcctcctctgtctccactagctcctttctctccactttgacttaaaaacccaaactcccaacatgcagccccgcagcaggaggcagagggaggtgctaagggtgccgtccaaccctgactgcaaatcacttaaaagctttttgaaacggaggaagagccgtgcatccccgtgtttcgtgtacaacatatgatacatgtgacagttgacaagagtgcctgagtctcagagcaggaagagttatcctgcctccacatgcattgaagggaatatatgtcacacgttactagccaggctcagaggagaacacatctcatttacaagttcaaatctgaaagggagaaatgtgctagtatttagtggatcttgaggaaactagggatgtgttacccatctgtgcaggaacattagatctagatggggctctcctagtcaaaacgctgagcatgtggcgtaggaaaaaatttccaggatgcaggggaaggacagaatgacttggaggacagtgtctctctctgaaaatggttacatgtgaaacacaggtaacaaatttaggataaatctggtatcttaaaaaaagaaacatgactttgggaaaagaagaaaccagggggccctaagggggaaaagactgagatgaaaacagaaacatacaaacaaaaaagctgatcgaaataaaagaatgcgaggaaaccaaaactgcaatgagacttaaaatccctactaagataatcagaagacttgatctccaaaaatagaagaggagtatggatggcaaacttggacactctcaggatgcagaggagaaaaagataaaagtgggtaaatacgaaaggtagacgtggaggacagataatggatccttcacccaagaggagttcctgaacaggaaactgaagtcatc

SEQ ID NO: 41356 - DNA, 1026 bp, Homo sapiens
gagcacacagtgtaggagagcgtgcattgcaggctttactggcagaattgcaaatgtgtaaaggtgatggattttatttcaaaagccagagttacctaaattctcacattgtagaaacttgcttcagtctgtttcttatattcccaattttaaaatactttatacaagacataggaaaagaaaaatgcaggcttttgatgctgaaacttaaattttgtaaactaaaatccagtggttaatttgaaaagtaacatcaagtagagtttattctatgctcaatattaagaattattgcttagtattaagaaatttcctatacggatgtagtgtgttttacagtggcgctatgtccttataaactgataagctgaaaatattgtaagttgaaaatgcatacacctaacctactgaacatcatagcctagcctaccctaccttaaacgtgctcagagcacttacattagcctagaagggcagaatcacctaacacgaatcctgtcttataatcaagtgttgaaagtctcatataatttattgaacactaagcgaaagtgaagaacagaatggttgtatgggtcccattgcaaagttgaaaaattgcaagtcaggttctctctgtaattcaaattatgaacaagtcaatgacagaaaaccatatggtctcaatagatgttagggaggtacttgacaaaacttaacatctatcccttctaaaaagaaaatcccttagtaaaaggattgaaaggtgttttccatcttaacatagtcaaaggtgtgttgcaaattaatagtcaacatcatttatgacagtgaaaccctagaaacatttaagcttcccaaataaggttgttggcaacaccattaaaaatgttctgttctttttttttttggatgtgcgatactttacttggcactaaaaagtaaatactaaatgacaagagaaagcaaaattgttatttgaagatattatatgattagaaaaacaaaggtcaacagacaaatggttagaagcaatttaataaaagt

SEQ ID NO: 41357 - DNA, 1769 bp, Homo sapiens
ccatgaagttttggggtaattcatatacagcaataagtaactgatcagatggattattcagtcagtggtgtggggatagccagctagaattggggaaaaaataagttggattcttactgaattctgcatcaagaaaattccagatgtgctgggcatggtagcttatgcctgcaatcctagtgctttgggaggctgaggtaggaggattgcttgggcccaggagtttgaggctgcagtgagccatgatcatgcctctgcactccagcccgggtgacagagtgagaccctgccttgggggaaaaaaagaaaatctcagatggatcaaatatttaaatgtaaaaatggaaccgttaatttattataagcctgaaaaattttaaacttttggggtggagaaggatttcctaactatgaatatgcaatccccaagccataaattaaaataacaaaccttataaacagggtgaaagataaaccaccaattaggaagatttgagcaacctgtattacaaaaggcagtgtctcggagaactcttaaaaatcagtaagaagactctataaatgggatggctgaggacacgaacaggcaattcacaaagtagaaataaatgtatgaacagatattagccaagaaatataatttagaacaatgagaggtcacattgtatttaccagattcacagaggtgaaaaagaccgacaaggttaaagagattccttgattggcaggaagattatacggtgtgggtggggacacagatttgtctgacttttctggagggcagtctagtaacatgtctcaaaatgcaaataccaaatgagtgcacattgattcagctattgtgtaaatttatgctaaggtaatcggacacacacagaaagatgtgtatactgttaaaaaaaaatcccgaatttcaaaaatgtcaaattttcttcctttttcttttctttctttttttcctctatttccccttctattgtctctctttccagttcctcttggactttcctggatctgtctccacttctcaacattgtactcataccttttaaatcttggtttcttctcaatattagtaatttctttaattttaacttccttgttgccaactctctattctgaaatcgattctaacattcagccctgcttcgaaaagtttattttggcaattacttttgcaaaactaatttctgataaattttttcttttaggattctgttctgtagtgggtgtatagctgttcaatctctctgaggatatgaattagagttttaaaaacttgccttagacacgttgattgtggctgtttctcccagggtttgtggctgtgtgtcttcatcttgctccttccctcccatgctttaagatcttcaagtcctgatggtcctcagctaaatatccatgtttaacgataaaggactaggttaattaatactgcagctgccgcaggttttctctgtagttgtgtggacattccagctgccccctgcgctaaatggaggatggactgcaggctctggaatgtggtcaggttgcttggcaagcttccccgtggggtgctgtttgggtggggaaagctgggttccccccacactgctatcataagcagtacttggtcaggaggtgcagcagtgtaccctgtcaggcagagctgctgcttttcatcccacgactccccgtctctgtgtctgttgtaacagttctgagttccctttgttctctctcaagccctaatgtccacacctgaagctctccacagagaactcatc

SEQ ID NO: 41358 - DNA, 1059 bp, Homo sapiens
cagtgaccgggaatggggataagagtgttccaagctttggaaacaggatggggaaagacctttattcgtagatggaggggaacggggtctgccagcatcactcctcaaggacatttactattgctgtggttcattttcattctgtatttttcttctgtttaatgggatttgggaggaagaaaaagatgaacttggttttgatccaagtaacctcagagaataatgacgtgggagcattttacaatgcaaacaataaatggaaaagcatgaatttatgtactgtatgtgaaatatatagacacatacatacatataggctgaacatcccaaatccgaaatttgcaatgttccaaaatccaaaacttcttgagccacctacatgatgctcaaactgagtgctcattggagcatttcagatttcgtatttttctatttgggatgctcagctagttgatatgaggcagatattcccaaatctgaaaaagattcaaaacctaatccaaaaatccaaaggctctctggtcctgaacctttcagataagggattttcaacctgtatttaatattgggaagcaatataccaataccaaaaacgttgtctgtgagaggtgagatgacaaatgatttttattacctttttaaaactcctaatttgaatttcaacttttctatgactgtggattgtttttataatcagaaaaaaagttcctaaaatgatgtttatcttatggtttggcttatgtaaatgcagagtttgtcactaggtcaatatccgcaacattataaagatgttactgtgtacttactggaaatggcctgtgattggtgacaaagctgacttacacaaaggagaacattatccttaggaattcttgctagtatctcataatgtaattgttttaacgttgttaaatggttcacagtgatcagagacttaaaatctttgtctcctacacagcgttttaagagttacagaaaagctatcattttgagctaccttgagactgaagtgtctgcagaatagcacttacatattcaggctgacaatatgtgtttgag

SEQ ID NO: 41359 - DNA, 1059 bp, Homo sapiens
tattttccaacggaggtggaaggggttgagatccacagcccaggggatatgctttgaaggaaggagaaaagcacctctccttccctaaaagaaggcaggaaaggtgtgtggacagaaattctagagagcatgaaatgcgggtaattgggctgcaataagaatccagtcatggttagagaacctgaatttaattaaggtcagtgtatgtctgtagagtgccattatcttacatagaaattatttttgaaaattttagttgacatttttgaatgatacctactagtactacagataatagaagcataaatatgcacaaaagcagttaaaacttaaccgttcgtcttaaagtaatttataactaatacttattgatgccctactctgtctcagtcaaaaagctaaacaccttccctatgcacaagaaaaacctatgcagtaggcgttactagttgtcctcattttatttttattttttattttttttcaaacttaaacatttttttttgtgtagagacagggtctacctttgtttcccaggctggtctccaactcctgggctcaagtgatcctcccgcctctgcctcccaaagtgctgggattacaggcatgaaccatagcacccaccctttatccccattttaaagatgacaaaacctaggctcaaagaacttaacatgttctagatcacgtggctagtaagtggtgacaccagaatttgaaccacgtatctgactccagagtggtggtgccagctgctgttctgtggattgagccatatgaaattgactatttagcaagagaaatataaaacatcggcatttttatatgtctctacctaatacacttcctcacctcaatcattgccaaggtcagtggactgcttacttggtgccaggcattgccctaagtgttttgattgccataatctgttgtaatattttgaaatatttgcagtcttaattgtcctgatttaaaaaatcatgtttttgaatatgataatatactttaaatgagtatgtttgattagcgatgttgctttttcctatgttggcaaaatta

SEQ ID NO: 41360 - DNA, 1025 bp, Homo sapiens
gagcatatgtttactcttggctgacacgcctctgaaccagccccaagttggtgtgcatggtgctagggcatgatttcaggcccgactcatacccccaagctagacacctttgtgcagagtacatctatatgtgtactagggattgcctactgaggtttttcctagttctccctttaccttcagaaggcatagagcacctttaatagccctcctgccttggccctcatcctccctccccaccaacccctgaattcctttagagattcctcatctcctcaaagtccagaggtgggctgtcttctcccacctccttgtaggagctcaccctgatgaaggttatttcatttctgaagctctgtctcctttttggcaactggcaccagcaaggatcagatccttctaaaactgtctcctgtttataacagaatctgacacttccaacatcatgtaagagctgcatatgccaatcacagtggagtttttaatcctgtacccaggtctgttgtgaggataaatggtaattcccattgcatttttgtgtgtgataaagtatattgcttaagagagttctggggatgtatagtggtgatgattacacaacgatgtgaatgtatgtagtatcactgaactgtacatttaatgtttaaggtggtaatcttttgttacctgtctattaccacaataaaaatggaaaaatatattgcttaataaaataatacttgataaagtccatgcagtgtttactacatgtcagtaccattttgaacattgtacacgttgcggtttacttaatcctcacaacaaccctgttaagtagctaatattataatccttatttgacacatgagaaaaatgtgctacatagaagttacataatttgctattaagtgagagaacgagattcaaaccaaagttgtttagctccatagctcatgctgtcaaccactatgttaatacaaatctgcattgtcctaattttattctatatttatgttcagatagaaggcactctgggaatctggaga

SEQ ID NO: 41361 - DNA, 1669 bp, Homo sapiens
caatttctgtgggaataagcctcctggaatttgatagggattattttgaatgtatagatcaatttggggagaattgccattttaacaatattgagtctttcgatccataaatattgaatgtctcatcatttaaaaaaacttgaattttcttcaaagctttataatttttacagtacaagtcttgttcttatgttacctttatttgtatgtacttttttaatgctattgtgaatgtgtctcttaattttacttccagattgtttattgcttatagaaatataattgatttttatatattgatcttgtattatatcctgtgaactagatgtgctttttaaaaattagttctaatagtttttttgtggactctttggggttttctatatacaggatcatgtcatcttcaaacaaagacagttttaccactttctttacaaaccgaatgtcttttatttgtttttcttgggtggttagagcttccagtgctgtgctgaatagaggagatgagagtggacatctgtgccttttaccctgtcttagaggaaaagaatttggtctttcaccaatatgtattatattcactgtaggttttttgcacatgttaccaggttctattctaaggttgctgagactttttatcttgaatgcacattggattttgtcaaatgttttctctgtacctgttgagatgttcatttggtttttattctgtattaatatgatgcattactttaattgatttttagctgttaaaacctcacatttctggggtaattaaaaaagatggcttatcatctttttttatatgttgttgaatttggttcactaatattttattgaggatttttgcatctgtgtttgtgagagatactggtttgtagttttcctttctggtaataatttgtctcgctttgctatcagggtgttattgcatcccataatgagtgggaatattctagaatgagatgtgagtaatattcttaaatctacttcttatacttctcggaagaatttgtggagtattaatattatttcctccttcagtgtttgatgaaattccccagtgaaggaatctgagcctggacttttctttgtgggaacatattttaaaagctcatttaatttttgtacttgctgtagatgtattgagattttctattccttctttagtcagttttggtcattcgtgactttttaggaatttgtctatttaagttgttgaatttgttggcgtaaagttgttaatatttctttgtctttctaatctgtgaggggtcagtggtaatcatctctctttcattcctgatttttgtggttttctttctctctctctttgccaagggtttgccaattttgtttttaaagaaccaccttttaatttttcctctgttgtttttctgttttacatttctttaatttctcctgtcatctttattttcttcattctgttttcccttgatatggtttagtcttctgttttctacattttaaaggtgaattcttagattattgatttgagatttttttctttaatataggaatgttaacactatacgtttttttctaagtcttgtgttagctgcatctcatacacttggacatgagttgtatttctattattcagattaaaatacttgctcattcccccttgtaattttaaaaaaatttt

SEQ ID NO: 41362 - DNA, 1047 bp, Homo sapiens
gtctaattcatttatatttatttatatttaatgtaattattaagatttaagtataccttttcattatatgttttctataaatgttatatattttttgttccttcattcctccatgactgctttcttttgtgttaaatggattcttttcttaaatgcatcattcttgttgtttcttttagtatatattttgagttactttcttagtggttatcctggggatcataacaaataacttaaaattcagttcaggttaatcctggcataatttcaaacatacacagaattttttctcacttgcatgctttttttgccttataaattatgtatttatatgttataagcctatcaacaaagttttataattattgctttatacagttgccttttaaaacaaataggagaaaagcgttctcaaaaacaattatattgtattttatatttacctatttaattgcctttattggtactttcaaatttttttcatatggatttgaattacttcagctggaagtaatcctttagtgtttcttgtagagcaattctgctggtgacaaattctctcattttttctttatatgggaatattttaattttcgtttttgaaggatagttttgctggatatataatttttggttcgtagtcttttctttcccccccccagcgctttgaatatgtcacatcagtgccttctggtctttatggtttctaacaagaagtcagctgttaatcttatagaggattccctgtaatatgcaagtcattttttctgttgttttacagattctgtctttgaacattttgtcttaatgtgtgtttgactctttgagttaccctatttggagttcattgaacttcttggatatgtaatttaatgtttctcatcaaactagacatttttggctatcatttctgttgtagtgtttttgcggtttttaaaaatttgttcttagggtttttatctctgcttacattacccacctcttcttgcatgttttacacttttttccattagagcttttggcatattaatcatagttatgaatttc

SEQ ID NO: 41363 - DNA, 1024 bp, Homo sapiens
tattcttttcctcagaccacataatctcaatgtatctttgaatttgctgggtcttttttctgctcatttttgtcagctgtggactccttacatgaatatttcctttcagttatcatacctttcaattccagagttttaattttgttcctttttgtgatgtctgtctctttcttgacattttttattttgtgagagttaaagaattaaaggaaagtatgagcatgatggtttcctttaaagtttacgtcttaagttcaacatctaggcttcatcagggacagcttctattgactccttttcctgtgtatggtctgtacattcctatatctttgcatgcttcatattttggttaaacactataaattttaaattatttaatgtgtaaactttggaagttcaaatttgttatccccccagagtatcatcctgttgataaggctgctgttacttcgtatagtgacttctctggactaatctcataaagtttattttcttcattgtgtggggacactgaaatctctgttgggtttgattagtggtcagttgatgattggacacaaatcccttttactaagtctcccatccttctgtgaggggctctgtatatgtgttgtgtatggctctttcctcggcttgtatatggcccggtacatgtgtgtggagttccagatacccactgtggacatctcatttcacaggtctcccatttaaatttttggctggactcttggctgcccaactggtatggccgacttaatagctgtggtgttaatcaattgcagctgattgtttttgacaaatgccctagggtagagggcttctcctgcttggtgagctctgcatgacatcaagtaatgataatgccttgtgaatggggcttccctgagagctgtgaagcaggtcagacagtgacagtgctccagagagggcgcttttggggaagtctgaactgggtctgctccctctggtggctacaggactacacattttcacattgttagggaggctgctggttcttagccta

SEQ ID NO: 41364 - DNA, 1047 bp, Homo sapiens
aaggataactaagaatttgtccttctcctcaaggagttcccacttttgtggcagagagggccttgaaaacaaatcatttaactgccacttactgagtgactagcacaggtgaggcatcctaccaggctctggagaaagagggaaatatagccctgctctcagcaaacacaggtggatgagaagggtataagcagggggctgggaagcagagagagagagaacctaaaaagacttaggcaaaggcgagtgtatgataaaatggagaacgccatagttcattctttcatttttttttttgaagtagagtcttgctgtcacccaggctggaatgcagtggtgcggtctcggcttactgccacatctgcctcccaggttcaagcaattcttgtgcctcagtctcctgagtagctgggactacagatatgtgccaccatgcctggccaattttttttttcataattttagtagagatggggtttcactatgttggccaggttgatcttgaactcctgacctcaagtgatatgcctgctgtggcctcccaaagtggctgggattacaggcagaagccatggtgcttggccagttcatcctttaattttggctctaataaattcactgtatgactaaaatgttactttttcttgatgttattattaatcctgtttaaaattagagcattggctttaattatttttaaatttagacactggttattatttctaaaggaagttataaacaaaatttcatacagcatgccatttgacaaattaatgaagaaatatttaatacatgtgagtatctcatttgttttgttattcaaggggattttagcttattgctttttgctttctgtatgttgaactgatattctttttgggcacctgtttgtataaacgtatcaatttgacctgtacttgaattaactgtttattttttatatgttggacagtactacaaattgctctatttatgaactgtatgtttttcttcaatatgcagtttggaatcctgctgttggaaccttatttgcttctgtatgctcac

SEQ ID NO: 41365 - DNA, 2495 bp, Homo sapiens
attcaatttcatgttggtgtttctacactcctttgcctcactgagatttcattaatcctcatatccttaatcgcctcccctttcccttatgatggtctgttttaagattctattatggttttttttttttttttggatgcctttgaggccatctgaacaatactcttggttaacctgagaatggattacaatctgatcacatacttactgctgtgtttgtgtctcgctgcctgtacagtcaggtggctgttctgcctcttcacccttggctgactttcacccatggactttgaagtgttactgcttctattttcatcaaattttatacaaattacaccgtttttccgcaaatgtacatttagtgaagtttgtttggctccagaatccagtccttttgcaggacaggagcagaggaaatggcagtgaaggagagggaagtccacgtaggaagaaatcccaagactggaggtggattggagacagcaacagaagagaagagcgttggggatggctctgagttgaagctaggtgactgttgacccagagaaagaagttgagaggagaaccacgctttgtatttaggtgggctgtggtggggtggaggggattgaggtgtggagtttgatttttgacattcttgtgtttgtgttggtaagacaccttgtggaactctcctagcagagtttaagcgaatgagcgtatatatttgatgaggtgtatatttgagagtgacagcacagaggtgatcataacaggagccactatttgttgagtgcatactagctacagtgataagtgcttcacagacatgctgtctgtgcttcaatgtcctcacctgtaaaagggatttaatagtaggattcttgtgagaatgaaatgaattgatatatataaagtccataacaatgtctggcacataataagtaatacttaagtgttatcataatcacattttaattcagtatccctttggaaagaggtattattgcaggttgaacatccctaatctgaaacattttgagcactgacatgacacctcaaagtggaaaattctacacctgacctcatttgatgggtcacagtcaaaacttcatttcgcgcacaacattattaaaaatatataaagttagcttcaggctgtgtgtaaggtgtttatgaaacaccttatgaattgaatttcatattagacctgtgtcccatcttcaagataccgcattatgtatatgcaaatattcaaaaatctgaaaatatcagaaatcaatcacttctggtttgagacgttttggacaaaggatactcaatttgtgtacacatcttatatgggggaagctgtgactggagcaatgtaactactctgccaaaggttgcataactcataagtggcaggtgaaatgatatctttttttttttttttttttttttttggagaaggagtcttgctctgtcgcctaggctggagtgcagtggcacgatctcagcttactgcaacctccgcctcccaggttcaagcagttctcttgcctcagccttctaagtagctggggttacaggcacacactaccatgcccaactaatttttgtattttcagtagagacaggctttcaccattttggccatgctggtctcgaactcctgacctcaggtgatccgcctgcctcggcctcccacggtgctgggattacatgtttgagctaccacgcccagcccaaaccatattcttaactctgcttgtctctcacctgcctttgtggaaataaacacctcaacagaggcttcatggtgtagaggaaagacaggacaaaatacctaacacacaaggaagctgttttgcttattaaatgaacaatatgcttttaaatcgtgtaagaagagctttgtaatgaaaatcatcattataagaaagaaaaacttacagaaaggtaggagtgaggcttggtatttgagctcctgcggaagaccaagagggagaagggaagatcagtgtagggcaaagcaaatccaagagagccgggaagataagaggaagaatcatgtagtttctgcatttacggacaaaagcgcttccaaaagtacataagggttgatgctatcaagtgctgcatggaggtcattgagagtgagaactaagaaaaggcagttggagtcacattttggtgttaaccagattaaatttccttttggagcaaaaacggttgactacacatacagttataagaatcaggaacatatgatccaataacatagatgaatcaggaactgaaatttggggtgtagatttattcctttgactttctctccctttttcagttcatgttttaccaatagagtattctggtagcagcactgtctgacatttgtcagcttaattagagatcagttacaaacttggctatcttatggatctgtgatacttcccagcaaatctgaaatgcaatacgggcactgacatgaaatgatgaaaaatatgctaattttaacctgaaaaagctcccta

SEQ ID NO: 41366 - DNA, 1045 bp, Homo sapiens
ggcatggcggtgggcacctgtaatcccagctactgggagggctgagacaggaggatcacttgaacccagggggcggtggttgccttgagctgagatcacaccactgcactccagggcaacagagcgaaacttcatctcaaacaaacaaataaataaataactaggaggctgtgcatggtggctcacacctgcactttgcgaggccatggtgggaggatcacttgaggccaggagtttgagacagccttggcaatgtagcaagatctgccatctctacaaaaaattaaaatatcagccagatgtggcacatgtttgtggtcccagctacttgggaggattgcttgagcccaggagttcaaagttgcagtgagcagtgattgcaccattgcacttaagcctgggtgatggatgagaccctatctctaaaaaataaaaagataacttgggctgctgagtggagaatggattgggagggggcaagggattaagtggagagagtatgttttgggctgggctgtagtggcagcagcagagatagctatgccttggaagacatatttttgcagaggtggaactgttaggatttgtatgccttatgggtgataggcagaaagaggaatcaaggactcctagaattttggcttgagcaagctaggcatagaggcaggaagagacaaggttggggtgcggaggaggaggagaaatttgaagggtcctagggcattttctgagacgagtggcctggagaatgtgacggaatggactgtttggcccagcccacggaggaggagagtgctgggttttagaaatggggcatctgagaaccctgacttctgtcatggtgcctggagtctaaagtggggagcagagcatccagcgaaggtgggtagtgtccgaaaatctggagaatgtttgtttctttggtatgttttagtttttttcttttacatgaatatctatagatcttccttgatcacaaaaaatgaagttggcaaatttatggaactgtgaaagtaataccttatgtttttgtgaaactttgaga

SEQ ID NO: 41367 - DNA, 2203 bp, Homo sapiens
acataatcgtaaggttgttcaaccatcaccactatcttgactgcagaacatttttatcaccccagaaagcaaccctgcgctcactagcaattcctcctactcctccattcccccagcccctggcaaccgctaatctacttgctgtattctggacatttttacaaatggagtcatataatgtgtgttttttttggtgtgattctcttctttcacttaaaataacattttaaagatgcatccatgttgtagcatgtgtcagatctccattcttgatggctgaaaaaatatttccgtgcacggatataccacattttattaatttatcagttgatgaacatgttggttgttttgacttttcggctattatgcataacactgctatgaacatttgtgtagcagtttttttgtggacacattttctttcttttggttatacacataggagtgtaattgctgggttttgttaacttgatttttatcttttgaggttgtatccaactttatatcatttatttatcacagtagctatgaaaggaacctgaagtactgaaggatttgatgggctagaggaaaaagtgcatatgttacaaaaaatatttaaaatgaggttcattcatgcattggttaaaatagggcagacctggacacataaatgtgtcaggagaagtaaacaaaacgtgtaatacttatatagtggaagagtgtattgcaggtgtatgtgtgtagagaagtgtgtagagaagttatatctatatgtaatctcaacagaggtagataaaaaacaatgagaggtaggttaaatgagaagtagattaaaaaacaacggtgaaaaatgattaaaaaacaatgatgagtgaataagtgagttgataccatttatgtaagttaagaaaaccacaaagtaatactatgtattgctcatagatggaaatgcccatatacacacacagaagtacaaaaaggattggaaggatacccacaagtccatgatagtagttgctttgtatccctacttctgagctgcaaacccatgccagttttccttaccatatatttatatataaattatatataaatgtatatatatatattcatatacaaatcatttctgttacatgactgtacatttcttcggagtagggactatgttttcttcaccaatttccattgcctagcacttaagtgtgaacacatatttttgaatgactaactgaatgaattaaatgattttgggaacaagatagggcaggactaatgaataagccactctcccccatcctgctcattgtctctgctccctaccttcatattctgttagtgttgtcataatatgaggcttgcaattaccagagcagttccatatgacacgacatgctaataaagcagatggtgtgtgcaaataagcaggataaaagaggtctttgctgcaaaagtcattgctgtctcctttaaagtatgaagtattttatgatttctcagtagattttatcttcattgtcaaggtaatgattatggatcgtataaatctttatggctttgttgtatcaagtgtcaaattacacagcttaggtagttgtagaaagaaagatgtctgtgatcagattaggaagtcatattactaaaagtttttgccgttcagggaggagttggtctcacttttttgtgttcagatagtggagaactgtgctcccgttctagggccctccctcctttctctttattaacttctccccacgggagaaagaatggcaaattggaaagctcggggcttgacattaatatgagtgaagtcactgtatttccacatggctttcgttctttttttttttttttttgcgggggaaacaaggggtggaggcctgcagaaaggtgccagctatcctctactttttgcctgctgtcttcaggcaataaggagattagggaggtgttcccctggcaggcctaatctggtctatacttcttctagtccagcctttgcctggacaggtaaatcagttcaggtttgctctgtgaacctggccaccttcaggtctggaagaagaacataggaagccctgctgacgtcaggcttaagctgtattctccagcacatttaccagaagcctctggggttgtgtgtgaccatgcctcgaataaagcccatgttctgatccccatctgtctgtcagatgttatttgtggatgttatttgtggttatgc

SEQ ID NO: 41368 - DNA, 1055 bp, Homo sapiens
aagtgaaattagtggagaatggacattttctacattgcgtgagcgtctacagctagagagtatctctaggcagtgaggtagctttctgttggctcttagatgggatcacattctttgggcttgacagtggatgttatgtcaaaagtcataactcctctgatttagagatgacatttagagtactgtaggtttatgagaacctgctcttaaccttaaataacagagctgctgccagggctgctgccttccttcctggtttttgggtgcttgagactcttggaaagtgggccagatgcagtggctcctatctgtaatcccagcacttctggaggcttaggcgggcatatagcttcagtccaggagttgtgagattcttggaaatgtaaagcatagttgatgagagggggaattaaatagcagaccggatggttctcaaaataaaataggaaattagaagatatgaggccttaataacaacaacagcaaaaatgagatgtatctatctataatgagatttctgaatgtcataatacagagacaattctgtatccaattagaataaaacttgttaccttcaagtggaatgaatcaaatgcaataattctatacccagccaaactactcttacataggtggtcagaggatcaatatttaaaaacctgctattattctaactttgaatcctttcaggaaaaaaaaaatttagaaaatacttaaggcattggtgaagtcaagagtgaaaacctcataggaaagaatatgtggcttatatgcaaccgattaacttgagtcaaatctaaataaatgttagtaggttgtgaagctaagtggattcattgacatgaaaaatactatagaatataaccaacttttcttaatactggaagtccttttgaaaaatcaaattattgctgggtgtggtggctcatgcctgtaaccctagtaacttgggaggctgagggaggaggattgcttgagctcagaagttcgagaccagcctgggcaacatagcaagaccccatcacacacacccagaaaacatcaaattatttctt

SEQ ID NO: 41369 - DNA, 1047 bp, Homo sapiens
tttagttttgcttttgatatctgaatggattaggaaaattccttccaagaaaccagagaccagaagatcagacaaataccatatcagtttctctgctttgaaaattataattcaaccttgtaaaatttttctaacgttgtgttctctgtaaataacacagagtaaaaataagtcaaaccatttgttttttcctctaaatgttctgaacattaaacaaatggttcttggcaaacacatactattttttttttttttttgagatgagtctctattgcccaggctggagtgcagtggtacaatcttgactcactgcaacctccgccttccaggttcaagcgatcctcctacctcaaactcccaaatagttcggactacaggtgcgcgccaccatgcctagctaatttttgtatttttagtagagatggggtttcaccatgtttgccaggctggtctcaaactcgtgacctcaggtgatctgcctgccttggcctgcctaagtgctgggattataggcgtgagccaccatgcccggccatactaatttaattttaggaatgttgtattatagttcattttgaacaaattgtaagaagattattttgtgcccatatgtgtgataatcagaatagcttgatgtagatatttggtatctttttagaataattatgtttagataaatcttttctgtggaaacatattcctaaacatttaagcctagttataccaccctcaaatataagaagtttatgaactttgtgggctgattcaggaaatcttttcacactgataaaaacaggagactttaatattattttgggaagaaaaatgagaaatttgaagatatgtctcttatgaatcttgctgcatcagtttgttttctgctgatagtctggttgatgcacaatttagttttcaaagaatttctcttcaaaaataccggctaggcacagtgttcacaccggtaatcccagcactttgggaggcagaggtaggaggatcgcttgaggccgggagttcgagaccagcctgaacaatgtaaggagactc

SEQ ID NO: 41370 - DNA, 1034 bp, Homo sapiens
aagacagtccatgaagtggtgagtgggagaatcaaacttttgtggtaatcttttattgtaatctactttcagctcagagaagcagcatagcctggtggactaagggaggatggggagtttggagctctgagatatgaactgttttgcaatgactagttttgtgaccttgagaaaggaccttaacctctgtctatgtcttcatatgtaaaatgggatctacctgatagaaacataggtgcattcatatgtgagcaaactgaataattagatctcacataaatcaggagtgattttttttttaaatggctgaagcctgcggtttataaaaagattctccctagaattcctttaagacctaaccttttctcaggggtgtttaaactgtgattaacaaatgttaaattatacatcccagtttacaaaatatacccgttgaatagagtgagactaacatgactttttgtctcataaaattatgacaataactcagtcagtctgtgtgaaatactttgtaaacagagctttgcaggctgcagtaaaaaaaaaaaaatatatatatgtattttatatttaaaaaatatatatttttatatatatatatatccccatacctgaagattttggggtgaactttttccaggttaagaatgacattagtgccaactgtgctgtattttggctatcgtgatgacattagtatcatcaaattggtcgtggcattgggacactggcagcatgtcatcctgccccagtcaagaatgactgtaggcagtttcagtttatctgttgctactagaattttgatgtagcagtgtcaaaaggttgatttgtactatggcaatcttattcctagatgtgaattctccagggggcaaaatatcctaaaagctaacatgtaaacaagctcaaaggattaatgtagtaggaagaaatagtagtttgttatatattcatgttgaatttaggtaactattttagttatttaaaagattactaccgaagggaagaaacatattttgctaggtttcgcatag

SEQ ID NO: 41371 - DNA, 2024 bp, Homo sapiens
agtactcttattaatgttcttggctatgaaccatgtaatatttttctcttatttttatcgtgtaatattttgaaggtgactgaaccttaaaagaagtaattgccactaaatcgtgaagaatgtttaaattagaacagattctttgtcctcactgtcttcccctttccctgaaatctgtagtctagagttgtgaataagagccagaagaatgttaaactgccttttaaaaactcgtctaccctccccaagaacctacatagacaatagaatgttctgtaatgaaagtgtatctttacctcattatttatttattttattgagcaaaaaatgtagaacatagaatgtctaacggattagtcacaataaaaaaaatttcctgggttatatatgtaaggggcagcggctgctcctctatcagtccaggagagcctggtctgatttcacattgcttttctttccacatgatctcatgacactaaaagacgattaatacatcctttaaaaatcaatacgggacattttactgtagtccttcacctttattgttcagtacccttcaggggtgaaaggagatattccaatgcaaaaaatatgtctgaaaacctgagtggtaagtaataaaagtttttttttctcttaaaaagtcttataacattgttatttcccagatttgaggggtgggccttggggtggaattaaaaaatcagtgtaatcatttgtaaggacaaaatgcgagtttctataaagaatgttttagcataatgtcactaatgttttgcagtgtgtagagagcaaactttaaaaaaagatgtgaaaatttacaaaccagtaatcctctatttcatgtgccagcagtcaaaattacgtgtgatcggctgggtgcagtggctcacacttgtaatctcagagctttgggaagctgaggtgggaagattgcttgaggtcaggagtttgagatcagcctgggcaacagcaagaccccttctctacaaaaaataaagttagctggatgtgatggtgcgcgcctgtagtcccacctatttcagggggcagggctaggagtttcaggtttcagtgagctgtgatcgtgccactgcactccagcctgggtgacagagtcggatcctgtctctgccaaaaaattaataatactaaaaaaattagatatgattaaggataccaaaaaattattcagataccttagtggaagctttggctgaatagaagttccatcttttgtagtactgaaaccaagtgaagggattacgtagttgacatctctgaaagagagaacgcagtggtaatgagaatactccccctacgtttgtgtatgagccttggcagtttcttttacactctctcatttaatcctctaagacctgagacattgttggggcaagtggaattattctgcattttatagatgaagaaatggacttggaataattaagttatttacagctaacccgcaccccagatctcttgacctagccccctgcatcctgcctttgccccagagtgcttttaatgttctgcattgcatggtctttttgttcattttattttatgtatcatagttaatactaaactgaacgtttgctgctaagacctatattattttatattcccaatgaatatgacttctgcataaaaacatttaactagggtaatcattttatagtatgtgcctgttgtctctgctatatctatcaccttcatgtgaagacagagaaaatagaatatgctgtgtattcgaaataatttcttctttacaatgatgtattctagattctaacatttacatatgagagaagcttcataaatgttacgttttctgtggccgctatttctgtcttatctgtgctgtctacacagtgaggacagctgcagagacactgccagtctcatgaagtgtccattgtgaaggcccatgtgtcagtgctgctgatggcatgcaggagttggtcagtaggatggttaagaacatgggctctggagtggacggtgtctggcttcaatctggg

SEQ ID NO: 41372 - DNA, 1029 bp, Homo sapiens
tattctgtataattggatcatatgtatgtgcacatgtgttcatatttatcgatatgtgagagatgatgtatagagtttggtaatagtgaggaagacctcttaccccaaactaaggtgactggttttgtcttgaaagtgggttatagtaagtaggggagtggtctcttcactgctgtttagaaggacttctctggacaaatgtgtggatgaggtattattaagcccaggatcttgaagatgagtagaatggtagcataataatctgggtgagaaatgtttggggcagataataaagtgggatgtttgagagagattttaagaagtagcagtgctagcatttgggatataaaggaagggaaggggtctaggatgatacgtagatttctagtttggaacaagtagacttgcagggatttggtttatgaaaacgaggggaggaatgagtttgggaatgggaagctagtgagttctgttttagacttaaatgtttggaggcttttagggttttgtggggacaaatgaagatctttattggttggctgaatagatctgaccttagctcatgtgaaaagagttggagattttgacattatcagtgtatataggtggtattttagtcatgggagtatatgaaattgcatagatggaataattgcatgaagagagaagagggatgaagatggagacatctaagatgtaggcaaaggatcacaagaagacactgagaaggaatggcaggagacataggaagaaaataggaagagaggagttttgcggaagccaaaggaggagaaagtttcataaaggaaacgatagtcattgcagtcagatggcacagagatttcacatcagctcatcctcaaacctgtctcctgggtttggcaataaagaggtcatcagtggctcaggcaagagaatgggaggcaaagtgagaggagtttataggttggctgctaagtggatgatacagtagctgggagatgatgtagggctgagcgagggtgtgggtatgtaagatgaacaagacgt

SEQ ID NO: 41373 - DNA, 1075 bp, Homo sapiens
agtgaaagacttagagaagtgtatgcaggtggtgttgggcaattgcaaagagactagcctccaaatgggagtgttagcatagcacgcaggcttctctccttatgagctctgactccaatattgactcttttttgtatacagaaaacataatctgttcagaactcattacagtgaaggaacttgtattttaaaaacagagatagagaactaaatttgtattgagttaaattgtataaattctttaaggatttcaagggtaagccgactcacatgattaaagtaagttatgagcatttttgtttatctgttcagtgtgtttggggcttttgtcgtgtcagctttctttaggacaggtagaattttatctaacctcttaagaacaagtggttattttctcaaggactctaggatggtgctagataccccagattcttaggtgctggctttatgtgttgcctttgctaagcacttggttgctttctgccactctttggaagcaggtgattgatactagaaactgacaggttgtgagtgatgtacccttccattaaaaacagatatactaatttgcttttcaattgtagagagcctcttactataaacatccctgtaataaaggtaaccttataattagtatgtcaaaaaagcaagaaagttatgatgaacatgcattaataacaaatcaaaacctttactaataaaatgtcacattgagaggacttaattttgtgtacactttcatactaatataaggcactcttgctaatagtgaaagatggaaatatttgccaaccagctatgttatagaagaacttcctacaatattgtcctatgtacggtgacatttagaattcaaggaaatatacatagtcattgactttgtgtggaatttccctcccctcctccaccaccctgttagaaatccccgctgttgactgtttccagaagtcttgcagggtgttgtgataagagtccaattcctcttcccattcctgcctaggtcatctctttcttccctccctccttttgttctgtgattctttgttttatttttcaccacagaacatacttcatt

SEQ ID NO: 41374 - DNA, 1069 bp, Homo sapiens
cttttttacttatataaacttggacccgagatcaattggttgcctgcttactcattctataaaaatttggaggcaccatacagtaagaatacataaaaataatttacatcaaggaaaaccaggtccacaaataaaatcgatacagctagattatgaaaatcaactcactttctagagtttcatctttatcattcattttaatgttacgttttttcagttttcccatttaaaaatgaacttttattaatgcatttcgattttttcgtgttccccaagatttgtgtgtgtgtgtgtgtgtgtgtgtgtgtgtgtgtgctgtgtacatttaagtctatgcaattctgttacaggtgtgggtttgtgtttccacagtcaagatacaaaatagttgcattactgcaagagtcccttgggttgtcctttcataactatcccttcccaatctctgatcagctgcaataacacatttgttttccgtttctataatacggtatgtaaccttttgggatttgctgctttactcagcataattctcttggaaataatctgatttgttgtgtttatcaacagttaattcatttttattgctcaggagtatttcatgatatggaatataccatggtttgactcttagccctttggaggacatctaggttactttcagttgttgagctgctgtgaaaatttccatgcaggtttttgtgcagacatcactttccatttctctaggatctgtgcccaagtgtgtaattgctgggttgtatagtaattgtgttcagtattataagaaactgccaaactattttccagagtgactgtaccattttactatttcaccagtgcttgagtggtaccgtttctctgtatccttgcctgcatttggtgttatccttatttttttattttagatattctgataggtatgcagtgatatcttgtggctttaattcacatttttgtaatggctactggtgttggatatcatatgatatctgttcgtgtcatttgtccattttgtaattggatttttgttttttttttactgttgagttttaaaaatatatattct

SEQ ID NO: 41375 - DNA, 1052 bp, Homo sapiens
tgttcattcctcaagggtgatttcactgatgtagaattcatggttgacagtccttttctttcagcacttgaaaaatgtgttgaaaaccttctggtctccatggtttctgttgagaagtctgctattatttgaattgttattcctctataagtacagtgttgtttttctcactgatttcaagatctttttcttcagtttttattaatttgtcttgctatgtttttccttgagtttattttgtttgggcttcactcagcttcttgaatctgtagatttatgtcttttgctaaatttgggaaatatttagccatcatttctttaaatattctttcagccccagcaactttctcctctgcttttgaagctctactgacataaatgttggatcttttgcttttgtattacaggctctgaggttcagtcatttttctcccagtctgttttctctctgttgttgctggtcaattccattgctctatcttcaagttcactgattttatgctttgttatctgcattctcttattgagctcattcagtgagtttatctttcagttattgtatttttcagttctttaactttcatttgtttttaaaaaaataacttctagttctagatttttttgttttatttttttccgagagaatacatagttgcttgttgatgtatttttgtgatggctgctttaaaatccttgtcagataattccaacatatgtctcttcttggtgctggcatcagctgctagctttttctcactcaagttgtgattcccctaggtttggttgtgatgtgtgactttgaagtgtctcttggacattttggctgttatgttaggagactcttggtcctacttaaacctgttattttagctgacagcccccttagttaggtttagcactcaggttctggcctgcttttgtgggtggttccaatgagacctcaattttagagcgtttgtcttgctgtttgggtgtcttttgttcatctgctgccgataggactcccccgatccttgcaggtgcctctcaagggtgcacaaggtgcttccgca

SEQ ID NO: 41376 - DNA, 1030 bp, Homo sapiens
ctgaagttggagaaatgctgcatgctcacttggctaacaaggtgaacattactctgtcaccacatttttatctagtatgcgtcctaatctcaaggatccagctaagttgtgtgttgtcagttggagacattagcttgggcagtaagctcagccttgcactgcttctggcaggtttactcatcttcatccactcttatctcgatatgaggatatctgttttttgagcatgttccatatccatgtttcatgtgaaattgcttgtcattcttgcttatcacttaaaataataactggctcccttcttttgtagcatttgctaatagtggcagaactatttatacgattatgataatctgtcaagaggattatgcaaagtatctccccccaccccttctctaaagcagagttaaattgaacactgtaaaggacattttcataaccaaggatttttaccaattatttactgtggatttaaattgatactgaatgactggaggcattgatttttaaagctggaaatatttacaaaccatccaattctttttccttagtattttgtctctagttacttcgaaatctctctcctctctctctctacacacacacacacacacacacacacacacacacacacacacacacacacagagatgtaaaacatacacatagaaagactttaaggaaagacatcaaaatggtaaaagtcattatacctggttggttgaattgaagttattttatacttctttatacttgctttcttcatggggaaagtatttttatgatcaataaaaatatttttctgtaatatgtatgtactactttacaatattaaagcactttcacatttttccaaaaattaaaagcacagtgaaatttgcacattgagaaacatttggagccaattaaatgccacttatgtttctctaaaaaaaaggaaactacttttattcatgtaattaagagccccactcatgaacattaaagaattgttgcccactgtacttttggtatatgtagaaatataaaa

SEQ ID NO: 41377 - DNA, 1065 bp, Homo sapiens
aagtatgtaattttaccatgatataaagctgtgattgtcagtaagtggtattaggaatctagattatttttattagaacttatttctttctgcaaaatcattatcatctcctgatattgtaaattgggttatttcacaccattatttttaatatgtgttaatcctcaaactacaggtacttaaaaccttgctaattaaggagtcattaataaagttagcaatatgagccgtcagtttcgattcttcacaccatttagacgcaattcaattttgcgtatttacactatgttttcagtttggctcagatgtttgaagtaagtcaagagtaagaagtgttgtcaacttcagatccataggccagcttagcttgttttcaagatgaaggactgataacattgtaaagaaacagagaaaatactgcttttcttagccaagaacagagtaagctttgtatggttttactttttatagtctactcggcttttctgttcttaaaagttgcctggttatagtagtttaaaacactctttgggactttatccattgaacttcaatgttctctgaaacaaatattgaagtgttttgcatttgattttgaggaaaggtttattttccttttgaaaataatcaaactctttaagttgttcctaaccatagtcacttttacttgaaggatgcattatagtcttgagcattttttcacttttgtaatcggtatgaccctcttgtgtttttgctgatgagatggtagcagtgctgtggtattgtttgcaggtcctttcttatcctttatctgtgtctccttcccactgtgttgtgggttggtaaatgcatagttccctccattactttttcatggctgaagggattgtaaatattgttttgcatttctagtttttttagatgtccatagaattccatctttagccatagtgcttttataattttgtaatacctttgactagctggggagggggtatagataacagtttagtttccacatattactcattttgtgcaattttattgtgcttctgatatatgcccagtatgctattaggtgct

SEQ ID NO: 41378 - DNA, 1036 bp, Homo sapiens
taatcatttccttgtgaatatttctgtctctaaatttttatcttattgcaatccctgcaccactacaatgcgggattttaacaagtggaacagatatccttgttttcttcttcattttaatggatgcttctaatattttaccattaaatgtaatattttctctaaatttttgatatataccttttatcagaatttgctaagcatttttgttaggaatgggtgttcagtactattagatgatatttatttcagtctctgatagttacatgatgtttctcctttaatacatgactatagtaaattcattggaacatttcttttttctcctctttatcattaaaatgtttatatatacgttggataagctctacatggccataatacttgtctaacattttaaaatttatttttagtttttaactaatacataatagttggacatatttatggggtacatgtgatattttgatatacgcatatgatgtgtaataaatcagggtaattgggatatctgtcacctcaaacatttatcatttctgtgtgttggggatactccaaatattctcttgcagctatttaagaaatgccttacttcagtatatgtgaggggttgattccagggtcccctgtataaccaaaatcgaagcatgctccagtccacaggtggccctgccaaacccacggatacaaaatttcaccttctgtatccatgaattcacatccctccaatactgtacagttttgtaggatttgaactgcatgggtccatgtatacacacattttttttcaaccaaacatagatcgaaaatacatattcactggatgcgaaacctacatatatgggggctgacttgttgaatatgaggttccacaaggccgacttcgggacatgagtgtgtgaggatttcggtaaacatgagggtcctggaactagttccccatgtagaccgaggaacggctatattttcagtttggttggaaaaatatccttgtataagtggatcctggcagttcaaaccagagttgttcaaggat

SEQ ID NO: 41379 - DNA, 1022 bp, Homo sapiens
tgcttagcttttaatgttaattaaaattatatggagttaaattttaaatctttaatatctgaggttgttttcttttccatttctattgtactttatttggatcttctttcttttttcttagttagacttggcaaaacttagccagttttatgggtcatttcaaagaacctgggtttcaaatgtgctggtatttttgtttggttttctaattcatttctttttttatgtctaataatttattctactttcctgtttggttttgtttttacccccctaattttgtaagttataaactaagtttacttattttcaatctcttgtgttttctggtaaatgcattttatgctatgattttttctgaccctgctgtggctgtttcccagtctttattttgtgcgctttatttgttatgtatgtatgatgaaaatggaaatttttcttcagtttttttttcttcatcccaaagcacaagtaaggcgttaaatttcaataggtagatagatgtagagatagtagatttttagccacgttttaattttatcctattacatttattttaaaagatttggaagacttgtatttttttaatttgtaaatatatccttttgtcctaaaacttagataatttttgtgaacattccacatgtttgataagagggtgcattactctctgcctctcttaactgtcttattctctaccagtttatcttatataaatattaaaactattattacatgtgtaaaggttatatttgctttgctaagattgtattagctatctttttatggtctggaacagaggttggcaattttttcttgtaatgggccggatggcttctgtcaaaaccactcagctcgccattgtgttgtgaaagtcgccttacacaatatgtaaatgcaagtgcagctctgttccaataaaattttatttacaaaaacatgtggcaggctagaattggcccactggtcttagtgtgccagctcctggtcagcataagccttatgacactctgaaatttaga

SEQ ID NO: 41380 - DNA, 1075 bp, Homo sapiens
taatgaaaggtgcatatctggagatagatggaagtgtaactcaagatgtgattagctacccagtttgtttttattaaaatgttatttttttctgcatatttgtaattcagggaaagtttctaatgtgaaaaataaagtagcttttcttaaggcaacgtataaaaaataattggtttaacagcattgtgtgaatacagatgagatggtcctattaaaatttgatcacaaagtatacatggtaaatgcagcaagattcatgctaactaattactatttcaagtttggagtaaaatgctgaattatgggatgctgtaatgtcactaatgagtcctgtcatggagaaatgatattgccaattacacataaaatagtcaaaggctaatacatttggagaattgtcaagatgggtttttttttcccctcgtgcttactggttatgtgtttgcatttttgttgagagaatacacagaaatgatctactgtcacttgctttcaagctggaattattctcttcatatttaggcgtaggtaccaattaagtgaaaagaaatctgtcttaagtgaaactatggactactagtatagtgtatcttgtagctgtttaatgttgtaactgctaggttctttactttgcatccaggtaatgtaatgtgaatgatggattattaagttcttttcataggaaataggcatattttaagttaatagtccttatcactgataccaattagccgaagagaaatgaattccctggatttacatttcttaatagttctttcaggattgctttgttacttttgaggaaggtgtatgaaatttggcctaggcactgtatccggtgtgaaataaatttatgcattcaataagtatttattgagtgcctgtgatatgccagtcattcctgtgttctgtatatcattttaaagattaccattcgttttcttctgatatttctttaaacatcttattttttgtgtcaagaacttaccatatagaattctgtgacttcccgccacttccatttagctttatatcaaggatagaattcagtatgaacacatgaagacctgcatgc

SEQ ID NO: 41381 - DNA, 1191 bp, Homo sapiens
ctaaaacattgaaagtcttgagcatgcagattaaagatctgggcatattatttcattgcagggtgatctgcttgagctcttttcttggggtaacttttgtcagtatcttttcttagtatctttagagaattcctcttggactgattagattccttagggaagactccttcagttttctgcttggctattaactgtttttactattcttccctctgttttctccaacttgctctttccaacttgctatgggctagggaatcaggaaaaagaaaaaaaaaaactgatcaggacagtttcaaagtagaacagttaggttccgagtgacagcctaagggattggcctgtgcgtaaaatgctttaatgtgtggaatttatgacattgattttgatgacccaggagcatgtttttatttcgtgctcctgattatattgtggaaaggtgatttagtcatacaacagaattctaagtagatgaagtattaatgcaaactgttatagagtatttgtttttcttaatccatttcatttgatccactgtgtgtacttttccagttgattataaattgatttgttcattaatttgttctagttactggtccataattatcataatgtttttattttttgttgaagtatgtgcagtattttggactttttccagttatgatggactatcagtatgttctcacaagtaatgggacactgtattttacaaatatttattactcttgatgttctctaagattctgtattatgagctcttgttgatttacagacatttggaaatgtaactatttgattcttattcttggttaatgttttatcctcctagaccaaaggtgtttattctttagaactttatatgtttgttttaacagctggatttctagtgataggcaaacttttaacaaaaattccaattacatataagcttactgccatttgatttctataattaaaaatattaatattattagtggggtttagtcagtcactatattagacaaacgtgtgagttagaaattcaggtgtacacaaggattattaattggggcttcttcaaagaattttgacattagtaaaatttttcttttttttcaaaatgtttcaaagatttttttttaattaattaattaatttatttttagacaaagtcttgcttaaagtcttgctcttggccaccaggctgga

SEQ ID NO: 41382 - DNA, 1028 bp, Homo sapiens
ctgccaacatgtgacctcaggcaaataccgttacttttctgtgtgtgtttcctcagttgtaagacagggtaatgataatacacaccttcttagaggtaatgtctgtaaagcaattaaagggtgcctggcacgtgataattgctatgtaggggcttattaaatacaaccacaatgtttggggccgttgtgttacctccattttacagttcccaaagtgagacccaaatagctgagtgttacgaagtgtccctccagtagcagagctggtctgtctgtctctgggcccctcttcctcaactgtgcttacctgcatcttcactcaacacttaacctctgtttaatgtcacagggcaggctcagagagcagcagccagacatgggtgttttctaccttcggccctgcagaggatttctgtaagaaaagcagcatgacagagagagccccccaggacatacagaaaatgagtacttagagtctaaattatagagaatggaatgttaagtcagtggttctcagttcagactgcacgttagaatcacctagtgggcttttaaaatatacagatgccagggcttcaccccagactcattaaatgaaggtctccgagtcatgaataacatcggtgggtgggggccaaggactttccagagctccccaggtagttcagatatgcagccatggttgacaaccattgacttagaactgggagggggctcccttattctcttgttcctccagtgtttcctaagcgtcgaccttatcaaaagtaggtctgacagtgtgttcccagtgcctggacctggatattttttacttcagctttaattcaaaccattatgtgctgctagtcactgtggtgtgggagcagcagtgcacaaggtggtgaggaagccagcctgcctcaaggagtttaacatttcctaggaaagcagtgtctgaatacttagatgattctataactgacttgcacagacgttctgctgtcacagtaggtattactgaataatgtggctgctccaagtttttt

SEQ ID NO: 41383 - DNA, 1761 bp, Homo sapiens
agtatttaccaattattttaaaaatcctttattatgaaaataagtcactgtggacagttaaagcataaaaagtttaaagaagcaaaaaataagcatacaaaatcaaccattattttaccattcttaggcagccactgttttttttgttttttgtttttttttaactttttagagcaattttaggttcacagcaaaattgagtagctggtacactgatatctcgtatgtctcctgcccctgcacgtgcacagcctcctccatgatcaccatcccccaccggagtggtatgttgcaaccattgatgagcctgtattgacaccaggatcacctgaagtccatactttacattagaattcactcttgatattgtacattctctgggtgtgggtgaatttatgaggtgtgtattcatcatcacagtttcctacagagtcctttcactgcccttaaaatcctctgacctctgcatagttatctcttccctctaacccctggcaaccacacgtcttttaactgtctctgtagttttgccttttgcagaatgtcgtatcattgggatcatacagaatatagacttttcagactgataactttcacatagtaatatttattgtttcctccctgtgttttcatagctcatttgtttgataactcacttgttttcagtgctgagtaatattccattgtgtggctatatcaaagtttatgtattcacctaatgaagaatatcttggttgcttccaagttttcgcaattatgaataaaactggcataaacatctgtgtgcaggtttttgtatgtggaaataagttttccatttctttgggtgaataccaaggagtgtggatcatatggtacgggtatgtttcgttttgtaagaagccaccaggctgtcctcagaagtgactgtaacattttacatccccagcagcaatgactgagaattcccattgctccgcatcctctttaccatttggtgttgtctggattttggccattctagtgatatgttgttgttgatgaagtatctattaaggtctttggctcattttttaattggttgtttgaagcaactacttttaaaggtattatttccttcctgtctttttatttttatgcttttttatgtgagtggttgagatttggggtaaatattccatctgttttttttccatttaacgtcacgatgaaatctttttctgttttgttaaagtgcattatgtcattgtaacaggtatgtaattataatgagatttgacattcacctattcttagaaattttggttctttctacctttgcaaaattataaacaatattgccattgagatgattgtgcctgaaaacctcccctgtgttttgtgttgttttcttagagcatatcctagaagctaagtgactggtttggagaacagagacatttttgagggtctttaaacatattatgagattactttccaatgtttatattaataaaaatactagcagctaacagttactgagctctatgtctgtgacagacactagatttagtctttcagatgtttttcagttctcccagcaccactgtgggtggacttaggacagttcttgttttatgggtggagaaactgaagcctagaaagatggtaaaagtggccaataagagacagtaataatgacagagtcgaataaagagatatgctatatagaggaagactattttttaaatttcggttattctcaagttgatttacagtgttaacagagttccaaacaaaatc

SEQ ID NO: 41384 - DNA, 1103 bp, Homo sapiens
tttagtaaaaaggatgttagtatacatatattgaatgcaaatattgtgtgtataaactagaaagccatgcaagagaatattaatagtactgatgaactctggatattgggattaggagtgattttatttgtgcatatgtttttctattttacagtgctttttcattgagcacattctgcatttgggaaagaaaggttatttaaagttgttcttattaaagttactgcatttaattctgtttttgccattgtgtcaggcaagtaaaaatgctagatatcaagttaccagaatcttctctggagcccttcctctgggggttacatgtatatgctgcctgtcttttggaatagtgatttgtaagtgacatggtttaagggtttggaccaacaggttcatagtttcaccctgctttcttttagagctgctggataaattctgtccggtttcaatgatttatctatatttaggttgtcaacctaggtaagaacatcctgtgcagctctctgtttgctctattgagtccttgtatggttatcttgttagtatagtgctaatgataacaggctgtgtgtaaaagctctctgtacacagctgtcgaactctgctgtgtttggtggtgcagactacaccctgaatcctgttaaagaaaacctttgagatcataacaggatgtttggaagttttaatataaatctcttacttatatcaaaagcagttgaagcaaatagtcttaaaatatagtagaattctaatgtatctgacctgcttccttaagaattcagtttggctatggtaatctctgcaatcttctccttaaataaaaactgaaacattaagtctgccccttttctttaatccctgttcaagagggtatgtcgatacttgaacccttttaccagcatttaaagaaccagctgctgctggcatagcatgtctgagattgcattttgtcctgcctacctttttattagaccttgcacagccatatttgtgagtggattagtttcctgtttttgccataataaattaccacaaattgaccagtttaaaacaacactcatttatcatttcccagttttgtaggtcataagtctaggtaaggt

SEQ ID NO: 41385 - DNA, 1040 bp, Homo sapiens
acatgttcactttgagaagtctgttaggtagccagaaggaactgttgcacaggcatttcgatgtacaaatctggagttatactctgtagaggtccagattagaaaaaaaattggagggtcatcaatctaacaaaaggtttaaaaactgtgggaatgtactgggtgcagtgagtcacatctgtaatcccagcagaaatgaagatcatgctgtaagagagtgggattacaattgacctccccatgtctcaggttccacatgcacagattcaaccaattgtggatcagaaataggtggaaaaaaaccaatacaacaatagaaataatacaagtaaaaaaatataactatttacgtagcatttacactgtattaggtactataagtaacccagtgatgattggaagtgtacaggaggatgtgcatgggttatttgtaaatactatgccatttcctatctgggacttgagcatctgaggttttgggtattcttggtgggccctggaaccaatgcccgtggatcccaagggatgactgtatgcctgtacgtgatgatgggcctctctccatgaatttaagtcaccaggactgggtttggggagtgtcagctcattttctgcctgtttatcagcagacacagatggggtagttttctcacttgcacctacggaaaatcctccttgctcctggggttgtttgactcagtgtctcccttttcttgtgtctgggaggttgatggcatagtacatttactccccaagtagtctgtgagtgtggttggttaaggtggctgaactgaactcggcatctcccagcaccaccaacctggaaagtgtttttggtaggtgctgtgtgtacaacatccttctgattgcaaaggcctgtactctagcattaggtcgggttaattcctgtcaggtcttttttttctcttagagccccatttctaatgaagggattaatttggcaggtgatatcaacttgcaagccaaatttagagttgattttccaaatgacttctcccaaatgccctattatttcctgt

SEQ ID NO: 41386 - DNA, 1033 bp, Homo sapiens
gccaccacacctgctaatttttgtatttttagtacagactgggtttcaccatgttggctaagctggtgtcaaactcctggcctcaagtgatctgcctgcctcggcctcccaaattgctgggattacaggcaagagccaccacgtctggcctctcctgtattttggatattagctcttagctatatagtttgctcacaccttactcttaatttgtctgtgaacgtggctgagaactcaattactctaccatcttgggcagcttagaagttgtgggctccggagttgtaagacgcatttcgagtggcggttggttacctatctttacttgctggtggattttaaaacatcctaatttacaaaaccagcagtaaacctaaggcaaggcttttatagaaactgtatcttttaattatttttttcctttgaaattgtactaaaaaatttagacaggcatggatttgaaggatgattacttacagttacagaagtggaaaatccaaaggaaatgactttttaacctctgaaaaagtttttaaagttaacatcagggaatacgtggagaagtaaggaaaggaagtgaatacattgtgctgagagatgtccacattggtgactggagagagacgccctgatggcattgctttctctgccttgacgagttctgtatctcatcctgaaagtgttgtttgcctcttcctgtggagtgacacaagacatcgtgttaagactgttgccagttctaggaatctttggaaattctgatgttctacagagagagaattataaacgatttttgattgagagggctagtttaaatgcagtgacttttaattatataacctttctcattcaaccagttgtgagttatatctcctgtgtgcatggcactgtgctagataccatggttacagtgatgaataagacagaagtagatcctagctttgggtgatatttaaagcccagttggggagacaggtatcagtgcgataatctcagaaataaagaaataccatttgacccagccatcccatta

SEQ ID NO: 41387 - DNA, 1049 bp, Homo sapiens
aataactgtctaatattattcttcagaatgttgcatgccctaaaactaaagcagccttacccaactttgcagtccatttttttcttttctgagtgtactttttaagatgtcattgtcatccctgagttgggtttgcctcctagtactaatttaatgagtgctggtatttacttacagtgctgtggggttttttttccccctccttttattgagccatgtttgatactgctttctctgacgataaaacagtaattactgcttatttctctttatccttttatcctaccatgacagttttatttctcttcatctaattagtggttcacccatctattgcagaatagttgctttgtgattagttaggcaagaacatcttgaaataatgcttatctcacattcaagatatttatctaatgcccgacaggttttcttcacttggagctttaagtgattaaaaagaacacttggtatatatttcataactggacattttacaacctaatttaaagacaatattccaaacataaaggtttcaaggctgaacatttccagaagaatcatgaaatgctataagcttaggccagaagtcagatatttatgccatccagtggttgcactcagataaaaattcatcaggagcaaatactattgttgtgctttttcaaaaagaatatgtgtgaggtcatttgccaaatagattttacatctaactgtgaaagtcactgtgggaacccacctgctctctcccctacctgagcatctgtggaatcccttcccgaagccttgtgattctcatctccaaccctacctgagcatctgtggaatcctttcgctaaatctcatgattctcctctccacccctacctgagcatctgtggaatcccttcctgaaggctcatgattcttgtctcccacccctacctgagcatctgtggaatcccttccctaaacctcatgattctcatctacctgaacatctgtggaatcctttccctaaacctcgtgattctcatctcccacccctacctgagcatctgtggaatcctttc

SEQ ID NO: 41388 - DNA, 1060 bp, Homo sapiens
actgctggagtcaaaaattaagaaaactttgtaatgctgtttaattcatgacccagacccagggcagggtccttaagagctgcttctggtgacactgcaggatacatctcacctgtacccctgtggaaagccaagggtcagtgggactcaacccatacatgctccttgggaactctctctcatgacaagcctggtcttatctggtcttatctcagggtgttttggtggaaatctttttttttttttttttttgagacggagtctcgctctgtcgcccaggccggactgcggactgcagtggcgcaatctcggctcactgcaagctccgcctcccgggttcacaccattctcctgcctcagcctcccgagtagctgggactacaggcgccggccaccgcgcccggctaattttttgtatttttagtagagacggggtttcaccttgttagccaggatggtctcaatctcctgacctcatgatccacccgcctcggcctcccaaagtgctgggattacaggcgtgagccaccgcgcccggccttggtggaaatcttgactgtcaaagttaccttctcccccacaaaggaggagggggaaagctgccgtctagaaggaaccctagggagaaagggatgtgcttggaggtcaagaagagtcacagggtgtgtgtcccacccagggcattcgtgcaccttagggctggggccatgaggaggctgtaaactggaaagatcaaggcagtcgtacaaagacagggcaaaacatgctaaacagatgagaggcagacagctgcagctgtctggaggtgctgtcacagttggcacccagtgtctacagggtgggttccctctttgtggaaagggaggtagcattcccgggtggggcacagcacaccctgccgagtcctggaaagagggtgaggagcgtcactgtctggaaattcagggtcctacccaaatgtgaagtgtgtggaggcagggtggtgtggaaggcacactggatttaaagcaggaagagggactgtgagagccagctgtgctctctcgtcactttctgcctg

SEQ ID NO: 41389 - DNA, 1223 bp, Homo sapiens
atagacacatagttcagtggatggagtagagaacccagaaatatattcacacatggataaccagctgattttttgacaagggtacaaaactccatagaatctgatcagaggctgatgtccagaatgtgtaaagaacccctacaactcaacaacaacagaacaaacaaagtatttccccagagaagatatacaaaaggtcagtaggctcatgaagagatgttcagtgtcattagtcattagtggtcaaaccacagcaggtcatgacattaacaggtcaaaaccacaattagacacaacttcacaccccttgtaacagctaatataaaaagtagaaaattaacaagtgttggtgaggatgtggaaacagtggggtccttgtgcattgctggtggaaatgtaaaatggtttagccaccgtggaagaccgttggttgctcagaaagttaaaaatacaattaacagcaatttcacatctaggtatataccccaaataattgaaagcagagacctaaacagaccttgtacaccaatgtttatagcagcattattcacaacagcaaaaatgtagaaataatctaagtgtccatcagcagatgaatggattaacaaaatatggtctgtaggtaccatggactattatgtgcccataaaaggcaggagctttgaaaaatgctgcatcacgtggacgaactttgaaaactaatcattcactatgctaagtgaaacaagccagacataaaagaacacccattgtgtggtttcacttacatgaggtctctagaatacgcaaattcataaagtcggaaagtagaatagaagtcatcatggccctggggggagggagagatgggagttactgtgtcacaggtacagagtttctgtttgggatgaagaaaaagttctggatagaaatagtggtgatatgcacaacactgtgaatgtacttaacactatgaaattgtagactttaaaatcattaaaatgatagatttcaggcatattttaccacagttttttaaaaagcaattcaggggaggaaaggtgatcttttcaacaaatggtgctggagcaattgggtatcaacaggcaaaataatgaacctgacctaaacctcacattttatatctttaaaaaaacttaaatgaacaacaacaacaaaatgacaaaacatacgagagatttaaatgtaaaatgtaaggttataaaactttttggaaaacacag

SEQ ID NO: 41390 - DNA, 1043 bp, Homo sapiens
tggggtggtggtggcaggcctcagtaggagctgatcctccattccctgctcagcagtgacaggtggtacactgatccctgcaacccgtgcagtctcagcaggtctagcgtggagctaagcctctaccccaactcagcatcaggtacttaaggagggtgagagaagctgtgcaagttaactattaagcatcaccccacacaccctttcagtcaggcacagggaggaactgaccttcagtcccaagctgcagctacaaagcaatgggagtcagcctcccctcccccttcctggtggttgtaaagtgcatactgaagctcacccctcactgagaagcagcaaggggagaggagtcagtgcttcccttttgccatgatagtgttggagaagcccagcataaagctgaacacacatacccagccggcctttatgctccacatccacaatgggtaagcccactaaaaagagatgcataggatgcaaaggtcttattatatcatacccaaaatatgtgggatatacctgaagaccatttatcatacttagaaccagcagaatcacaacttgaatgagaaaagccaattatcagatgctaaatcagagatgaatgtgatgttggaataatctggaaaatattttaaagcagctagtcataaaagtgcttcggtaagtaattttgaattctcttgaaataaatgaaaaaaaaaaatagaaaatcttagcacagaaataaaagagccaatggaaagcagagaactgaaaaatagaataaccaaaataaaatactcattagatgggctcaatagtagaatagagatgacacagaggaccgaatccatgaacttgaggacaggtcaagaatgtagccaatctgaacaactaagaaaaaatagattggacacaacaacaatggacccaaagggacctgtgggacaagactgagaggtaacattggtatcatcagaattcataaggagatgagaaagaaggttgggctgaaaatgtttgaagaagtaatgtttgacagcatctccgatttggtaaaa

SEQ ID NO: 41391 - DNA, 1046 bp, Homo sapiens
ttatctcaagagcttagagtaagggaatgagaggagaaacatggcaccctcaaagattattagagaaggttctatttccaaagattagaggatttccaagaggaaactactctggaaaggatttttaattgcatttagggaagccagtgtactaagagctgagacaatcagtgctcagtgtagtaatgatacagctacttcctaactcctttctgggtgctataaagacaaagttaattgtatcattactatttcaaaacaactgaggcttttaaagtgtttcttaggagtgttacaagcctgtctgaagtcctggagagcaatgaagtgtagatccaggaggctgcagtcaatgcagtgtggtggttgagagaccaggccctgaaatcagacctgggtcaaatttcggctctaccagtttctggtcttacgccctttggcaagttagttaatcttttgaggtttaattcttacatgtagtatgagaactgagaagtaataactgtatctatactgaaggagtgttataaagaataaatgagataattaacacaaagcacttcataaatgctctacaaatgccagctttgctgccgttgttagtattataattagaagcaggagcagtagtggtgcagaggaatccagagacaaatttcgtctttgtttctaacagcatgatttctagaaagtcacttagctttgcagacctcagtttcctcatctagagttttagtatgttggagtagatagtatgtaaagtatcttccagtgtttatcttcttggatgctacagtgaactttttagagggaaaatactacagcggctgaaagcacaggctgaggagtctttcaggcctcagtttggatcctgcctccattctgaggcacacaccgctcatggccaatccatgtcctgtgtcctctgccttccttagagtttgccattttgttcagaacagcactgtgagctccctcccacctccccgaccctatgatgaatcatgattgctctaggacaggtcagcagactactgcccaagggg

SEQ ID NO: 41392 - DNA, 1032 bp, Homo sapiens
tactactggtgaaattttgaacaaattatttaattttactaggcctcagatttcctctctgtttcttactttagtaatgaggattaggttagatgaaaaatataaggcttttgctccgttcctactacagaggaagcaaataattggaagttattatttttatttcccaatgaatccattcataattctaaattattttgagtctgtgtctacacaggcccatatctgccaaattaccttttgcaaaaaaccatgttttatttagaaatgctttgacagccagaacatgtgtgtctattgcaaacaaaaatattttcagtttagaaatacttgttttgatcatccgtgtggaaatgaatgttttgtatttgagttgttaagctacaaaatatatttgctaaatgtttttgcaaaaatattcatccatttcttagaataatgccttagagaagcacccagtggtaattatgttcttaggcatgtttatgacacagaacagatcgaaccttttggaaaaatctggaatggaagctgggactaatagcccagtgactctagatgcagggcgtcacctacctcatcacgacgctaatgtttccagggcttgctagttgaatttccacatgacgattagcacaaatccagaactaaatgacaggttatacttctgtctcaagcatcatatgatattgatttttttttactgtaactagaaatttttttcctggagggtcatgagaaaaattgtattttttgacaaaagtataataatttacttgagacttattgttaatgttcagtgatagtggcagggatttatccttttataatccttacattgtttctctttcaaatttttcgtgtagggattataaaaataaacccactggatagcttgtaccttttgctggcatttaggataaagagaaacccaataaatcttgcgtcgagtggcctcactgatattgattgaattataagatcatagtatagcttttacagataagtcaccaggaagacatcacacaatgt

SEQ ID NO: 41393 - DNA, 1032 bp, Homo sapiens
tccaagggacacgttgcatatgtggagagcagtggcaaggaatgattgattgcttgattgaccagtaactgattggatcactaactgataggcatgaaaactcctccctcactaattcctatataatcctcatctgagcccaggatttggtgatggtgctctgtaatatgtagtccaactttctctttctcacagagcttacatttctctgtgtttgtgtgtgtgtgtgtgtgtgtgtgtgtgttgttacctacatttaaggttactcaaaaagcagcaataattgtatcttatgtaattattgtctaaatttctaatcctttggtgccgatttctgaaacaatgttaacaaaagtaatcaaaggatgaaataatatatatttaattatttttgagttgtgtcagttcttatattaaatagtgtattgaatttagggactaaaatgtaattataacaaagcaattcactctaagaacatttgattgtttataatactgtagggtgtctaacagtagataggagacctctgatatttaccatagaagttcctttaaaaaaaaaaactcataagtaatacggtttatggaaaaattcatcttgtttatggaatggtagtgcgaaatagaacttgtattttagaaatgctttaaagatcttgaatgagatatactctctcaggttcttaaacataagaatcagaatatgaaaggcatgttttattttctagattttccttctctcgccatttgactaattcttacagtaaaagtaggggaagtgaatgaagtgaacatcaatgatcccatgctaggtttgtttatcttacttttggaaaacaatgataatgattctgtgtagggctgtggtttttaaattgcttgtctgctaattataagaaaagccaagatattgaaatttgtgtagtgctaattactcatccctttctttcccgctgcaatttacagtgtgtcttcagggtgtcagtcactgatttggagcttctgcctctgcttcttctcagcaattaggtc

SEQ ID NO: 41394 - DNA, 1029 bp, Homo sapiens
acagaatggggaacatagaaataggcccacataagtacagccaagagatttttgacaaaagcataaaagcaattcaatggaggaagaatagtcttttcaacaaatgctgctagagtggttggacgtgcataagcaaaaaaaaaaaaaaaaaaaaagaaaaaagaaaaattgtatcttgacctacaccctaatctttatataaaaatttacttaaagtgtgttggattaagtgtgaaatgtaaaactgttaaactttcagaagaataaacctctggggtttagaacttagtgaagtgttcttagacatgacaccagagacacagtccataaatgtaaaaattcaataagttggaattcattaaaatttaaaacatctgctctgcaaggggatgaaaagacaaaccatagactgtaataaactatttctaagctacatatttgagaaagtggccatatttggaatacataaagatttctcaaaattctacaattaaaaaaatctaatgctaaaatgggcaaaagacgagacattttactattgtacgttttcttgtgggagcaaagtaaatctttttaaaaagcaactgtgtctttttcaactcacttcttggaagtgatgatggaagtgtgtattcgtggctcctgcagaggttttagctggactttccatactggacatgaataagcacccctctccccctccacattagggccggatagcattcaccactctcacctgcttagtcttctgccccaaactgcttcattcatacctgcttctggaacattttctcgtacactgactccagcacagaggctgttctttctaagttctccctgaattagcagtgatgagatgcctcatgacccgagaaacctggccttggctgttccccatgttggactagtattggagatcacatagtttattgtttcacttgtcattgactagaaaataaattagaaagatggttcaagttcagcatttttactcatggtactccttgacttctgcctgttttgcaaaag

SEQ ID NO: 41395 - DNA, 1035 bp, Homo sapiens
ttcatagtttctgaaattatttgacatattacttgactataaaggaaaaaaaatcagagattttattaaaactctgtaaacattcctaattaaacctcacatgttgttcacaaaccttttatgttttaagctgcttcaggacagagaattgattctcctctcatttttcactgacagatctggtggtacttagagccagtaacatgcagcagttaattatgctgctgtcccacatgtgtacattttgttttcttgcctgtatttgttataaagagggttcatgttacattcctctgcaccctccagaatgattaggtgggcgtgagatcctcacatactgaacacacacttagtaactttcttgttgactggttattctgttgtttcatgttattttaatgagactgggaaaaaagccattgctcaaatctggttattctttattaaagttctcatattggaattattaaggactaatgtcattagggacatttctacttttgatatagaaacaagctgcttagggaaaaatctcctgttttcatgcttgacagtgtagtttctcgtagttaaaacaagtctttatgtactgttttatctcctgtgctaaaacagaacggtgaaatctaaggcaaacattgtgtgtgtgcttcgacactctcgtaaattactcttgccattaatttaaccacagttgtgttatcacttgacctaaaggggctcctggatgattgggaaaccagcagagaggctaatgggccaacaatcttggcagccaacctccgtgtatgtcttggaaaattccttcaggatgtttgctttggcatttgattgttcctatcttcagattaccttattttatagtatattgaatgttgcatcattaacaaatacctggttgatatctttattactgtggcttcaggcagtaatacaaagatttttctctaaaatacaaagtgtatttgaaagcttttctttacatgtatatcagtttcaaactttacaattaaattttattcccaggaaactctc

SEQ ID NO: 41396 - DNA, 1110 bp, Homo sapiens
accctgttcacaaatatactagatcgtcataaattgtacaaatgtaattgtaaatttaaggttttattttactttttgcagatgagctgcagactatatataaattcatgtatgtatccacttaccagaaattttattaaatcaaaatatatttgacccagcattttccgatccgtttacagtgggagaaggtaggctacgtaggttcttccctcctcaggtggcactagtcaagactgacagagccaccagcaactgatagcccaaagatatcctctcagcctaccgaaccagacacccctcaccttctacctggtgatgcagggaagcccagggaagtgcgttctgtcccacaggaggcaatagcagggatagagaaggatccccagaccctacagaacaaaggagaccaggacagctctgaaaaacacattatcattggaactacagcccaaaaaagtaggcaaagtcctataccctaaacccatcaggcaactgccatctaaaataaaagatttaaataggacaaggagtcttaacataatatcgaaaacgtccacagagaatggaaaattactgaacatacaaagaacaaggaaaaatcacaacttgaatgagaagacacaatcaactgaggccaaaattgaagtgagtcagctgttgcaattaccagacaaggattttaaagcagccatcataaaagggcgtcagcagcaaactattcattctccttgaacaaatgaagaaatagaaaaatctcagcaaagaagaagaaattatttaaaaagtgaaagtgagtgaattgaaacattccataaccagaattaaaaactagcaggattagctcagtaataaagtggagaagacaaagatagatcggtgaatatgaggatagatcaatagaatttgctcagtctgaccaacaatgaaaaaggtagacaaaaaaaaaaaaaaaatgaacagaggctcctgtgaggctgtaaccaaagatctaactttaattttattggagttctagtaggagatgagaaagaaaattgggactgaaaaagcattcaaagaaataataggtgaaagctttctaaattgggggaaaaaaaaaactccaca

SEQ ID NO: 41397 - DNA, 1050 bp, Homo sapiens
tgtatttacacccatccatgagtgcaggcactgctggtgtcatctgaatactctctatgaattctcccaacatcagtttcctggttttgatgttgtttggtaaactgtagttactcagcacgatgttggcactggggcaggttgggtgaaggatgaatgggtttcactgtacatttctttgaactcctcgtaaatctaattatttcaaaataaaatgaattaaagacaatatgaatgagagaacatcaaataataaggctttcacagtacagcgtaggcttctaaagtttgggaggagggccttgagatgatttggtaacacctctgtgggtgcacccttctgacgcaaatgaccctctgttgtctcttctgctctaaccaggcatcagctatgtgggtgtctggtgtttccaaaggagggtaggatgagatcagagagtgcattgtgtgctcactgaggaagggggaggaataatgatctgttcccaggattaagaaagaggaagaggagatacaggaccataagaaaagagaacccagagctgagagcttgtaggaatgtctctgctccattctactagggcttagaccggttggcataacaacttcatgaactgtcggccatccttaagctctcctttaggtaccaattatctcctgattttctcttcattattaacagtaaattattttcctttcctctttcctttcctttcctttctgacaaagtctgtctttatcacccagtctggaaggcagtggcaacgatcatgcctcactgcagccttgacctcttgttttttttgtttttttgaggttatttttgtagagccagggtttcaccatgttacccaggctggtcttgaactcctgagctctagtgatcttccttccttggactcccaaagtgctggaattacagatgtgagccaccaggccagcccaggttagcagtaaatcttgctaagattggcccataaagaataccctggcttggtagactgtacagaagaaggggagactcggagaccacgtcctatgccatagcca

SEQ ID NO: 41398 - DNA, 1060 bp, Homo sapiens
cactgtcctcttcttttctgaaacagagccatcacattggagaatcagctggtgatcctcgccaccacaaccagtgatgccggggcatactacgtgcaggccgtgaatgagaaaaatggagaaaacaagacaagcccattcattcatttgagcatagcaagtgagttttgaaatcccaaatggtaattctgcaagcaataaaatcttgctttaatcagtaaccactgtctgacaggacattttgcaataaattttctctctctagtgtagtagttacggtttaatattgatccagtgccaatagttcggagagctttagggctcttgctttcttcaaaatgatatgcggaaaaatgtgaatctcagtggtacttctgaatgccagatcttttttgggaattaaaaaaaaaagtatttgctttttatacacagtcaatgcatgttgttcctaacaacaaagaactttcaatttaaatgaattgtatccatgaacctaaatcaggactagattagatatacattatattcttttaatctaacaggaaaatctttgagaaattctacctattaagttgtacgaaaattagcagtatttaagcataatcagttgatcattttttccacctaatttaactgaaagcctgattcttgaagacaatgcacacaaatcatgggtatttgtcgattttatttgaggggactttagtttgagtaaacttagttttacatgtttggactttaaattctactagcaagagttaattgctaaagaagggaaaatcacccaaagcaggaactctgaactaatctagattcagacatccatatcagaaggcttgtcatcagatgtttgcagcatgaagcttcatggtatgaaatgaaattgtcatgcggttgagaaaatagggttgaaactagtcatggcggatggtaaatttcaaaatattattatcatatcatatgagtgaattatattgatttgtttgtatagtagtggattttatctttttaaaaattgtcttgaaggaatcgtttcccctgcaagtgatttgaaaagtat

SEQ ID NO: 41399 - DNA, 1050 bp, Homo sapiens
tttccctgaactctccaccccgctgccctggtgagagcttgctgccatcccaggggtggatccactttgaagttttaatgtgatgtgaagccagcagatgttaaggacataggtgggactgttgaagcatcctgcatgaatttttcatggccagctcccactgctcaggtgcacaccagaaaaagaagggtttgggcctgcctgagagtagatgtgtcttccgaggtcagacccgggaaagctttatgaacctgtcaacctatttttggcttttgctttgaagattttacgttgagttaacctttgtggaacagaacttctgaactgaattactatgtgaataagagtttcttcctctaaaaaaaaaaaaaaaaaaaaaagccacaggcgatgagacgaattctatacagtggttaatcagtcattgtttatacgccattgtacatgccttagacataccatcagttctgatccaatattcaaaatgtccaatgtaatgagattctctactagggatgaagcttggattaaaaagaaatgactgcctctctccttcctgtttttttcacctctttcattttaatgtctcctcttcaaacaacatttgcagataggatatcatttcagctgatcctccttcaggctgacaaacccttgcttttaattctgaagaccacttaacattcttttgtcctctataatgctaatttaactgcagactcacgtagggttagtagttgaaagtggattcctgagaatgtccatgaacagtcatttcagaggactgccctgtaaaacatggcttttgtgtgcccaggtacaactctctcctattttccttgtaccgttaacattaaagggagagaggggaacaggcagatgccttccagatggcctctgacttggctcgggttcctaaaacaataggaactgtttgaaatattactaaaaaccaatctggggcctagccccacatcacaaatgagcaatttagaaccaagcatagttttatagattgtatgacactttactgccagaatttttcagaaa

SEQ ID NO: 41400 - DNA, 1030 bp, Homo sapiens
tttttaaaatcatgttgtaatttcttaatctggctgctgctgtagtgaatgcagcctaacgattggtcaccttttggtagcagttcaactccacctttaccacttagtcataatgttttattactgttcattgtaaacgatgttcttttggctcttgtagaaggcaattacagcaggtaattaaaattgtagttctttacaatgtgtttgagaatattaaatcaagcccacagaaaatcaggtaaagtatctgttaaagtgaaaggccacttaacaatgctgaagaccattagcaaatccagagtgctatattccctgcttttccaagaacacttcgtatctgagatgtaaagaaatggaatttatatcagaaataataggaaccagaaatttatctggagatgtagattctttctgtgtgttctaattagtgagttcttcgcaatagtctctctctctgattctttgttatttcaggtaattattctgcctgcacccctttaccttttatgatcttgaagaataccctgtttagcacaaaattagttccttccaatctagtatacctctatgtttggctgagagggtcttaggaaagtataagaaagcctgtgacctctgcttgtcagtgtaaactgttattttgcccaggaataactagcaagtgtagctttttgagacggataccaaagatattattttatgtagttttagagcatcataaaaatgtgagctgggaattccctagctcacctcagtattaggcctgcatgaccatctgggaagtgtgaaggctataacggttttgtggtttttctagggaggaagatacaaatgtcaaaactggaagtgcggaactctagagaagctcttaaaagaatgaaggcttttccattttagttcctaagtcgaacttaaagagtaggagtcagagctgacataagtcagtaatggcgagcatccggctggccccgtgcggtagtttgctgtttcactgatgatgtattttgttgaggtgtgtcccatctga

SEQ ID NO: 41401 - DNA, 1054 bp, Homo sapiens
gtgagtgggatttgaagccaagttgaatctcctggcttcggattctctattttgtaactgcagatgggatatgatttattaactttgtcgctagctatttgaaaaaggagctcttactatggagaagaaattgttacattcctatcacccgcaaaataggacttgactctttcttcctcaaattaactaaagtcaacctgttttcaattggtgatattccttcattagttttaattcatttttcagcacacctgattttttaattcattatgcttttgatggaaattaattagtttcttttagatctaaaacaatattattgtgggcactcagacattgttacacaaaagggccttattatgaagctggtctcagaatgaaagcctgggtctgtttcataggaaactcgcctgacgatgaagccatcgggacgctgaggctttttggctgcctggttctgagcctcagttttcccatctgtgaaatgaggagcttgagccagatgaactctaaacttttgtttgatgagcacaacaaaatgaaataaaatcttataaaatagatatatgaagatgtatatgaaggtttatggtaatattatgttgatcaaacattttcttagcccaatagagaatgaaaattaatatcctactacaactttgcagaaatcctatttatttatttattagacagagtctcaccgtgttgcccaggctggagtacagtggtgtgatctctactcactgcaacctccacctcccgggttcaagtgattctcctgcctcagcttctcaagtagctgggattacaggtgctcaccaccatgcccagctgatttttgtatttttagttgaggtggaatttcaccacgttggccagactggtcttgagctcctgacctcaggtgatctgcccacctcagcctcccaaaatgctgggattacaggccatgagccaccgcccctggcccagtttaataattttagaccgtattgccaattatttaaaggagaagggtgagtttgtatttctttaattaggtttaggtaacggc

SEQ ID NO: 41402 - DNA, 1014 bp, Homo sapiens
tttttctgaaaactttcatcatggatgctatagagttcacaatatacatttaaaaatctgaatctacctccacataatgctatgctgcttcacacggagtataaggaccttataacagtgtatttctaattcccctctcccattccttctactattattgtcatacattttacttttacatacagtatcaacacaccagatatttttactattacagctttaaccagtcagtaatcttttagagaacttaaaaataaataattttaatttaccttcctttattccatttatgatgcttttcatgtcttcgtatttatcccagtctctgacctatatcatactccttttgcctgaagaattttctttaatgtttcatgaagagtatgtctactggcagtaaattccatgagatttgtttttgtctgaaaagtctttctttctccttcacttttagaggatatttttactgggtgtagaatcctgtattgagatgtttttctttaaacatttgatgtaattccactgttttcttgtttgcatgagttctgccaagaagtctgctatatttcttatcttgctcctctgtaggcaatatgtctttttttcctctggcttccttaaatattttttatttgtcccttctttttcagtagtttgaatatcataactagatgtagagtttgtgttttgttttgttttgttttgctgcttgatgtcctctaagctttgatgatttggtgtctgtcactaattttggaaaatcctagcccattattttttcagccatttcttctgtcccttctgtttttctttctgattttataattccaattatgtatatgttaggctgtttgatattcttccacagtgcttgcatgctccatttagttttgtttgccttgttttttctctttgcatttcagattgattaattcctattgacccatcttcaagttcagtagtcttttcaagtctgctcatgagcccatcaaaagcatttttaatctaaatact

SEQ ID NO: 41403 - DNA, 1065 bp, Homo sapiens
gtaattaaggggcttggtacccatagagtcatctcatcatcactgtaataaatcattcttatatttatttattggagcctgaggatgttaaacccttacttttgtatgaccattcatagcttattggtgctttcatctttatagaaacacattagagtctggctgcctcagggcccattccctagtcacttccagccagacatccatgtatcaaagctctagccaatcaacatgtagtggacgtctgctaagtagggcttccaaggatgttttctgtttagaataaaaagggggaaatgtggctagccacatttgaccactatcccttcttctggaacatggatgtaaagctggagacagtgtagccatctcgtgaccacgaagcagtgatgaggaagacaagaagcaactcacggaaggacccatgccccctttctctttccactccgctgtcctgaggcttcttcttcttcctcttcttttcaagttgcgtaaagtggatacttagatccctgaagtcagacctttcttcttttctagtgtaagtgcttgatgccatcagtatccccaggcactgctttaggctcatctccccatttttatgttgggtcttcattttctttcatgacaaaatatcttctaattccctttgcattttctcctttcacccatggattatttataagtgtgttgttaagttctaactctttggcgattttccagataactttctgttactgatttctgatttaattctgcggtggccagaaaacatactctgcatgatttcaatccttttaaatttattgagatttgttttatggcccagaatatcttggcatatgttctgtgtgcacttaaaaagaatttgtattttgctgttgttgggtggagtgttctgtaaatatcaattaggtcaagctggttgatagtcccgttcaagtcttctgtttactgattttctaagttttaaagacattttaaaaaatgaaaaacgaaatgtttatatatttactcacatattgaccatttctgctgttctttatcccctgtgtacattcagct

SEQ ID NO: 41404 - DNA, 1050 bp, Homo sapiens
cttggcctcccaaagtgctgggattacaggtatgagccaagttaactatcgtaatgaccccatgtccttgtcagtgcaccacatcagaggccacctgatgtcaacttgtcccattattgattattttgagtgtgattattaagctaaatggggaccaacaggtttgtccaaagggaaaggtgcatttttcctttgtgagttatcaataatctgtgtggtaataccttgaaactatgggactattctgtttcttaacactctttactcactcacgggtgactcttgcctcagtcaactattaccacgatgtttgtgtcctaacttctaccatcctttgtgtgtttattaggttagtcttcttctgtaaggaactccttttccttcttcacatttccattcctttttttaggaagggactcttgttctttgtgttaattgaatatgttataatatcccgttactcatttaggtgttaacattgtttcagatttggctgctgggcatggtttcagagtatctcctctatcttttccggatgttctcctctgtctttgagtgtgtctcactttctagcacaacaagctgctccaggctcacctgtatttttcctgccccagccctggaatcagccattgctccaagaagctttggtgcctttgagtgcaatatgatatttacgaaccaagatctggctgctaagtgtgcttattacttccttggtgttcttactcccagactcttcagtggctagaaatgtgcgcgtgtgcatgtgtgtgtgtgtattttaaatcatgagtttacgctgacatctctaattccagttcatcatcacagggttcttcctctcctcccattccatgtttgtgtctcccttctcccacaataagaaccctgattccccatcacattaatgtatttacccacttattcaatcctacaattcacacaaaattgtttttggaattgctataccgatactactgctcactacaaattcagtaagagagatttaatatttccttctggttcttcttgtgcctggaagatgtc

SEQ ID NO: 41405 - DNA, 1050 bp, Homo sapiens
attccattgaagtattaaatctctattttggagaagaactgctaagaattttaaaaatatgttaataggctgttgcccaatacaggctgcacaccttcctcgggcacttgacaagcttcacgagctcgtgtttagtttagatactgaagcaaactagcccataaaatacggtgctgtaaatataaacctttacgaacctcttggggtagtccttctaaaatgtaaattaagatattccatgattcaagcccataaactgaaaagtagccatcaccctgagtagtaagttgctttctgaaaccccagactgtaaattgcctttggcctgtgctcactgagttctgagtttgtatgcacgatgctaactaatgatgaaattttcaagaatggtttttaagaggagcccacactatcttaggttatatggtctctgacatatccttctttggcttaggggcttttttttattttcttgtttgaagagccaccatattttactgctgagcccgagagtcggatttcagctgaagtagaagaaactgtggacatcggatgtcaagccatgggtgagtgcagagtggctgctggacaaggagccatgactgggaggaagggaaacaacctttttccatagcagaattgccatcattctagggagacattgagtgtgatggcgaagagcagacttcagagagtagatcggtcttggggcagtgactgtgggtaaggcatttgactttgccaagcttttgcttcctcccctgcgaaacagagatgatactatttacccagcagagcaaaaaggaagcccacatctaccccagacagagaggggactccatcatatcctgtggactccccttccaaggccctgacttcacaagtgtgtgaccccccgagattcggggcagaaaattctttctcatccatggggtgactaggactggtgagcacagccactctagaaagggagatgggtgtacatgtatttgtagtaggtacgtgaggtacaaggcaattttgttccactgatgtattgcacagtggtga

SEQ ID NO: 41406 - DNA, 1028 bp, Homo sapiens
ataattttaaatttttggaatcagccttgaaaataaaaaaggaaatatccagtcatcagagtatttccactctggccttagcccagaaggggcacagtgcatgagtcgaatgggcagactactcaagatgccctgctgctttctggggcctctcaccccgagcagaggggacagctgtgggtgcacagtcagcagcgggacgcggagactcggctgttctctcgcgcttcttgagcgggtgtttggccaattgtaaatttccatgtcgccacccgactccctggggtttcccagggctcagaatccaaatttggtttaggtacgtgggtgccgaatgcaaaacaaaacaagcaaaacaaaaaccagcaagtgaaagacgacctaggacccccctgggggccaccctggagacggtcgtcaggcctcggaaagagctccttcctaaatgatttggagtatgacttcaaggaagtctgcttttctgctactctgacagctcagaaagaaccccctcggatccctgtggtttcgtagtagcttgttatatgtgattaaattggaggccccttcctcagatggaactgggttactcgctctcggggtgcccctcgtcccagggttgctctgccctgaggagcgccaggctgtaagtgaccagccagccagatgcgatgccccggcgtgagcagtctatccatctccctcttgtggaatcagccctgttctatctcagggtaattgctgagaaggtagtttgtaaatgtctgtgcttatgactatgaagtctttaaagaactgggcacatttgcaaaacccgatcaaattattgtggaaaagaaaaacagcactttcattccatatagcaatgagtgctggccctgcccgtggtcatctaaagactgggcaggctctcaattgattgtgtatttgaaaagaaaaatgtgctcaaattgctacagatagattaaatgagaaataaatgcaattttaaggaccatctgccagaatggtcacattttaagaaagtg

SEQ ID NO: 41407 - DNA, 1073 bp, Homo sapiens
aatcaaagccaaagtaccctatccaatcaacaccatagatacatcttcaggaaaaagccctcctttatgaaagcaaatccaaaaaattagaagaagcaactgttacaccagatgtgcagatatcaacataaggacacaagaaatatgaaaatgcaaggaagtataacacttccaaaggaacatggtaattctctagcaacagattccaatgaaaaagaaattatgaaatcccagaaaaaaaataaaaaataatgatattaaggaaagtcagataaaagagacacagataaataatacaaaataatccaaaaaacatttcaatacatgaatgagaaatttaccaaagagataaatattataaaaaagaaccaaacagatatccaggaactaattaattcattgactgaaatttaaaaatacaatagtaagcttcggcagtagactagatgagacagcagaaggaatttcagaatttaaagttgaataaagactatgtgatatatgagtcaccataaaggaatgagtatttgaatttttgatgtcccagaaggtgaaaagaaaaccaaagggatacaaacctgatttaacaaaataatggctgaaacccaagtctagcaagagatttagacatccagatatgggaggctcagagatccacaaataaatagatactattcagaaaggtcttctccatggcacattgtagtcaaattatcaaaagttgaagacagaattccaaaaacaccaaaagaaaagcatctactcacttataagagaacccccatcagactaacagtggatttatcagcagaaaccttacatgccaagagaaaaatgggatgatatattcaaagtactggggaaaaaaataacttgttagccaagagtactatatgcataaaagttacccttcacaaatgaaagagaaataaagtatttcctagataagtaaaagctgagggaattcatctccactggactggccctacaagaaatgcttaatgaattcccacacctgaagtgaaagaacaatatctaccatcatgaaaatgtacaaacgtataaaacccatt

SEQ ID NO: 41408 - DNA, 1044 bp, Homo sapiens
ggaggggtaggcatgggggcattgtcagagaggaggtagggctctcaatggcaggcggggaagcagggccaacccgggcagctgtgtttgtgtttgctgctgagatcaatggatggaggggcactttcaggcaccgcacaggtgcctgtggtgcctgacttagggaatgggagtgcactgtctctcttcccctcatccttccctccatttgctcgtaagacgccagcctccccaaaagcgtttccatttccacctgctcctcatgccttgcacagcagctatggctatagagagaccatggaaggcacatggcagggcttgggagtaacggcatccgggagaacatcaccatcaggacatccacctatctcctccagatagccaggcatcctctcctccctccccatcaccacacagtgtgggctggccctgatgggaccgatgggacctgctatgggaacactaaaaggctctaaacctgggtgagctggtgcaagagatgtgggtcagaactgccagatgtccctgctgtccggccagcagcgacttgctgtgggccctgctgtccctgagtcgcaggcaggtggtccatctgcatgtggggcggagctctgcgcctgtggccgcccttcctcaagcagtttgctttgctgagctgcacctgcatcttggatttttaactcatgttttagactctcaggtcttttctctggggtggcatcctctgatcctaggaatgagtttatgttctgatgagaggttcatcatcatgacagcggctgatgatcatggaacattttcatggtgcccgggacatcctcgtgttttcatgttttattacaatttattcttataattgtctcgctgagttatttttattttccctgcttcacacattaacagactaaggtgtcgagagtgtaatttcctaggcagcaagtagctcagccaggtctgacacccagcttggacgccagcgttcaagcgtaactctgcggctctgcctgcccgtgttagcaagggggccgcagggcacagaagctc

SEQ ID NO: 41409 - DNA, 1061 bp, Homo sapiens
ccaccgcacctgacctgtaaagaggttttacatttttaatgtaaaacatcttaaatatatgcaaaaggaagaatagagtaagccctcttatacccatcagcaaaagtcaatgatcctcaagattttgctgcatccatccatccctggttttttattggcgtattttgaagcatatttcagaccacatgtcacttttcccccatacacatcacacatgtgtctaaaatgcctgttcacatgccaatatggatgaatttcacaggcataatgtttaacaaaaggaaaaccagacccctgcttggagcatatactgtgtgattccatttatagaatgttccaaaacaggaagaagtaatctttggtgttggaataacaggttttcctgggacccttgtggttacttaccgtgggggtgacagtgactgggagggggccacctgaggagggggcgtctggaatggcaggagtgctgtcttttgatctgggtgcttattttgtgtatacaccagtcgtctgtgagcttgcctgtatgtcttacttcagtgaaaactttggccaggcgtgatggctcacacctgtaatccacactttaggagaccaaggcaggcggatcacttgaggttgggagttcgaggccagcctggccaacatgtgaaaccccatctctactaaaaatacaaaaattagccaggcatggtggcgcacgtctgtaatcccagctattcaggaagctgaagcaggagaatcgcttgaacctgggaggcggagtttgcagtgagctgagatcatgccactgtacttcagcctgggcaacagagtgagattctgtctcaaaaaaaaaaaaaaaagaaaagaaaagaaatttttacatgaaaatatggatgtcttttctcatgataccattgtcacacctgataaaattattattatttttttgagatagaatctcactctgtcacccagacaggagtgaagtggtatgatctcggctcactacaacctctgcctcctgggctcaagcaatcctctcatctcagcctcctgagtagctaggaccacag

SEQ ID NO: 41410 - DNA, 1039 bp, Homo sapiens
aaaaaaaaaaagtaaaataaatgtaatgtttgacaggagtgttgatattttcacttatattaacaagtaagaaatgaagcaaaacacatatagatccgaactttatttgttcctcaatgatgtcagcaacttctttgctgtattggagcatggttttctattactgggtgaatagttcctcaacattttgtgctattcacaatataatggctgcagacatcacagaatttgaagtttaaccacattgttaattttctgtattacttatgtctagggtttggcaaatggattctgcagagtcagatggtaagtattttccacttttccagacacgtacagtctttggcacagtctcttttgttttgctttgttttgttttaaccaccctttaacaatgtaaaaaaaaattttttagctcaagcaagagccagattttgcctccaagccctgaattgtagcattttcagattttcacagtgtaaatatctctgcaatagttgttgcaagctgcaaagtggagtatctgaaccaatgcggagtatctgaacttggagttgggaagataatttccagtatacagatggagtagagtaaccttaaaagcatagattacagtaaaataattagaacatgataagtgttgagaccctttcaatagaatttatttcactgcaagtttaatgtagggtaatttttttttttttttttttgagatgaaatctctctctgttgcccaggctggagtgcagtggcatgatctcggcttattgcaacctccacctcctgggttcaagcagttctcctgcctcagcctccctagtagctgagagtacaggcatgcaccactatgcctggctaatttttgtatttttgtagaaatgaggttttgccatgtcacccaggctgctcgcaaactcctgagctcaagtgatccacccgcctcagcctcccaaagtgctgagattacaagtgtgagccactgtggccagcttaatgtaatttaatttttaataatgactgtgtttaacagccaattaac

SEQ ID NO: 41411 - DNA, 1030 bp, Homo sapiens
aaacttctccccttttttagtcttggcatgtttggttacagatatcgcattgaataatttaaaatgcaacatcaacaatgactcactcccccttggggcgtgagaggggaagtatacctttttctaaccgtgctgaaaggtgtgcattttggtaaaatcagaactcaggagataacaaatttgttctttgcctcagatattagtgtgttctctctcttccataaccaatacactctctccgtttggggccattaaatgcatttcctggccactctcccctccagtaagaaaatgacaggtaggctccccaggccccccttagaggcctgctttacagacgcacctttatataactcaggttcactaagtacttccattaaagtcttgttttcaggtttcctgcccctgccgtggaaacaggtgcactcctgagtcaggcccagctttagtgaatcttgaaggaggctttcacggtattttttttttgtaattcaaggggaaaaaatttcaacctcagatcgtctacgaataggccagtagcaagcctgttatttatgaaatgttatcggtgtatacagtccttgcacatttatgctccagggagctcgtgttctcggtgggtgcattaccaggcattgtggtggggctgtcaggctacacagatgcccgcccgctgacttggtgcattagatgtgcgtgaagtgcttggcccactgcgcctgtctgtttttatttgacttcacctgcacatgtgagcaatatctatgtaggcagcaatgtaaaatttacaagaacaaagcaaatgtgcagaaggaaaaacattaagtggatgtccatgtccaccctcctagaaaagagctatttgcttttttttttttttttttttctgtcatggagtctcgctctgttgtccagactggagtgcagtggctcactgcaaactctacctcccgggttcaagagattctcctgcctcagcctcctgagtggctgggactacaggcgcacaacaccacgcccagctaattct

SEQ ID NO: 41412 - DNA, 1120 bp, Homo sapiens
cacatatgtagaacaggctgtcataaacttttttggttaggtaaagattcttaagcctggactacatttggttaggtaaagattcttaagcctggactacagcctcacgcctgtaatctcagcactttgggaggccaaggcgggtggatcacttgagttcaggagttcaagaccaccctggccaatgtggcaaaaccctgtctctactaaaaatacaaaaattagcttggcgtggtggatcacgcctgtagtcccagctacttgggaggctgagacagaagaatcgcttgaacccgggaggtggaggttgcagtgagctgagatcacgccactgcactccagcctgggcaacagagcaagactccatctcaataaaaaacaaaatgaaaaaaaaaaaaccaaaaaacgattcttaagcctattatgttgaaagtcattaagaaattttaaggatttcagcgcaaggaagttagatgcgtaagtttttgtcaccctgaatgggaaattcatcaccgaatgtcaggaattactgtgtctgttttctctccggctttggtacctggtattgccactgctactggaaattgtgaatttgtttactgtaaactacagattctcttgctgtgttggaatgtgattgccttggacgtgcttggatttggtgggaggtctatgttgtgttggtgcccacaccattttccaaagctgtgttgtccggggccaccctcttcaccttgggacaggtacatgccacacacacttccagtagagctcccactcaggaaggatgccagaattcaacccctatttgttactggaagtacgtaattccaaatcttcaatatttttaattattggtgggggaaaaaaaagacttgtgacccagcttagagctgatcttgctctactgggtgacactacgcctggtgggtaagcatctcgccagagctcccaggcacagggggagtgtgcgtgggttctgattcagctttgcttggtgttgacttggaggaactgcccgggtctccgtgatagcgtttcttctagaccataagctccctgtggctggggccgagaatttatgatgtttcaccagagacctagtgcaggcactggctcc

SEQ ID NO: 41413 - DNA, 2040 bp, Homo sapiens
ttttactgtgtcggccaggctggtcttgaactcttgacctcaaatgatccacccacctcggcctcccaaagtgctgggatttcaggcatgagccaccacgcccagcccaggccattatacatgatttgattaagaagaatctcgtctgccctcagtactgcatttaaccttgctgggaaaggggtgaactgtcttccatctgtttcctcagaggacgctgagctctgatcatgttgcctctctgcccagaaacctcagtggctcccgtgtacccagggcaagaggccctgcccctcagcagagaccctgttattatgaagctgtcctctaacctgttcccctaagtgtcaaagggcatggttctctttgggcagaatggctgctggacattctctgcttataccagcaattcccagatttgttttagtctcagggcccttttatactcttatactcctacacattactggggaccccaaagagctttggtttatatgagctatatctgttgacactgaccgtattagaaattaaaatatgcatatttatttatctactcaaaaatggtaataataactctatttcaaaaatatttttatgaaaaaaaaactatatacccccaccccaagaaaagaataagagtttttttggtagaactctgtaatgtctggcttaatagaagacagctggaatccatggctgcctccgcttttagtcggctgtgatgcgtgttcaggctgaagtacatggagaaaagccagcctcctgcagatacgtagttggaaaagggagtatttttgtagccttttcagatattgtggatgttccttgagacctcactaaaacctgacaaggggtagtttctttttttgttgttttgttttgagacggagttttgctctgttgcccaggctggaggggcagtggcacgatctcagctcactgcaacatccgcctcctgggttcaagcaattctcctgcctcagcctcccgagtagctgggataaacaggcatgtgccaccacgcccagctaattttgtatttttagtagagacagggtttcatcatgtaagccagctggtctcgaactcctaacctcaggtcatccttctgacctcaggtgatccgcctgcctcagccacccaaagtgctgggattacaggcttgagccaccgcacccggctgggtagtttctttttttttatttatttttttgagacagtgtcttgctctgtcacccaggctagagtgcagtggtgcaatcatagctcactgcagccttgacctcctgggctcaagcagtcctcctgcctcagcctcccaagtagctgggaccacaggtgagcaccaccagaccagctaatttcttttatttatttatttatttttggttgagatggggtcttgccgcgtttccctgactggtctcaaactcctggccttaagtcatcctctgctataatatccttaagtcatcctctgctataatatccttaagtcatcctctgctataatatccgtagatgttttatactgtgttacgttaaaacctattgctctttcattttgaatgagtcctttgccacccctgtgtgattttgtaacatcatacattggccattggcaagaatattgattgagttatgcagatcttctaatgttaattataaaaaacaaagtctgttttatcctgaggttcagctgatagttaaacttgatcccttcgaacccaataaactctgtttttaaaaacagaaatcttttataggaacaggctttttgtagtcagttaatttttaaagctgttttaaaagttgagtgacacagcatattttaaatagactttttatagagcagttttaggttcacagcaaaagcatatttttatagaaataaagttatataatttagtcattggccttattagcatgttgtgatatgacttggctacagttagtatatttttttaaatgtacagtaattttttgatgatttagggtggcacgattcatcctgttagttactgccgttattttccc

SEQ ID NO: 41414 - DNA, 1045 bp, Homo sapiens
tctctactaaaaatacaaaaattagccaggcgtggtggctcacgcctgtaatcccagcactttgggaggccaatgtgggaggatcacctgaggtcgggagttcgagaccagcctgaccaacgtggagaaaccccgtctctactaaaaatacaaaattagctgggcgtggtggcgcatgcctgtaatcccagctacttgggaggctgaggcaggagaattgcttgaatccaggagggagagattgcggtgagccgagatggtgccattgcactccagtctgggcaacaagagcgaaactccgtctcaaaaaaaaaaaaaaaaaattcccacaaaaattagctgggtgtggtggcgtgcacctgcaatcccaactacttaggaacctgaggcaggagaatctcttgaacccaggaggtggaggctgtagtgagctaaggatgcaccactgcactccagcctgggcgacagagcaagactgtgtctcaaaaaaaaaaaaaaaaaaagaatcttgtgctgagtctgacccctgacatacattaggaggggaggcttccatttgtccctgtcttaactctccttcttgaagccaaaggaaagacgcaaatcatctaggagattctgatggataataaagaagagggacaagcttgctgatgtaggggaaataaatcgccgaggctctgtctagcttggatttactgtgtgtattggctgtgggtggattacaggtgagctcataaatattagtattttgctcatgtccttccagatttgtaatttccttgataagcaggtgtgtgcgcgtgacatgtctgtcgtctacccgtcacacggttgtaccaggtagcctttgcttaataagccctcggagtactcgtcctttgagctcgtgggacttgcggggtggtcattaagcgttggtgtgaataccgggtatctccgtctcccagaagctgcgagtccctcgagggcaggggctggttctttcgggaggcattttgttctcagtgcctcgcccagtgccagtgaagacacacttccaggt

SEQ ID NO: 41415 - DNA, 1049 bp, Homo sapiens
aaaagtaacatatggcagtcacattacattatgaccatgaaggctaaatactcccagtcactataaatacagaaaaccaaacctggtgggaaaaaatgcgtgtatacgtacccctacgtgtggaaaactggctaccgcatgcttaacaaaataacttgggaatgaattactcatggtgaggcttccgatcagtgtctaaccctggtagcgtctgccagtagccacaccgaaagggtctaccaagggtacactatggacatttttcatttaaaggtgaaagattttttaaaatgcattgctaagaaacatccctggccgggcgtggtggcgcacacctgtaattccagcactttgggaggctgaggcaggtggatcacttgaggtcaggagtttgagaccagcctggccaatgtggtaaaacctcgtttctactaaaaacacaaaaattagtcgggcgtagtggggcacgcctgtaatcccagctactcgggtggctgaggcaggagaatcacttgaactcagaaggtgaagattgtagtgagctgagatcacgccactgcactccagcctgggcaacagagtgagactctgtctcaaaaaaaaaaaaaaaaaagaaaagaaaaggaaacattcctttcatcaaaacacaaataaatatttttcaaaaattaaaaaaaaaaatgctcaaaggattaccgggtactttgtgaataaatgttttccctatttcggaactggataagctaagctgggatccacgcagcacgcagcaggagggattgccctgtgtgctaggcaaggctgacatcagtgacagcagcgtcaggctgtgctcggatcacgggcccatctgtagttatactttttaaattttttttcttctgttgtttctgtagagatagaacctcactgtgttgcccaggctggtctcaaactcctggcctcgagccagcctcccaaaccaatctatgtttcattctttttttttttttttgagaaaaagtctggctctgtcacccaggctggagtgcagtggcatgaactcagct

SEQ ID NO: 41416 - DNA, 1033 bp, Homo sapiens
aggccgaggcaggaggatcccttgaggccaggagttggagactagcctgggcaacataacaagaccctgtctctacaaaaaatcaaaaccatttgctgaacagtcttatttctcggaggagtttaagcaaacactgcagggcctccggcattccagtttcaggccttatctgatgtggcccaccctgggaccgtcacctgacttcctgtccctgcacagagaacttgctggtaggaggtggtgaggggcctccgaggtggtgggtgagcatccctgcaagtcaagctctgctgttccccggccttcccttgagactcttgggggcctgggccctgcgggacgttttccccctgcctcagagccaaaccacttaacagaaccaggcgagccaggtttagtactttatcgggtatcctaaagacacgttgcagcctgcaaaattcgaaaagtacctggagtatgtaacagcttttgcctcccattcttgagtctttcatttcttcaaggacatggtagcaacatttaaagaaccttttgaaaagagagaggcggccgggcacagtggctcacgcctgtaatcccagcactttgggaggccaaagcgggtgcatcacctgaggtcaggagttcaagaccagcctggccaacatggtgaaaccccatctctactaaaaatacaaaaattagccgggcatggtggtgggcacctgtaatcccagctactcgggaggctgaggcaggagaatcgcttggacctggaggcggaggttgcagtgagctgagattgcaccactgcactccagcctgggcaacaaagcgaaactctgcctcaaaaaaaaaaaaaaaaaaagaaaacagagaggcctgcttataacaccatccttatcctgggctgttttcctttgtccttccagtccttgtctaataacaagaataactgaagcacattttcagtaaccgcttgctacgtgccagccgtccggtcaggactgatgttcacggcatggagacctgaggccacacggaggccggg

SEQ ID NO: 41417 - DNA, 1628 bp, Homo sapiens
gatgcatggcacacagccctggccctggtcctgtcatacagggatgcaaaaacagacgtgtacttgaggctggagggttcatacattctttaatgatttacctcttcattgcggacatttctaaacgtggctggcttttctctcccaaccgcacgtctgtggctctgcagatgcgtggctgcgcgtggtttggtgccggagctgtggctcctccgcagcaccagcagtttctgcgtcgctcgcgcgtcaccagcaaaggtcaccccagtggaaaaagcagatcacatcttagggctgttgtgaacatggtgttgacctcacatataccctgaaaggggctcagggccctcggggacatctgtgaagcacgctctgggcatgctgatctgttggagcgagcgctgtggcaatcccaggctggtcacgtcagtccctccctgctgatctgcgcactctgctgaaccccggccgcaccttggcttgcttttttctttttttcctcttgcagctgtaggagaagaaagggcttttgtttgtatttcagagacagcgtctcactctgtcgtccaggctagagtgcagtggcgcaatcatagctcgctgcagcctccaactcctgggctcaagcggtctccccacctcagcctcccaagttgctgggaccacaggcatgcaccaccacacccacttaattttcttatcttttgtagagacagggtcttgctatgttgcccaggctggtctgaaacccctgggctcaagagatcctccctcctccacctcccaaagtgctgaggttacaggtgtgagccaacacacccagcccgtacatggcctgcaccttttcagggtccacagttagaactacacactggcttctcttggaacacagccatcaggggcacagctcctctaccctgctttgccgacaagttaccagtgacctacaagttacaaggtgggaatcatctccatttgagttgcttggagtaggtctccttttttccagagccagtgggtgggagtgtctctcgtggagagagaagttcagggacagtgctgctgcggaaaggagaggccccgggctcaggccgggcatggtcacctgtgtgactctgtgcggtcacttcagccccccaccttcccgggcccggttcccgtctgagtcagtgctgtgacgtcatgaccctctgggatgatgatgatggtgaatcctaagtgactgagagcctggtgtgtgcccgcctggccctgtgctgagcagtgcacatgcagtattttatgtagtccatacagctttgagaatgttccagaagtagatagtggtgatggttattcaattttgtgaatatcctaaaagtcactttaaagagtgaactggccgggcgcggtggctcacactggtaatgccagcactgtgggaggccaaggcgggtggatcacttgaagccagttcgagatcagcctgggcaacatggtgaaaccccgtctctactaaaaatacaaaaatcagccaggcatggtgccatatgtctgtaatcccagctactcgggaggctgaggcaggagactggcttgaacccaggaggtgaaggttgcagtgagctgagatcacgcgactgcactcc

SEQ ID NO: 41418 - DNA, 1216 bp, Homo sapiens
acacgtgtggaacttacctatctctgccatatttggggagtccgttgtaagagagaatgggaattccagatcagagtccttaacgttccatgtgggtgacactgagtccttcctgaaaatgccccagacctgaactgatcattaatgtcagctgtcaggtttttctcagccacaggatttttttcattcattcctctgctccatccaaaaaatgtttcttgagccccgcctgcacccaagggggctcctacttaacctaagttttggagatctaggagtcttgtgcctggacagttagggaaggatgttcctggcagaggaaagggcagcaaggcgggaggaggagaatggaccttctggatggttctggatggttctgggtggttctggatggttctgggtggcctgcagggcagtgcagcagggagcatcctacccgccacgggggctctaagtcagctgagaggggggatgtcagcatcacaggtgggcagggtccatctcaggacggggctaggtgggtgcccgtgagctcaggacagtgggatctctttctctcgggaggttctgcacccactcttcgtgtcttcattggctttctctgaatacctgtaatagaaatcattttcagaagcaaaacatcgccgtggtttgctgacggaagcctgccttagtgagttagggaagcaggccagagcacacccctcagccggacggacgcagcctcctgcctgtggtcccggcctcaacccagagcctcacctgcagccgggggtgtcggtcactcccagccatctgtggttgctccagcctgggagggagaggggatgagggcaggggcatctcagcggctcagggcaaaactgcaggggtcatctcttcccgagggcggtgtctccaggagagccacctgccacgccttcaccctgcagggcgatggcacctccacagcctctttccaggatctgcctctgtgaccacacggggttgtcctgggcccgagccttttcccacagcgccgccttgtggacacctgtgcaggagccagcagcccgcggaggctacctgctccgggtgcacatcctgtaggggtgtgtgtggggggacctgaggaggggccccacagagctgcctgaccaggtgctgccctgggccctgcataatggcaggaggagggcccgcggtgctctcagcccccgagcagaagtcaccactg

SEQ ID NO: 41419 - DNA, 1352 bp, Homo sapiens
ctctgcataaagagggccctccctggagcacccccggggagctgggactctccagaaagccccgggtgagggctccgtcttgagagagagagaaatcccttctttgggcgattcagtgagttcaggaggaggaggaagcttttccttggctttgaaatcagtgtttttatggagacaaagaacagacctcagtgggaaaaatgaaaacgtaatggaacacggggaggtgtcggagaagaaaggattttccccttcgctttcagagccggcgggagtgcaggtctgttttgcttcagaagcctcacattctgctttgcccttgagtgacttcatgcgggatgaggaactgttgacccctctagagaggacaccccaagtccatcctgggctcctcctcacccctctgagaaagcccccctaaaaaaaggcttcagagtcaccggcatgccgcctcacgttgcaggacggaatcgcgcgctcctcacgctggagtaagttacgaaacatgatcgtcaggctctttgcaaacgcagagccccagaacgctggatggaggcctcctcggccctgcgggcggcctggctgcggtaggtctgctgcaaggagccaccacggggactgcgccacactcctgatgaaaacgtgtttacccacagcctcgcctcgagcctccttgacaataccgctgcttcaaagcaatattatttaatgagaatactttacattgctcacatgtgctgctatgaagacaggattagtctgtagacgggactcagctccagaggttcctgggtaatgtattgtggctcttggaaatgagggtagaatttgaaatataacaaatggtctctcgcccggttctgtcccttatttttagattgttttcctgcatcttacaatttccttttcttttcaaagttcctttctccaggcctgtttttcagtgctcaggacacggttttcatcacatacttactgtttttttggttgggttttgatacgaaaagctgctacgtttggtgaccagagggagggtttggaatctgtgctttgcaggggatctcggtgggtaccgcggcccctcgcagggtggcgagtggggtccgtgcctcgagaagggggcccttacccacaccgtgcggcttgaattctgtcggagttgaatctgtggaaaggattgtcccattagagctgctgcgtcctttcctctgtcctccctgtcacccaaaccccgaagtcacagctgcttagaagaatgggattttggggatacaaccacacacatttccctctggactgaaattttaaaaacagacccatttcactgacttctttttttttttttttttttt

SEQ ID NO: 41420 - DNA, 1044 bp, Homo sapiens
ctcttttctaaagagggattttccctgctccaagggttatcctttttttggttccgagcagcgagtgcttctgggtcctgaagtcctcttctttgtttagggagatccaggacgaggagctgaagaagttctgttcccggatctgtaaactgctgcaggcggaggacttggggccggacaccctcgactccctgcagaggctcttcctcatcatctcagccacgaagtacagccggaggtgagtgtggcgacggctcaggccggctcctcacacagcggccccaggagaacccagcccacgcccagcaggtcactgcagatgctccttgggggttgagtcatttgtccacttaaaccagtgctgaaggtccatcctcatgtaaaatgctctgtccactggcccaagggtgcccggccaggtgctctggggcaccgggtgctcctgccacggtcgtgacgtgttaccgcccaccacgggcatctcgccttccaggctggagaagacatgcgtagacctgctgcaggccaccctcggcctgcctgcatgccccgagcagctccaggtgctttgcgccgccatcctgcgagagatgtccccctctgacagcctcagcctggcctgggaccacacgcagaacagccggcagctgagcctggtggcctccgttctcttggcccaggtagcgcagcagtcaccaccccagttggcaccggatggctgcttcccaaggaacaggggagacaggaagcaggggcgccagagccggcaggtggctgcttgttgtagacgcatctcggtgctgagtgcctggcacacttgaggctggggcatgccctgttgactggaacggggtcccatgcccagcaggcccacgtggtatgttggtgctcaggagaggtggtggagtttggtttctcagacagagccttgagacagcgagtcagtggaggctgggcctccagaccttctttttggggtttttgttttgttttttagaaacagggtctcactctgctgtccagtgtagagtgccatggagtgat

SEQ ID NO: 41421 - DNA, 1126 bp, Homo sapiens
gagacagagtcttgctctgttacccaggctggatggaatacaatggcacaatctcagctcactgcaacctccgcctcccaggttcaagtgattctcctgactcagcctcctgagtagctgggattacaggcgcttgctaccattcccagctaatttttctatttttagtagagacggggtttcaccatgttggccaggatggtctcaaactcctgacctcaggtggtcaggccttggcctcccacagtgctgggattacaggcgtgagccaacgcgtctgtcccacccagttaatttttgtatttttagtagagatggggtttcaccatgttggtcaggctggtctcgaactcctgagctcaggtgatccacccacctcagtctcccaatatgcttgaattataggcatgagccgctgcgcctgtttcttttctttcttttttttttttttgaggcagagtcttgctctattgcccaggctggagtgcaatggcgcgatctcggctcactgcaagctccgcctcccaggttcacaccattctgcctcagcctcccaagtagctgggactacaggtgcccaccaccacgcccggctaattttttgcatttttagtagagacggggtttcaccgtgttagccaggatggtctcgatctcctgacctcgtgatctgcccgcctcggcctcccaaagtgctgggattacaggcgtgagccaccgtgcccggcctgtttctttactttcttaataaacttgctttcactttatggacttgccctgaattttcccttgctcgaggttcaagaaccttctcttggggtctggatcaggacccctttctgataacacttacatgaaatatccacaagaggtgtagacagaggcagaaagtgggtttgtggttgccagggcctaggggcagaagggaatggggagagcctgcttagtggccgtgttttccccgttggaggtgaccaaactagacagtggtgatggttgcataacactgtgaacgtgctgcttgccattgaattatacactttaaatagctaactctatgtgaattccactttaacttaaaaagtggtgacaactgaatatgtacaaagcgtaactgctatattaa

SEQ ID NO: 41422 - DNA, 1080 bp, Homo sapiens
tgagcacatttaaatcctgataaggaaaatctaacagggagaagctgaaggtaggaaagaaaagggatcctcaccagtggaaggattttgaactccagcatcctgttgaagggtggggtggatataggtgcacgcagagaagagtgtgggggaagcaggttaggggagagtaaagaggagcattgaccagagaaacaacatggaagatttgcctatagaatgggactcaccagcccattgtcgtgtgatttaacctgtacttattcaaggacagcttggacagttttgttttgtttgagacagggtctcctgtgttacccaggatggagtgcagtggcgcaatcatggctcactgcaaccctgcctcaggctcaagtgattgtcctatcttagcctccgagtacctgggaccacagctgtggaccaccacgcccagctatttttttgtatttttagtagagacggggtgtccccatgttgcccaggcaagccttgaacacctaagctcaagtgatccacccccgtcatcctcccacagtgctaggattacaggtgtgagccgctgcacccagccaacagtttttcttttccctagttagtctttaatctgtcagtaagtattttgcttccaccactgtaccagtttatgaaagtcagagaaaatgaaaataaagaaatgctgcctatttattttaccactgcctattccttttttttttttttttttttttttttttttgagacatagtctcactcttgcccaggctggagtgcagtggtgcaatcttggctcactgcaacctccgcctcccgggttgaagccattatcctgcctcagcttcctgagtagctgggattacaggcgtgtgccaccatgcccggctaatttttgtatttttagtatagacggggtttcaccatgttggccaggctgttctcgaactcctgatctcaaaggatccgtccgccttggcctcccaaagtgttgggattacaggcttgagccaccgcacccagccgccactaccagttgttagccatgctgggaagaaagctgaaactgtgttaaaatggcatttg

SEQ ID NO: 41423 - DNA, 1033 bp, Homo sapiens
ccatgtgcttttctgttcccataataccaaaaactggttttgttttttgtatttttttttttaattttgagagggagtctgcttcccaagctcaagcaattctcctgcctcagcctctcaagtagctgggtttaattacaggtgtgcgccatcacgcctgggggtttcaccatgttcaacaggttggtctcgaactcctgacctcagatgatgcaccctcctcggcctcccaaagtgctgggattacaggcatgagccacactgcgcctggccccaaaaacttgttttctgaagaaaaagtttgaatttaaaaatatgtgagaatgagcaagagaaaaggagaatcaaaataaaatgtattagtaaccagatagtaaatgttaagatcaagagattaccaagaacagacaagcccaccctgcctgcctgctcttcagtgtgttattgggtccttccaagggaagtgacagtacatgtctggtgaatgagcttgtgatgagtgaatgggattccctcccaataggcaactgagagcaaagttctgggtggagggtccttggtgcatcctccacttactcttcatgccaatgggtacctcaggcctgtctgtccaacctctggactttcttaactctgccccagtctccatccttaaccactcagggccagcctcttacatgggattccttcttccaatctaaccctcctccagcccctcccctgtgtggctggggtaaggcagagtctgatcccatctggcctggcctgtgcccagaagtgcccaagaggcaagtgtcctcttgcccacaggaccccaggagatgatgggcacactaaagtttgagaactactgcctcaggcaactttataacatgcctttccaattcaggtttggatccaaatcctcattccagtacttattagctgcttataattttttgtttgtttgttttaaagaggcagggtctggtcaggcttggtggcttatgcctgtaatcctagcagtctgggaggctgaggtgggcggatcact

SEQ ID NO: 41424 - DNA, 1051 bp, Homo sapiens
ttatgctttggaatattgattgaaagaatcaaaaggacataagaggttaaggcaggaaaggtggaacaagagctaaacaacaaagcctggaaaatagactaatatcttaaaaggctgatggattgaaagaaagattcgggtgaggggggacaactgaaggtatgaatcatgggtaaagaggagggtgtggtgatctttgccaagcaccagcactggcagtggcagtatgtggggcagggtctagcgctcatgttcacgacatagaggaggacctgggcctagagccactcagtatactggtggcagagctgggttaaactttggtctcctggccccaccttccagggctcttttctctattttgtgcacttggagaaggcagttaaaagatcaaagatgtggaaagcacatgtgaaaagttaagaggacacccacatagtaagaaactcagggccaggtgcagtggctcacacctgtaagtaatcccagcactttggagaccgaggtgggaggatcagttgagcccaggagttcaagactagccctggcaacatagtgagacctcattctacaaaaaataagaaagaaagaagccaggcgtggtggtgtgaacctatagtctcagctactcaggagactgaggagggaggattgcttgagcccaggctgcagtgagctatgatcatgccactgtgttccagcctagatgacagagtgagaccctgtctcaaaaaaaaaaaaaaaaaagaaaaaatcgaatttaggcttaccacttgaggtggacttgatactcctaaaaactgaggggtaaaaaagaggtgcaggttgaggtgccaggaacaaagaatccaagactgcagctttgaggctttcaagggaagagggtccatcatgaccaagaaaaaattttcagcacatgctatgcatgtaccagatgcaaggagtgctacaaaaagtctgaagatggcgacctccagggaattaagtcaccccagcaggaaggcagccattccaaagacatcccaacacagtgtgtaacagccacaggcag

SEQ ID NO: 41425 - DNA, 1209 bp, Homo sapiens
ttttgctgttagagctatagaaatcaacatgcttggcatattttttcttgtgtaacctaagctaaatgtttggcagtggaatcacttggtcaaggggtatgtctgtctgtctgcctgtctttgtttttttctttctctttctctctctttttctttctttttttttgagcacttggtcaaggggtatgtctgtctgcctgtctttgtttctttctttcctttctctttctctctctctctttctctttctttctttctttttttttgagacagagtgctgctctgtcacccaggctggagtgcagtggtgtgatctcggctcactgcaacttctgcctcccaggttcaagcaattctcctgcctcagcctcccgagtagctgggaatacaggtgcccgccaccacacccggctaatttttttgtatttttagtagagacggggtttcaccatgttggccaggctgctctcgaactcctgacctcaagttacctgcccgcctcagcctccgaaaagtgctgggattacaggagtgagccactgtgcctgtcttaattttttttttcattgtggcaaaacacacctaaaaattactatccgaatcatttgttcagtgtgcaggtgagtggttttaagtacattcgtattgttgtgcaaccctcaccaccagccatgtccagaactcttttcctcatctcggactgaaactgtatacccattcaacatgaactccccactctccccactgccctccgtgtccctcccgctagcaaacaccattgtattttctatctgtatgattttgactactatggctacttcgtagaagcagaatcatttgtaactttttgtgactggctgatttcacttagcataatgtcctcaaggttcatgcatgttacagcatgtatcagaaattccttccttttaaggctgaataatattatattcactgtatggaggtatgtattttaaatttgcagacagatattctgaaaatatccttctaaaaggtgataaccttcactcccaccacagcaagtaggtccaaccgcccttcccccaccctcaccaatcctgcctactatccagcctcttcatgttgccagtttactccatggaagaggaatctggttattgttctcctttgcatatataagtaagactggtcaccgtttcacagatttattggcgactttttttttttttt

SEQ ID NO: 41426 - DNA, 1449 bp, Homo sapiens
caaaaatcagccgggaatggccacacatgcctataatcccagctactcaggaggttaaggcaggagaatcacttgaaccccggatggaggttgcagtgagctgagatagcaccactgcattccagcctgggtgataagcaagactccatctcagaaaaaaaaaaaaaaaaaaaaaaaagagtgttatgtgtcgctgttgttactctttgctcaatattttttttgagcataccactttgtttattcattcttaaattgacagactttaagccagtttctagtttgagataattaaaaatcgagctgctatgaacattcatgtatatgtctcttagagaacatgtgtacctatttctgttgggtatattcctatgaatggggttgttgaattgtaagttatatgtaacttcaagtttggtaattacgataaaaattttttccaaagtgtaccactggtataaaaatagacagaccagtggaacagaataaagagcgcggaaataaagccaaatactacagccaacagatcatcgacaaggtaaacaaaaacttaaagtggggaaaggacaccctattcaacaaatgctgctgggataattggcaagccacacgtagaagaataaaactggatcctcatctctcaccttatacgaaaatcaactcaagatggatcagacacttaaatctaagacctgaaagcataaaaattctagaagataacatcggagaaacccttctaaactttggcctaggcaagatttcatgaccaagaactcaaaagcaaatgcaacaaaaagataagtagatgagagttaattaaactaaaaagcttctgcacagcaaaagaaataatcagcagagttaacagacaacccacagagtgggagaaaaatcttcacaatctatacgtccaacaaaggattaatatccagaatctataaagaactcaaacaaattagcaagaacaaaacaagcaattctatcaaaaagtgggctaagtacatgaatagacagttctcaaaagatgatatacaaatggccaacaagcatatggaaaaatgcttaacatcactaatgatcagggaaatgcaaatcaaaaccacaatgcgataccaccttactcctgcaagaatggccataatcagaaataaaaaaataatagttgttggtgtggatgtgttgaaaagggaacactttcacactgttagtgggaatgtaaactagtacaaccactgtggaaaacggtatgtggattccttaaagaactaaaaatagatctaccgtttgatccagcaatcccactactaggtatctacccagaggaaaacaagttcactcttggtcctttacattccgtggggagaagcagtagaaaattaccgggttattcaccccgagtctaagcagctgaataggaaaatagctttaatagccctgttaggacctagg

SEQ ID NO: 41427 - DNA, 1048 bp, Homo sapiens
gagaccaggcgttcgagaccagcctggtcaacctggagaaaccccgtctctactaaaaatacaaaaagcctggtgcggtggcacacctgttagtcctagctactcaagaggctgaagcataggaattgtgtgaacccaggaggcggaggttgcagtgagccgagattgggcccctccactccagcctgaggtacagcaacactctgtctcaatcaatcaatcaatcaatcaataactgtccaggtgtggtggcacagccctgtagtcagagctaatcaaggggctgaggtgggaggatcgcctgagcccaggatatggaggctgcagtgagctttgatctcaccactgcactccagcttgggggacagggcaagtctatctcaaaaaagtaaaataaattggatacattgatattttgctaggaccctgccttctacaggcatctagtctaatgggactgggagtaatcagggcagatgacctaatcccagtgtcacattataataggatgtaactggagagctatgggcatgcagaagttggaagatgagggaaggcatcacagaggctgtggggtgaactgacttcaaggaatgggtccttcccttcagaaccacatgtgtgtgggacacccagacagaaaacacaaacgcaaagtcgagtggagggcatttggaaggagcagtgaagccaagccaggaaacaccaagatggtgagccagtgtggttgtagagattgtagagagggtggaattggcactgttaccctggcctcgatagagaaagacatcagctaaggaggttgttcaggtgggcagtgaggttgttgtgctgtggaaagatgttcaggctgcactagggagccccctggcttggggagagactccaggagaccctggcagggagcatttgacagtggattcgaatgatgcaagggggacctgaactgtggcctctgtcgtgggaacccggaggaggacgatggcatttgcggttgatgtgggaaggagagagagagaagaaccagaaacgtctgcttgctggggga

SEQ ID NO: 41428 - DNA, 1048 bp, Homo sapiens; identical to SEQ ID NO: 41427

SEQ ID NO: 41429 - DNA, 1056 bp, Homo sapiens
tcggctgcagtgagccaaggttgagacactgccctccaacctgggcaacagagcgagactctgtctcacaaaaagaaaagaaaaagactgtgggagcatctggtgggagatgctggagggagagaggagaggaactgtgggtttggaagctgtgccctgctccaggcggtgcgttgaagcaggaacaccgttccgtagaaaacaaccttactttgtccgacaccctcagatctttgtcccagaccaggagtcttttaacgacaggatcctctgtgattagagagcagatgtcagcgtgagaagcaggacagggtttctgtgggagcagcagagcagcgaggagaagtgtgcttcccggggggtaagtctcaggattgtggccgcaggtgaggtggatgggagaggggagaatgactttcactgggcaagggacagaggctcctgctcggagagtcccctgagaagaggccgaaggaggccctgggtgtgagaatctatgggatgtagagctgggaataagccaggatgccctcccagcagacacggagaaccactgcagagtcataaaggaattcccatcatttcctcatgagacagtcacatcagggtgcgaccatggccttggtatcccccactatggatggagacacttaggtttagaaaagtcagtaagagacattaagtttcagagagcacagctgaagccactttctttgattttttattttgttttatttatttatttatttacttacttacttattgagatagagtcttgctctgtgggccaggctggaatgcagtggcacaatctcagctcactgcaacctcgacctcccaagttcaagcgattctcctgtctcagtcccctgagtagctgggattacaggcgtgtgctaccacgcccggctaatttttgtatttttagtagagatcaggttttactatgttggtcagactggtctctagctcctgacctcaggtgatccacctgcctcggcctcccaaagtgctgggattacaggtatgagctaccgcaactggccttgctttttc

SEQ ID NO: 41430 - DNA, 1056 bp, Homo sapiens; identical to SEQ ID NO: 41429

SEQ ID NO: 41431 - DNA, 1061 bp, Homo sapiens
atgttgcctgggctggtctcgaactcctggcctgaagcaatctgcctgccttggcctcccaaattgctgggattacagatgatgtgagccactgtgtccagccctcactgtacgggttttctaaaaaaaaaaagattaaatttgtcttatttgccacaaggtaaattaaccttttctcctctcctttttaaagagtatttccttgataaacgtggtaatataaataacttttgtgcctttgacatgtatctaaatcttttaaaaaggtgaatgaacttcttgccaacactacaacccaggaatttttttttttttttttttttttgagacggaatctcactctcacccaggctggagtgcagtggtgtgatctcggctcactgcaacctctacttcctgggttcaagcaattcccccgtctcaacctcctgagtagctgagactacagcgcctgccaccacgcctggctaatttttgtatttttagtagagacggagtttcaccttgttggtctggctcgtcttgaactcctgacctcaggtgatccacccacctcaggctcccaaagtgctgggattacccgcctgatccaccacgcccagccacaacccaggaatttttttcttaagagcctgagagtcttgtctttgaaatgtaaacctcgaggaagatagtgtccctatcttcctgttgcctagggagtttagcctaggcaccttgagctgttactacctgcttgtcaaggagatatgagaagttttgttttttcaccggatacaggtaattaactagcatgggtggccaccttgatttccaggtgaatttaggatgagtgtttaagaatgcatagcaggccaggtgcggtggctcacacctgtaatcccagcactctgggggaggccgagatgggcggatcacttgaagccacacagaaatcaaaagaaggagtttgagtccagcctggccaatatggcgaaactctgtctctactaaaatacaaatattagctgggcatgatggcacatgtctgtaattccagctactcgggaggcttaagtatg

SEQ ID NO: 41432 - DNA, 1061 bp, Homo sapiens; identical to SEQ ID NO: 41431

SEQ ID NO: 41433 - DNA, 1054 bp, Homo sapiens
tggcaccatcatggctcactgtagcctcaacttcccaggctcaagcaatcctcccatctcagcctcctgagtagctgggactacaggcatgcaccaccacacctggataatttttttttttgtagaggtgggggtctcgctgtgttgcccaggctgtccttcaactcctggcctcaagggatcctcccagctcaccctcccaaaatgctgggatcacaggcatgagccaccgcaatggcccatttcttcatgtcgttttccaactgttcagccaacgcttaactctgaaccaactgccaatctttgaatctgctagtgacctgaaagcctttccaggctgacccaatgtgtacctctcatgtattgatttatgtctttgcctgtaactgctgtctccctaagatgtataaaaccaagctgtaacccaaccactttgggctcacgttctcaggaccccctgaggctgtgtcaccagccatggtcactcaagtaggaggcccagaataaaactcttgacagactttgagtctttttggtcaacataacctaaccctaaacataatcctcctggggaaggtgagatcacaggtatctcttttcttcgttcgatctgtgtatttcctgatttctctacagtttttaggcattcgctgtgtgatctagaaaagctacagagtctcgctccgtcgccaggctggagtccaggggcgcgatctcggctcactgcaacctccacctcccgagttcaaactattctcctgcctcagcccccgagtagctgggattacaggcacacgccactactcccagctaatttttgtatttttggtagagaagggatttcaccatgttggccaggatggtctctatctcttgacctcgcgatccgcccgcctcggcctcccaaagtgctgggatttataggcgtgagccaccgcgcccagccacaaattctattttctttctcttccttggaaagcatcgctgggcatttatcctgtcctagtatttgagtgaaacttctcttagcatttcagcgcagtgaccacgatac

SEQ ID NO: 41434 - DNA, 1054 bp, Homo sapiens; identical to SEQ ID NO: 41433

SEQ ID NO: 41435 - DNA, 1084 bp, Homo sapiens
ttctttttttggaaacagagtctcactctgtcacccaggctgtcgtgtttacggctcactgcagcctcaaactcctgtgctcaagtgatcctcccacttcagcctcccaagtagctgggagtatagtcatgtgccacaatgcccagcgaattttttaatttttagtagagacaggttttgctatgttgcccaggctggtcttgaactcctgggctcaagtgatcctcttctttgacctcccagtgttggcattacaggcatgagtcaccacagctggcctagaatacttttctaaagataaatttctgttctctatttggttatgtaattcatgcaggaaagacagtttctaaaatgttgagtaggcttctaagcaggaaggtttttttgttttgttaccattatgagctcgtgggtttaaacagatagtaaatatttcagtacatcaaagttgtgattctttttgaaaattaaatggctccatctttggccagacaaaatccctttaagttggtttctgagtccttttgaaatatatttgatatatttgatagcaaatctatacatacaatatatatttgatagcattattttctgttcagcattttattttgaaatcatttcaaattttcagaaaaattgcacggattttacaaagaaatcccagctacttccttttgttcagatacttcattcttaacattttcccacattaatcatttatatgcatatatacatatatgtgtgtacatatttttatatattttttttctgaactgtttgagagtgggtatgatttgtcatgcctctttaccttataaagttttagattatatctcataaaatcaagaactttctattaaatacccatagcacagtaattgaattcaggaaatttatcattgatttaatacttttatctaaactgtagttcattttccagttttgccaatttcccaataatttcctttatagcaatttttaatttttggtagaagattcagtctaggactgtcaattgcctttagttttcatgctttttaaggctgtttaatacggatttgttcctcagtgccattataat

SEQ ID NO: 41436 - DNA, 1084 bp, Homo sapiens; identical to SEQ ID NO: 41435

SEQ ID NO: 41437 - DNA, 1084 bp, Homo sapiens; identical to SEQ ID NO: 41435

SEQ ID NO: 41438 - DNA, 1084 bp, Homo sapiens; identical to SEQ ID NO: 41435

SEQ ID NO: 41439 - DNA, 1031 bp, Homo sapiens
cttgtgtgtaattgaaatacatatgtcacatatatatcatacatactattgcatattagggtgcaatatttatatttgtgtatatacatgttattgatgttaatgaagtatccatcagtttctattttctttagtttgtttttttaaatcagctttttctgtcaagctttttcaggtatcttcacggatacaagatttttcttctttgctgtgttatagtggcttatcatattaatagatttccaaatattaaactagtctatattattggaataagtcccatttggctattgtatattatgtttttaatctggtactggattttgtttgattatgtttcattttgggtttttgtattgatgtaagtggtattggcatgtaattttatgttatttattggttgatcagtcttctaacccctactacctccttgccttctggactaacttaacccagaaggttattactctctctcggtgattttatcagctcctgtggcctgactgtggataagcttggatgttctgctttagtttctcagcccacagcctagcggccctgcctctgctatctcttgggatctacatggtcctagctgtatcactggatttgaaccccttgttgatatgttctttataaataataggataatgcagcctgcttactgggcacttcctttttctaaactacaagtttgggcagggcgtgctggctcaagcctgtaatcccaacactttgggaggccaaggcaggtggattgctggagcccaggagttttgcatttttctttttttttttttttttttttgagacaaggtctcactctgttgcctaggctggagtgcagtgttgcattcacagctcactgcagccttgacctcccaggctcaagtgatcctcctgccttagcctcccaagtagctagaactacaggcgtgtgccatgatgcccagccaattttttttttttaatttatttttagcagagatgaggtcttactatgttgcccaagctggtctcgaactcctgag

SEQ ID NO: 41440 - DNA, 1031 bp, Homo sapiens; identical to SEQ ID NO: 41439

SEQ ID NO: 41441 - DNA, 1031 bp, Homo sapiens; identical to SEQ ID NO: 41439

SEQ ID NO: 41442 - DNA, 1031 bp, Homo sapiens; identical to SEQ ID NO: 41439

SEQ ID NO: 41443 - DNA, 1020 bp, Homo sapiens
ttacaaaggaggagagggataggattccaggacaatctcaaaactattgctttttcctaaattcattgcaaccttaaaatcctagcaagttctttaatgtaaattaacaagctaattctagaattcatatgcatattcaaaagtcgaataattgtcaaggctatcctgtagaatggacagagaggattgaaatttctaaatatcaagacctgttataaagccatagaaataatgaaggtgttaatttggcacaaggatgaaaaaactgactagtggaacagcatacagattcaaaagtagacccacgtgtataccatcacctgagttttgagaaaggtgacattgaagtgtagtgggggaaagggtgttctttccagtaaatgtactttgccaataaaattttgtaatttgataaaaagttatttggaggtggattgcagatctgaatatgaaatgtgaaagctttacaaagaaatcttaggacagtttgtaatcttggagtaagcaaaggtttattgagacccaaaaagcattaacccataaaattagaacttaatattaaatttgagaacttctatttatcagaaagaccaccagtaagaaaatgaacaggaaatcatggggaggagaagatatttgcagttcatgtatgtgacaacagcaccgagtatagcagaagtgttggcaaactttataaagcaaggcaccagatggtgaaaattttcagctttgtcacaactgctcatctttgctattgtgtgaaagcatccatacaccatgcattaaaaaaaaaatgagcatggctgcttcccagtaaaaccattcacaatcccaggtggcagtctggatttggtctgcactcatagttttctggtccctgatctcgaatatgtaaagagcacctacaaatcaacaagggggaaactggaaaaggcaaaagactttagaggatatccactcactttagaggatatccagacggccaataagcatgaaaagatgtgttagctttattagtaa

SEQ ID NO: 41444 - DNA, 1090 bp, Homo sapiens
gcaccactgtgccccagcctgggtggcagagtgagaccctgtctcaaaaaaataaataaaaataaataaatcccactctgttgacttaaaaataaataaataaacattttttggcaataaagctatgtattagggaaaatctcctacttacctgttgctctgcctttcccattagtatgtctgccattttatggtcaggtcaattttgaaattgtttaaagccaaatctccaaaggggtgttgaacttgattgttgatgttgagacgaaaatatcaatcatatttatatttaataccattctttaaaaatactcatctaggccaggcacggtggtcacgcctgtaatcccagcactttgggaagccagggcaggtggatcaccaggtcaggagttcgagaccagcctggccaagatggtgaaactccatctctactaaaaatacaaaaattagccgggtgtgatggtggtcacctgtaattccagctgctcgggacgctgaggcaggagaatcacttgaaccgggaggctgaggttgcagtgagttgagatcacatcactgcactctagcctgggcaacagagcaagactccatctcaaaaaaaaaaacttatcttttgctgggcgtggtggcttacacctgtaatcccagcactttgggaggctgaggcaggtggatcacctgaggtcaagagttcgagaccagactgaccaacatggtgaaaccccatctctactaaatacaaaaaatttgctgggcacggtggtgcatgcctctaatcccagctacctggaactacctggaaggctgaggcaggagaatcgcttgaacccaggaggtggaggttccagtgagccgagattgtgccattgcactccagcctgggcgacagagcaaaactccatctaaaaaaaaagaaaaaccaacttatctttactgataaagtgtactcatactatggtatatatatctcaaaaaatatttggaatatttttgtttccctttcttaacggattggaatgcacagttttgtaaactgtggggttaaacttctagctgaggtatttaatatcctaaatcagcttccaaa

SEQ ID NO: 41445 - DNA, 1117 bp, Homo sapiens
aaaaaaaaaaaaaaaaaaaccataaaataaataaacttagcactacagtctggctgtttgatatggggtacaccaaaccctcaactcgaaagaacttgtcatcccttgttttaaggacacaggaaggtatacaatttaagaacaatttgtttttttaatcagaaaatgggagtgggggagtcctgcttaaaatagcaacccttagttatctggaaaatgttttcctgaacatcagtttcccgaaagttctgggttgctgagattttgttttagttttagcctagggatattactctattcttcttggttcttttattaattttcaaaatagttacaggtaataatacctaattatttcattgatacaacaattgatgtaactaattcagtatagtaaagaagcaaaaaatttttgcaaagaaaaattatatgagctggtagagttttgtttctgttctttttatccttctaagataaatcaatgtgattttacagattaatactgattatagcaactcttcttggaatacatttcttccacatacgtgtgaaagagtagttggaaatctcaagtttttaataaatcacatgatcattaaaatagccctgatcctatcttggggtacaaatacttagtgtgaaatgtgccccttccctgtttcagccttctgttttacctcctcattttcatgttctcccagatgttaaaagtgatcctggtatctgattcctctgtaccccggtgcttcctgcttgttcgctcatctttcttctgctgaaagctggacttgcttcttgttttgctttctttggtcaactgggttctggagaggcacttttctgatgaggaaaccccttctgtggtgtccccgaggcccctgctgggaggggctgctgagctgtgggctccttgagcctcctcgcagaagcgggtgatgagtatggactcataaacgcaaggccatgaaaccaatcctctgctttttccttgtaagccaacgacggggcctttgattccagactctaaggtagctttggagtccgtttcgtttccagcccactgctcagccatggcacagcacaggggtggagccacgggtagtaaaggcctgcagaa

SEQ ID NO: 41446 - DNA, 1098 bp, Homo sapiens
ggcaaaaccctgtctctactaaaaatacaaaaaaattagccaggcatggtggcgcacacctgtaatcccagctaatagggaggctgaggcacgagaatcacttgaacccaggaggcagaggttgcagtgagccaagattgtgccattgcactccagcctcggtgacagtgagactctgtcttaataaataataaaaaataaagagtggatgtttcctgaccaacatggtaaggtgggtgcatgaatgtctgtgttcttcttagtgaactttggcccttaaaaatagatgatgaaatggacaaagaatgttttgagggttaatactttaaactgatctattacattgttctattccaagaatattatctgcctttcctctttcacactttttttttttagtagataagagaatgtctctagaaaacaggttagctactaagtgaaatgtcaagattgttttctagcatttttctataggtggactcagaggaaagaatgtttcttcatgtctcagtatttagttcaggctcagtattgacgtctaccctcaaaacttttaacaatccatcataaaatcagatctttgctgtcactcactgtggctgttacagaaagaatgggccagagctggtcttagagaaaaacaagatggacagctacttgttgttcttttgtttacttagaaaagaaaattcacacacacacacaaaagcttggtctagcagtactggaagatagattttctaccatcaatgttgtaatttcaaacttgaaagttgcaggaactgccagataggctttgcacattgtttatgggcgcctcatatatgtatatatatggggacagagtctcgctctgtcacccaggctggagtacagtggcataatcatagctcactgtacccttgacctcctgggctcaagcgatcctccctcctcagcctcctgagtagctgggaccacaggcacatgccactacacctggctgatttttttttaatttttgtagaaacggggtcttactatgttgcccaggctggtcttgaactcctggcctcaagcagtcctcccacctcagcctcccaaagtgctgggatt

SEQ ID NO: 41447 - DNA, 1035 bp, Homo sapiens
agtgcaccgccatgctcagctaatttttcgatttttttgtagggacacgatcttgttatgttgtccaggctagtctcaaactcctgggctcaagtgatccacatcagcctcccagagtgctgagattacagacaaaccaccacacctggctttattttgtgtgtgtgtgtgcatttccaggtagacggcaggcatcagtacatttctcctcaatactgagtagagttcaatgtttgtttttttcttgtaagataaaatttacttacagtggaatgcatctatcttgagtgaacactatgtgagttttaacaaatgcctgcatctctgtgaactgaaaccctatcaaggtttaccatcactccagaaagttctctcatacttccttccagtctcagctcccttctgcccacattccccaagaggcaaccagtgttctggtttttttctactgtagattagttttgtcttttctagaacttgatatgaatggagcatctactcttttgatgacgtttcttttgctctgcattttttttagatttatccacatcttatgtctcatttgcccagtatgtgaatatatgacagttgttgatgtattcttttcatgacagttatctgggctctttgtagttcagctattatgaacaaagctaccatgaacattctcgtacaagtcttttaatggacagatattttcacttagataaatattgtagtggaattgttggctagatatgtgtttagttttgtaagaaacccccataaccttctcctaagtgactataccatttgtggttctgtcagtgctgtatgagagttctgattgctctatgtcctcactaactttttttttttttttttttttgagagagtctctgtcgcccaggctggagtgcagtggcacaatctcggctcactgcaacctccacctctggggttcaagcagttctcctccctcagcctcccaagtagctgggattacaggtgtgcaccaccacacctggctaatttttgtatttttggtagagacgg

SEQ ID NO: 41448 - DNA, 1294 bp, Homo sapiens
accttggtggggtccgaagcctcgtcagaccacaaggtcttgcccgtgtaccacacacaaatccaggcttttattttttttttttttccccccccgagatggagtcttgctccagagctggagtgcagtggtgcagtctcggctcactgcaacctccacctcctgggttcaagcgattcttctgcctcagcctcccgagtagttgggattacaggcatgcgccaccacacccagctaattttgtatttttagtagagacacagtttctccatgttggtcaggctggtctcaaactcctgacctctgatgatctgcccgcctcggcctcccaaagttctgggattacaggcgtgagccaccacgcccggcccaggcttttatttttaatagtttaaacttcagatgactcagaacaatagaatgatatgccacttttgccctgaagactgttagtgttgagagtaagtagtcatttaaaataggtttaaagagaagattgaacattaagtcaacaatagaacaggggagtgtttttctatgctcgtggcaaaaagtgtggagatgatgttcaaggggggccctgggggaccccagactccttggtggcccagggcagagctgtcctggagatagccgtgtggcgcatttgcagtctgctgtgaaagatgggaaattcctgttttaactcagctcaaattcttcttttctcttttccttccacaggggaccgtgattagggtattttccattccagaaggacaaaaactctttgagtttcggagaggagtaaagaggtaaagtacgtgaatgtccagaatggattctggaggttgtatttggatttcagttttatgttatctatgaacaaacaagtagaacccccaggagaattccacacgagcatttctagcccggctgggtcaccgggtaagatctgggcgtcggtcttgtcatgggaattgaagagcactttcagaaaagcaaattgggtttttgtttgcgatcccaccagctagcgtgagagttgtgaagagctcacgcaaccaggtgggccctccagtgcccggcagctcccagcctgctgtaagggacggggcggcgacgtcatgggtagcacaccctcccctttaaaggccacgctctgagaacctgttccagctctccagctccgcctccaccctcagcaaatggcattggccccttcttttaacccagaagccgcagcctggagttctcttgtcttcctccctccaggctgcaaagcttccctcatcggtgcttacatgcctcctgt

SEQ ID NO: 41449 - DNA, 1105 bp, Homo sapiens
tagagacggggggtttcaccatgttggccaggatggtctcgatatcttgacctcatgatccgcccaccttggcctcccaaagtgctgggattacaagcttgagccaccgtgcccggccctttgctctgttcttaaactttactgaggttgccgatttaccctctggtgtggaaagaatggctgtaacttaaattactgagttttcttttactcaccttaggactataaatccatcctacttcagctaaaagtggtttagtgaaatcctactccttttgtcatgtggaagcttgcagctgtgttaacgaattgttcttagtatttccttttgaacattttcctctctcaaggaaaatgtttgagaaggtggctagaggggaataaaacttaccagcaggcccaagtgtgcccgtgacaggaactcttctccgccacttgagttgaacccctggggcagctgctggctccggtggcccgccccaacctgtgcgtctccccaggtgcgtgagcatctgctccctggccttcagcatggacggcatgttcctctccgcctccagcaacactgagaccgtgcacatcttcaaactcgagactgtgaaagaaaagtgagttgcaaatatacgtttctttaaaaatgatgcaaaaccctttgtccccacttgctgccgggatgagaggtaagcacggacccgcccaccctctgacatcgttagccagtgaagaccccggagctggccatggagcgagcacctccgcatccaggctcggcagtgaggaggatgggccccagcagatgagcttctcccacaggcagcacgcagggtagacagagccctcgcgtagggcatggagggcccaggtggacatccttttgtcagtgaagatggcctctcctcaggttcccctcacgacaaaagcgtttgtgatcagacagcccactagggtgaatggctcgtctcttaccttcccacgggtaagcagagacatggacggcttccacaagaatttattatcgcaatgaatgtgtagcatgaggggggtcttatcttttaagaggggcttactctgttgcccaggctgcagtgcagtggtacagtcatta

SEQ ID NO: 41450 - DNA, 1088 bp, Homo sapiens
ttttaattgggaccatttttagccctcaccgggaggcttccgaaaaccccccaggcatctccctcggggcccacaggggtgacgtgtgcccaccctataccaggagctccctaccctcatctcggagcccccagcacccacaccagctgccccttctatgggtggggctttcagctctagaagtaaaagggagttgcccaaggcagacctgagctcagagcctgtgtccttgaggggcccttggtgggcagcaggtccccctcctcccacccagagccccccccttccatccggaagtgttgcctaccaccgaggctacaaaacccacatgccagtccctactcaatgcccctaggaccgaccgacccggcgtgcccgggaatgccccagttttctcactgaacaccttccatccaggcaccctctcatccctgggacggtgggtcacccagccacccacagataagcacggtagggggttggagggtgtcccccgaaaagacatgtccactggaacctcagataggctctcactgggaataacggactctgcagatggaattaaggtaaggctctcgagataagcgtgcctgattagagtgagccctaaatccaatgactcccgtccttaagagacacagagcgcactcccacgtaacgagtgcctgacggccgggacagagactgcagagaagcagcaacgggcccaggagcgccaagcgtggcccgcagccaccagaggctggagagaggcctgggaaggattctccgtgagagactagagaaggagccaaccctgcctgcaccttgatctgggacttctggcctccagagctgtaagacaataggtttctgctgctgaagccacccagcgtgtgggcatttgtaaccgcggcactagggaatgaacacagtaggtgggccaggcacagtgactcacacctgtaaccccagcactttgggaggccgagacaggaggatcacttgaagccaggagttcaagaccagcctaggcaacacggcgagaccccatttctacataatattgaaaaattagccaggtgtggtggtgcacacctgtagtccca

SEQ ID NO: 41451 - DNA, 1026 bp, Homo sapiens
gcagcctcagcctcctgcctcagcgatcctcctgcctcagcctcccaagtagctgggaccacaggtttgcaccaccactcccagctaattaaaaaaagtaatttgtagagacgggggtggggtgggggtcttgctatgttgcccaggctggtctcaaactcctagactcaaacaatcctcctgccttggcctcccaaagtgttgcgatcacaggcatgagcccctgtccctggcccctattatttctctaactggggaaagtcatgtgggaacagatgtagcttgccttggcctctgaccggccctgcctgcgttcctgggtgctctctgctgcttctcatgtgtgccactgtggggactcggccgcccaccccaccccgtggtgttaccttgcgtgtgtagttctgtgagctcagggctatggtctgccagaactagggggcgtggggccccagtaccagcccaaggcctcctctctgcaggtatggacctgtctgccaatcaggacgaggagaccgaccaggagaccttccagctggagatcgaccgcgacaccaaaaagtgtgccttccgtacccacacgggcaagtactggacgctgacggccaccgggggcgtgcagtccaccgcctccagcaagtgagtgcctcgctcccacctgtcaccgcccccaccaccttgcctgggctaccccgcctgaccctgtcccgccatcccccaggaatgccagctgctactttgacatcgagtggcgtgaccggcgcatcacactgagggcgtccaatggcaagtttgtgacctccaagaagaatgggcagctggccgcctcggtggagacagcaggtaacactaaagccccagttccctggagccgtcctggagtcctggagggtctggccatgccgtggtcacttggtagccccagccaaggcctgctctgtgctgggcatccccccggactggccccgcactgtcctaccctggggactgctgtgtgaccccagctcctggccctccctctctggt

SEQ ID NO: 41452 - DNA, 1002 bp, Homo sapiens
tgatctgcccctctcggcctcccaaagtgctaggattataggcatcagtcagcgcgcccagccttgagtttctttttaagtctttccagctgccatcttaaaggatggtttgcaggggtggactagaatgggtgcgaggtggaataggctaggtgaagaatggtggcctggccacgtgtggtggctcacggctgtcttcccagcactttgggacctgaggtgggaggatggcttgaggacaggagtttgagaccagcctgagcaacatagcgcagttctttgtctctacaaaaaaatttaaaaattagccaggcttggtggcacacacttgtagtcccaggcactcaggagactaaggcaggaggatcacttgagcccaggaagtcaaggctgcagtgggccatgatcacacccctgcactccagcctgggcaatagagtgagaccctgtctccaggacaaaaaaaaaaagacaagaaaatgatttgtggaattgattacttggccccatggacgtgcttccaagctaaaataaagtgtttcaacctgtgttcccttttccctatttgtataaattactcagttacattctcattgctacttatttaagcaaagtattcttagtttgttaagaacaaagaactacaaattgtgttcattttctatccttccctgttgttaagactaaattacctgaaataggaaccatacaatttcagagtggcttttagccacaacttttatttgttgaagctttttttttttttttttttttttttgagacggtgtcttgctctgtcgcccaggctggagttcagtggtgcgatcttggctcactgcaacccccgcctcccgggttcaagcgattctcctgcctcagcctcctgagtagctgggactacaggcatgcactaccacacctggcttatttttgtatttttagtagaaacagggtttcaccatgttggccaggctggtctcaaactcttgaaatcaggtgatc

SEQ ID NO: 41453 - DNA, 1030 bp, Homo sapiens
tttttttttgagacgaagtctctctctgtcgcccaggctggagagcagtgttgcaatctcggctcactgcaacctccgcctcccgggttcacaccattctcctgcctcagcctcctgagtagctgggactacaggtgcctgccaccacacctggctaattttttgtatttttagtagagacagggtttcactgtgttagcctgaatagtctcgatctcctgaccttgtgatccgcccgcctcggcctcccaaagtgctgggattacaggcatgagccactgtgcccgacccaatctcagccttctgttagagcactgggggactgccaaagcctttgaaaaattagtcttgccattgatgattttcagctttcctaaataagttgtttcttgagcttcatcttgagttccattatcatacttagttattagtaatctgttgataatcttcaaaatttttaggtcataggtagtctcctcacaagtgtgtacagtggtacctgatagcctgagttcaaaacctgcttccttagtggtaaaatgggaatgacatcagcaccagccattagaattgcagccatttggcctagtaagggctccctacatgagatggtaaggacggcagtgatggtggcaatgaattagcatccatggcagatgttacaaggaatcaaatgtatctcattttttctattgattgtattatttattttttaaatgttcaaagtggatataaaagagtaattataatgaactctcatgtagccgtcaaccaactttgacatttatcaacttacgggcagtgataccagcacctccttatctccccacgacattatctcaaatccaatacttcatctttcacttgtattttagtgtatacatctaaagagttttttctaaaaatcaaaaatgtatttacatgaaacagtcattcagtgttcatatttctctggttgttgttttatgtatatataaaatatatatacataaaatacgtgtgtgtgtatatatgtatgtgtgtgtgtata

SEQ ID NO: 41454 - DNA, 1031 bp, Homo sapiens
gttgagtaggattccattttatggctagatcacaatttgtttctccatttgtctattgatgggcatctgggtcatttttcactttgtgccgttacaaattaagctgctatgaacattagcaaacaagcctttgttaggacatgttttcatttctcttaggtaaatatctaggagtaaaatggcttggtcctggggtgggtgtgtactttaacattttaagagacttccagactttccagaagggattgcagtgttttatagtcccaccactggtgaatgaatcttccatttgctccacatccttcccaatacttggtggggtcagtcttcttcagttttagccatctccataggtgtgtagtgtggtagtattttgttgtggttttaatttgtactttcataatgaataatgctgaacctcttttcttttttgttttgtttttgttttgaacatcttttcatgtggttatttgccatccgtatatttcctttgctaaaatgcctgttgaaatcttttgcccgtttgaaaactggtagttttcttattgttgagcttagagagttctttatatatcctcgatataagtcttttattatgtaggctgggatttgtcttttgattcttttcagtgtcttttaaagagtgcattttttgttttgggaaatttcatttctttttttttctttttattcgttgtgctgtaggtgttttaagaaatcttggctgggtatgtggctcatgcctgtaatcccagcactttgggagaacgaggcaggtagatcacttgagcccaggatttcaagactagcctgggcaacgtagggagaactcatctctatatataaaaaaaatcaaaaattaggccaggtgtggtggttcatgtgttttgggaggctgaggcgggtggctcacttgagttcagtagtttgagaccagtttgggcaacatggtgaaaccctgtctctataaaaaatacaaaaattatctgggcttggcggtgtgcgcctatagtcccagctacttgggagac

SEQ ID NO: 41455 - DNA, 1028 bp, Homo sapiens
tttaaagttttgtggccaactgcagtggctcatgtctgtaatctcagtgttttgggaggctgaggcaggaggactgtttgaacccaggagtttgagaccagcctgggcaacatgtcaagaccctgtctctccaaaaaaaaaaaaaattagctgcatctgggaactcatgcctatagtcctagttacttcggaggctgaggcaggaggattgcttgagcctgggagtttgaggctgccgtgagctatgattgcaccactgtattacagcctgagtgatagagtgagatgctgtctcaaaaaaaaagttttggaaccaggtaagtcctccaactttgttctttctccgagttatgctgtagcctgggcaacattgtgagacctcgtctttacaaaaaataaaaaaaattctctgggtgtggcggcaagcgctagtcctggctacttgggagactgaggtgagaggctcgcttcagctcaggaggtggtgactgcagtgagccattattgtgcaggtacgctgcagcctgggcagcagagtgagatcttacgtcaaccaaaataaaaaagttgttctggctcttcatggttgcttggccatttgtattttcaaatgaattttagaatcactttgtgaatttctacaaataatcttcctggtattttgattgggactgtgctgaatatttaaatcaatttgatgtgaattgacacctaaacagtattattttctgactcacaagcaaggtatacctattcatttaggccttgttttttgttgttgttgttgttttgtttttttttagtgacattcttgctctgttgcccaggctagagtacagtggtgcacagtcagagctcactgcagccttgacctccttggctcaagggatccccttgcctcagcctcatgaatagccaggactacaggcatgtgctacaacacctagctaattttttgtttttttgtagagacagtctcaccatgttgcccaggctggtcttgaactcctacgcttaagcggttctct

SEQ ID NO: 41456 - DNA, 1073 bp, Homo sapiens
atataaaatattaaaaaattgggctgggtgcggtggctcacgcctgtaatcccagcactttgggaggccaaggcgagcagatcacgagctcaggagatcgagaccatcctggctaacacggtgaaaccccgtctctactaaaaatacaaatattagccaggcgaggtggcgggcgcctgtagtcccagctactcgggaggctgaggcaggagaatggcataaaccccgggaggcagagcctgcagtgagccgagatcgcgccactgcactccagcctgggcgacagcgagactccatctcaaaaaataaaaaataaataaaaataaaatattaaaaaattagctaggcgtggtggtgttcttctatagtcttagctactcgggaggccgaggtaggagaatcacttgagccagggagttgaaggattatgccactgtactccaaccagggcaacgaaaggagaccctgtctcaaaaaaaaaaaaaaaaaaagccactccagttttctttttcgtatcgtttctctttttttttgaggtggagtctcactttgtcacctatgctggagtgcactggcatgatcttggctcactggaaactctgcctcctgggttcaactctgcctcctgcctcggtctcctaagtagctgggattacagacatgcgccgccgtgcccggctaacttttgtatttttagtagtgatggggtttcaccatgttggccaggctggtcttgaaatcttaacctcaggtcatctgcctgcctcagtctccctaagtgctgggattacaggcgtgagctaccatgcccagcccactccagttttcttatgattcatgttagcatgatatattttttccatctttttatctttaacttatttttgtctgtatatttaaagtagattcccttttttctttttttgagacggattctcgctctgtcacccaggctggagtgcagtggcgcgatctcggctcactgcaaccttcacttcccaggttcaagtgattcttctgcctcagcctcccatgtagctgggactacgggtgcaccaccacacccggctaat

SEQ ID NO: 41457 - DNA, 1290 bp, Homo sapiens
ttgctgggattttgataggaagtacactaaacttgtgtcttaatttggggggattaacatctttactatgtccctgaagtctgctttactctttattaatgtaaccattcctgctttttttgttgttgttggtttctttgtttttgagacagaatcttgttctgtgacccaggctttgtgcattggtgtgatcatagctcactgcatcctcaaaatcctcaaaatcctacatcatcaaaattttggtctcaagctatcctcctgcctcagccttcctgctagctttggactacaggcgtgtcccaccatgaccagctaatttttttatttttacttttgtagagatttggtctcgctgtgttacccaggctggtctcgaactcctagcctcaagtgatcctcctgccttggcctctgaaagtgttggaattacaggtgtgagccactgtgcctggccctgctttttttttttttttttcctccttgagatgaggtctcactctgtcacctggtctggagtgcagtggtgcgatcatggctcactgcaccctccaactcctgggctctaggaatcctccatctcagcctttggagcagttgggaccacaggcatgcaccaccatgcccagataaaattttttccctgctttgttttgattaatgcttgcatgacatatcttttttatccttttactttcagcctgcctgtgtcattacatttgaagtgagtttttctgtaaacagcgtatcgttgggttgtgctgttcaatccattttgtgagtctgtgtcttttaactctctgctgctctaggctgggtgtccttcaccctcatttatttagaacattgacttttaaggtgattattgatattttaagacttaaggcttattctgccatttaatgttttgttttttgttctgttcttttttatatgtctgtgttttcttgcttctctgtgggttatttgaatacttgaaagtgtttttcaaaattacatcattttgctttacttgagtctttctttcttttttgggggtgggtcgtggacagggtctctctgtcacctaggctggagtgtggttgcaccatctcagctcactacagcctcagtctcccaacctcaaatgatcctcctgcctcagccccgcaagtggcttggactacagctgtgcgcgaccatgcctggctaatttttgtagagacagggtttcaccatgttgcccaggctggtctcaaactcctgggctcaggccatccgcccacctcaggctcacacaatgctgggatt

SEQ ID NO: 41458 - DNA, 1046 bp, Homo sapiens
ctccagcctgggtggcagggcaagacccaaacacaagtgacggtgtgcggtgatgtggtgtttgtgcctcttctcttcccaggctgctcagagtgtcaacaaggcattggagcagtttgtgaagccggaacagcttgatggagaaaactcgtacaagtgcagcaagtacgttgggtggtgacttgattcttgatgccggcttctccagtggggatggccggcaggcttggtttgagagagtttggtgtgtctaggttgcttgagtttctgataccctctgggaagacactgcgtccctgtcgtccaaaggcgagagcccggagtgtcttgatgtgtgtgtttctgcaagatgcgcagctctgtgcctgtgaaagcctggggcatgacattattgggcagattcggtgggaggagagaggtaaaattgtctttgcaccccatggtagtgctgcttcaggtgtggctgggcacgcactgtctgccaaatagcattttcattgactttcttatgataagagggctgccgtcgggtggggagtcactttcttctgggatagggaggctccttctctcttagggtgggttcccagggtttgggatagcatttgctgaaaaactctaattttgatcattcattaatatgtttccacatgaagtcaagagtgcctattttaagaaagctcttttgtatgtttttaagtagatttccactttgtggtcaggtaatagaagtaatttttttattgtcaaatcttcaagaccagagggattttgcctttgttttaaattccacagacatttctaatatttatttttattccttttgtttctggttagggctctcttttcatataataattattattatttttaaattagatgaatttaagacatattttcacataattataccagtctgaacatgttcgtttttcagtttcttttgaattgagaggaagttgtgttaacctaattttaacattattggtggcttgcgtggcttggtttttcagaattgtcctaacttcctttcctttcatgctaat

SEQ ID NO: 41459 - DNA, 1427 bp, Homo sapiens
tgcagtagatgatgaaagaaaggttggtattatcaggaaatgttttcttaagcttttcctttctcttacacctgccatgcctccccaaattgggcatttaattcatctttaaactggttgttctgttagtcgctaacttagtaagtgcttttcttatagaaccccttctgactgagcaatatgcctccttgtattataaaatctttctgataatgcattagaaggtttttttgtcgattagtaaaagtgctttccatgttactttattcagagctaataagtgctttccttagttttctagtaactaggtgtaaaaatcatgtgttgcagctttatagtttttaaaatattttagataattcttaaactatgaaccttcttaacatcactgtcttgccagattaccgacactgtcacttgaccaatactgaccctctttacctcgcccacgcggacacacgcctcctgtagtcgctttgcctattgatgttcctttgggtctgtgaggttctgtaaactgtgctagtgctgacgatgttctgtacaacttaactcactggcgagaatacagcgtgggacccttcagccactacaacagaattttttaaattgacagttgcagaattgtggagtgtttttacattgatcttttgctaatgcaattagcattatgttttgcatgtatgacttaataaatccttgaatcatacgactggtaatactggtgtttttgagacttgatgaacaagttcctggtgtgtgtttgtttgccttgctttaaagtcctgggttgttggagacagtcattttcaatgcgtgtctccacacaggagggacagggagtgccacctccaggggagaactgggtgagcccaaatacggcaggagtggaggtgacattcatgtttggacctgtcgaacagtggcgaagctctgagggagaagcgcctatcggggtgtgtgtgcacatcctggcccagagctaggggctgaagatggagatgttgggaccctagactggccctggaagagtagaggttggtgaaccacatgcccttaagatcctttccagaggctgagtgcgtggcttacgcctctaagcccgacgctttgggaggctgacacaggaggagcgcttaagcccaggagttctagaccagcctggacaagaaagagacctacccaaaaaaaaaatgcaagagcctgaacttgtactacataaaggttcatgttagaattcgttttcttaatattcctttttattgctttgaagattgtttttgagtttttgttttttttttaagatggagttttgctcttgttgcccaggctgggagtgcaatggtgtgatctcggctcactgcaatctctgcctctcgggttcaagcgattctcctgcctcagactcccgagtagctgggattaca

SEQ ID NO: 41460 - DNA, 1042 bp, Homo sapiens
ccccctaccagggctccagcccccagggaaatctccgaccaggcccgcccaggaggtgccttggatgggggtggcttcgggaggccctaatggggagtggcggggagagacccaaggctaccgacttggcttatttcttcccaactagctgtttctcacaaagtctttattattattgtattttgagacggggtttcgctcttgtttcccaggctgtagtgcagtggcgcgatctcggcttactgcaccctccgcctcccggattcaagcaattctgcctcagcctccccagtagcttggattacaggcatgcgccatcacgcccagctaattttttttgtatttagtagagacggatttcaccatgttggtcaggctggtctcgaactcctgacctcaggtgttctacccgcctcggcctcccaaagtgctgggattataggcgtgagccaccgcgcccggcctcttttattgtttttagagatggggtccagctctatggcccaggctggaaggcagtggcacgatcacagctcactgcagcctcgacctcctgggctcaagccatccttccacctcagcctcccaagtagctgggaccacaggcgcgggccaccacgccccactgatttttaaatttttatgtagggacagtgatctcactgtgttgcccaggctggtctcgaactcttaacctcaagctatcctcctgcctgggcctcccaaagatttgggagcaggcctaagcaacttagtctgggccatttctcccaaagtcttacccattcatgctgggggtgctgaaaatcccctacttccaaatccttttccacaggtattctgcctttgactgcaactcttgtcgtcttatgtgggtgttgaattgatctgtctctgcagccagatccaggctcctggaagaaccatgtccggcagctactggtcatgccaggcacacactgctgcccaagaggagctgctgtttgaattatctgtgaatgttgggaagaggaatgccagagctgccggctgaaaattaccc

SEQ ID NO: 41461 - DNA, 1033 bp, Homo sapiens
ttccttttgtttcagatattttcctgtataattccagaatgtcttcagagagccgtgcatggattgcttcattaccttttccatacgaggtatttctctttcagagtttaaatattctcctcttttctgctttgattattaattgttgagatcctctagcttcaggaagctccttgtggtttccagcatggtgagggaaagaaggccggaaagaatcacgagtcctgagttgggagcctctactcgtagttaatctgccttttgagatggaggttttaacttgcctacttttaaaaagcgatatttacagattgtgaatttctgttaaatacatgcaaaatgtttcacatagttttctatgtaattcttactattatctcaagcccaaaggaagtggttggccgttggttactttctttagtatcatacaatttcttcaagaagaaacccccatgaacaagccatgcctgttttctttcagaaaccacaccttcattgtcctgcacctggtcttgcaagggatggtttatactgagtacacctgggaagtatttggctactgtcaggagctggagttgtccttgcattaccttcttctgccctatctgctgctaggtgtaaacctgttttttttcaccctgacttgtggaaccaatcctggtaagttgaggctcttagcatacagcatggtgacagctccactgtcttactaatagtgctgcaaacaaggagaggccccccctgaggactttgtaaaagatttgatgtgtagcattttcattacctttcagttttgagtgttttctaattttttttttcttcttcaacccatgggttatttaaaaccacttaaaatttttagtttatctttttaatgctttcacttcgttttgtcatatatagagcatgtgatcggtatggtactgttcctttttttgtttcttaagacggagtcacgctttgtcgcccaggctgcagtgcagtgaggcgatctcagctcgctgcaacctccgcctcccgggttcaagggatt

SEQ ID NO: 41462 - DNA, 1044 bp, Homo sapiens
tctccctcagcctcctgagtagtcgggaccacaggtttgcaacaccatgtctggctgattttttatattttttgtagagatggagtttcactgtgttgcccagtgtggttttgaactcctggactcaagcagtcctcccacctcggcctcctaaagtgtcggcattacaggtgtgagccattgcacccagcctgaaatgtgtgtttttaatttaggttaaaagctaaaggtgtggaccacctggacgtgtgcagtttgctaagagggaactattagtgatacccatttgcctgaggtgcaatggtccaagtggcaggcagcccagaaagcaagctctagtgtctgtgagatgtgacccactccctggacatatgacttgatttcttatcatccccatactttctttaattttttttacttttttggatatagaatcttgctctgttgcacaggctgctggaatacggtggtgcagtcataggtcactgtagcctcaaaactcttaggctcaagtgatactcccaccccagccttccaggttgctgggactgtaggcacacactaccaggcctggctgacaaaacctgcttttctgctgctgtttctgattcctcctcctctgcccttggctgttgctgctcacagggctgacaaatagtctctttctcttcctggtctgatagccataccagcactttgaaagccttcaacagcatctgtcatttttattcagtccagtattggtctcccaccagcctcctgactatttttgagccttctttttttttttctttttttgagacagagtctccctctgtcgcccaggctagaatgcagtggcatgatcttggctcactgcaacctccgccacctgggtttaaacaattctcgtgcctcagcctcctgagtagctagctgggactacaggcgcgcaccaccatgtctgactaatttttgtatttttagtagagatggggtttcaccatattggccaggctggtctcgaactcctgacctcctgatccacccatctcggcctcccaa

SEQ ID NO: 41463 - DNA, 1070 bp, Homo sapiens
ttcccttctttgtccaccgcttttatttaacattttaatgttttcttcagggaattaaaaagacagcaggatacaaatcctgtgtatcatccgagtcttataaccaggggtccacattagagccccccagaactaatcagcagtcccctgctggtcctgccctggagactcttgactccatcccttccaaggagctggtggccgcctctcctgacgcagatttggggagccctgacctcccggggcaggcctggcactgctgttggggaaggacagggggtcgcctggaatacctcctacatttcttttcttttcttttttgagacagagtctcgctctgtcacccaggctggagtgccgtggtgtgatctcggctcactgcaacctctgcctcccgggttcaagcgattctcctgcctcagcctcccggatagctgggattacagacaactgccaccacgcccagctaatttttgtatttttaatagagacgggttttcgccatgttggccaggctggcctcgaactcctgacctcaggtgatctgccttcctcggcatccaaaagtgctgggattacaggtgtgagccaccacgcctggcctacctcttagatttgtgacagtctctgtgttcaccgtgtttccaaatagactggaaacttcttgaagtgctttctatctccggcagggtgtgtacaggttcaaatcatcacatgaccgaaatttggcctctgcagtactctgcagtacctcctccttgggttcgttaatctcttgctaagttacttacccagggttatttaatagtagtaacagaaagaaagggggctcagaagaactttgggcaccgaatgcaccagccctccacataccctctgtttactgcctcagcccctcctgggggccctgggcccaagcctttgtactggggagcttgggggttcagtctgtgacagaccagccccttgatggagtatgggggagtagacagagagcaggcagggccgtggctgggaaaacgggttgttgtgggacccagttaggataatatgcagggacggagccttgg

SEQ ID NO: 41464 - DNA, 1049 bp, Homo sapiens
gggctggagtgcactggcgtgatctcagctcactgcaacctctgcctttcaggttcaagtgattccccagcctcagcctcccgagtagatgggactacaggcgcacaccaccacgcccgactaattttttgtattttagtagagataggatttcgtcatgttggccaggatggtctcaatctcctgacctcgtgatccatctgcctcggcctcccaaagtgctgggattataggcgtgagccaccgcgcccggccatcccttggttttattaaatcaatatattcttggaaaaatggccagaaagcaaacttttataaatcaaagcattgtcttccattacaaaatggaaaacatatgatgttatagggagaagagatgttgaaatcagagttgggaacggagaaagcctcctcaagtcacatgtagaaagaaggattgggattttccagtagcacaatagtaatactcaaaacgagaatctcatggtgtacacggtgcggaaagagaagcgtagtaacggagtggtgctgtttttgcagggcctcccaggtttatgcctcccaaagtgttgcgattacaagcatgagccaccacgcccagcctagttagtcctttgtattcctgaatgacaatctcaaacagtcccagtctccttggtatttttttgttactttgcaaaccaatcctaaccttcagagagagggaattttcaagcacctaccaggctccaggtactatgccagggctctccttgttgtactgtttaagcagatggtgtgggtatcactgagctattttgtagacaggactgtgagcctgcaggaggttgtatacctgccgactggtagagttaggttctgaactgagaacttcctgtctgaaacctagtggtctctctgacactttggtgattttgggaaactacttgtggtaacacctccgggcagctttatataaattctttattatttacagagaaggataatttcatttatttaaggtgtggctgtaaggtcggagttcagcatggggttgatggcttggccgt

SEQ ID NO: 41465 - DNA, 1052 bp, Homo sapiens
cgccatcgggggtctgctggcggagcccgcgccggccgcgctggcggaggaggagagcccgtggatctgctcggactgcggcaagacgtttgggcgccgggccgcgctggccaagcaccagcgctaccacgcgggcgagcggccgcatcgctgcgccgactgcggcaagagcttcgtgtacggctcgcacctggcgcgccaccggcgcacacacaccggcgagcggcccttcccgtgccccgagtgcggcgcgcggttcgcccgcggctcgcacttggcggcgcacgtgcgcggccacacgggcgagaagccgttcgtgtgcggcgtgtgcggtgcggggttcagccgtcgcgcgcacttgacggcgcacgggcgcgcgcacaccggggagcggccttacgcgtgtggagagtgcggccggcgcttcgggcagagcgcggcgctgacgcggcatcagtgggcgcacgccgaggagaagccgcaccgctgccccgactgcggcaagggcttcggccacagctcggacttcaagcggcatcggcgcacgcacacgggcgagaagcccttccgctgcgccgactgcggccgcggcttcgcgcagcgctccaacctggccaagcaccggcgcggccacacgggcgaacgccccttcccgtgccctgagtgcggcaagcgcttttcgcagcgctcggtgctggtcacgcaccagcgcacacatacgggcgagcggccctacgcctgcgccaactgcggccgccgcttctcgcagagctcgcacttgctcacccacatgaagacgcaccgcggagccaccgcagcgccgggctcgggttcggccccagcccccgcgcccaagcccgaggcggccgccaaggggccgtccagtgccggccccggtgagcgcggcagcgccctgctggagttcgcgggcggcacaagcttcggctccgagcaccaggccgcgttcgccgggccctcgggcgcctaccgggagggcgtcctgtgaggggcccggggccgacagcagcgcagcctgcagggccaccggcccc

SEQ ID NO: 41466 - DNA, 1023 bp, Homo sapiens
ttttagaagatttcttaagatttgattaaagacgctgatgtacaaactatagcaaggctgaaagaaaggtatgacaaaaatctttttacttcaaattcagtgggattaagtcattcttttaaaagaagaaaggtggggagcgggaaggagacttgttccataaaatgagaagttagccttttatcttaaaatctggttagagaggaactccaatgtgtacttaaattattttgcagctaattcaaatgtccaaggggaatatatatgccaaaatctgtaatatgtgagaataggaagagggagaaaaaaaatatataaagaaactggtgtttgtgatttagggaagcacataagaaggtgggggaaactgaaaggaaagtctaaataaattatctagcacctgtagtatgtgctgccttgcacattgaaggggcgtgttgggggcaacgagaggcaatattagggagattctggaatgggaaacctgtatattaaagcacatttaaacggctagatgttggataataggcagaatttgaaattaaatacagcttggcatagttatttgcattcttggtcattgtattttctagggctgcggtaacaaaatacgacaaactgggtgatttaaaacaacagatttattgtctcagttctggaggcaagatgtctgaaatcaagatgtaggtatggccatgctctctcaaggttcgaggggagaatctgttccatgcctcttagcttgttgtgttactgccaatccttagcattttttggcttgcagctatgtcactccagtctgtgactctgttatcacaacataatccctgtgtggctctgtcttcagatggtgtgctccacttcttgcaaggatactagtcgtattggattaagatccaccctaatcacctcatcttaacttgattacatctgcaaagaccctattttgaaataaggtcacgtgcagaggtactggaattaggacttcaacctatcttttgtggggacacagtttaacctgta

SEQ ID NO: 41467 - DNA, 1005 bp, Homo sapiens
ggtgagggggccgagcatgctagcccagaactctttctttctttctttctttcttgtaaagctaccagttcctttcccatgataacccattcatgagggctgaacccttagtacccagtcaccatttaaagactccagctctcaatactgccacagtggtgattaaggttcaacatgagttttggaggagacaaacattcagaccacagcaagtgcttactatgtgccaggtcctggagataaaacagtggataggcaaaaatctctgtcctcatggagcttacattctgaaacacgggttctaaaaatgtggtccctggatctgcagcatcatcatcacctgggaagttgttagaaattgaaattttcaggctccatcccagaactctttatttaactagccttccaaatgattctgatggagactcaggtttcagaaccactgatcaagatggaaaagagacagtaaacaagatgaataagtaaaataatatttgatattaataggtgctgtgggtaagcatagggtggccagtgaagactcctgaaaagtaaagacctgaaggagttggagagtgagccatatgagcacctgggtgcgtgttcttagcagagaacagttaagtgtgaagaccctggcacgtttgaggaatgacaagcagttagtattaggttcaatctatgaaattgctgctgtttgttcatttttgacctacaaaaacaccaaatactggggagaagagatcagaaagaaaggggtggagtaggatgcagattgtgggtagatccttgtaaggttttggctctctaagattaggaagacgggagggttttgagcaaatgagtgatgtgatctgatttcagttttaaaaggatcattgtggctattggtaaaaatgggccaaagaagcaaaggctaaaggaaggggaaagttggttagaatgttgttggagtagttaaaagacagagaggttgctcagaccagggtgatagcagtggagaag

SEQ ID NO: 41468 - DNA, 1238 bp, Homo sapiens
gggatttacagaggttggtgggaagcaagtgttgtagtcagagaagacagtaggaagaggagctgaccatattgggaacctttcagtaactgtagacagttcaggattgctgaagcagacataaattataaggcacagaatagcaaaagacgaggctggaaacctggacaggctctaggtcatagcctttatttatatatcatgttaataaaaaatgtttagtttttgtcttgtaggcagtggagttccgtgaaaggattcatggggtgacatggtcagcttttcattttagagagctcattctggtgacggggtatgagttaaagagggatagcacttgagtcagagaggttagatattgtaatagcctgtggggagagaggagagtctgaaataggataaatactagaaatggagaggagacaatggattagaataatatttaggaagtaatgttggcaagacttggtaattggatttggggtgaagataagggaagcattaagaatatctgtgtactttgtagtttagataatcctgtggctctgagtgaaataggaacccattggtgaataatttaggtaattaccagtaattaaggtaaaatgagcagaggaaagtaatgagtcactttggaggtgttgaattagagatgcctatggtccaggtggaagtatttagcaggcatttgtgtatgtgaatctgaaacttggagaagtctgaaaggatcaagagatcattttgtttgacaagtgtggagaaattagtggactttaatttttatcatattatttcactctgtagataaaaattgcctccctttatttaatttttatcagaaaagtaatgtgtgtacccgatgcaaaattaaaacatcaaaaggttataaaataaaaaaaaatttgtccttccttgctcatgccacccagtgctagttcccagagatagctcttgttaaatatcatatgtatatatatcttaacagattttaaaatatatacagaaacatttaaaaagccaagtgaaatcatactagaaaatatttcggtacattgtcttaaaaaataaaccttttatcttatacagttgttaaaatgaatgacattgtgttatggataaaataagtgaaggggtaaattaaagtgcagactaaccgataagcatgatctctgatgtaaattaaaagctgaacatacatatgtgatgatataggcattacccaacgatacgaaagcagt

SEQ ID NO: 41469 - DNA, 1076 bp, Homo sapiens
gtgaatcttttattttctttatctgtttttgtatttggttaactatcttttttattatttatgatactttttggttctttttgctgtacattaaaaaaatatatttcataaagaaatatgccctttaaccagcgacttcattgccagaagtttatccaatgaataaactcatagtgttttaatagtcacagcttctgagtgtgggagagatctcaattcgtaatatcaaaatgcaaaaatatattttcttccagttttgttttaattccattttctaaaatactgaaatcttagaaacatttgaaattgttactagaaagtaaggatccagctggttttgtttttttttccccaaaagattaattaattcaataccatttcttcaataagccacctttttcttgatttgaaatgctgtttattatgtattaaatttccacatgaatttttgttttccatagagtctttatttcaacctgatgaagtccctttataagattcatctggtagagaccaccagggacacatctgtaggctgacaaaggttaattagcttgctgcagtgaaggagacttgcacagcagaggaaatgtcagcatttctaaagaaggaaccagggttattataggattttggagaatggtggagtttggataaagtttaaacgcaacaatatttgataagcttaaagcacggcaagactgtgtgtcaagggttaataaacatcaggcctgggctgagaagctgactcaggattctgattccctggagactacaaaatcgcgatacatgtggaatgttgtgtctggaaaccccttatctgaagctctgagttgcaaagtgaggttgcttctgtttcataatgatctaccatcagtgcgagagtgggatgttccattctcactttataaaatttcaaataacatagtttctgacagtctgatgtagagaacagtttctcagcacattgtctttagtattaacaaatgcatttttttaaacagactgagagtttgttcagcataaataccaaattgttttcattaccttttttaaggtaatatatttttatatgt

SEQ ID NO: 41470 - DNA, 1028 bp, Homo sapiens
acagagatgttgctacccgatctttcctctggaagcttcgtctcagaggggcacccagctgtatgaggtgccagtcggcccctactgggaggtgtctcccagttaggctactgggaggtcagggccccacttgaggaggcagtctgtctgttctcagatctcaaactctgtgctgggaaaaccactgctctcatgaaagctgtcagacctggatgtttaagtctgcagaagttactgctgccttttgatcatactggtgaccagggaagcgggggaaagccggcagtaacaggcctcacccagctcccacaaagcccgaaaggccagtgccactcccaaggtgcctcttccagcagcactgagttaatttccaggcagctgctgagcagtattgagaagctgccccaggctatatgccctccccctcccccgaggaagtaagcagggctttcaggtttcacgcttccctacctgccgtggtttctttgctgctttctgcactgcctgtttgcctcctcccccgattctgtccaggaaacttcatgtttgtttgaaactgttacacagttcagctggaagtttccttctccttggggtctttccccaattccactggcagctctccccaagggcctctgtgagacaaagtcaggaatggcttccctggtgacagagagtgcccacagggctcttctgcttcttcctttatccctatatttctcacagctctctaaattaatctcagctccaggtgaggtcacatccttctctcgtgaattggccctttgggatccccagtgaggatgtgtgttcagaggcagacattccctttcacacattgggcactcagagttttttggctgtctcaggggaccagcagctgtaaactgcttcctttgaaaggtctatggattctctcggctttcctggtacgttcccgtggtagtagttcttcgagtaaaagttcacggtgtgagtctccacacactactcggtgtgtctgagtgggagctccaagttagttatgc

SEQ ID NO: 41471 - DNA, 1035 bp, Homo sapiens
tgtctttctaattatttatgtattctttaatttcttaaagcagtgttttgtagtttttgtcgtacagatctttcactgtcttggttaattcctaaggtttcttttttttgctgttgtaaatggaattattacttcaagaagtgttctagttagtgcgtaaaaatgtaactcatttttgtgttgactttgtatttgcttctttgctaaattaatttattagttctaacaggtttttttttttttttggaatctttagggttccctgcatataagatcatatcatttgtaagaagataattttactttttctttccagtttggttgtcttttgtttctttttctttcctaattgctctgggtagaacttccagtactatgttgaatagaagtgatgaaatcaggaattcttgccttgttgtagatcttagaggaaaagctttgagtcctttaccatttgatcttaaaggaaaagcttttagtcctttaccatgtgtctgatgttcactgtgggtttctcgtgagtgtttatatcatgaaagcatattgaattttgtcagatactttttctgcatcaattgagaggaccatgtagggtttttttttcctccttaattctgttaatgaggtgtattgccttgattgatttccatatgtacaactatccttgcattccaggataaatcccacttggtcatgatgtatataatcttttaatatgctgctgaattcagtttgctagtattttgttgagaatttttacatcactgttaataatggatattggtttgtagttttttttttctctttttaggttgctctcatttctatttctaaaaataattttaattgacacagtcattgtacatatttatggagtacatagtgatgttacagtacatataatgtatcagggtaattagcatatccatgatctcaaacacttctttgtgttgggaacattcagtatcctcctcctagctgtttgaaactatattattattgttaattatagtcatcctacagtactatagaata

SEQ ID NO: 41472 - DNA, 1029 bp, Homo sapiens
ggcggatcacgaggtcgggagatcgagaccatcccggctaaaacggtgaaaccccgtctctactaaaaacacaaaaaattagccgggcgtagtggcgggcgcctgtagtcccagctacttgggaggctgaggcaggagaatggcgtgaacccgggaggcggagcttgcagtgagccgagatcccgccactgcactccagcctgggcaacagagcgagactccgtctcaaaaaaaaaaaaaaaagggaagaggaacaaacctaagctaacacgttagcatgcgtatccctcatgccatgtgatgctctgtgccacctcaagactcttcagaggagagtcctcaacagcaagaaggctcttaccagatgtgccccctttggccttggactttctagcctccgtaactgtaagaaataaatgctttctctttataaattacccagtttcagttgttctgttataaataccagaaaatggactaagacataatagcaaagtggttaagagtctgaattcctgattcagattgctagtgtgactctctgtgtctgaattcatctgtaaatgggaatactagtccgtactttatagtttgcagatgctcttagtacagggttcaaatgttaactgtaattacctctcctatttttgttattgctagagagaaacctgtaatgataatcacaaaatattaataattgttgtttctgggtagtaggacttgtgatgatttcttccttctaaatccttttttaacaatgaatagcataaagctgtccctttaaaaataaaattaaaatataaattttagttgtcccgggagttcttttgtatctgaaacctcagttgtcaagcttggaaatctgtacttttaaaatatcctcaagcgattctgattacacatcaggtttggaagcacttggcataaagaacttcccccacccaattcaaagaaatagtatttaagccctcataatgtgcagtgtggttaagctgtgtctttttccagtctagtctacctcaacactct

SEQ ID NO: 41473 - DNA, 1005 bp, Homo sapiens
aagattatgcatttctaacaggctcccaggtgatgctgctgcttttaatcagtaaactacagtttgagacgaatttagattataatgtcaactcttactagctccagtgatgtcctagataacactgacatgaaaccaataaatcagagtgtcagttcacattaggatgagtttgctttcctttggctaaatcactaatagagggataaatagggactttgaaattaggacagtgctttcttcagtataatttattaatatttggattttacatctatgtaaataaccttttaaaatgttttgtttaatagatgagaacacagacattgctgaaaacctctatcagaaagttagaattctttgctgggttatgaccggccctcaaaacctagagaaaaaggccaaacacgtcaaagctacttgggcccagcgttgtaacaaagtgttgtttatgagttcagaagaaaataaagacttccctgctgtgggactgaaaaccaaagaaggcagagatcaactatactggaaaacaattaaagcttttcagtatgttcatgaacattatttagaagatgctgattggtttttgaaagcagatgatgacacgtatgtcatactagacaatttgaggtggcttctttcaaaatacgaccctgaagaacccatttactttgggagaagatttaagccttatgtaaagcagggctacatgagtggaggagcaggatatgtactaagcaaagaagccttgaaaagatttgttgatgcatttaaaacagacaagtgtacacatagttcctccattgaagacttagcactggggagatgcatggaaattatgaatgtagaagcaggagattccagagataccattggaaaagaaacttttcatccctttgtgccagaacaccatttaattaaaggttatctacctagaacgttttggtactggaattacaactattatcctcctgtagaggtaagtttagaaattttattactatg

SEQ ID NO: 41474 - DNA, 1032 bp, Homo sapiens
agaatattgtttcatttaaaaatactttccacagtttcacttggtttcaccaatttcaattggttttaaatcattaggatgtctaagtaaactattgatttcttccacaggtctagtacattaggttcctctgctttaccttgccatctttaatgtttgtattcttttaaaattagctggtcctttataagtatgtaaatattgtagctagcaatgtgctgtttattaacaatacctgtttccactacttttttagggtcctggttgctgctctgatcttgcagtttcttttcactatgttgattctacaaccatgtatgagttagaatacctcgtttatcatcttcgtccatatggttatttatacagatatcaacctaccttacctgaacgtatactaaaggaaattagtcaagcaaacaaaaatgaagatacaaaagtgaagttaggaaatccttgaaagaaaatcatgaatgaacaaaggtaatatgtctagcactgcactgaaaaaggacttctgcatttctgacatagaacactggaatcccagtgaggaattctaagtgaacattccttatagaaacctttcacatgaatgactataaactgaagctttaaatgagctgtgaagtgtgttaaaatgtgttttgatacagtaatatataaatatgtctatatatatgaggaacttgtgttttttaaatggtggccaggtagaggaactagaaaagagattttgttgcctgttttctgaccatctgtgttattgtcactgagaaactaaaatagtaaatttactaaaactacactgcaccatgttagtaataaacagatctgccttaaagaaaagaaaattttagaaagaaatattgttgctcagtgttgttaatatagctcaagaattgagtttatatttgcagtatgctataaatgatacccccctaccacacccacacacacagtttttgtctaatgaaaatgttgctgtgattatttataattggtagtatttcttccagaagaagctaaaat

SEQ ID NO: 41475 - DNA, 1074 bp, Homo sapiens
aagtagcatggtgtcccactaggactggtctacttgccactttaacaagggatagtaatattattagattgtatgatatgcagcatacacccactcccattggggatgaaactgaacccacaataattgaaagaagtgtgcaaccttgtgacaattacattgcttcctttgcgtggcatccaacaagtcaaaatcgaatgatagttgtaactcccaaccgaacaatgtcagacttcactgtttttgaaaggatatctcttgcctggagcccaattacatctttaatgtgggcttgtggtcgtcatttatatgaatgtacggaagaagaaaatgataattctttagaaaaagatatagcaacgaagatgcgtcttcgggctttatcaaggtatggacttgatacagagcaggtgtggaggaaccacattttagctggaaatgaagatccacagctcaagtcactctggtatactctgcactatatccttttcattgtgaattttgtgaggtgaatcaggtagaaatgttcttgaagtttgccaaaaggtcagtctgtaaatatgctcaatgttttatatacaaatacaagttacataatactaacattataaagtaaaattgttctaaactttcgaacttgaaatactgctttgtagattgtgtaggaggaagaaaagtgtatctctgcaatagagtcgaaccaccttatttacactgatacttattatgaattggctccaaatcaaaataaatttagctttgaaatatattgtcatgcatcactagtatttcctatgcatttaaatacttatgaagcaatacacagaagatatggatcagaaatctccaggcaacaaaggatcattggtttatgcaggaattaaatcaattgtaaagtcatcgttgggtaagaaaattctatttcattttctccaatatgtttataacttttgtacttttattttgccccctgtcatttggcagaaattatctagttatttcaggatcatgtacataattttttttgttttctgattggatatttcattgtattgttgagttaaatgcatactt

SEQ ID NO: 41476 - DNA, 1060 bp, Homo sapiens
gaaaggtaagcagtgggctaactcaagaaagacttagaaatcatgttaagaatttagggagattcatcttgtaagacggggaaacagatggatttgtgacagatttgtgttttaaaaggatcaagattgatagtagggatatcagatagaagcctgctgcaaggaggcaagacgtgatgctatccttaccaaggttagtagcagaggagctagagaaatgtggatacattagagaataggagaaaatttaatgattaattagataaaggggtggagaagatggaaaagtcaaaggtagcacacatatatttagtttgggaaactagttaattttaagtatgttaattaggaataacacaggaagagtatttgggtttattttggagcaagttgaaatcaagatgcttaggtagagacgtccattgggcaataggatatcagttcaaagcccaggggaggaatataatgtatgtcagaaataaatgatatttgatagagtaaatggaattgtttggagtaagaaagagatggcttaaaggagactgaggcagattgtcgagagatgtaggagaaagatctatatgacaaaaaccgcaatcacttttgtaccaacctagtatacattcatgtggaagagaggtcagttgtccggtgctccatgcttcagatccagccaaataagaactaaaaaggactcactgaatttaggactaggagaaggtctttcactggcggtatggatagcaaattgcagttatattagaaattcagagtgggttgaggaaatgaagtaatcaattataaatactttttttgaaggaatttgactatataaaggaggacaaaaagatacgcagtaggaggagacaaatctggagccgggagctttgtgttgctttatttctgttttcaacatgggattaatttaagcatgtttaaatgctaattgaaggaagcccatagaggttaaagatgcagagagaagggagtgaagcgaagttcctagaaatgggagggaatgggatccagagcacaggtttctttagctttagatacaagg

SEQ ID NO: 41477 - DNA, 1032 bp, Homo sapiens
aggagttgtatgtctaatggaagaggcagatccaggcatagttttcagcagattcaaatctattaagcttaatatttacaactgctatagcatttgcataaaatgagtatcattttagcatctctgcaagccagaaaatgtctatttgattttctcattttggactttaaaaattattttccaattaaaaataatttgaggaaatagagatttccataacgtttttcaaaaatgtaattttcttactcatctactaatggcacagtgttttaaaatgctttgctaaaaaggcagctttaggattaaaggataatttatgtaatgttagaaacagcagcaataataattcagtagagactttcatcattcaatttatgaaaagcatattgccttaacataatttcttaactggaaatttagatgcaggaatcaaattagtctcttaaaatataaagtcacaaagacaagtctggaggagcatttgaagggattaatgtctcacagcttgaaacatatatgtaagaattcatgcaaactatttatcttacatctttttatttaaagaattttagctccatctacacataagaaagcctggagtttgaaataatagttgtccaaattcatgcttatccagatttatatcacattgcagccacatattttgctgatgatagttaaataagaagttgctactgtaaaatgtaaagctaagtatcctttttagcaccatgtattatttcatagtaaaaattggaatgttacaatattcctgtggtgttatgtcaaaaaaatattttcatcgtcaatttgaaaacttttattatgcattaagtaggtatacttaatatttgaacaactatggatgtgtatctttatggtacataaatgttcccaaaatagatgaagatgtgtatttatgaagcaaacatattcagcgatgtgacaaatgtgagagaagtatctcttgataaagtaatacttctttaaaaattaatatgttttatcatttcaaatcttctgatctttttc

SEQ ID NO: 41478 - DNA, 1012 bp, Homo sapiens
tttttagacggagtttttgctcttgttgcccaggctggagtgcagtggcatggtctctgttcactgcaatctccgcctcctgggttcaagtgattctcctgcctcagcctcccaagtagctgggattacaggcatgcaccaccacacctgcctaatttttgtattttggatagagacagggtttcaccatgttggccaggccggtctcaaactcctgacctcaggtgatccgcctgccttggcctcccaaacagctgggattataggcgtgagccactgcttccagccaaaattcattttctatgagtaatatacagttttcccttggtatctgtgggaaattggttccaagacccccgctcataccaaaatccattgacgctcaacgctctgatataaaagagcatagtttttgcatgtgacctacatacatcctcccatatactttaaatcatccctagattactaaaatacctaatgcaatgtaaatgctatgtaaacagttgttttactgtattgtttgaggaataatgacaagaaaagaagcctgtacatgtttagcacagatgcaattttttttttttttgagacagtgtctcactccatcacccaggctggtggcagtggcacaatcttgactcactccaacctctgcctcccgcgttcaagcaattctcatgcctcagagtcccaagtaattgggattacaggcgtgtgccaccattcccggctaattttttttttttgtatttttagtagaaatggggtttcaccatgttggccaggctggtcttgaacttctggccttgagtgatccacccctttcggcctcccaaagtgttgggattactggcctgagccaccacgcttggcaaccacaagcaatttttttttctgaataattttgatccactgttggttgaatccacccatgaggaactcatggatacggagggctgacagtttttgaaaccttagatgttttttgaaaaatcagtggaacaactgggaa

SEQ ID NO: 41479 - DNA, 1263 bp, Homo sapiens
ctagcctgtaggcatcttttcattgctaaagttgggttaaattttcaccacagaaattcaattatgacttatacctgttatgaaaatatgtaaatacatcaaatatattttaatgttttaggtccagatatatttaaatgttttttatcccctaaaggagtgcagtttctttctgctccttctaggtctccaaagttacaggaccttgaagcatgtagagctcagcatggtacaaacctgtatttttcaatttgtgctccatgtgacccttcctggaactgagcagaagtgttatgctgccaacattgaataatggtggtcttttcacagtttgtaggggaaaaaagctgatggaattttaggtttttcattccaaaattttccttaaattctagaaagagccaccattaattttcaagcaagtattaggcaggtaaaatgtatgtatgaggaaaaaatggttattcaaggaaaaaaacttgtaaacaactgataatatctacttttataactgttctttagatatttgtagtcgtcatcattattttatattcaattaaaataaaccaaacattaatagcaatttaaacttagaattactaaatacataatttcatctaaaatgatagtttgtatgatagaatttaaaatatcagtatttactactgtcctgcaaagagcattttgacttcaagccttgcatgacattcactatatgaagagattacatttcgaaggagaagatgggaactctgctgcttattttctttctcatcttacgcatttcagatcattttgctggggcatagattctctatccagtgactgaggaagtaaattggatttttatctctaaagttttcttagaaagagctttacattttagtgacccttttttgttctatgtatttaaagagactgacaaatccctaatttattctaatctttatcgaattaaaatttgatggtattgaagtgttttctgatacatggagttctttctcaggagggaaaaaggtggttcaccagctgccaaacaaaagtcatgaagattttttagttaaaattttatctggctagtagctcagtttagccttgactaatcttgtattaaaatactcatgcaaatgtggaaggaaaaattttataactgttccaaaacttaggaatgacagtttaatgctagaaactgaggtgaagttagattgagaaaaaactaagcttctacacatagtacagtatgttgataactgcagttattaa

SEQ ID NO: 41480 - DNA, 1047 bp, Homo sapiens
ctgagcttagccactggaactggccacaagacctgatttgggaagaggtaacctgttatatgaatttagttagtaaaattgtagaaattcagatgtcatttgatcccagggaagtgtatttctccccagctattaaccagtgtcaactgtctgaaatttattgatccgaaggctcttcctcatttgttgccagtagctctccctcatacagaacaaatgactcacatgctcaagctaaataaagcactccgtaaagatttttctgcctctagaactgctcaaagtcagctctcaatagtgggcactgattcttgccaactggtttacccttattaactctataggtagggccctgtgaaaccacactaacatgtagatgttctctctttttctttcttcttctttttttttttaaaggctgcccttttcagacattccttctgaaatctgttaagaataacataagactagtcacagatttattgatttttcctgggcatttgactatgtgaagtggaaccagctatgacctaagcttagcaagctcagtaaacaccctctctttgctccaaggtctgtataacttctgtcttagtacacatgccaagcagtcagcaggaacggtcttgtggtagatgagatgattttcagtcaggataagtcagattgttttgcttttctttttatttaaaaaattattttttcaccctttaaagtcttgatgatcataatccacttcttgatggaatgtgtacctgacactttgatacactttgcaacagtcctgattggctttctgaacagattccttattatctaggaatgatatcttctatctaattattttcccaaataactgcttagtgtttattgctttaatatcagaatcctctattctgccagacaagttgcagcatttaatttgttttcttctaaaacacctatgaaacagataaattatccattttatttcatttcctgtaagttattttcttaaaacaggtatcttatgggtacatactggaaactttaaaaaatggctaatgt

SEQ ID NO: 41481 - DNA, 1189 bp, Homo sapiens
aagcacgaatatgtacctgctaaagcccttggggtgggcacctaactttaaagatatttttatttttttaagctgatattatcacattcatgtgacattggcacccagtgtgtaatagagctgtggttattttaacataaaatgctttaaattatggatcatcaggtagtaaactggaggatatgagatttactgtattttttccttgtcattatgcctcttttcacatggtgcatgtactcttgggtatccatcttccaatttgagacgtataaatcagagtttttcagttgcttaaatgactctctgtttgagaccagaagtgttttcagaggaaaattttgatattccctcagctcaccttcatgagggctgtgaaataaaaactttggggagttgcctggattggattccttagcaagctgaccccactactcatttgattgttagaatgtgcatttcttttaattagaaatagagaatttctgcacttcacgttctggctagacaatatgttatctgaatcaaatacttactaaatgcccatgagttagacactgtgctgacaggcactaagaataaacaggtagttctatatctgatgtgatattatttattttgaattgctatatgcttcattagtgtttttggatgaaatttagtaagatatagacagggcagatttatttctgtgagaagattgcaaaatataacagttcccattcttgaagtaactagagaaaatttttttagtgctttttaaaataaggtttatataatggtgcgtttcctgctgcatctctgccatcaatttcaaccaaactggtagaagttttgattgagaagtagctgtaagttgactttcagtgtttttacagcttagccttttccttagaagtcacttctagaaccagatccacctgatttaacaaaatgtgtttgaggttgaatcattgcaggctttattctgtctaaatgtttttttcttttctttttttttgtagtatttcgtagaactggagatcctgtttaggcagttgattccacagttttgactatcaagtaacccagttgtaatgtgggtgctacagcctcagcttcttaaatttggtttggagcatcctttcaaccttctttctccagctcttaataattacctgctccacttctttaatgactatttagtggt

SEQ ID NO: 41482 - DNA, 1038 bp, Homo sapiens
gctcatgttatcaccctagtctgggtttgctggttagagcatgtatgattggaagagagagagagaagttcaggaaataccaacagagcatgggaactgtactaggttcagtgattccaaaaccaaaaatgaaacctatataacaatgctaacaatatatgtaatatttccagagtttccaaagcctcatttaaattgtgcctgaaaatgttagatatcattttttaaaattggaaaaaatgaggaatacaaaacttaagtaacccatccaaaggcacatactagtaggtaataatgaagataactaataataactcatttacataagaactctaagaacttagtactattatttctaactcacagatgggaaaacaaagtgtcgatgaggttgactaacttgcgtaagagtgcgtggttagtaagtgacagctgggattttaaactagattgtctgagtctgtgctcttaatccgtatgttctacatcctatctgttggttttgttattttttggatagagcatcttgacttacttagatttaaaataaaatccattgcagcacaaacatttgcaggggtggctaagatcctaacagaggcccagggagatgacagcaaatctttcctaatgccaggcttatattcttgtctcattcttgtctttgaagtcaaaacatttttagtcagtctctagaaacagaaacatgactgtgtcaggacactaattaattagcattgaggagttgttttctgattataaatatataactattgtactaccattccctggttggtaggattgctgtttgtgcacattatttgaggagatggaataaacaggcaaaatcagtttttacaaccctgtgtgaatactggtctgtacagcaaagattatattcattatggttataaactccttgtctgcctacaatattaatatggaatgaatgttatcaccaagttactgtaactcagaagacttcagaaaatatcctctaggtatcaaattaaatttgtaactacggtactttttgct

SEQ ID NO: 41483 - DNA, 1205 bp, Homo sapiens
cttgagaaacacccagactactgtagtattatggtactatagactactgagtattagtacagtactatagtgctgactagtaagcttcctaattgccaaacaaaagaaaaattttcactgtcatcaaaagaaataaactttcttcatggtaattataaaaagactttttgagaaaaaaaagcatcttcaatagtgattttgtagaagaagccaatttgtttttttgtgtatttttatttaaacatttttattaaaacaaggggcattttactgaagaattaagagccttcagtgaaggctaagtgcaggtgtgctgccttctagtaatccagactaggtggttagtatgagttatgggttgaattctgtccccccaaaaaggtatatttaagacttcacccccagtacctatgaatgtgaccttattttgaaatataatctgtttgcagatggaatcaagttaagatgaggtcatactcattggagtgggccctcctccttcactgactgatgtccttataagaagagggaaatttggacacagggagacacagaggagaaatggccatgtgagagaggcagagatcgaaatgatgccaccacaagccaagggacaccaaggattgcaagaaaccaccagagctaggaagaggcaaggaaggattctgccctagagacttcagagagagcttagccctactgacaacttgattgacgatttctagtctccagaaatgtgacagaataaatttctgttgtgttaagccaccacgtttgtaccattttgctatggcagctttaggaaactaatacagtatgtgaatctctttttctgtcatttggatttttgacaagtttcttttctcacatattccatatgtgtgcagaggttcatgagctctggacctgtcattgtggtcaaatttgaattctactttaaatgttaaggcacctgcgtgaaaaccacactactgctgcataattgtgagccgtaggggatactgccattaggagccatttttccttaaaaggaagctcatgcatttgaataagtagtaaatggtgatggcagagttatgtttcataaaatatggaggagacttttgtcatcagcaggaactgtcacttttatgatcttctactggaatgaaaactcacttccaccccaggaaagatctctgcagaggcagtgaatcaatctctgt

SEQ ID NO: 41484 - DNA, 1031 bp, Homo sapiens
aatttggtctccttgaagctgggtatattgtctttttgtgtatagtaacttaagaatgtggaatgtgggcagacagcataatctatggtagttaaacttttattagattgttgtgaagattaaatgagatagtacatgccagaggcctagcccagcacttgcatacactaagtcaataaatattagtcattattctgcagtggaaaatttagtgtcactaaaactttgtcctgctagtcaccttaaaacagacagcataacctagtttttcatgttatcaattgagaaaatggattctaaagtcaagctaactgaagaatgtcactttaatacataaacgggtatattttttttgaattgataaaagggtctgtagaatattaaacagtagttattaaaagaattaattccatttcttaaagaagtttagtgtgaccaaccactagtgtaggcattggaagaatttagtatattttgtaaaattttttccagcatgggatctgactctctgaacctgaaaatgaagcaaacaaaacagaggcttgttctgcctatgcccttagtgccaaaacataaatcattgctgtattcatcaagtcataaaatttaaatcatctctatttgagttggataacttgctgcggtatttgatactaaccactggttcaagcaggacctggtgatgtttaatggactattgttcaaagttgttggactaagttgttgcattaatataaaagttttgcaaaataacatggttgtaaaagaaatcttccactaagcaatgaatataaatgaactttatttgtccttgtaaccaaatactgttcaggaaaattttttgctttagctttacagctaatttgccctctttctgggatacttttagggctgtggctaccgagtgacatcatatgtaggcatttctgtatatgtttctcttgctttcctattttctgtaggacagagttgccagctgtcatcctctctgggagggaaccgatgctcaaaaaatggcactacctttcctc

SEQ ID NO: 41485 - DNA, 1029 bp, Homo sapiens
aaatatctttgcttcggttaagtagtaaggcaatatgaagttatacagtggatataagcaacttgttggaagacaaatttgtttagatgaagctgagactgtggaaggtgagagtagtgtgaacttgttcataggcagttctcaatacctaggccaattatgcagatagtgaaataacatcttaaggcagtgatgggagctggatcacttgaggtaagtttggactgtatgaggaactccattaggtaacagtgccggaattgattggaagcagtgtgttttaacaatgaggtcatatttttaatgttgtctatactggtccaattactctgccccttgtttacaatatgtgattcagtgcatatactcaagaaccattcttatgtcttggcaaggtaccctgccctttctctaagcaccctttttgatcttggcttctagaatttctttgactgctttacttctgatctccaaaactggcctgctgtttcttttgaagcacttccttccctgtatgtacctgctgtatcttagctctgatcatgtttgtacttcagctgtcactgcctactactggtgacacctctgctctgctctattcttaatatcattctttttttttttttaaaggacatagaaaatcaggtattgtcttgttgtctttaagtgttgacacacttaaattcttgaagtcctgtttttagtcttcccttcccaaatctgacaaatatatagctttctacttatgtcagtgaggacaacatctcactgatcaaaaatctcaagttccttcactcatatcttgcctctcatcagtttactctatgtatctgtctcttctgtgtctgtcctttttcttccagtagccaaatttttaacctcgccttgagatctttctttcaaaatactcctttggcttcgagtgcagtactccagtgcttaaaaacaataatatttaatcaatcataccatagcttcagaaaccattgatgacttgtaaaaagttctaattctgattaaattttgatt

SEQ ID NO: 41486 - DNA, 1088 bp, Homo sapiens
tgttctactcaaaattttggaaataattttttccctctatttagtatctgagttttttttgaatacttattaatttcttagtcaacaaagtagtccttgtatatataacaaatggtagaacagttctcctcagttacatatcgttgtaatagtggaataagaattgtaatcagaattagccttctggtcatttgtttgggatggatcttctgttagaatccagatatggcagatagaaccgaaatgtagcagtttccttcttttaatgttaacagtgattgtgctaacacataagattataatagagcagccttgtcaatagcagcaaaatttacttgtctgtttttctcccagagtacatgtgtagttaatcaatttttaaaaatatattttactacaagttattgcttattccaggcatgcccaatgacatgctatttattacttctttttgcagatccacagtttatattaggaaataaaacttctactgtttaaaattgaagttcatctgattaataaactgatattgcctcaggtttcaaactccgtagtgaataaaataggtcctcgtgtagtttagaaatagtataccagctgcaagtccagaaaatacttgctgttactcacataataaaagaactcccaaagccttataatttatatattcataactgcttcttgttgaatttcttcttctcaatcatacaggtgctgctttggtttaaaacttacagccctctttaggcaatctacagtttctccaaagtgtttaatttttttccttcttatattgtgagctggttaatgttgaagatagcacttcatttaaagttcaaacctgtgattgttttaaaaacttacctagtattcattttttcatttaaatatatatgtaatttcctacaaatgtgtacttgtttatctaagatttggacaattcattttaaaccatattattcatttattttgaaatattaagatcctgccatgttccaggcacagatccagatactgactgcacattggtgaactcagcaaaaatccttgcctttatggaaacttactgtctggtggaatttatattt

SEQ ID NO: 41487 - DNA, 1049 bp, Homo sapiens
caaaaaagaaagagagagagcttgagaatgtgaaagtgttgtgaggtagtatagttatggaactgtttgacccatttatgtcctttttttgggaactcttgacaaccaaggaaagagaatacaagaaatattaaattttactaacatagattctttgtgagtgctcttaaagctgtttgataatcccactacttatctctgtttgattcccaacccactgctttctcataacaccaatttcaactcttgtcatccttctcaagccccaggcccagttccttctattttagtctcagtagataagttcttccccaattttgccaggaaggttgagcaaagcccttgagtttccctggccaccatctcaaaatgtatttcttcacttaatttccatctcactttctgtctcttcctcgcaaaggtaacctgtatccttatcacattctcatcccatttcttctctaacctttcttcatcaattatttcatgtctttctcttgttcttttaatctcctctaccggtccttcctcatagccaagaaaccctctttaagttcactgtcatatgtgtttcttccattttcactgccaaaattttccaaagactgatttgagctcattctttcttcaccattcatgctttcttttggtccatttcagtatggcttctgtctgttcaaataagcacatgaaaagatgctcagcatcggtagttattagggaaatgtaaattaatactgcaatgagatactacttgatatggtttggctgtgtctctacccaaatctcatcttgaactgtaatccccataatcatatgtgtcctgggagggacccagtgggaggtaattgaatcatgggggcagtttccaccatgctgttctcatgatagtgagtgagttctcatgagatttgatggttttataagtgtctggcattttccctgctgtctctcattctctttcctgccaccctttgaagaggtgccttccgccatgattgtaagtttcaagccctccccagccatgcagaactgtgagtcaattaaac

SEQ ID NO: 41488 - DNA, 1754 bp, Homo sapiens
agggttaaggagttactaatacagaaagatggtgatacaggagagtatgagaattattgattaaattatagataaattatagactaaagcatagtaatatgagaatgtttcattttctgacgtatttaacttaattacctaatctcattagaagtgattaagatgaatactcagcttgtatctcaagatctttttaggtattgattatagcatctataagtccactgactttttggtttctacatgcattgcctggcagtatcagtcagttcacaattcaagttgaaattaaaattttctaacaataaatgagaaacaaaaagtaacatttattttaaaatattatgtcttttaaattttgaatattcagatttgaggattgaatactggcacctctctgtcacttatgttttgctaatgatcatctatgcttcagctcctcaaaatggcctgtcaggtgtcagtttagcatgcgagactttaagctgtcttttgtagtttcataagggccaaagagcttgttagcctggaatttagtgtattttggtactcatttgcttttagttattcttttcttgattttttttcaaactcttctcatgaggaaaatgtacaattcctaccaattagtcataagccagtttggatttaggaattgcatagtttattactttgaaatattattttattcaaatatttagcaaatagtaaagatgtgaatatttcactgaatgttgggtgatttggctgataattagatcctcagagaaaaactgaaactcctgaagtttgttgcagaatctgaaaagtaaccaggaaaacagtagtttaatatgttaagtactagttattaatgaaaattaagcgtgacttttttaggattcaattcctgtttttagtggtatagctttctggtattttgtagcttactgtgttcatgaacacaaaagaacaagtaacctcactagtggcttgagatctgactcgcaggaaaacattaggtagtaattaaaacaaagctttccccccacccccaagtttgtgaaattttaagcacactgcctaatgcagtcaccacttgccgcttgtggctattgagcacttgaaatgtgactagtctgtattcagatgtaaaatacatgctgggattcaaagacttagtatgaaaaaaaggattgtaaaatatctgaatattttatattagttacatgttgccatgataatgtttttgatatattggatttaaaaaagaatattaaaattaatttcacctgtttaactttcttaatgtggctatcaaaaaatttaaaattatatgtgtttcacctcactgatttattggacaatgccagtctaatagatttaaaaattcttaatatgtacagtaaatatcagatattaaaagcttatatgatttggtttttaacctctgaacagtcaattctttggaaatctgagaagcccaattattctttggtctcttcaagggctccaggttgaagcagctgttctttgaaattgccagtcctgattcagttgactaatagcaatcgatagatacggaaggctaagtactgctttgcggttgtgcagccaaatgagtgaactgtacctactgtttctctcctttctgcctcttcccctgatggcttttatgtggttgttagtattcagttgatgtttatggtaacataaatctaaattggttttcagagacccaattcatgttttactatatcccataaattatgtca

SEQ ID NO: 41489 - DNA, 1064 bp, Homo sapiens
ttcttctcaaggatgcatggaagatttatgaaaataagaagcatacaggaccatagagcaaatatcaataaatggtaaaagattattatcttacaatcaacattatccagtcaactaatacaattagtaaaaccacttttagcaataatctggcatttcttcattaaatacgtgattctttcatgatccagcaagttcattcctggtcatatgctctggatgaactcttgtacactgatagacatacaagaatgatcacagtgctattcatggtagaagaagctagaaacaacacaaatatccatcatccacagaatgaataaataaataatgtttattcacaaatgaaatactcttaaggatatgaaaatagatttaaaactgcttcacatagcagtatggatgaatcttaacatagttttaagagaataaagcaaaccacagaagaataaatacaattatgaaattcaaaacatgcaaagctatccgatatattatttagagagaaatatatagatatattgatctatatatttgtcatgtagctataaagaagagcaaaacaagaataaacgcaaaattcagattagcatttactttctagcaggggaggaaaaggaatagatgggagtgagagcagactccagagttcctggtaatgttctgttccttaaattgggtggtgaaacacagctgattgttgtattttattctttatgccttacacatattatagtatctcgtcattgtttaataaatgaaataaattacacagtggggatggagtaaggaagtatggaaacagcaagggtgggcactttttttgttttttgagactgggtcttgctctgtcatcacccgttctggaaggcaggtgcataatcatggctcactgctgcctcaatctcctgggctctgccagtcctcctgcctcagcctcccccaagctgggaccacagacacatgccatcatgccaggctaatttaaaaaaaaattatttgtacacatagggtccccctatgttgcccagacggatcttgaactccggggctcaagcccttct

SEQ ID NO: 41490 - DNA, 1140 bp, Homo sapiens
gatgaggctagctcagtgagaagatgggtctgtaggaaaaatctttccccaacaatttcatctacattgtggcaggaccccattaaacttcctttaggagatgtatttgtaaagctgttcatttggcaagtcaaggaataacttatctcatgcttgaggaaatggatgtagctggagtcacaaaccagtttatctctgcatttaataccatccatagtttatcatgttggtgataacgggcaaaatgggtttggtaaaatcttagaaaaacaaagaaacaaatgcaggaattgagggccaacatcctaattcctaacttatttagaagaaatgtgaatataaaatttatgaagagatttagattattcagtcattcagtaaacatgtattgattatctgttatgagccccacattgtgctggctgggaaggaaatgggaatgaaagctgtagtccctggctttgaacagcccgtaggtttgtgggggtgacagggaattctagtcgagtgtgatgtgtgctgtgagggaagtatgcataagctgttaagggaacacagggatggttacttggcccacgtttggggagttagttggggaagtctttctaaaagaggcttgtgtgacctggaagggcaaattgaaataggcaagatgaagggagtagaagagaggatgtcttaacttaggtttaagtaattcaatgagccaaggctcagaactaaagagaaagtgtgtgtacacacacatgcatgaatctacatacatgtctacttttgagggagtggaaagcagtaggcaccatgaaaaggtttggttaacagcggatagcttggtatggatgcagtaaagagtttaggaataagagtacaagaaattggaggggtaagcaaggccaggtcatgcttgtgtgtcgtgataaggagtttggtcttttttcaaaggcattgaggaatgttaagcaaggaagagaatgtgttttatatgctacaagtggtagggagagtgtagtgtagggtagtaaagctgtacatgggaaactcttgcagcattccaggaagaagaccttagtatcctgaatgaagagaatgacatgaacctgaagagaaatggatgaattaggggagatattaaaagcagaa

SEQ ID NO: 41491 - DNA, 1042 bp, Homo sapiens
gatgtaaacaaagccttcagtatttggagaaaacatctcctcatacttggaagccaagagcagagcagtaatccaaactagttgaagcttcctctgggaaactggctgaaccagtaaagatcaatccataatggcaacacacacatacagagtctcctgaagaagcctaaacttggagtggatttgcaccaaccagtctaccaggatggtatgcttatgtccatttacatctcatccacctaagacatgtgggtttatgaactgcaaaatctccagctgcctgaggtactgatagatacccttaaatagtcactgcagagctgagggttattccaatctttgttatcaatatcctcaattttgtagagcaaagcatcagaaaaagctcggcagatgttctcttctttcacggaggcatcctcaggtatgggagaaggaccctttggagccaacatttccatctgtactgtttcacagaagcagtaggtttcagttgtttgttgacatttgttgtttccctgggttgaactggcactttggtgttctgagctttcttagctacttgtgctgctctggctgtaactctatttccaatttattctaaaatggaatgcctaatagtcacatgactcttaggtttagaattaactcctgtctctctgtctctgcatatacccatttaccctattggttctgtctctttggagagtcctaatagaatacctgacaactaaatgcaatgtggatcttgggacagaaagaggacattagtagaaaaactggtgaaatttaaaaagagcctggaatttagttaatagtaatgtaccagtgttggtttcttagttgtaacaaatgtaccatagtaatgtaagatgttagcaatagaggaagttggttgagagctctagaacgctctgtattatctttgcaacctttccataaacctaaaattattcaaaaataaaaattttgttttaaaaaatagcatgtaccatacaatctctctctctgaaactgctcctaattgtctagctttctattt

SEQ ID NO: 41492 - DNA, 1033 bp, Homo sapiens
ggaagcttgtcagtgtgggcagacaccacgagcagaccaatttgacattgtgcttctcttttaacctcttgaaaattaatgaaagttatctgatgaagatccttacattaattgctcccgattaaggtttaaaaccttggtttactgtggggtaaatttatgtttttgatagtcatccaaaatctttgtacgctttcagtttcattacagaataaaaaacaaatttaccacaatggattattacattacatctggtatttattcctcccaagaagctatctgcttcggaaaagccaggggcgcccttcattaatatatctaactgatggtgtaatgacataaaattccttgttgacccctgctattcagtgttattgtcttggaacatagaacttgataatctcttttcactgcataactacaaatgttaggctgtaagagtattttactttgttcagtgcaggttccagacatttctcctgatcaccagaagttcttttgattaataaggctactggtcacgaaaactcagcttactaaaagagatccagtcttctggttctaactaaaacatcccaccggatgcaggtgtacttgcaaattaaagtttgcctcatgtgtcctgtgtctcaagtcatacagacggcccaggagggtggagcccctgcaacctgcctagcggggcgtttgcgtgtctgggggtgtcgggacacgcgcaggacacacacagtcccactttcctagtctcgcacttacctcaaggctgtcaacttttacgctcctccctgcgcgcacagcccccacctcacgctgccacccctcacgccccgccttcaaagtaggaggcaccattgtcattggacactgcttctctcactcctattccagaaccaatcactcgagttctagtggggagcgcctaagccaatggaaatgctcgctgcggcagctgccgggtcctgggcgctgggaggcggtgccgggggcggggtgcggctggggcgaattagttgccattcggagtgaggagtgg

SEQ ID NO: 41493 - DNA, 1036 bp, Homo sapiens
aggaacattccaaaataggaaaaaattacatgacaaattaaaccaaatttcttataacaataaatataagtgggataagctcaccttttacaaccagaaggctcgctacaatgtttttttcaaaaagtataaaaacatactttgttttatgatacacataaaaaaatcttttaggatgggcataccatgtaaattaacagaaagaaagcagaagggggtcataatattcagtatcataaaatttcaaaaataattaatgggacaaattataatatgatgcatataagctgtaatgttgatgtcaagaatctatatgtaccctttaccattatgtaatggccttctttgtctcttttgatctttgttggtttaaagtctgttttatcagagactaggattgcaatccctgcttttttttgctttccatttgcttggtatatcttcctccatccctttattttgagcctatgtgtgtctctgcatgtgagatgggtctcctgaatacagcacactaatgggtcttgaatcttaatccagtttgccagtctgtgtcttttaattggggcatttagcccatttacatttaaggttaatattgttatgtgtgaatttgatcctgacattatgatgatagctggttattttgcctgttatttgatgcagtttcttcctagcatcggtggtctttacaatttggcatatttttgcagtggctggtaccagttgttcctttccatgtttaatgcttccttcaggagctcttgtaaggcaggcctggtggtgacaacatctctcaacatttgcttatctgtaaagaattttatttctccttcacttatgaagcttagtttggctggatatgaaattctgggttgaaagttcttttctttaagaatgttgaatatcggcccccactctcttctggctgcaaatcaaaaccacaatgagatactatctcacaccagttagaatggcaatcattaaaaagtcagaaaacaacagatgctggagaggatgtggagaaacaagaatgctt

SEQ ID NO: 41494 - DNA, 1042 bp, Homo sapiens
accatgttggtcaggctggtctcaaattcctcaggtggacctcaggtgatccacccatctcggcctcccaaagtgctgagatgacagatgtgagccactgtacccggctgccttggcctctttcttgactctaatggtaatgtatctagtttactcactggacaaggtatactgacatttgctgtgaagcatgtgtgtttgttatacgtagagtacacatgcttattttactaatggtttttcttgttttaatcaggaataataatttatgtggaaaatgccatttcatcagtgaatatgtttgttaattctatatttgtttattattcagcaatgagttcttaattttttttcatgagccttagagtatttttacacttgcttcataaacaggttttgcaagatttccttcctctgtgctctagcataacacagtataaatatcatctgaattctgtcacttgggtctgaaaggattttacctaagtaacttacttactagcctagtatgtttttggattgtagcactttagaaaattttcttaatttcttccatggcacttggtctcttggttgatatcagggagagatttcaaaacttgtattctctgagaggtgagagatgggatggttagatcttaaataaaattacatatactgatacttccctttctccaggtgatggtattattatatttggtattttattgttttaaattaatttttaaaagttaaactgtgaaacatgagacatgccaaaagcacataaagcagtttctcttaatctcattagacttcagtctatggagttttatgatcctgcctctatgtcagcatctttccctagaaatctatttgtttttatttgtttttaagaaacagatccagactaagtagttagcatttggctttaggcaacattcaataaagttaactaactctgaactaaaacatatatattcttttctgttgacgtcatatttaaagtacctagccttttcctccattcctgaaaggagcttggttagggaggactttagtc

SEQ ID NO: 41495 - DNA, 1299 bp, Homo sapiens
aacatgacctcaccaaatgaaccaggcaccagggactaatcctagagaaacagagatatataacctttcagacaaagaattcaaagtagctatgttgaggaaactcacgcctgtaatcccagcaccttgggaagccaaggcgggcagatcccttgaggtcaggagtttgagaccagcctggccaacatggtgaaactctgtctctactaaaaatacaaaaattagctggttgtcgtggcacacacctgtagtcccagctactggggaggctgaggcgcaagaatcgcttgagcctgggaggtggaggttgcagtgagccaagatcgcaccactgtactcctgcctgggtaacagagtgaaaccctatctcaaaaataaaaggaagaaggcataccaccacaaaaaaatcaccaaaaggaagacaagaagggtagaaagaaggaaggaagagaaaaccagaaaacaaataataaaatggcaggagtaagttcctacttatccataataaaatggaatgtaaatggactaaactctccaaacaaaagacaacgagtggctgaatggatgaaaaaaaaaaaagagacccaatgatctattgcctacaagaaacacacttcacctataaagataaacatagacttaaactaaaaggatggaaagatattccatgccagtggaaaccaaaaaagagcaggagttgctatgcttatgtcaggcaaaatagatttggagacaaaaactgtaagaaaagacagggtcattgtataatgataaaagggtcaattcaacaagaggatgtaatgattgtaagtatatatgtactggagcacccaggtgtataaagcaaatattattagagctaaagaggaagatagaccccaatacaataatagctggagacttcaacaccctactttcagtattagacagatctcctagacagaaaatcagcaaggaaacattgggcttaatctgcactgtagaacaaatggacctaatagatatttacagaacatttcatccaacagcctcagaatacaaattttcctcctcagcacatggatcattctcaaagacagaccacatattaggtcacaaaacatgtcttaaaacattcagaaaaattgaaataatatcaggaatcctctctgaccacagtggaataaaactacaaatcaataacaaggggaattttggaaaccatacaagcacatggaagttaaacaatatgctcctaaatgaccaatgagtcaatgaagaaatgaagaaggaaattgaaaaacttcttgaaacaaatga

SEQ ID NO: 41496 - DNA, 1016 bp, Homo sapiens
taaattcagttaagttgcagaacacaaagtcaacatacaaaaatcagtagtgtttctatattctaaaagtgaacaatagaaaaagaaataaaaagtcatcccatttacaatagacacaaataaaattaaataccttggaattattcaaagaagtgaaagatctctacaatgaaaagtatgaaacactgatgaaagaaattgaagaggacaccaaaaaatggaaggatacttcatgttcattaatttgaagaatcaatattgttaaaatgtctattctacccaaagcaatcttagattcaatgcaattcctatcaaaataccaatgaaattcttcacagaaatgaaaaaaactaaaatttgtatggaatgacaaaagacccagaatagccaaagctgtcctaagcgaaaagaacaaaaccggaggaatgacatgacctgactttaaattctactgaagagctatagtaaccaaaacagcatggcactggcataaaaacagacccgtagaccaatggaacagaacagagaatccagaaacaaattcacacacctaaaatgagctcatttttgacaaaggtgctaagaacacacattgggaaaaagacttcaatccatggtgctggggaaactggatatgcctatgcagagaaagaaacctgactcctttttttcaccttatacaaaaataaaatcaagatggattaaagacttaaatctgagacctcaaactatgaaactactacaagaaaccattggggaaattctccaggacattggtcagggcaaacatttcttgactaataccacacaagcacaggccatcaaagcaaaaatggaaaaatgggatgacatcaagttagaaagcttctgcacagcaaacaatcaacagtgtgaagagacatcccacagaatgggagaaaatatttgcaaactacccacctaacaagggattaacaaacagaatatataaggagctcaaagaactccatattaataaacctaatagtatgattttt

SEQ ID NO: 41497 - DNA, 1047 bp, Homo sapiens
tttacccaacggttccagtgtagggtcatgagtggctgcagtgtatcctggaaggttagtgcacaggatgagaaccaaccctggacaggatgccattccttcacaaggcacacttacagatgcacccacactcgctcagactgggaccatttagatacggcaacatatttgggatgtgggaggaaaccagagtacccagaaaaaagccatgcagacgtggggagagattgcaaactccacacagtggccccagctggaattggttgttttcaatgaacaatatgatgaaaggacctattgtacagaaacctaggtaatcttcacgggaaagagaaccaaaagtattctgcaaatggcaggagattggaactgggctctctgtataaaagtagggaactgggaccgtgttttaggcagtgcaactatacctgaaatactatacccgaaataattccacctgacactgttggtattttcctgtgacccaatgaggcagttatgcaaaaataggaatgtaaccctataatatatgtagatgtggcacctgaattagagctctacttatgagggaccaaagttccagtcttctttatgttagacctactctggagctgtgtaactccagaggtgtgagtaaccatgcaaccacacagcaggcaggagttcgcagaggataaaacttccacataagatgaacctgcaaacaaatatcttaggaaacatgttgccataagagatatcggacatattaagtagcctcatttacatctgaggaaatgagagtaagaaccacaattccaaaaaaaaaaaaccttataaatgtttaagatgttcaaatgaagtcataattcactatgagaatagaagtaaataagaacaggtggaatgaaaaggggccacttgcaaatcttgtaacaaaatttgataaaattaaataaactgttggatggattaaagtcaagttggcataacggaagagagaattcatgaatcagaactatcagctgggaattgaaagttaggatgaatcaagtcacgtagaacata

SEQ ID NO: 41498 - DNA, 2573 bp, Homo sapiens
ttaatgcagggattcgttaatcttttatggttttttgcatctcagtttctttcaggtcagctctgattttatttttgttatttcttgtcttctgctagctttggagttagtttgctcttgtttctctagtccctctatatgtgatgttagtttgttatctgagatcggatttttatgtggacctttagagcttgtaaatttccctcttaacactgctttagctgtgtcccatagaatctagtatgttgtatctttagtcccatagtttcaaagaatttcttgatttctgccttaatttcatggtttacgcaaatgccattcaggagcaggttgtttaatttccatgtaattatatggttttcagcaattttcttagtattgatttcaatttttattgtactgtggtccaagagtgtggttggcatgatttcagtttttttgaatttgtagaggattgttttatgtccattcgtgtggttgtttttatattatgtgccatgtggtaatgagaagaatgtatattctattgttttgggttgaagagttctgtagatgtctattcagttcatttggtcaagtgttgagttcaggtcctgaacatctccattaattttctacctcagtgatctggctaatactggcagtcgggtgttgaagtctcccactattattttatggacatcgaagtctctttgtaggtctctgagaacttgttttatgaatctgggtgcccctgtgttgggtgcatatatatttaggatagttaggtcttcctgttgcattgaatcctttaccattatatactgaccttgtcttttttgatatttgttggtataaagtctgttttgtctgaaattagaatagcaatcttgctttttttcagtgttccatttggttggtagatttttctccatccctttattttgaccgcatgggtgtctttgcatgtgagcctggtctcttaaagacgcctactgtttagtcttgcttctttatgcagcttgccagtttgcaccttttaattaggacatttaatccatttacattcaaggttaatattgatatgtacatgatccttcattgtgttgttagctggttactttgcagacttaattgtgtagttgctttatagtgtcactgttctgtgtacttaattgtgtttttgtagtggctgataacgttctttcctttccagatttagcagtcctttcaggacctcttgtaaggcaggtctggtagtaatgaattctcttaccatttgcttgtctgaaaaggatcttatttgtcctgtgcttatgtagcttagtttgactagatagccacttctcgcttggaataggctccaatctcttttggcttgccagatttctgctgaaaggtcttctgttggcctcatggggttccctttgtaggtgggtgacctgcctattctctccagctgcctttaacattttttctttcattccaaccttggagaatctgatgattatgtatcttgggaatggtcctcttgtgtagtattttgcaggggttctctgcatttcctgaatttgaatgttggcctctttagtgtgggtggggaagttttcatggacggtatcctgaaatctggtttctaagttgcttgctttctcctcatcatttttagggatgccagtgcatcgtggatttagtctctttacatagtatttctcagaggctttgttcattcttttttattctttttaaaaaaaattttggctaggcacggtggctcatgcctataatcctagcactttgggaggccaaggcaggatcacctgaggtcagaagttcaagaccaacctggccaacgtggtgaaaccccatctctactaaaaatacaaaacattagccggtcatcgtggtgggcacctataatcccagctactcaggaggctgaggcaggagaatctcttgaacccaggaggcggaggttgcagtgagccgagattgtgccattgcactccatcctggcaacaagagcaaaactccatctcagaaaagaaaaaaaaaatttcgtcttagttcagagaaccagtcttcaagctctgagattctttcctcagcttggtctattctgctattaatatttgggattgcattatgaaagtctcatagtgtgtttttcaactctctgatcagtttggttccttcttacaatggccatttcatcaatcagctcctgtattattttatggtaatcattagattccttggattgggtttttgctttcttctgaatcttgatgaccttcatttctatattatgaattctttctgtcatttcagccattccaacctgtttaagaacctttgttgggtaactaatgtggtcagtgggaggaaagaagacgctgtggctttctgagttgccagagttcttgcactggttctttctcacctgtgtgggctgatgttccttcaaccatggtataatttgtacagtcggttgacttttcgggatgtttttagagtctgaggcattgtacaaggtttttatttgtagctgacttattgtccttagtttcacaggagggtttattaactaagta

SEQ ID NO: 41499 - DNA, 1016 bp, Homo sapiens
gcccagatcataagtgctcagccaaatgaatttttacatatgtgtgtgctcctgaaaccactacctacatcaagtatagatatagaagatttttattatcccacaaggctcccttgcgcctcttcccaaatagtatccttcctctctccacttgaaagtaaccactttgctgacttccatcactataatttaatttcccctgttactagacttcatagaaattgaataatgtggtatatattctttgtgtctgacttcttttacttatcattatacctaactcttctaagatattaaatggaagctactttggactttgtcctctgcttttctatgtgggtagatcttaacagttctcccctttcttgttgactctttcattactgaaggccttgtggacccccttccttcattaaggatatattgaatatagtaccaggtgtctttggcttcatgtgggaagtctccatttcttaaaatgtcagactaggaaattttcatttcactgaagcatcctgtgagaataaacacctttaatcacttcctcacaaccttttaatgtggatgtttcacaataaaacatcttgcttccagtaggagtgtttgttttgaaggtaaatggaaatgataaataatagtaacttgttttaggttgtgtaggtggtaaatggagaaaccagtctgtcttcattccaaactcatattctttgttattaagtacagttcaggttggccacttttgctacttaacacttgtaactggggtaaaaatgaaaagtagaaataatggtggcagtacagctagacagttaagtctggagttctgttttctttaatactgtggataattgagagatgctgaaccaaaaagaaaatgtattgagaggatggtaaatgagttccattttggttaactggttgtgagattgccttcagggcctcccagtgaatagtggtttctgtagttcacaggtcttcacttacatcataagtttcaaacagtgcatgttctttaa

SEQ ID NO: 41500 - DNA, 1037 bp, Homo sapiens
actgcactccagcctgggcgacagtgcgagactccgtcttaaaaaaaaaaaaaaaaaaaaaaggccactatttcataagagtccttgtaagctttgctaagagaaagaaaagccaaggaaagatcttttgtcagctaaaggataggaccagcttcacatttaagaactataactcacgttgacacagaagtagaggcagtaggagggcaagataagtagccatgttaatagtctagtcttgtgattttcaaacttgatttattccacacccttgtcagcaattttgaatctgtacccctaataaaagtttatatatttctaggtgatatatgtatataattcattctacaaactgttaaagtttacctgttttaaaagattaaaagtgtgtataaatgtagaaataaatatatttaattgctctattttttcctacatgtcagcagattgtttcatgcctcttaactgggagaccacaggtatagggcaaagatgaggagacatagcaaggtcagaggaactggaggaaaggggctgaagaagagtcaacagcatttggtggccaattagatgtatgaggtgagggaggaggaggagatcaggataacagcaaagttcttatgaagttccagcatgggagatgtggaaacgattaccatcattaataaggtagtaaatattggagatggaacagactttaaggtgactataatgattaaaattccatgttggtttctgcctaaagacattataataccattttcctttagcaagaatttttttaaaaagaggaaatgctaaattttatctaatgttgcactgacaacattgatagcattttgctttgccttctcttttgaacatagtaaatgcttagtaaatatttaagtgaatatttaaaattgtagtgaaatttttattagaagttccaatgttcttttttccctaaatgttagtaaagtttacttgtttttaaagataaaaggtaaatatgtataatgcactgattttttttccccacacgtcagcagattgtt

SEQ ID NO: 41501 - DNA, 1095 bp, Homo sapiens
tccattccaatctttacaacactgcccgacctatcactatatgatgcaaatcaaatttttccactctcctacttaaaatgttttaattgctttctcttgccactagagaaattccaaacattttttgaaaaaacacaggcccctttacatcctggctcccttccccccaaatcttactctcctccccaccctccgatagaactattccctctgcgcatgtcagaacgcttgagcttccctgaatatactatgcacttcaaggacttgagatgattctttccacttggaatgccctccccctcctttgtctgattgcctaacttagaatttacatcaagactctcctcaaatgttgcctcttcagtgaagtattcccaactcaacatctcgtctctatccctctccccatgggtcttgcactccagacctccccactgaagagttaactgctccatactggtggtgccactgcactcctgtactctccttcaaggagctaattacatctgtatctcctgcactagactgtaggtcccatgagtacagggaccctcaagttcatctttgcctccttagcaccaagcatggcccctggagcacagtagccattcagtacatatgtgctgggcaaggggcaataattatgttctaccacttaccaagcactttacatgtgtgaagcacttaacatcattatgtcatcgccacacattatgaaggggatatcaacccattttgcaagtgagaaacaaagtttagaaggacgaagtaatttacccaaagtcaacaactggtaaacacaagtttacttttgacttctgagctcctgtttttaactactctgctctactcttggatgaaaggagcttgattaatggggctgtttcaataaaaacaatctcccccaatcacaggcttaggtgctgggttaggcccaaatccactgccaatatagtgctactgtgcacaacaaaacctgcaattgctgattgatttcttccttgatagttgtcagggttcctatgactaaggagaggggcactatttataaatatcagcttcttggtttctggcttagaatgctctaccctggaa

SEQ ID NO: 41502 - DNA, 1033 bp, Homo sapiens
tcctactaccacttctactgggtgctgttgattcaattgggcatgttgataccctattcgtggtggtcattgcttctacctttttctgccttgcactagggaatcaacaagtgcttcaagatgccaaggcttttcttgaaaagagggcagtgaaattgcggaaatgccttgctcctcattttttgctattttctgttacatggttactaaagctatgtcaatatgcctaatgtcttaaggaagtttaaataaaataaattttaggttttacttatggttctttgtttctccaggaccctgggccagggaaagaaatgaatgaagatgccaccttatgcccagaacacatctctcattcaatgataaaggatttgtggttgggtcaacttttgtgatgctcaactctttccttcgtaaggacgggctctttctcaggaggcttttgtactcccaattaacgcactgctgtaagtttgccatatcattatgtaacacatacctggatgtgtttgaactctgtctcaggatgaagctatgatgtcccattgcaattgttttgaaatctgcttcctgtatccagagagaggggcattaagatcccagagatacgtagttaaacataacctgcatatcagctgctcttcattgcaaaatgtctgtgtttgcacataataccttaatgttttcagcttcagctcacttcaacatagacatttatgggatcttttcaaacctatccttctccatttattcacaccacaaaatctagtgatcggcatagaccctgataaaacttttgtagggagaatgaggatggggcttatattgcataatatattaatctaacttcagctatgttgtgataataaataaaccttcagatcttaatgactttgtataaacaataagtatttctctcccatgcagaatctgatgaagctctattttgtagctatgccatctggatcacatagcctccaaggccagcagagcagaggaagacaaagagcagagcaagatagaggtggaagtt

SEQ ID NO: 41503 - DNA, 1032 bp, Homo sapiens
aagtagatccaagacacttttgccccaagtggaaatcctctggtaagagatgagggaggagagtctggcttcatttcagtcttgtactacttttgaccttgggagagcttagttatgccttggggcaaaaaattaaatgttccattttgcagcagtatcatctttcacctttatgtggatttaaaaatgtaaataaaattgctttctgtaaatggtatacatgaaggtcatattcatattctccgcaagaattcaaaatgccatttgacccatcattggctcaatagataataatgtgttctattagtttctagtaatctactttttaagcattttatgacccaatattttaatgcctagttcctagtttgtgaaataagtcagaaataaaccttttagcacttcattgtagatttatttatagaatgtgtgctttcaactttgaactttaaaaaatgccaaatcttcccagaatatatttccttagttataaaattggtctggatgaacatctgcactgtggaagaatatgcatttgaaagattttgagggatctagcttttttttttttttcaactatcatctgtgttccttttgcttattttttcttatagatcccttaggaattagggtttaggaatcctgataacagagtgcagccaacagacttgggaagttaagtgactgttctgtctttcagagagcgggtgtctgaattatttttattgcaatttggataataagaccctgatagatccttgtatttaattgtcatgattttgatcgctaatgacttttgattgcttcttctggagacacctgtcagccgcttccgaagcacagatggctttatcagcagcagtaggagtttctttttcttactaaccttgagctgaacaaattattttgggaatatgaacataccaatgtcatcccaagtttttctgtctttggaacattattttgtttattgaataacgaattgagactgctctttttcaaaagcttttggattttgtttgatagtaaaaa

SEQ ID NO: 41504 - DNA, 1033 bp, Homo sapiens
gttatgtttactgctgaaatcccaactccaagtatagtgccttgaaggtactaggaactcatttaatatttgaggaatgaattaaggaagaagagacatggtggtaagagcatttaggacagagagcgaagcatatgtaagggccccaaggcaggtagaagcatggcagccaggggggactgagggaaagacattgttgcttttgaacacagtgaactaaaaaaaagtgtggaatactagaggcaaaaaaggtaggtaaagactggatcatacagttataaagattttcccctaaaaacaaatacaagctactgaagtattttaagttgagatggggttgaaggaccagatcaagtttatgttaaaaaaaaaaaaaaccactctggctgaagtatggatatcagatttgaggggaggacagtgtgaatgtgagtagatcaattaggagttcgttatagtagttgtgccaagagatggtgccagcttgggccactggcttcagtggataagaaaggagcggattgtttgagagcagtggttctcaactggagcagtatttgacaatgtttggaaatactttttgtcattacaattgttgggggaaaggggatgtctactggcatctattgagtagaggccagggatgctggaaaccatcctacaatgcgcagaacactctccaattatccagtcccaatgtcaatggtgttgagattgagaaactttgttttagaggtaaactcaagaactctcttcatgaggtacaaactcagaacttgctgttggagtagacatgggagttgagaaagtgggtatttcctataaaagaaaggaaatcagtatatcaaagagatatttgcactcctatgtttgttgcatcactgtttacaatagctaagatttggatgcaacctaagtgtccatcaacagatgaatgaataaagaaaatgtgatatatatatacaatggagtactattcagccataaaaaagaaggagatccagtcatatgcaacaacacaggtggaactgga

SEQ ID NO: 41505 - DNA, 2046 bp, Homo sapiens
atgtagaacagtccttgagtttctgtctcatagacatttttaaatatatagtccagttttttttattttggtttgtttttacagaatgttcctaatatgattagatttgggttatatgcttttggccggaataccacggaagttatatagtgttcttagtgcatcgtattaggaagcatatgatatttatttgtgcagttactggtgatattactattactttttttctcatttttattgcataagcctaccaatttagaatactggtgatattttgatcacttggttgagagggtgtctttctggtttatctgtggtaaagttattttttcttaccaattaattattattattattattattttttaatcagggctgtgactaccacaaaacagtatttctatggcctttctcttacctgcttttctggtattacagcccttgtcccaagtaattctgggagtctgctggacttgtgggactttgcatgatctgtgattctctagctaatgctctgatcttcatgtggagctgccctttttttgctgctaacactcactgtgggaatatctccagttactgttattcatttatatttttagtaatgtttgttgagtaccttctatgtgcttggtattctgtaaattttaggcatatgaaatagaatgtacacattgttgacctggtggaacttaatgtctggacagacaggcagtaaacaaaccaataaatatctcttagttggtggcccagattctgaagaaaaatgaagtaggacaaggagtataggaatgctgtgtgtgagggtggttgggtgagttgcagaagtttgtatttgtaaaaattgataaggggctgggtacggtggctcatgcctgtaaatcccagcactttgggaggccaaggcaagcggatcacctgaggtcaggagtttgatatcagcctggccaaaatggtgaaacgacgtctctgctaaaagtacaaaaattaatccggcatggtggcacgtgcctgtaatcccagctactctggaggctaaggcaggagatttgctggaacctaggaggtggaggctgcagtgagccaagattgcgccagtgcactttggcctgggtgacagagggtgactctgtctcaaaaaaaaaaaaaaaaaagttgttaagggaaatccactctgataagaggatatttgagcagtgacctgaaggaagtaaaggagcaagtcacttaaatatattgggaacgagcactgcaagtggagggagtagtgaatgtaaagatctcagccaagcacaatggcccacgcctgtaatcccagcactttgggaggccgaggcagtgaatcacttgaggtcagaagttcaaggccagcctgtccaacatggtgaaaccccatctctactaaaaatacaaaaaattagctgggcatggtggcatgtgcctgtagtcctagttactcaggagtctgaggcaggagaatggcttgaacccaggaggcagaggttgcagtgagctgaggtcgagccactgcactccagtctgggcaacagagtgagactccgtctcaaaaaaaaagatcttgaagtggtagcatgcttaagagtgtttgtataatggcacagaagtttgtatggctagaactgggtgagcaagctggttagtggtgggagtagagatgggagtaatccagctggggtcttgcagattccggtactgattttagattttattattgtgtccggaattggtgggttcttggtttcactaacttcaagaatgaagctgtggatcctcgcggtgagtgttaacagtttttaaaggcggcgtgtccggagtttgctccttctgatgttcggatgtgttcggagtttcttctttctggtgggttcgtggtctcgctggctcaggagtgaagctgcagaccttcgcggtgagtgttacagctcataaaggcagcgcgtacccgaagagtgagcagcagcaagatttattgcaaagagcgaaagaacaaagcttccacagtgtggaaggggacccgagcgggtt

SEQ ID NO: 41506 - DNA, 1031 bp, Homo sapiens
ctctctgagatcccataccctgaccatttgaatgacttgtctttttctccagtgtttgggggctttcatatatgcttttccttttacccagattcctcttgttccacaaatataacctaaatacataggtgttaagccagtgtttaccgtttgtcttcctgttatttggagatttgaaaaatcttacttttaattttatttttaaatattttattgtgtatatttcaggtatacaatatgttgttatgggatacatatagatagtaaaaaggttactgtagtgaaggaaatgaacatatccatcatctcacataattacccaatttttaaaaagtttaccaagtccatccttctgcagaaattacctatttttttgtttttgtgacaagaacagctaaaatttacatttaacatgaatcccatacacagtacaagtttattaccttgaattaattcattaaaatattcttaattataagtgacatatgagtagatatgtaaaaatagttatgctgtctgtctcaactctacttctctttgcatagggaatcactgttaacaatttggtatgtatctaccccatctgttgtaccttgtgtaccaggggttttttaactttattttattatgtagatatatgtcctctgtggaaaacatcagtagaaataagctaagaaaacatctcccagttgggcttggtggctcacgcttgtaatcccagcactctgggaggttgaggtgggtggatcgcttgagctcaggagtttgagaccagcctgggcaatgtggtgaaaccctgtctctacaaaatacagaaaaatcagccaggtgtggtggcttgcgcctgtagtcccaactacttgaggggctgaggcagaggatcgcttgagccagggagttcaaggctgcagtgaaccaagattgcaccactgcattccagtatgggctacagaggaagactttgtctcaaaaaaaaaaaaaaaaaaaaaaagaaaagaaaaagaaaacatctctcataatcataccaccta

SEQ ID NO: 41507 - DNA, 1115 bp, Homo sapiens
aaacttaggttgcttccaaatcttagctattgtaaacagtgctgcgacaaatataggagtgcagatatctctttaatgtactgatttcctttctttcggatgtatacccaacagtgcagttgctggattatatggcagctcaatttttaggaacctccaaagttttcttcatcatggttgtactaatatacatttcatgcaacagtgtacaagggttcccttttctccacattcttgccaacatttgttattgcctgtcttttggatataagctattttaactggggtgagatgatatttcatgatagttttgatttgcatttctctgatgatcaaggattttgagtcccttttcatatgcctgttttagcatatgagcttctttttatatgtctttttttgagaaatgtctattcaaatcttttgtctgtttttaatcagattattagattttttcctgtggagttatttgaactccttgtatattctggttatttatcccttgttagttgggtaatttgcaaatattttctcccattctgtgggttgtctcttcagtttgatgatgtattctttgcccagcttgttgtgatcctgctttttaaaaaaacctgatatgatatctttcgtctgtttttgcttcggttgcttgtgcttgtggagtttcgctcaagaaattttacccagagcaatgtcctggattccccaatgttttcttgtagtattttcatagtttgaggtcttagatttaagtctttaatccattttgatttgatttttgtatatggcaagagatggcgtctagtttccttcttctgcatatggatatgcagtttttccagcaccatttgttgaagaaactgtcttttcccatatatatgttcctggcacctttgttaggcactaagttcacttaggtgcgtggatttgtttctgagttctgtattttgttcctttgttctgtgtatttgttttatgacagtaccatgctgttttggctactgtaggtttgtggtataatttgaagtcaggtagtatgattcttttttgcttaggatagctttggctcttctgggtcttttgtggttccgtatacattttaggattattttttc

SEQ ID NO: 41508 - DNA, 1034 bp, Homo sapiens
gtctccttttttatttctaattttatttacttgtatcttctctcttttttcctcagcctggctaaaggtttgtcagtgttgtttaccttttcaaaatactaacattttgtttcattgatcttttgtatatgttttttatttcaattttatttatttctgctctgatctttattaatctactaattttgggtttggtttgctcttgctttcctagttctttaagatatgtcattggattgtttatttgaagttttttctcttttgatgtaggtacctatagctataaacctccctcttagtagggcttttgctgtatcccatagattttggtatgttgtgtttccattactattcgtcatactcttcttctttatgtcctttgttgggtgtcctcccagctgttctgaaatgaaatatggctttgaactaaattccttaatttttaaaaataagctttatgttgcaatagaaggcagcattgaaatctttatgtctcagttctttctttttttttttccaatcagacggggcctggctctgttccccaggctaaagtgcagtggcacgatattggctcactgtaacctctgcctcctgggctcaggtgatcctcccactgaagcttcctgagtagtgcaggttataggtgtgcgccaccacaccaggctaatgtttgtatttttctgtagagacgaggtttcaacctgttgcccaggctggtcttgagctcctgggctcaagcagtcctcccacctcagccttccaaactgttaggattactgtacctggccaattttttctttttttctggagagaacgtctggctttgtcaccctgactggagtgcagtggcatgatcttggctcattgtaaacccccgcctcctaggctcaagcagtcctcctacctcagcctcccaagtagctgggactacaggggcatgccacgacacctggctaaattttgtattttttgtagcgatggggtttcaccatgttgcgcaggctggtctcaaactcctgagcttaagtgat

SEQ ID NO: 41509 - DNA, 1029 bp, Homo sapiens
cactgcactccagcctgggtgacagtgtgagactccatcaaaaaaaaaaaaaaaaaagagagagaaattgccacagccactccaactttcagcaaccaccaccacccccatccgtcagtggccatccacatcaaagcaacatctttcaccagcaaaaagattatgacttgctgaaggctcaagtgatcattaacattttttagcaataaagtattcttaaattaatgtacttaacattttaaaaatacataatgttattatgcatttaatagactacagatagtataaacctaacttgaaaatacatggagaaactaaaaaattctcgtgatttgttttattgtgatactttattgaagtggtctggagctgaacttgggttatctctgatgtatgcttgtaaatttaacagaggttatttgagcattaacagatgtatttattgggcagcacttagaactagaaaaggctcagagatgcccacttcaatagtgtgagcagtgggcttctattggctgaatgtggaaccaaagtaaggaaattacttaattgactacagctgtgttgtttttctgtatgggtatgatttagtagaaagtgtccagttacgttatctgatgtctagttggctgttgtggttagttgaagcttgttttttttttttttttaaatttaatttattacaaggaatttttctaaattaaatttcaccttgtgtaaagttccatgtacagaaacaggtccaggctaatttcctcttgcttattttgctttaagaaaacatcactgggaaactgagttgaaaattaggtactctctggcttctctgcaaaatcagatacaatgttgtaaatcatgactgggacagccttctagacctcattgtctactcattttccaatctgaattatgttctcctgtgttctcagttgcttagttcactagcattttaaatgattcaggcgattgaggaagattctgttttctttgatagattgttttatagtctaaaaaggctgtcaggaatat

SEQ ID NO: 41510 - DNA, 1056 bp, Homo sapiens
ttaatatgcttggaacatttacattagcctacacttgaacacaatcatctgacacaaaactttattttataataaaatgttaactatctcatgtaatttattgaataccctactgaaagtggaaaacagaatggtcgtatgggtactgaaagtgtggattctgctgagcgtgtattgtttttgcaacattgtaaagttaaaaaattagaagtggaactgttgtaaactggggactgtctgtatatgtaaagtgcttagaatagtgactggcacatagtaagtcctcaaataattttaattatggttgtattattatttattatcattaaattagttgaattttgatttatttgaaccatataggtaattacgttttttcatataaactcttggctcgcctatgattattgtttgtattggtacataattggttcattatttgtatttagcattttaaatatttagtggacactttgtatgagaatgcagtctttagtctggaaataagtttgctttgagaatttttctgttactttgttgtaggagtgtagcttttgtgaagaccctcgctttgctagaactggggtttgcattagctgtgatgcagggatgtgcagagcctatttccatgtgacctgtgctcaaaaggaaggtctgctttcagaggcagcggcggaagaggtaggtttatttaaacccatagttggtgaacatgttcacaagatatcttttgactctatgtcctataataagtgtaaataataaaagaaattttaacatttattcttaaagttcttgccaagatcactgttctaaaactttaagagtaaatgcctatgagttttgtcagttttaaagctagtcagacgttcagaaaacataatttttatagtgagatctgacagataaaatgaaagataatccaagttgtcttaaagcattaaaatgtcggcatttcagccccatgaattatagttaaaaaaaaatagcatattttatacgagaagctgaaactgtatttgggtaaccttgctctatttttctttaaataaaatc

SEQ ID NO: 41511 - DNA, 1051 bp, Homo sapiens
catttactaactgcttctcatcattcatttttgtcttatatttttctggcatcttttaggtctccttcacccatttatgttgactattactgcttctcaaggcatttgtatttaaggcccttgcctcagctctgctaagtcagaatttgcagagttgggctctagttacctctatttagaaatctccttaaatgaatctgatgacagtcaggtaatggttaaggaagatggatcttacatactggacataggtcttggttcagcaacttaacctctctggctttcagttttctatccataaaattgatattaaaatggtagaacccacctcatgtggtagtggtgaaggttaaagagatagtatatacaaaagcgcatgtgcttatttcatggtagatattcagaaacatgtttttccctttctgtcttccactgggagtaggatcttgaaagctccatttctccaagcaggttgaagggatattccatgtcaaccaatgcattaattaggacattattttgactggtttaacaaaaccaagtaacgagttgcttaaacgaagaagttgaattcactctaatatacaattccaggcggattggatactgaggggagtttggttccagggatcagttcccttctttcttcttgcttcaccttcctttagtctattgcactctcctacacagtcaaagatggtttatcaccatcttgactggattcttcctcattggaagtagcaaagaggaggttaagagtaggcagcttcctttcaagggcatggtctgggcatttcatacaacttattggccagaacttaatcacatggccacatctagctgtggggaggctggatcagatagtttctagcagggtagccatatgcccagtaaaaactcataggggtctagtactaatgggaagaatggatattgtaagacaattagtagtttctgccatagtaagtattggtgtttttcttaagtcagagtcttggtccaaatgcttaactcacctatgcaagcatgaatcctatctctaatgactcaa

SEQ ID NO: 41512 - DNA, 1048 bp, Homo sapiens
tctcactatgttgtgagcagtcatcctgcctcagtctcctgaagtgctgggattatgggagtgagccactgcagctggcaaaaccacctttttaatcagtgttgaatctcatgttggttcacttaaacatatagcattgttaaatgtgttcttatacttacaggatacattaaattgccttaaatattatattcatagtagtcactcttagaggagtatttctgaatgttttttcattatgtaccctataatcacattacctgtgtatatttttatatattattcttatatacctggattttgtatttataaaaactatagctaaagccagaagataataataaatgcatgacttaaatttttcccctttatgtaggcagtgctcggaatgtgaccaggcagggagcagtgacatggaagcagatatggccatggaaaccctaccagatggaaccaaacgatcaaggaggcagattaaggaaccagtgaaatttgttccacaggatgtgccaccagaacccaagaagattccgataagaaacacggtagtttattttttatttatcataagcatcatacaattctgaggccaaaatttaagagagtgagaaagacacagggcaaacatatactcagaagtcaaagaaaaagacatctattggttattcttaacaattttttttctatattatgaaatataccacatgcttacctgagtgtttgtagtttatattttgttggaggcataatataaggaacacaccagagcatccatcacccaccttgaaagacagaccattcccaaagctttagaagtttcccgtaaacccctcgacaagctcatctttatctgtctagcccagaggccacctctttactcagctttacttttctcattcacttctttttctttatagaagagatttacactctaaatttctgtacttataaataatacatggtttatttttgtaggttttgaatttcatatgaatggaatcaaatgtttttctctggtaatttgatattttgaccaaaattatgttga

SEQ ID NO: 41513 - DNA, 1049 bp, Homo sapiens
gtgcccacagttcagtattacttgagataaaagagaactctttaacattaaaggatccttctatttttttctcacctttactggtctgctttttttatcctagaattataaggaagctttaaaatttgctaatataatcccattcctttcatcttgttctttgtctctagttttcttgtttaaaagttttagacttcttacagattttggtcagtgaaacaccagggaaagagtccatgaccagtaatttcaggaaatgcagtgtgattattttcttacttgtagaaattccaatgcatgttgaagctccaaaaaaaaaaaatcctaatatttagaaacaggattacttttatctattctttttcttaacttgtttttatcaaaaaagcattttttaagacactttttttttggtagcatagagtactgtgtggtgctaagtttggaaatgatgctccggagaccatggattacttgcattaggaccatcttgggtatttgttgaaatgtagactttggacccaccctagagctagtatagactttggacccattctggaattaatcaattagaatttaggggtttgactaagcagatttcttaggtgctacgcttatactaaataaaagttgaaaataactactaatggtgattacctttcctttttccctctcatcttttctgcctgccttccaacaatccattcagaaaaccagacaattggtgcgaggtatcatactaaactgttcaaggaatgtaggaatgagagatacagaagggagtgatcagtcattttggtcttgatcttaccatttatgctgagttcctgttgttaccttaagtttttacttatttctatttgagttgtatttatcttttttaatcaataggtggtatggtgaaaaatgaggtgttctaattgtgtttcttagaacagtgttaattatgagagaccaggcatacaacagcttactaacttgtataaataccttttgcaatatataactaatttttctctcccattgttacatttttaaactattgctcc

SEQ ID NO: 41514 - DNA, 1032 bp, Homo sapiens
tgccaaaggacttgttgggacctctctttccattgtttttacacacacgcatgcatcatctactctctttgaagttctgagatctttcttcctgacttacaaattctggttgtgttttatatattttcttttttgcaaaataaatgcaataaataggcaaaatactttttagcagctttgactgaaaaccatattgtttttcaggatgcattatttcttttagatcattattttagaaggagatttaaacacatctaatcgtttttccatcgcacttaacaatgtgagccactagccagttctaagtggcagtctttatttgagagataatcaaatatcctagagcctacttttattacatttatgttttaactaattttacgcatatacaaagtacctatttaataatgtttaagcttaagtcttgagaatctgaaaatatgaaatatgtttcatataaatattttttagatgttagtttaggaaaaatgttgaagcatttggattcagttctactgaagtgactaaaggttactgtacattatgttcatatttattttacttattcttatactaactgtttgaattactacagttctgggaaagaagagttatttgtgggggctttacataccagagttttctattatcagactcaaggtgacctctgaggtacgagtcagattataaaacctctatctgtcatagattcttagaagaaaccctggcaaacagtttttgtagtgaactagaactcactttggctacttggaagagatctactctgtgggtgtccttagctcaagtaatcttattcagaaccctgagactcctgttttgctttttgcctcttggaaatccatcacttttatttattcccaggagtatgaaataaagataagaataggtggagctttcaagactttccttattttgtatataccattatctctgagaaggtttttatagcagcacttacttgtcatgtagaatacatattttattatatatcattagacccatagttatttc

SEQ ID NO: 41515 - DNA, 1098 bp, Homo sapiens
ttaccagctgtgtgacatcagcaagtcatttctctggattgctttttcagagctctaagataatattattttatatttttataataagtttatttttgtagatggaaattgtttatgtgtcttgtgttattttaaattattacatgaatatatcagcgattaccatttggtaataaatgtacttaaagtgactattttagataattacaaatacacctaatatatgagaagaaatttataaatatagagagaaatggagctataccattgtgtgattgaatcactaattggcattataccatatgatgctaattgcaatctggtatgaagagagtttcaattgatggagtcataccagatatttgaagatttaagttattatcaaaatggtaaataaacatccttaaaagaattgaaaacatgaacttgcagcattaaaatacatacttgaaaaattcaaaactacatgatacatttgctagttcattacctaaaagatgagttggatgaagaaaaatgtgaaaatgtatggaagtcttttgcacattctgtttagaagtttgtagagctcaaatgagtaatttgaatattttccacttgatattggttactaatttggagcatcttattgaaatgccctgtaggccaggtgcagtggttcacacctgtaatctgagtactttgggaggccaaggcaggtggatcgctttaggtcaggagttcgagaccagcctggccaacatggcaacccgttctctagtaaaaatgaaaagattagccaggtgtggtggtgcacacctgtaaacccagctacttgcaaggctgaggtgtgagaatcgcttgaacctgggaggcggaaactacagtgagctgagattgctgccactgcactccagtctgagcaacagagggagagtctgtctaaaaaaagaaaaaagccctgtaaatatacattatgcaaattagataatagagtaccaaattagggaaaaataatttaaactttttgtcaaatttttattttattttatttttttgagacaaagtctcgtcctgttgctcaggcttggaatgcagtgacttgatcatgtctcactg

SEQ ID NO: 41516 - DNA, 1035 bp, Homo sapiens
tatggtccttaccaaattgggaatgaattttgtaaggggacagaaaataaagcattaaagggcaagagtggcacagaaggaaaagagatgaatgtagaaattactagccataagttttcagttagaacttgaataagtgttgttaaggacctttctacactggtgtccttaaacttatgtgtatttgacctacttaggattcttgttaaaagatagcttctaattcagtgtgtcggagtcagcctgagattctgcatttctaatagacactcaggtgatgccagtgcttatgggtcatgattgacaccttgagaagcaagtctcagtattgttctttggaagtcagaattgtagatgcaggatctgcatttaaaggcctttcctggatatagtcttcagttttctgcctaattacttccataatataattaaaacagactgattggcaatataaatgtaaacagattcatagtttataaatttactttttttgaatgactaatttagttgactcttggttatctaggaacagattaaatggtaagtagttagccatggtattaaataacagtgtacttgatatgaagaattgaaattaatgtaagaaaatattaatatatttatactataatgtaattctgtttagaattatttggtacctactctagcttgggaatgttccttgatctcagctgtcaaagtaatttttggaagcagtgcctgcattctcttccagtctctagggaacagtggtctgcatatggggctgtgctgtgattggtggatatttctaacatattggctgcaaatactaatgtagttacagttcttttaaacgtttgtatgcgttctttcaaatggtaaatgtattctgaaatataggatgtgaattttagctaaattagtttaaaatgtcattttatgtggcattttaattagttttatgttaactaggattttggatatgtgagaacttttccttctacttttttttggctgcttaagaattatttctttacataaacatgtatgcac

SEQ ID NO: 41517 - DNA, 1031 bp, Homo sapiens
gtttttaaatacttacttccaaatgatttaatctattttggtcattaaaatatgtcttaatttctcaaagaaaggcatgaagtcttaaattttatgagttttttatgctatcaatgagaaagataaagtaaaaattacagtagaaaaagacaaagtccttcaacaaagttaagaaagtttataataattggctaatttttttgaggtagttcatgtagagtgtgttgggagctatcctgaaggttaagtttattaaaatttagggtaaagtagtaagtagttccaagttcaggagatacacctgaataattctgaccacagtataaattttgcaatatgtcgaaaatgaaatcccaagcataagcgtaacataatggagtaaatgaaacaataaaaataaagaaaaaaaataacaatcttatataatgaacaaaaatttaattcaggaaaattcccttggggttgagggtggagttgaggactatgattttgaaacagtagttaaaaacttatagagctggtgatccttttattaattatttgaacctgtatgagtatctactgtgtcttactaattttttttttttaatatgagattgattgaggcctttttgctgtaggacttagaggtttttattaggttttttgttttgcttttgtcatatattggaaattaggaacctgagaaatacaatttttattttaaaaatcagtttatgatagatttccaacccatcatattttagtcgtttaataaaaaaagtgccatcttctaattttgataagatttttgaatagtattactctatgttatttatttctttagtttctgttatgaaatttttatttctaattgcattattacaatatgccaatgtctggaattttgtgaaagtcttctggaaggtaaagatatttttattactctaaaataatggatatgcaaagtccccttccttcgttttgccttattaagaagataatatcgtaaattgtctgcaaagttttaaagaggtaatgtagaggaaatt

SEQ ID NO: 41518 - DNA, 1108 bp, Homo sapiens
aatttatgatcatggtatatctctccatttattcagatactcagatagtctttattttttctcactgatgtagtttcgactttaggaatcttgcatgtcttttattacatgcatttttaagaatgtaatgtttttgatgctattgtataggttatctttaaagttctctgttttctgttagagtttagagctgccaggtggtcagttaggaaaacaagcaaagttcaaagtaacaaaactttattttcttattctggtagcatcaggaagaagccagtcaggaaaggttgctggctcctgagtattacattgtttcccactgaacagcagtgggcaagagtcaggaagataagtgcagatacacccccaaccccaaccagcaccccacaccacacatacccttgtacttagaggagaaatttagtcttactgctaaaggattcccaaacaaaggttcctgctgttttatggacccaggggcttctggaagggagatggggaaggggtaggaggtagaaaagtactgagtccgcatggagaagtgccttcaagtctccttaataaggaggacgataaggcacaggtatttgaacagtgtttgctgggctcttccatcccctctgtcccagggaggcttcaaaatcaaccttgcaaatctgggataaacccttctggtctgatgtattgcctcttttatgtattttttttaattttatttgctaatattttgataagggttatacattctctgtgaacgtattccctccctccctccctccctcccttctttccttcccctcccctcctctcctctcccctccctttccgtcccctccctttcccttccttccttccttccttctttcttgtctttcctttttttttggttggttggttgttgcccaggcttggtctcaaactcctgggcttaagtgatcctcctgagtagctggaattaccaccgtggcttggtattaccaccacaccaccatgcccagctgttctattatttatttatttatttttttctggtagaagtatcacattttattagataatactggccttctgaatggagttggaaaaagtgttcccttattctttgttt

SEQ ID NO: 41519 - DNA, 1031 bp, Homo sapiens
aggctggagtgcagtggcgtgatctcagctcactgcaacctctacctccggggttcaagcaattctcctgcctcagcctcctgagtagctgagattacaggtgcacaccaccacacccgactaatttttgtatttttggtagagatggggttttgcaatgttgtccaggctcatctctaactcctgttctcaagcaatccgcctgccttggcctcccaaagtgctgggattacaggcatgagtcactgtgcctagctttcaaatatggttttttttttttttggcaaaattacacctttttcagataattctaagatatgttagtatctcaatggtatattaatataatactaatatatatgttgtacttatgttgtatgtgcacatattaaaatgccatgtgtcatgtttaattcatatatactacatttaatactatctatatttatgaaagttgcttcttaggaaattcatagtatgttaccatctacacttttactcttttggtcgttagtaatgttcattatggtcatctatttactaaatgcttttgtagtccctttgtcttgtcttaaagatcaacacatattattgctctaattataaattgaagaaacctctgaatatataggcataattatgtaaaaatgttagaaacgtaagcatttgaattaaccagtagtgcaaagaaaaaaaaaaagccagattcagccgggcgcagtggggctcatgcctgaatctcagcactttgggaggctgaggtgggcagatcacaaggtcaagagatgaagaccatcctggccaacgtggtaaaaccccgtctctactacaaatacaaaaattagccgggtgtggtggcacgcgcctgtagtcccagctactcaggaggctgaggcaggagaatcacttgaacccaggaggcaaaggttgtagtgagcccagatcgcgccactgcactccggcctggcaacagagcgagactctgtcttaaaaaaaaaaaaaaaaaaaaaagacagattcaagcacactgt

SEQ ID NO: 41520 - DNA, 1065 bp, Homo sapiens
actgcaggtgtgtgcctggctaatttttgtgtttttttaagagacagggtctcactatattgtccaggctagtcttcaactcctaggttcagtccttccaccttggcctcccaaagtcctgggatttgctactgataagtacagttttttttaaccctagtttttatcagtagcaaaacataatagtttaaaaaaaaaactgtggttaaatgcttgaattctggagcctagttatttgggttcagattttcacccagcatttattagttgtaacttgtctagttacataatctttgtgctttagtttcctcatctgtaaaccgaggataataatcttttttacctctagaattgctgtgaggattaaatgaataaaaatatgtagtgcttattctccttcatcaactctctcctggaccgttgcaataaccatcaccttctctagtttgagtacctctagtctgtatccagttgtcttactaaaacatgaatttgttactattgtactcaaatttgtccagaggcttcccatttcttgcaaggtaaatctagactgtatagcatggcttataaggccctccaaacccagcctcagtctgtctttttgttttcatttccagctgttcacagctccaggtgacctaaatttagatcatcgcaggtcattttttctttctaaaactaacctgttgcttttatgccatcttgcttttattatactttatgttataccttctctctgaaataacctcgtctttttctctgggatgagggcttctcaatcacttatacttagtccatatgtcttggtcagtgtatgattcttagtgtataagcaccattttttaataattaaattaattttaatattccaggtccgaagccaatgcttatcacatagtatgcccccagtacataaccaaattgaaaaaacaatctgtggattttaattagtggtacttatttaatattttaaaagttataattgtcagatattaatgggatcttggcttagttatgttatttttatatacaaaacattgaaattttggttagattggaatg

SEQ ID NO: 41521 - DNA, 1095 bp, Homo sapiens
tgatcattgactcttagggcttttagggaggagatacagttgtcttggccaaaatggtattataaaatgttgaagccaggtgctgataaactcagaattattaaaagctctttttgtaaagtaacacaccagttaaagggtgtttttttccccctaatagtgacccttgaatcagattggcatggcaacgttctagattgctctgaaatagcactttgtctgttgtctccctgagacagtgatctgttttcactatagtcagaaagtgtgatacagtcctgccaagcaaaactagctttcaggctttagattctaaacttctaatttcccttaggactttctctttaactcatgggttatttagaagtgtattttatttccaaatattcggaggattttccatatatatttctgctaatgatttctggtttaattgcatctttaatatctccgtcatcccagagtttgttctgctgattgctttgtttcttgacagtggattttctttttcattttatgtgcctcataacttttgattgaatgttggacatcatgagttgaacagtagaatacttacgcctgaaaagggcacacctgttctttttcaaggctgttagtatgggggagttgagtcagtttaatctggagttgagctgggcttatattttcttgttgctctgcttacctcagtgtaccacaaggcttcagatttctttggatttctttactatttcctgtgtttctggttgaggttgtaatgccagagtgcttttcgtcatttgtactcccctgttaaatttcacctttctctgtatgcctgtgctactgaagaagccccattgcactgtctttcctcttacttagcagtagactgtcacatattactcagtgcttgctggtctggtggtattagccaaaggagttcttaattttcctcattcaaactcagccttcagcctccaaagaatcacaagcttggttcttgagtgtaggcctttttcattgttctctgccctttttcctatggcagctttattctggcttgtgtctttggcacatcttgtgagggagtttccttctgactctcaggggtag

SEQ ID NO: 41522 - DNA, 1036 bp, Homo sapiens
ttttctagcactagagttgttctgcactccttggttcatgacccccaacttcttgcagctatagtcacatctatttatctctctgattctgactcctcctacttctctcttacaagagctctttcctgtgattatatcaggcccctcttctcaaaattcttaatcatatttgcaaaatcccttttaccatacaagataacatattcacagattcagggcattagaacatggactcttttgtattgttattcagcctaccacagggttcctggaaaaaagtttgtgaatgaaggtaaccgtccctggggctgtggctcccaaggcttctgtactctgatattagccaacatttcacctttagcaaacctttaaaatttataactgaattcttactcatgtagtgttgagcagctcttcctctcatgctctgccacaggtgatccagagcttggatcccatccttcttttatggggtctatctttcttgtatttcaggccacttggttgccctctgacatcagctctctcatggcttgaaaagttataattttgtagtttatctttttttttcttgctaggatagaaggagtgttatttccagttgttgttgttgttattgtttttccattctagccagaggcagttcaaagaaacttcagaaactttactgagcctgagggaacacaagtcaactgccagtaatcactaccttcagctttatagtaatagcagtagtaataaactagaacaaattgtagtgatagtaagagtggttgagttgaactcatagtgaaggtaagtaagcacttaccacaaccatatgccaagcattattttaattattttatacacttatttaatccttaaactctataaggtggttactgtttttatttacatttataagtgagaaaactgaggcaagtggagattaagtcattttctcaaggtgtcaggctgatactgacagagctgggattttagtccaggaactacttctccagaatctgtacttttaagcatgaggctgtgctgc

SEQ ID NO: 41523 - DNA, 1749 bp, Homo sapiens
gctaacttttaaaggtttattttaaataaggaataaagaggtcttccttaatcacatggttttcccagtcatgcaaagttcattttggttcttttattctttttcggtgtctgagtatatgcatgcatggatatttgcatgtaaacttcaagtgggattaaaaccatttagggccatccatgtattttgtaaagaagatcatcctgcataattactctttatcagtaactatcatcaaaaaaattttcacagtaggatattcttatcctaaagtttttgaatgctcatacagacctgacaatttcacttataggagaaagggaattttgtaaagaagatcatcctccacaattattcctcatcagtaactagcatcaaatatatttttactttaggatgttcttatcgtaaagtttttgaatgctaatacagacctgacagttccacttacaggagaaagggaactggatgccattttccagttcatttacgggtatttcatatcgtatgttgctttaacctgggacagaacccagcagccttttaacactattaaaagctctatttggttgttgccaattataaagcagatgtgaaaagaaaaagaaaaagataaagcagatttgaaaagtagacctttaagaactgtttggatatatcgagtttttatagccattcaaaaagaactcaagataatcttcccacaggacagtcatggtgattaataaggaactacataggaagtaaagttgtttcttgagtttaccaatttctgttggtgtttttctggaattttgacttatcactatatactggaaaaaaaaactcatcttcaaatgatttcagccaattcagtacatttaatcttagtacctgtttacttcattgatagtattttgccccaacaatagtagactagaactttttttttttttttttttttttgagacggagttttgctcttgttgccccggctggagtgcaatggcacgatctcggctcactgcaacctctgcctcccaggttcaggtgattctcgtgcctcagcctcccaagtagctgggattacaggcatgcaccaccatgcccggctaattttatatttgtagtagagatggggtttcaccatgttggtccggctggtctcgaactcccgatctcaggtgatccgcctgcctcagcctcccgaagtgctgggattacaggcgcgagccaccgtgcccagccaggactagaactttttaacgtattttattcatattgccacaatggagaattattatgacacctaaaatagataatattttatcaataaaagctaatgttgatagatttaaggtgactaatctatcataggtattgatatcagagtctcctcagttttctaaattatgactagggatcaccattaggcgtagtagtaggcctttatcatttgaaatcacaatttaatttcttggtgaattaggattcaagggtaggaggaatttgagatattgagctcttcaaaaatttacctgacttttgaacttcatcagcagtatccccaccatgttgttatgcagctattgtttgaatactttcccttaccacagttaatgctagaggcagagttcaggctagttcagtcctcatctgaaagtttgccttcccttcacattctcaaagttcattgttgatacccatttatctaactcagcatcttgtttaatatcattgtattacataagaatcaataaagtgcacact

SEQ ID NO: 41524 - DNA, 1499 bp, Homo sapiens
acatttaaatttaaaggaaggggtgtgtgtatgtgtgtgtgtagataggagggagtgtatttgaagctatatattacctgatttttctgtaaatctatcatattcctttaaaaaagtcttttttaaaaagttaaaggactgtgagtagaaaaattaatatttttcttttaaaatcttttgttaattataaaaatttatatacaaaaatataaaaagtaattttaaatcacctataatcttacactatctcaatgtatttacttctattcagacattttgatgattctgttcaaaacatttaaaaaactttagccatgtatataatttgaaagctgaaaatatcagaatattttgggaacagttttctattaaaacatttcttgatccattcttttcctttcccattcctatggcttccttgagacctttcgcagtgtctagcctctgttttctgccatgttattctgttcaccttagcttctttgctgttttctcttgccgcctttctctgttcctcacttctgattatctctcccttggatccctctctgtctgccttgcctctcctcatttttattgctagtgtataattgggttctacagctctactatgtctcacttcccccaaccttctggctcgtttcctcacctgataaaatggccagaacttgaactccagttcttgtggaaagtgcaccattgtcctcactaatatccagagcagggcatatgttgtcttccttctttaatccccactgcacccggctgttctttacttctttctctaaataccattattccaaggctgtcttggacatttactgaacaatttagggtaacagaggccttacacacagaacagtgtaagatttaaaattaaatgctttgtattcttgttcataaaagttacttggccatccttgccactaagaatgtttcctttttgccttagaccaggttttataaaaagcagtgatcagtgacttaagataaatgtctttagacttaaaatgatgcttcattgtatgtcacgaagagattagattctaaggaaggaattagaaaattaagtaaattttgtgctataatttttaaaagttcatttcaaaaatgcttttctattagtaaaaatcagggaagagaggtttaatttaaaaaatattcatatttggataatgagtgtagcccagctgccactgaatttttcttattaaggtggtattctgatgaaatttaaattaaaaaatgtttacttggtatattttttctataattaagttgatttgctgatcttgttagacacatggaatggctaacctgtctaacacatttagtatttattgtatcacattctttgacttaaaatctgtattataacatcagacctttaagtgtctttgtattattcataaatattttttgtttatgttataaatgtttggattttaaaatttttaacacatttttaatagatgcagtatagtcaggtaatttgtatt

SEQ ID NO: 41525 - DNA, 1087 bp, Homo sapiens
ttgattgataaaggaatgtgcttttaacatctccttaaaaggtcccttagatttcctctagataaaagaattagtaatttcatctgcaacacatacaattttttttaattttataaaatttagttaaatgtttgttttacactgactatggaaacagcactattttagatacagaaagaaatcaataaacatagcctgtgttcacaattcactcatccttttgttataaaaagacttgaaattagggttatgttttaacatgaaaacaaaatttagccttagcttttatccatcttaactttagaaattatatttatgcattgtttatagatcattgtcattcgttgttgcttaagtgttcatctgattttatatttatgatgttaaaaatagactgctgaccaataaataataaaatatttacactccattctatttccctgtattcacatcctattaatgaaaaccactggttttaaacaaagttacttatttcataaaactcaccactattttacttgattctcaatatgagaatatttcatgactatttcaccaaaatttattcaaggaattcagaaggactctccagcagagcagaatatttacatcattaaatttttaaaaaaatttaaaaatggcaattgaaacttgtttaagagactcaacttggagtttcctgacatacgaaggcagaatcattttttctacctgtctgaatcagcactttgtaagtttacataaaattaaggattgtgatttctaagataggcatgctttgcaaatatttctctataaaagtggaagcctctttcccatagtgctcactttaaggctttctgtaggcctgccgataagattcactgctgttcaggtacataagatgtaatgtaattggatgcacatgctgggctttgtaaataaaatgagattgacacccagcaattatctcatttatctgatttacattgtaaaatcaggatctacactattgattagagcataattagttaattatgaacagggaaatacaaagttacatggagcttgagctcagcaggttgtactgctgaaaaatttccaaggg

SEQ ID NO: 41526 - DNA, 1030 bp, Homo sapiens
gtgataatactctgattttcaaatgttaagaaatgttttttaaaagtaacctgaagagtaattttctgtttcattttctgccttcacacacatcaaatgaaaatctttcctgtctcagagtttcacactaaacaggggaaggtcaagtctaactttttcatgcagaaaaatgtccatttgttataatttcttggtagcaatgaaagctatctttataattaatgtatttttaaaccatggcattcatggctccctaaatttttttaaagtatatgctatcctatcagattttctaaatgtactgtagttagtacttttaatattgatggtaattcatatttcactttaaatataggattatggtcctatgtgaatcatgcactaatatatttattttataagtagagagaatgatatttagaaactaaaggtttgttttgtttaagccatatttaagccactgactctgcctggtatgaataataggaaaagatctaactcatacggaaacttgttttttactgacgacatattttagtaacaagtgaagaaatatccaagaaatttttcttagactataaaggcatatttttttctttgtcaaggtcattaaaactgtaaacttgaaactgaaatgaaaatacaaagtaaatccagtaaaatgtaaacgtaacaaaccactgaagacagttgtaagacaatttataagtccactttgtcaaggtgtatgcagtttctgataacaaaagtttcatcatccctaaagaatgactttttaacaggtaaatatcagcaacacaccctttttattatatacatgtgggatcttttaaggatggatatgttggaaaatctgggctagcactttcacattccttgttgagtctggaagttaaggtttttaacttttagagcatattgtataaacacatttagaatttcaaagcatgattatgtgccatcaatatgccttacagcatttatgcaaaagaaaaccttacacttaagtaaggaaatgtttactaattct

SEQ ID NO: 41527 - DNA, 1047 bp, Homo sapiens
ggtataatggtaataccaacttacattcctactaacagtgtacatgagttccccttttctccaccccctcaccaacatttgttatcttttgactttttgataattagccatcctaatgagtatgagatggtatctcatagtggtttggatttgcatctccctaatgattagtgatgttgagcaccttttcatatacctattgatgatgtttacctgttctttggagaaatgtctattcaagtctgaaatttaaaacataataccatttgatttggcaccagaaaacccatgaaattcttaggtatgaatctaacaaaatatacacaaaacctgtatgagagaaactacaaaattctaataaaagaaataaagaactaaataaatagaaagctattccatgttcattgacaggagaaataaatattttcaagatgtcagttcttttcaacttaaactatagattcagtgcaatcccaatcgaactctcagcaagttattttgtggattttgacaaactgattctcaagtttatatggaaaggtagaaaacccagaatagccaacataatattaaaggagaacaaagtcagaggactgacactacccaactttaaaacttactataaagctacagtaatcaagacagtgttgtatttgtaaaagacaaataggtcaatgaaacagaatagagagcccagagatagacccacataagtatagttaactgatacttgacaatgcagcaaaggcaattcagtaaagaaaatatagtcttttcagttaatatatttttaatgcaaaatggttgggcattagattgagaccatatcataaagggtggtaaatattatgtcatgagtttatagccactgaaaatctatttggagcccattagaggaagttagggatcagaagaggacaggaaaagctaatctccagagtgcttcccctagcaagacactcttttttcaaaatagaacatgcaatatggagtttagggcagtgtccttactgcacttttcatctgctcacagttctgctaattata

SEQ ID NO: 41528 - DNA, 1068 bp, Homo sapiens
agaccaagaaattctgtagtttcaaaaagacttgtctagatatttagttagacattaagaccaaacatttgtggtctaattatgatgtctgtggtcaacatggtcataattattttaattacttaaaaaaaattatgaactagcacatgcttattatagaaaacttggagaacaattaatatgtaaagataaaaaatattcaagaaataaccactactaacatttcgttaggaccttaatatataagacatatgctacgcattttcagtggggacaaacattggttcttatgggggcaaaaatgcaaaattaaagtggtttgtgactccacggcttaaacccttcccaagaaaattttattcttaagatttaatctctcaggttttcttgggtatcacacaagcattactgacattgagttcatggaaaatacagaaaatatatacaaaattaatgccacagaacatgacaaatggctgtgaggggaggacttttgatcaattgcttgatcttaaacttactttagaagaggtggccagtgcctgccaattggctgccatgtggatacttcttatgcttgatcttaagtgcttttgtgtgtgacagctctacacaattccctagttaagagttacttctcaccaaccaaaggtttaaaaagttaaagttcaccaagaatgatttttaagacatttatttaatttttttcatttactttagctggaactgcagttttaatagttttgaatggtttttttaaaacttgatttaactttattattaatatagttctaaagttaaacattaatcacttttacattttaacttaaaaattcttttttttttttttttttttttgagacggagttttgctcttgttgcccaggctagagtgcaatggcacaatctcggctccctgtacccaggttcaagcgattctcctacctcagcctcccgattaggtgggattacaggcacctgccaccacgcctggctaatttttgtattttcagtagagacggggttttgccatgttgtccaggctggtctcgaactcctgacctcagg

SEQ ID NO: 41529 - DNA, 1082 bp, Homo sapiens
gagattgtataatttaaatttagagcaactggccaaattcttttagatcttgtttctgtcagggttatctctgtaattaagaaatccggagttcagaaggattgttaatgaattgtctgaagatatgtaataagtaggagcaggcccagatgaggactttgactttctgtctccaagtctaatggtctttcccctgtatagtatagaatctggtgctcattttctgattaaatctcttacagtgcctacacaattcccaaaaagtatatatatctcacagtatgattatgctagttgggtttattgtttgttatatgcagaaaaagtaaaaatgttttctcattgttttgatataaattattttaaaatgttcctggcattgtgttatataatagcctaagttgcatcaggagtataatttggtagctgtttcccacagggaagttttatcttatttacagatttcattccttgaaattattaatagtttcgtgttgcatcagtgacagtatgtaaatctctacgtgattattggtatttttgggtttcactttttaaagctagtctgaacgtgtgtctaacagctgtaagtttttcatacttacataactttattattgatatagatttttttattcctacttgatactgcctttttcttactgtcttatctgtcacaattgaaaatactgcttctgtgagagaaaaatactagcatatcttcctcaaattatcaaaatatgagaagtatttacctagaaaatttcaaatggccatattttgaatatctagaaatcagaaaaataagcaaatagcttcaatgcttatttttagattggggttttttaaatttcttaggggtttttgttgttgttagttttgctgctgcatatgcttctcagtaaaagcaaatagttttattgagctttctccaaaatgtagacaacaatgttaaatgtattatcaatgaaaaattatgaaccacaaacacatattatcccaacatataaaattacagattttttattttctcagtaaactcaggtatcttcacatttaaagctggtagaaatacatgatgc

SEQ ID NO: 41530 - DNA, 1050 bp, Homo sapiens
ggttcaggtggcagaggaactcacctggtttgaaaggtcccagcaaaatattcctgatatttttaaaatgtggtagaagtttttccttcatttcagtactattataggtgtatgtcctcacttgctctctttttctctcttttttaaaattccattggccatttcagtgaggctctaggaggaaaaacagttcttcctagaatgtgcatatatccttcatatctgaaaaactcacatttttaaaaaagtcactgtgctataattattgttgctaaaacttatatagactgaaaatgagcaaatctccaaattcattaggcagttacttcactataagcagaatagaattgagcattttcttaattcttataatataaaggtgctgattcactttttataattatgaaagcatttttccagttttaacactaccattgccctaaagcagcaattcaatagcaactttatttaaaaattatattaatatacttcatcgaactatttaaagaactacttttctgatcaaataactatgctttgtttgtaccacaaggaaatatactaatgagcataaaaagtaacatgcattatagatacatggaatattattatcttattttattaaaacagtaaattaacatcatagatgcctaaaccttttaattttttgctcttttacttctatcgtatacgttatacattaccatatgttatacttgttggattagcatcagcaagtaaactgaggaaaatgtaaaagcataatttatattctcattaatttttttaaagcaatggcagataactcttgaatatgttgagcctaaatttatcacaaactattaattaaattacattattatatttaaatgtcttgttggaaaatctgtggtcaagacattctattttttgacagtttctagtgctgtaaacagtgaaaatgtcagaattcctccaatagaatatttcacatatatttatatacattacaaatatattcacattacttacaaattaaaaaattatattttgaaatacaatttttatatg

SEQ ID NO: 41531 - DNA, 1043 bp, Homo sapiens
aggatccttactatctatctgtaggtacctatcttcactacagcagtatgtcattaatgattaaaaactgtcgtaaagttaagcctagaaagaggaaagaatagacttgattgtgctttctgtgggccaggatttgtgctaggctcctcatattttattttatttaataattttagtcgtcaaaaatagttactgccattttatagatgagaaaactaggttctaaaagtttaagtgatttcttcaaagtatttttgggtagtgtaggtatcaaagttaggatttgaatctgggtttgccagtcactgacaacaaagcccaaatttcctccactacacaattgcatagaagaaacagaacaaatatgaagtatgtcagaagtaaccaaccatgagcactgtgtaatgctagaaccagaaaagcagaattcccaacctttctgtgttattttccactactttgctctttctcactgggctttggctgacttacccttcccactgttccctttacttagaatattcttccctccattgtttgcttgaccaactctttcttatccttcatgtctcattgcattagtcattttttggagagtaggggactttgctgaaatttttagatccttctactaaaagtcacatagcactatgtttttcttccattgaatgtgtcataattgcaatgatacagttacttgagtgatcaattgttttagtcagattgtaaactccataaggcagggacagtgtctgtcttatatacaatgttttttttttgtttttttttagcaactagcacagtgcctgacacatagctagctagttgatgttcaatcaggaaggaatgaatagatggcttatatagcttgctggagatctgttttcaagtaagatattttaaaattttattttataaaataattttgtccttatgttttatagcctatattatgaaatattgggaaaaactttatacttatgtagtagctaataggtaatagaaaccattggctaaatgaatgcattttcagacaagcttta

SEQ ID NO: 41532 - DNA, 1039 bp, Homo sapiens
gcgcacttctttaggatatatgtttcttatgtctctcctttgagcatattttagagccctttagatagcatctagtttattttttaaagtactcaaatgaagctacttagaagaattgaatacactcaattttattatgacaaaagatgtgctgtgacaccacttctacctttctcagaccctagttctctcaacttcctgggatatatgggttatggcagtcaggttgtgaagatttttgttaaaagaacatttcaacaaagaccttgattctacaggtctctctcactattgcttctatagtcaccacagaaggaataacaaggctaatactgtttggataaatgtgtatatggaacagattaatctgaatttggcaaaagttcagaggctatgaagaacaagatttggggagaaaatctgttttgaaagctaaattaacctattttgtttattttgcaactataaatagtagtattaatttttttcctggacttttatggttttatttgctctggatattttatttactaaaaaggaatctttccagatggtctcataaattatcaatatgttccagaaatttcaacatatcagaaattaaaaatatatctcctaagtataaattagttcaaccattgtgaaagacagtgtggcaattccttaaagaccaagaggcagaaataccatttgacccagcaatcccatcactgggtatatagtcaaaagattataaatccttcttttataaagatacatacatgcatatgttcactgcagcattatttacaatagcaaagacatggaatcaacccaaatacccatcaatgatggactggataaagaaaatgttccacagtatgtgtgtatacatacacacacacacacacacacatacacacacacacacacacacacacacacacacacacacacacacacacacagtggaatactatgcagccataaaaaggaacgagatcatgtcctttccctgggcatggatgaagctggaagctgttattctcagcaaactaac

SEQ ID NO: 41533 - DNA, 1030 bp, Homo sapiens
aaattgtttgtgatatatcataggggacgtcagaaggaaataatcccctgtgtgctgcttgtaagctactttaggaacagtggcaataagtagaaataataaagatactttatgctgttctcattatcttcttggtgaaagttgatgtgtgaccctggagatacccagagggaagaaggtcaaagtataaagtatactttgtgtacctttttaagatgcttaaaatgtatcttaaaatgctgtgggtttgaattgaagtttacatttgcgttggcctttgagtatgatggttttattttcacaaggatagtagctatttaagaataaaataattattgtagttgaagggattaatgcaccaggctcagggggtaggggagtactgttttagcagtctggttacatttttgaggtatgaccagtaaacttttttggccgcctggatacagattatggaaagtaggaaatcaaggatgactccagagtttttttgggggggtttgtttgagcaactgaaagaatgtagtagcaatttattaaaattgaaaaaaaaaagattatttgagtgtatatgtcacaggagagttcaggagctcaagtttagacatggatatttggagatgcctatttgacgtggaagtggatatgttcattaggcagttagttatcataagggtcaggaattcaattgcagcgcccagcctcaagttaccaatgtatagatgacacttaaagctcagctggatgacagcagcaagctagtcagtgcagatggcaaaaatgagaccctagcgaatcctgagacactgtagcatatcaaggtcagtgaaagaattaacaaaggaccctgagaaagaaaagttagaatgagaggaggaaatcattgtgtgtggtatcatggaagataagtgaagaaagtgtaccaaggaggaaagagtgaccaactgtcatatgctactgatagattgggtagtgtgaagactgagaactggccattggatttggttatatggaggccacagaagagttt

SEQ ID NO: 41534 - DNA, 1024 bp, Homo sapiens
caacaacaaattgtgtaaaggatttgagagaaaatgtctaaaagtcacataaagaaaactaaacatgtatgtaattggagcatctgaagaagaaaaccaaaggaatagaactggacaaatgcaaaacattaaatcaagaacacagggacctgcatattgaaaagacaccacaatcctgaaaaaaatcaacccaggttagtgaaattcttgaactttaagaaaacaacaaaactcctaaatacctaggcaaaaggatcaattaatttataaatgttagaaaatcagattgacatgctgcttcttgactacagtgcctcaaacggataagcaatggtgtgacatatttaaatcaggaaaataaaacaaaccaaggattttataaacagtctgaccttttattacaaaatgtatagacagatatgaatatgaaggaaattaggattaatccctttataacctaaaagtgggagaactttttaaactatgattttgaatgcagaaaagataaatttgacagatgaacttttacaggatgaagacaaaaccttaactgaagtcaaaatacaaatagcaaactaagtagtaaagtttacaaatcatatcacagacagagggccaatatccttactctataaagagcttcagaatttgagaagaaaaaggccaacctccaaagcaaaatagaagctatgaacagctagttcacaaaaaagaaatgcaaatgacctttaaacatttgaaaagatgtccaatcttgctcataatagaaatgcaaattaaagctacacttagatgccatttctatcacagtggcaaaaatccaaaatgttgacaacatactttgttggcagtagtgactgaaaacaagtatattcattccttgctagtgaatgaaaatttggcattatttgccaaattacatctgcatttactttttggctcagaaatcctactttgaaaaatttattctcaggatagttgtcaaatatagtaaatggtatttgcgcaaattatttattgtgcc

SEQ ID NO: 41535 - DNA, 1028 bp, Homo sapiens
aaaaacagattgaaagtatttctttttaatatggtttcaatttaatttaaaaacaatgcaacaaagccattcttatgtacacacatagccattaaagatgttcctagcacaaagattctcaaatgttcctagttcattccacccttaatatctggtaattttttcatggtgactctaggaaaataggaatacctcattcgtttattaagtagttaggcccaaatttagtagtagcagtttgtgtagtgtctgactgatatttctgtgttcccctaaaaatttaaaaacactataacactcctgtgggttcacggtatcatgattgggaaccacggtcctagcagcattaagagtgtgtgtgtattgtaggggagaaaaaatagttttactctacttattttaggttcagtgctcgagacccctgtatcaaacgaaagactaacaagcaaaaagcatacacatttatttaatatcagttttccgtgacaagggaaccttcagaaggaaatgaaaactcaataaacagttttaaacttgagtgtttttccatagtaggtttgatgaagagtggaaagtcatggagaaatatgataggacaaaggggatatgagctacatgtaatgagctgggagaaacttgtcaaggcttatttgttcagattactctctgtgactctgtgtccttggagataaggatattcctttcctccaggaatagggaagcacctctcacataaggatcttatgcactgcttcaagggaaggtcagaacatgcttcctaggttttatgatctgcttcaggggagaagggaggcggaacttcacagagaccttcctgcttatgctattttctcaaattccttcagcttaaaatattcaatatgccaaggtgccatattttggggtagtgtgtcctgatgtgtgtgtctctctctcctgaactctcttatctatccatccagccatccttccacatccacacacacacacacatataaatcagtctcctgcatttttatttgctaagt

SEQ ID NO: 41536 - DNA, 1033 bp, Homo sapiens
taacatttttgggagagcaaaaagaagcaccctacacttactcaattcagtgtaagctgtggatttattacgtttgatggaaagagatttagaatgagaattgggtctgtcccttattagctgtgaggttgtcattaccttctgtaaattatatttagcttaatttcctgattttcaaagtcaggatgacacctatctcacagggtagttttcgattacaatgtattacctaccaattttaaattgcaggtactctgagcttcactagttaagtgaaagtcgtgcctacaaaacatgtctgagttcttaaatcatctttaagttcccttctaactgtgccattatatgattctctcatgcaggtgcttctcctttctttccttctctgatgggtacccttttcctaacacttaagtctcatccaagtacatattgataatctctcttctatttctactcaaatactgctgtgtgcactagatattttaccatttctcaaagggccctgtgctctataccagtacacctcagacgatctgtggagaagaacatgttggcttttgcctctgacacagcatcgaacaatacttgtatgaaatacaacaaaatttaatttctagaaaagaaaaactaaaacaagaagacattcaaattatgtccttaaattgtatattgttagatatagcagacatgaaataattctatcaaattgttgtaaacattttaaagtgcttatgctaaatttatgtaattatctcatactcgcagttcacaaactggcactgttttatgggccataatttaaataatgctgctctagggactagaccagctgtcctcaaaccagtagcattagcatcacctgggaacttgctggaaatgcaaatttgtaggccctgtcccagaacttttgagttagaaactcagggcctaattcccatcccagctgcctgtgtttaacaaatcttccaggtgtttctgttgcaggctaatgattgagaaacatggctctttctctgctatttgctaactc

SEQ ID NO: 41537 - DNA, 1069 bp, Homo sapiens
aaaaaaaagacactatgaagtgttggtgaggatgtagagaaactggaactcttataagtttctgctgggaacataatatagtacaatcactttgaaacaaaggtttgagattttcttacatagtgaaacataaacctaccatatgactcacaaatttcactctttggtttttacttaagataaatgttaacatatgttcacaccaaatacacagaaattcacagtaactttatttgtaatagttccaactgggaacaacctatatgtctctcaatgggtgaatggataaataatggaatgccaaatagtaataaaaagaaaaactactcttatgaagaacatcatagatgaatcttaaaaatactatgttacatgaaagagtacatgcacagagtatatgcaaagaatagtacaaaaacatacatactctatggtttaatttagataagtttctagaacaaattaaactgtatgctagaaactagaactgtgattacctagagctgaaaataggagtggggtcacgagaaagaggcacaagaaaacttcttgggttggtagaaacattctataccttaacaagggtaaatccatttatcaaaactcattaatctgtgcacttataatcccagtatgtaaattaaacctcaatgtacttcccccaaaaaaggaacagaaatacaatgtaagaaaaaaaggtaaagtcaaaggaacattttgaatatttttttctgtatgtgttgattaggttttagtaatggcaaacgcacacttttgaaatcgtgacttctgtaacttgtttgttgatattgatatgtaaaatcaaatagcatttttgacacctaaaagagtaattacaactttaatacagattttaaggttgtgctatgatttatatggatgttagattttttatctcctaccttctacttttgttttttatgtcttctcattctgcaggaattatatgaaataagaatgctgaggaaaactaaatgacaatttttttcttcccatttaatgccctcatctcttcctgtgatgttaagtacaaagtatttgatcatat

SEQ ID NO: 41538 - DNA, 1051 bp, Homo sapiens
ggaataaaaaagactgctatgaacaattatacaccaacaattggataatctaaactaaatggataaatgcctaaaaacatccagcctaccaagaataactcgtaagtaaatagaaaatctgaatagaacaataatgaataggagattgattcataaatcaaaaccttccaataaaacaacaactacaacaacccggggttagatgtcttcactgatgaattttaccaaacattacaaaaataattagcactaatccttcttcatctctttcaacatatacaaaaagaaagaatactttcaaacttattttatgaggccagcgttaccctactaccaagtcagacaatgacactacaagaaaagagaactacaagccaatatcccaatgaaaatacatttaaacatactcaacaaaatattaatactaacagccctaattctgaattgcacagcaaattaaaaatatcacacaccatgataaagtgggatttatctctgggatgaaaggatggctgaacatatgcaagtcaattaatgtatacaccacattaacagaatgagaaggaaaaaaaatcacataatctcaatagatgcagaaaaagcatttgataaaatttgacgccatttcacaatagaaaacaaaaaccctcaacaaactaaacatagaaggaactcaattcaacgtaggaggggccacctatgaaaagcccacagctaacattataggctaagattataaacaagagaagggtacctactctgtcaatttctatccaaaatagtattgcagtcttagccagggtaattaggcaagaaaaaaaagaaagacatccaaattgaaaggaagaagtaaacttatctgtttgtagattacatgattaaatatgtagaaaaccctaaagactccaccaaaaaactgttagaactaataaattcagcaaaggtacagaataaactatcaatatataaaaattgattatgtttttctacactaacaatgaactatctgtaaatgaaataatctcatttaaaataatctcgagaagaataa

SEQ ID NO: 41539 - DNA, 1031 bp, Homo sapiens
aaagttatattttaatagaaacaatacatttaatataaatcttttaaattgttaattgtcttacaaaatgttatattactttccactgaaaatattaaacattatttattatatccatctgaaattttgagcaatatacaaatgattgaaattccttactctgttttgattttatttttattttaaatacttatttttaagtgagattcagttctagaactgtttttgacttgatgtgactatgcttggcttaccagatgccatttttcatatttccaatatgaaattacttatcatcaaaaaatttttattaaaagggacatatagtttgcagaaaggaaatgtaagactttaacattaaaccaatgttaattatcaaactaactgggacacatatatttaaatttacaagtaaataacaaacagtgaccattttagttagcccagatgaaaagtttaattgttttagggaaatcagtaacttgagaatgaacagaaatactatatattttcaaatactttgagctcttcaagagaccacaaatgaatgcattatcactttaattgtgagaagatatggctttaatttggtaaaatactttataagttgggaaatgctggaatctaagctgaaagactgtggatgaactttcaaagtaaatgccatattcgataaggcactacaagatgaatttttcagtcattagtgcagttgaacagtgactgagagaaaaacagtgaattaagaagagatctataggtttaaaatggggtattaaagttccttactattgctttacatatttaggtgctgcagtacaataattgtacatatacatgtgtgtatgtttattcccaacattttacatatgtgtgtttatatataattgcacatatatatgtgcaattatataagatatatataattgcacatatatataccattattacaacttacaatgaattgaaccttttatcatcatatagtgattgtctttgcctcttgtaacagattttcagtgcaaatctgt

SEQ ID NO: 41540 - DNA, 1088 bp, Homo sapiens
ggctagtgttttgttctgtaatattatctcaaaccttgtacattttctgttgtgttcactattccaggatatcttctgtgacccctccatatatgttgattgttattcaagacaaccaaactcttgttttggtacttgctgcacagtagttaaataatcccttttgaaacagcttcccagaaaaaggacatgacattatttacctccttaacctcgatgcttggaacagtggatgctaagtaaatatgtggtgaactaaaattagcatatataaccaaagacagactcactgagttttggccatataattggatcagcttctgtagtgtatatattgtgtattttcagtactataatatggagagttggtcctttccaaagtgtgattggtgtgccagaatttaaaagtattcccttgattagaaaatgtgtttagtttctgtaaccaaaacataggaacccacttctcagcatgactataggtttttcaaatgtgaataagtcattatcctgtatctagaatattgaatttctttatcttcccctcctggggcaacagttgatgtaattattcacgatggaaaaatgcatcctcctcagcagatttgcagaaactcttactttggtcacacctgtctgggaagagtggtatcctgctgaatcagtcaatttcactgttattctcagctttgagtggcttaattgtcaaggtattctagggcacctttacagcagggttgacaactttttgtctgattttcaaggacaggttgaaaagaaacagtgagcctctgtttgtctcaatatcattgttttgcacagggatatgcagctttaatttcacatatttggaaaatctaggtgacattttagaaatacgggattataattaccagtgagtttctctcttgtcttaggcagacaataaatacactgaaaactttgtgacattttatagccagtgaaaggctatttcttcttatgtcattgatgaaccagggtaacttaactgtatttttttaaatgaagcacagattatatgaaaattaaaattaatttacattgttttgtatagttatagtctataa

SEQ ID NO: 41541 - DNA, 1043 bp, Homo sapiens
ccagttcttagccaaatgtccctgattcctttaaatgtttaagtcactgtctacttcaggagtatacattgcatcaggctgttatgtccctcagccctctttaatctagagtaatcttttctatgataccaatttgctgaataaatattaacagttgtcctgtacaatgtgccacattcgagaatcaatagattactttctgatgatcttcctatatgcctgttatgtcctggatgttagagataaagtgttcattcaattgaagatcaacagttttggcaagaatttatcagagctaatgtttaaaattttgtatggcatcgtatcaggagacatataacgtttgggtcctgcgattaggtacttactggttaggatagcaacagactaatcttttttatgtaaagttgcacttttcctcttgtaatcagaaaataatctgtgtggtgtcatgatgccactttggcactataggaatgtcccattctctttcattcttttatcactgttagcatatttattagcttgacattcttctgtaaactagaacatttgctcattagttgcagctatttatttactgtgaaatgtaattcttatagcaaatttacattgattataattcattatattaattcaactaatctgttatattttatttctatttattgatttctatgactttgttgcctcttttatgttgatttttattttttaatcttaactcccgccatatatttttttaatgtatatattctgttatttcagtaattggttagcctttaattttaccaactgtctttaactcaagaaagtctaaagttattacaaccctctccccaaaagttcaagtacctcagaccactttaacagcatcaccttgtctctcaatttacctgctatgatcatctgatgtttttatctgccttctgctgttgtaaaatcctacagataagtaaccattgtcattattattttatgcagcaatggtatgtttagattacagactttcatatttctttactcaacatttctatttggat

SEQ ID NO: 41542 - DNA, 1028 bp, Homo sapiens
atattctgatagatacagtactttcacagagtcttgtgtctgagagtatggaaaggccaatgaggagacagtgagctatcaaacatctgtcataaatatatatctaagtaacttttaagttgcctgatacttgaatacatcaagggaaagatagcattttagggtcaattaaacaaaagtatgtgtactgtaatagtttgacacaaagaagaatggatagagaaagaaaaacagtcaaagtggtaagctttatcaaaatagagtttttgaccttgtacggataaagaaagagagtttagaaatatgaattggcttacccatgcaagttaaaaaaataaataaattaggcagagagagtggaagaggaaaaatgaatacagacatctgtaacttttgtacatgaaaagcagcatgtacaatgaaaaaaatagaaggaaataaaagcagaattgattccccaaattttctttacaagaagagcaataaaattttaaggatattttactaaacatactctaaacttaatttccaattcttgaagtcatatgtttaaagtttaaggaatcttcctatattagtaatgcttctccagagagaaacaaccaatagcagataatagatacatgaatggatacacatacatacagacagacagacagatagacagacagaaagacagaagatagatagagagattaatagatagatagagatttattaaggaagttggctcacatgatatatggaggctgagaagtcccatgacaggctggagaaccaggaaaggtgttagcatggctcagtccaagtctaaatgcctcagaacaagggaaactgatggtttagccttcagtctcagactgaaggcttgagaaactggggagccaccagtaaacgcagagtccaaaggccaaagaatctggattctgatgtccaagggcaaatgaagaaggatgtcccagctagaggacagagagaaatagaaagagggagagagaaatttgtcatttctttgcctttttgttcta

SEQ ID NO: 41543 - DNA, 1047 bp, Homo sapiens
tatttttaaaaaaatttatgtgaagatgcttggaggctatgtaagtatcctgttgatcatcaagcactccccagcgcgcgcgcgcacacacacacacacacacacacacacacacacacacacacaagtaggtttagcatacattgattactcttgcatgaatcagttttttatttaattgttgcaaaatggtgattttctaattcaatgtttcattctctgtttattagttgacattctactgaaggaaaatctttcacttacttccctttccttgtgtactgaaaaatttgttttctttaaaatgaagctaaaagttatgagcatggacctatgggtttgtatttttttgaatgggttattagctattatccttagttatttgggtcctcaaattgccctgggctaggccagtggaattgtcctcaagatggctcttatgttgttttgatctagcttgatttttttttagacacttttgaatttgccaacacaagacatcccaggatcatagtgaatctcccctgctccagccttggagtcagccatttatccaagaaactttggtttctctcagtagggaatgatagttagatcctgtggcacatatctttttatgcaaaaatgttattattgctcgtgactctttgagaattggtttgaacttcaaaagaggttaaaacgttttcacttaagtatatacaattttctaattatagaaaggatatgcatttattttacagaaaatatagacaagtataggtaagaagaataagaggtgccttgaacccactactcatgttgaccaccattggacgtaaatgtattttacatagccaagatcacatcatgtatatagaatattgcattttgctgtatctacatagcatgtcattgttttctcaaagtcatagaaattaacatttttaagtcacacattgtatattaaaatttctcttttctttcttgtttttgtttccattgatgcaatatcctaaagtagaaaaagtttgtctgctggtgttgagcttctttttctgctctctt

SEQ ID NO: 41544 - DNA, 1063 bp, Homo sapiens
tctactaaaaataccaaattagctgggcatagtggtgggtgcctgtaatcccagctactcagggggctgaggcaggagaatctcttgaatccaggaagtggaggttgcagtgagccgagatcacaccattgcgatcttcaaaaggaacattatatttaatattttatcaaaaattatgagttcctatttacatacacctttaacaatgttagctacctaatttcatcagttctctagatctctgtcaattaggtaagggatgagtattttcattttaaaactttaatagtggagttgaatatttcctaatatattattgacttctagtatttcgttaattatgatatatttttatcagagtgatcttcagcgagttttggttcttgccaaagtcacatgactgtagtagtcacttatatggacccttttcagactgagtgacctctaggcagcactgttggcccttttgtcattcttgaactcttttattttcttcccttacacgagaccacttagacctccttctacctctctgcatgccacttcttacattactcctggcttccatcgttaaccacctccccatataaaattatctgtataatttgtgttgagtttcttaaagtttcctttaccatgatcagcagatttatctctgtagcccagatttctttttttttttttttttggcagttgcaagatttaatggagtgaaaacagagctcccatacaaagggaggggacccaaagagggtagccattgctggcttgaatgcctgggtttatatcccagtcattatccttcccactgtgctctcaggcaatagatgattggctatttctttgcctcctgtttttgcctaattagcattttagtgagctctctttactacctgattggtcgggtgtgagctaagttgcaaaccccatgtttaaaggtggatgtggtcaccttcccagctaggcttagggattcttagtcaccctaggaaatccagctagtcctgtctcttagtaccccctctcaacaggaaaacctaagtgctgttggcgaggttggcca

SEQ ID NO: 41545 - DNA, 1974 bp, Homo sapiens
tgccccaaaaccttgattgactgggcagctagcggggagatgggagccctccatctgcctgttactttctgaccccatttccatgtaatgtaggtggtgctttatgtcaaagaagaaatgaagaggaatgatcttccagaaacagcagtgattggtcttctgtggacatgtataatgaacgctgttgagtggaacaagaaggaagaacttgttgcagagcaggctctgaagcacctgaaggtaacagcccttagcaaggaactgacccagccaagggcaaactgcagctttttttgtttgtttgtttgtttgtttgagagtgcagtggcacgatctgcgctcactgcaactttgaactcctgggctcaagccaccctccctcctcagcctcccaggtagctaggactacaggcgcgtgccaccacgtctggctaatttcttcattttttggtagagatgtagtctcgctgtgttgcccaggctggtcttgaactcctgcattcaagctatcctcctgccttggcctcccaaagtgttggattgcaggcatgagccaccacgccgggcccaaatttgtcttaattgagagtatgacaaatgggttccaactacaattaccctagactcagactaaacatatacttcctaatttttttccaagtttgcacccagcgttcatgagaacatagcagtgagtaaactgtccatgttactttgatcagggaaggccctttggaagagataagtattgaattgagtaagtctcagaaaaacaatggctatgcctcagtgtcagaaagtcaaggatatttctaaatgaatgctttttatcccagcagctcatcaagattccttccctgtacccactaagagaccaaatatgagaatctgcctatattaaagataattgctggcctgctatgtctaagggatatttcgaaaatgaggtcatatcctcatagaatatccattgtattattggactgtggctctgccattgaaaaaatgtgaatcttcttcccagttccctcacaggtcgactatactgctttgttcctactgttctgttcccctcaccccattgggcacaatatgatgataaaaggtgtcaatcctgaaagtcagtcttttctaagcaaccctccaggttactgttatagttccagcagtgtcggctctgtacctcccacgcaagtgacggcttttactctccacttctgttctagcaatatgctcccctgctggccgtgttcagctcccaaggccagtcagagctgatcctcctccagaaggttcaggaatactgctacgacaacatccatttcatgaaagcctttcagaagattgtggttctcttttataaaggtatccatccacgtgccactgctgtgcttctgtgttttgctgaagctctttgagaggcagagcaggcaatgaggcagaggaggtcatggggctctgtttagagagggacagcaagatgctaatttgtgaaagttttattgaggcaaccataccatgtagagagaggaggcatacacgccatatatgcgttgccttggaaaccctgcttaggcccctgggcacttctcattggtagatgaactggtaattgtttcttggggttggtggaaaaaaaatgtaattatataaaattgagcctgtttttgaattgtaaggattagctctaataacaatgattatcaaaatagtatatatattatgttcagactcttttaggtaccataaatctgactttaaaattactgaagtaattagcctttttactttgtattttagttacttggcccagccattctcctgttttccaagggaatggctatttttaggttttcacatttactgtcttttcattgtatttataaggattaggttgctatgacaactggcactaaaatatgaatgctaaaggttttaaccgatcccaatctgtatacctacagcatacagaaa

SEQ ID NO: 41546 - DNA, 1024 bp, Homo sapiens
agaaaaaagtggtgatgggtcattttgcaaagactctctgtattaaaatctagatttgcatatttttaaggtagtaagaaacagtaaatccattgctaactttcaagcatcacattattgacttttaaaaataattttctcttcttttttccctgaagataagtcccatagactcagcatggtctaaaatgtgtaaaactaccttgtcaagtactgttattatctctatcatgggttttcttgtttgcagaaattttttaggttaaattctatcctgcatgcaaatttttctaaaaggagttttttattctagttctaaaaaagggtgagtgcccttctcagcatatattcccagcattcttagggtaaattatttttgacttgtgtccctatgtgacattcctaataaaaaaatttctgaatttcaagagtttcaagtgacatagtttcagactaagtttctaaataactaacatgatctaaaatttagcagttctcaagccacttttacagtattgtctcttcgatcctcatgaatacattagaactctacaaattgagaaatatttattttttctcatcaagttaacaaatttattccttaaacgtgtgttgaatcgatactatagggcaggtctttcattaaatgctggaaatgagatgaacaaaatatagtccctgacttcctgaatttcaggatgtagaagaaaacaaagaattacactcaccatgtcaattgctgaaataagcctcacacagagggtgtcagaagggataggaccacagagggagggcacctaacttgttaaaggtaatttggagggggagaagtgaaggctctcaaggtacatgtatctcaccagacattatgaagaagttggccagatagaaggggaaaacatatattccagtctctatgtgccatcatacaatgtcttcctttcttactgtcttttactgttattctatattcctaataggcatttatgaaatatcccaccaaaaatggtttctcagttttaat

SEQ ID NO: 41547 - DNA, 1063 bp, Homo sapiens
aactgacctcaagtgatccacccgcttcggcctcccaaagtgttgggattacaggcgtgagccaccgcgcccagcccccttttatctttttagtcagtttaaaatattttgttttagtctccttcagttagttctgtcatctcaagttcttgggagcttttatccttcttttgttatatttgtcatatctctctcatggtaaatttttttcttagtcattttgtgattttttgattggcagcaatgtttttatttttttctttgggaatcctgtaagggctgggatttggaagggtccctcctgagcaaattttggatatgcgtttatgagcttttctcccccaaatgccgtcacctcttgtaatcagcttttatttgaattgtttgtcttgaggattcctgcatgcctgaggcagtgtactcttagactgcaagcatgggcatgataggctcttgtttgataggctcgtgtttctctttcttgaaaactttttgaagagactgaaaagtctttgctctctttctggataggttgttgtggtttttctctaacccctgacactgaaaatacagctttttggagatcccagttatgcaagggtctcagttccacttcctagctctgctatgaaacctaaatcctttcccgttagggactgttctgatccaggaactccttccccacctgctcatgggaccccacagcaccagctgtatgcttacagttctagctttcgattctcctttcatttctgacctgtaggaatttcccatagtttttctgtgctcacttacgtatttaaataaaatgttacagtcttttcagtgttttaaaatatttgtagctgaaaggattctgtggtagctcagttgcccatgttccaagaaccctctgtggtgggctaaataaccacacactccaaaaagtcgttcatatcctaatccttgaaacctacaaacacgttactttacataactaaaaggactttgaagatgtgattaaatgaagaatcttgagatggggagattattctggattatctgggtgagctttatggaatca

SEQ ID NO: 41548 - DNA, 1050 bp, Homo sapiens
ttatgttaagggaaatccaaattcccaattttttttggtctttttaggaaagattgttgtggtaaaaagtgttagtataaaaatgataatttacttgtagtcttttatgattacaccaatgtattctagaaatagttatgtcttaggaaattgtggtttaatttttgacttttacaggtaagtgcaaaggagaagtggtttcatgaaatgttctaatgtataataacatttaccttcagcctccatcagaatggaacgagttttgagtaatcaggaagtatatctatatgatcttgatattgttttataataatttgaagtctaaaagactgcatttttaaacaagttagtattaatgcgttggcccacgtagcaaaaagatatttgattatcttaaaaattgttaaataccgttttcatgaaatttctcagtattgtaacagcaacttgtcaaacctaagcatatttgaatatgatctcccataatttgaaattgaaatcgtattgtgtggctctgtatattctgttaaaaaattaaaggacagaaacctttctttgtgtatgcatgtttgaattaaaagaaagtaatggaagaattgatcgatgaattaagtgaggtggaattcttttctttctgctttagcttctctctgttggacttagagctgggtattgctattttagtgtataatcaagctgtggaaataaatttccagcattaatgtctattggtagtcatcctcaaatcctttcttgaaatgtttcagtggctaatattatctccatggtgagaaaaagtttttctaaaaagagaagccattaatatttatttgggaaaaatatatacgttctttcccattacgaaaaattattaatttcttgttttacattctaggtagcatgtggtattttattgtcttactaggtttttagaccgagagagggtaaatggttgatctgtagagttttagagcattttgtaggtttgtcacttccgtgactttgcaacactagctaattttccaaggaaacagaattgtgccattttca

SEQ ID NO: 41549 - DNA, 1070 bp, Homo sapiens
gttgcgcaaaaaacaaattttaaaagaagaaaagaatgcttatctttctttactcagtaaggaggttcatgaatatacatattgcatataattgctttttaagaagtactacttgtaaactcaagtaatctatatgtgtgtatgaaatcaatgggtttaaaaagtacgcttccctgaggcttggcctactcttattaactctaatctaaaagtctgaaagatcctaccaagaaaactttgtatacttatgtattgtaagattataccaatgaacaataatttcttcatcccctataatatacctgattttctattttatcatgttgttttccatgatggtaaaatacattctcctttcattcaggattcatgggtactgcatcttgtgtaaagcctgatggttctactagaaggttgagctgtttctctactgatttcacattattttattaggttatttagtaaggagttatttcccaccagtgatatatcgtaccactagactgtgaatttcttttatccagtctatctttggatccacaatatcaaagttagtatctggcagagtgaaaattaatcattgaataattgggaaagattaaatgctagaaaataatttaggttttattttgatctcagaaattgagagcttgatctgaatagaaatgttgctattttaggaaaacaaatgggaaggaggacaaggaagaggtgaaggatctagtgcagtaattctaaactagtattgacaatattagcaaataaaaatacaggtcacccagtttactttaaaatatcacataaataaccaatacattttagtgtgtttcaaatattaaacaggatatgcttatattttgaaaatgttgtttatcccttatttaaatttaactggatgtcctgtactttatgtggcaacgctggactttatctaattaatcccttttgaatgtacaacttttttgactgttatctctttgaaatgcaaatgaaaactctgaaagcctgcattaaaatgctttgcacatagaattgtgcatactatttcaggtagttgatgttggtaactt

SEQ ID NO: 41550 - DNA, 1051 bp, Homo sapiens
caccaaataaagtatttgttgaatttgatttacccatggcattatccatcttaaatggtgatttaactgttatcttttttcctaattcacattttaaaacatgaaactctaattacaatattcatgataactttcatagctaaaactatataaacctaggttcttttaaaattttaatttatggaacccctgcagatttaaacatgaataaatacaaagaatagtagcgcattcttattgaatgaatatacaaatcctggctctcatatttaatattgtgacctctttggttcaggaatttaatctctcttttcctcagatatcccaatttacagtataagatttattagattatatgaataaattaatatgatagaactttatataggatacttttatctctgcttttgtttgctttgacaactattttgaagaacacagtgacaaatatctgagattcaaacaatctaaactcattgtatcatatattatgtattttgctgctttcctgtctcttttaaatttactgatttaatggatttctctttgatcattacctagtcttgcatggttctagaatccttgcttatttggccatgaacaggtcattagtcatcattttttttctttttagggagactaccgtgggctaacattaaaatcaccaactttcagcaattttccttttttagaaaattttcaaatacagacatttaaaaatctgtagttaagtcttaagatatttcgtgagggtttgtgatctggttaatggaaatgtacaccttcatgttatagtgttttataaaacatattcatatataatattaattatattaaaatctgaagaaatttttatttggtaatatttgtatattatttttaaatcttgctcttacagccttttgacttttcaatcaatgaattttaatgagtaactcaaattcgtttatttgcttatggctggagatttagattttagagtcattttatcgtcagaataacattttaagccattaaagtgaataaaatattccagggggagaacatgtag

SEQ ID NO: 41551 - DNA, 1031 bp, Homo sapiens
ttcagcaggtaagtatatattatttatatcatttatattattatatcatttactttttatatatatttaggacacagttggccatttgtatgtataaagtatcaatatatgctgtagaatacagtatgtatttgtagctaataattttttctaatattaataatttactgcactataattcctttaaacctttatgtgattcatggttactgtgtttcttctttcgcttatcaagaatcttatatataagaaactttcaggcacgtagggtctaggggagaagatacaaaattatttgctatcaaataacttatggatagcagaggatatatgacaactatgaaatgaatgagatgctgttaaaaagtacaagtaaaatcctatgatttatacctttaattctgatttatttggattatggaagttaccctaaatcaaatggtatgtaagctgacctaaataatgtgtaacaggtgggtggtcaagaaaacataggaatattgaagtactgtaagcattagactggaagtcattgaaggaaacagacgtgtctgacttgtttgatgttattgaatgaacagtgaatagatggaattataaatatttgatatattggaagggcaagaacatcttttatggtttgagaacagattgtaacatttgaatgcttgctattctcatatatctggttctcaaattgtactgtgcacaagaatcacctgaagaccttgataaaacttggtcatccctgtgagccccattgtcagatattctgaatcagtagttcacagtggggcccatgaatttgcatttctattaagctcacaaggctgctggtcttaataacagttatatagactagagcttcaactatattatatacccagtggaaaccactgaagggttttgttacagggggtgtgtatatttcaacttgtgtttcagatgcaacttttggaaattgtgtaatggttggcatcaagatgatttaatactagaagattaggttcctaggaagatttaagtgtaga

SEQ ID NO: 41552 - DNA, 1050 bp, Homo sapiens
cgatagcatgctgtacaggtttgtagcctaggaacaaaaggctatactgtatagcttagatgcgtagtaagctataccatctaggtttgtgaacctaccctctgatgttcacaggataatgaaattgcctaaggacacatttcacagaacatgccccttttgttaaatgacatgtgagtgtatgtctgaggtggaatatctgtgtgcaggagggccttttcctccttgtgctgctattattttgatgtcagaaccatcccttggactggttgatattgttttaagcaattaaatatatcatgttcatgtttaagtgcctttgttttccctgtcttctaaatttcttccatatctttactcagtagggctctgcattctttatatgttttcatgatgattcattttagtgtcttaataaaattatattttgcctctatagaaaagattatgaactatgcagtatgctatgagctgtgatatagttcatgtatgcttgaaaatgaatgtttactttaggactttatcaccattcaggatatattgattgcctggtgtgcaaggagctgtgtgaggtgaaaatgatagggtaatggcaagcttggaaaatgatataggttttcatgttatgaccattaggaacaaggagtggttcacttatccctttagaatatttttcatattactctttgagatagatttaatgggcgtcccatggagagaggagtgaaggaaactaacagttctcagcttcaggaatatttatggaattatcaagaaccctagaggcagccataatggagccttttaaaaaggcactattttatattgttaattttaatgaacttttttgttgttgttgcttttttaaggcaatgaatttccaagggaagttaaagtatcttcatggacagaaaaagaaagggaaagatggatcaatacttccacctcagttggctttgtttgcgatagctactccacttcagccaccatccatacttgaaatccggaccaaaaattttatctttagaaccaaacacaaactagacttca

SEQ ID NO: 41553 - DNA, 1028 bp, Homo sapiens
cgtttgcttgtctttctgttttagtccttttttcccctaataaaccatttaaacttggattatctatatcattattatcatttttagagacaaggtcttgctctgtcacacaggctataatgcagcagtgtgatcatagctcactgcagccttgaactcctgggctcagctgatcctcctgcctcagcttcccaaggagctgggactacaggcatataccaccacacctggctaattttttattagattttttcttttttagagatggaatcttgctttgttgaccaggctggtcttgaacttctggcctcaagtgatcctctggagtaactgagattataggagtggaccactgcacccagcctatattatcattgttaataccaccatcatcattttcatttctggtgtttatgctttgccagcccatatttgatgttgtgtactaacgtctactgatagtctaaacacatttcaaatttattataatctgaaaaatgtctgaatattctttttctccaattgttttctttgcttatcttgcccttttaccctttctggtccagaagaatgaactagcaccatatgcatttaaacattacaactcagtccttacataagatgtaatcccatcatgacaagtttcactgctgttgccaaatccgtgaaatcgatactacaggactgtcatttagaaagacaggaattgcttcctgcaaatggctgagatctttatgcaatttgtagttctgctggagcaagacttctaagttattgtacatatattgaacctcagtattgggtatattcaattctcctttaattcttataacagtattgaatctagtagtatgtaatggttatagaggctatctatgcaaataagttgaaatcagctctgctgactagcagaaatactttagaattttccactcattttctgtttactgctagagatttaattgttgtcttatgtggcagaatttgaatgcacagacttcagcatggaagcttgccttttgttcatt

SEQ ID NO: 41554 - DNA, 1050 bp, Homo sapiens
ttgattatataaggctcttgctgcttatgatagatggttgctcctcacatatcattgcataattaaccttttctcccaggctcttaatgtccaagaaaatgttctcttcataccagtaatgtagttccactggaaagtgttctgggtgagctggggatttttcctttggagctggaatttgccctagtaattctgccttctttggaattctgtgagttctgtgagagggcagataatcatagtggtgtatgaccaagcactcaccttttatctttaactctcagaagaaattgtttttcagaaagaaatgtcaaaatgacattattcatgagaaaaactagtcatgagttttggactctctaggaatgtaaacatgtttaataaaagctggtgacagtttttcggtctgctgttactggaaagcctgcttgatttccttccctgtgtttttctggtcttgagatctccagtgctttctgaagatccaggaatgccgtacaaatgggaaaagccagactgttatcttgaacctctgtttttgaaatctctgtctgataaggaaaaaaatattgcaagtcattgtagttacttgtttggtttgtcactggaattccaaatatttgcttggtggttcatggacatgtaaattttgggatatgttactattgtttagggtatactgtctgtaaaataagttattaacccagtgactgttaactagatcttccaaaagccctgtctcctatcattttatgtgtattgaaaaattattataattagagatttttttaaactcttagaaaatgaaagtatacagctatgaaaattctgtttgggtaattttttaaaaaatttattttcagttcagaggtacatgtgcagatttgttatacaggtaaactgtgtgtcacagggctttggtgtacagattatttcatcatgtttggataatttttatgttattttttaatgcatttttatccttttgtctgtattattgtgcttccttttttattaaagaagagttggatgtatcttactttggcttta

SEQ ID NO: 41555 - DNA, 1048 bp, Homo sapiens
ttggcaccaaaagggggcactgctctcttgtgacataaaatgtagtccccgaatagtggggcttttgaaggttagtgactccaaaggaaatagtagatgaaaggaaaacgtatttacttcatctcatgggggtctttcttgccttggtcttcctgaagaaaagataagcattgggctgaaaatgtttgttatatacccttgggcaccattggcatattccaagctgtttttgtcaatcatataaatacatatttagacaatttctgaaacatttctcataaagaaagaagtcattcatctggtatatcatattcatatgcatgatggctttctagagttgtgtcatttcttcactatggcttctctcgtctcgcacctcttcagaaggcacccttcctttcttttttcagtaaataccacaattttatttttaggtgtatgcagcatgaaatgtatgtgtgtatgtgtgtgcctgcgtgtctgtgtgtgtgtgtgtgtgtgtgtgagagagagagagagagagacagagagagtttgagagatagaacagagagattgattaattggttgattgattagttggttagttggagcttttcccagaaagttttccaactgttcttattggcatatttgaaagtttaacaaaatctcattaaagttcatggatttcactgaaatctcttatttttattagataatcagtaatattataagtatacataatctgccatcccaatattttcaaattttagttctttttctatcgtattggtaagaatgttacagtttcttcctaatgttggtgataggcatctgtacatctggttttgttggaaacaactctgctaaatgtttaataaggtgctcattgtaagttaaagatagggaatctttattatattatagaactaccctggcctatgcacatgtattgagatgactgcatgttatttagcatgcagggataggttctgttttaacatattttgacctattgatgtcgtaacttcattagtagattacctagtattaaaccattctggga

SEQ ID NO: 41556 - DNA, 1043 bp, Homo sapiens
gcactctctgggcagaggaaacagctacagcaaaggttggaagtctgcttggcatttttactttagtaaaatacacataacaaagtttacaattttaaccatttttagtgtacgattcattggcatttcgtaaattcacagtgtgcagacatgactactgcctagttccagaacatttttatcaccccaaaggagaacccatattcactaaatagtcacccccccattcccaccttcctcagactcccggaaattcctaatcttctttctacttctgtggatgtctttggcattttggggaggtgaagaggctcatgtgggctggagtctagtaagtgaaggggagtttcgtaggggagaaagtcagtgaagtaatgggggctgagccggatccctggtaagccactgtaagaactatgacttttactctgaacaaaatggagaacattccagagttttataccgaggggcaaaactctatgcaagagtaggtcgtatgtgtgagacagggtgagaggcagattgactaggaggttatcagtgtaatccaggtgagaggagataatggctcagaacagggtagcaagagtgagagtgctagaaggaattgaattttagtaagattttgaatctaggaccaagagaatttgctgtaggcttggatttgggatgagacagaaaggagttaaggattctccagttgttctaacgtgagcaactggaaggatgtagttgccattaactgagacagggaagctatggctggagcaggcttgcaggggaatatagggaatgctgttttgggcaggttgagtttgagatgtctggtcatctgaataaaggtgtcaagcagttagtgggatatgtctgtctggagttctagaaagagttctgttgtggagaaaaaacaacttgggagtcattagcatagagatggtatttaaagctatgagaatgggggaaatcgctgagggattgagtgtgaactgataatgagaagaggccacgtggtgagcactggggcatattctcctttagtggtg

SEQ ID NO: 41557 - DNA, 1050 bp, Homo sapiens
aaattctgaggatggcaacaaatggatggtgaggaccttccctaagctattttttttctatactatagtaatggctgtcatttattgagcatttacaatgcacctggcactgtgctatgtggttttcttatttaatcctccctatatccctatataatacttaatattaatatcttcattttatagaaaaggaaactaaggtgcagagaagctaagctacttacccagctcataagggacagccaggattttgttccaagtctgtctgacttcttagagcgtttgtccacaagaaataggtttgttcaaacatgtgcactcgaaatgcatccgtggttttgctcttaggcttcctgaagatgaaagtcgtcagtattcctataaagcaagctgaatggaaaaccttttctctagtaatagttttcccacagtgtattttcagaatgcctaattacaagctggaaatttgtcataaattttgacaaatacagaggcgggtggggatggtgtggagttaccgctgtaaaaagtaaatattgaactgacaggtaaaaaaaaagaaatgctcttttagtaaattaaccatgcttcagtggtggattttgtttttaaggccatttgtctctcttgagtttttgtagaggagggtgaaatatatctaagtcagtttttgagaacatggagtgctgttgtaaaacaaatgataaacattgatgcgctgcagaaataaaaattggctgaatcttctgggaggtgctgaagagaactgggacatgcacagtcagacattttagaaacctggaattgacttgaagtgctttatcttttacattacgggtacaactgcaaaaatagaactgaatgtgtgaatgaagagagaggttaatttcacaactttggagttttttttcccctccaatagagtaatggtgttttaaatttttttttttcttcactcaaggggacatggtctaaaatttagagctaaaaatgcaaacatcagacataaatgattgacttgccttttatcaggcaatctgatacaatttg

SEQ ID NO: 41558 - DNA, 1027 bp, Homo sapiens
tagagatcagtgaatctcagaaactagatcacctaccatgcaatcacaaaatatgccatattctacactgttgatattaaattaatatttaaggtccatacatcactttttaatgggggcagagtgcgtaagccatttttacgtattccaagacttaagaatatgtcttgtgatttctctaagagaaattctccagcagatcagaaggatagaaccctcagtggaaaatgtatgaaaatgatccatgctgccctggacgttcacatatgcccccacccccacctctgctgtccccaactagtgaatccttcctaacacatccagatgccatggtccctgattttattggaatagggtaaaaagtttaagaactggaaattctaaattgtgtttctttataggataagaaatcagttttttgctcacacactcttccttcagggcaggaagaccttctctgacccaccaatctgggtagcacctttccctcctggttattctcttttccagaattctgtatatttcctccatagcccactttttataattgtaatgtttgtgtttgtttttactggcacactgtgtatctttttccatcttcactcttgatgataagtgccacaatagcaaaaatcgtataccctccaccaaccagtgcatgtagatatcctaggccggtgcctgacacatagcaggttctcaataaacagtcatcaaatatgaaaatacatgaataatattaggtttgagtaaaagaaaaagaaatattgttagtttccccactttctcgactaattctgaaaaaggaaaatgaaaacatgttctggaatagtttgcttccactgaagctagaaatccacattcacatttgctggtcctttcaccttcttccactgtaccaacccatatgtgtccaaagaaacataactcaaagctaaataaagcatgactccccttttatcatcaggttttctggtctgtaagtcaaccagagaagtagtaatctagaactgtttgaatgacacat

SEQ ID NO: 41559 - DNA, 1025 bp, Homo sapiens
gagctatggcacagggattaaaaaaaatgttttgcacctggctcctctatattaggtgtggaatggcagtcaagccgttgagctgctgtggatttcaattaatgcatttctaaaatactttccagaaattcaagatggtgattatttaaatagttgaaaaatactacatctcaatttggcctatctttttgtgttgaagatagaggatgtaatcttttttcatgttcagtagactgtgagctaatagttttgttaggggctgagaaatcaacatacaccttacggcactggagaagcagaaacctggcttaatttcagaagtgcaggaatctttgacagaaatattctactgtgaggaaataaatttacacaaggatcccttctcagagtatttactaaagtctgaaaagccttaatttattttatgccaaaatttatgtttatgtcatgccaaatatagttgctgatattgttaggtattaatttgtgtgccaaaagatactctttatactgtattctctgatcacaatgtaataaagcagaaattagtaagaaaaaacagtaatacaaaataaacaacgatttggaaggaacaagccattaaaaactactgagtcagaggcagtttttaaacagagctcaactagagatagaaatagagaatgttaaaacagtctttaccattggatggggtgaagttggagagaggaaatggggagatttaggccaaagaatacaaaatagcacatgtgttggattactaattaagagatctcatgtacaacatgaggattaaagttaataaaattgtacagtattagggatttttgttaagtagattttagctgctcttgtcacacacaaatagtaactatgtgagatgatagctatgttcatctgcttcactatatagccattttactatctctctatatcccatgtcatcaggatataaacctcaaatacacaccatgaaatgtgtttttaaaacacttgcaatcataggttatttagaaaatagtaac

SEQ ID NO: 41560 - DNA, 1044 bp, Homo sapiens
agtatacatctttaaattgtaatctatcttcaagtgatattatagcatttcatgtatatcacgggaattttaccaaaagtgtgtttccatttctccctcctattgtgctgtcattgtcatagattttactttatattagttataaatcccatgctgaatttttatgagttttgtttaaacattcaagtatctttagatatttaaataattaaaaatgtttattttttcatatggttaccttctcctgtgccttttattctttgtataaatcaattttcccatttggcatcagtttccttctgcttgaaggacttccttaaacatttgttgaagtccaagtctgctggtgatgaattctttcagtttttgtatgtttgaagaagtcttttccattttctgtaagatattttggctgggtatagaatcccaagttgacttttttttttcttttagtattttgaaaatgttggctccactatcttcttggttacaatgtttctgacataaaatatctgccatccttatcttttttcttttgtacttaaagtgtgtgttttcccccctgactacttttaagattttcccctacctccatgactcttttggagaaatttgatgataatgtgccttggagtagttttattcatgttttgtgtgtgtgtgtgtgtgtttgtgtgtgcacacacacatgtgcctggtggttgttgagctttttgattctgtggatttatattttccatcaaaatttgaaaatttttttgccagtatttcttcaaattatcttctactctttgggggcttcaaatatatgtaacttaaaatgctcccacatgttgacaattctctcttcttttttaaaaaatttaattctcttttttctgagtgtttcatattttggtagtttctgttgctgtatcttcaggtatgctaatctttttttcctgcgatatctaattggctgttagtctcatccaaagtgttttttatctgacaggttatagtttcatctctagaacttctattttgttctttctaatgtctttt

SEQ ID NO: 41561 - DNA, 1021 bp, Homo sapiens
tgagatgtcaggtgaattgcactgattggcattgatggatggacttgttgaaatattgcagagtttccgtaggggcgtagaggaaaatggctgtttagaggtttgggtctcctaagcactgaaactgtcatcacataaacagaaccacttctgcaggtctgaggtgtcatcgtgcattttctggctaatctatccattcatctcaatagtccagaactcgcgcatcatgtcactctttgcctttgttctgcactttgatctttcagaatgtctgtcagaagaaaagtgtttatattgaattatgtgtggaaaggggtaggctgcatacttcagaatcttggcatgaaatttgctaaacaaaccttgccagttgctccgcagcaataatcgaagtatggatttcaatttaacgatatgtaggtgcacacttttccccttcaaaaacaactttaatgtggatgtttgggtgtaggagattttattttgttttgtttttcctgtagaaagtatgtagcacctttattgttaactgttaaaattaatgttaagaaggaagataaatgaatttttcaaaatcaacttttttccactaaaattctggttaaatgcattaactaaatgtatgccttggctgaaatatctttttgtgtgtatattttatctcactgattctaacattctagtataagatagtctattttggtatccattatatctattataatacatgtattagaacacattaggaattccacagcaaaagcaaaagcaaacaaaaataggaactaattacattgaaaagtactatacagacacaatagcagaaacaatgggtgaattattagtttctgcattctgtcacagctatccattctcttttctcatacctttttaatatgtttgaaataaaaaataattatgagatcaaggtttttttccttcatagttgtctaaaatgattaaggacatcaatttccactgatatgatgctgtgggcaagaaaatgtataatggttcaatt

SEQ ID NO: 41562 - DNA, 1053 bp, Homo sapiens
aataatgtccacttagcatttctacaaggggccttaaatatttagaaagaggctatcctttacaattataccttgtttgttaaagggacactcaaaggttggggctgtcttaatcttattactaaaattctgtaggtgtcacatttattttaacaaattaaaatagaggctggaaaagttagggttattgcaggtggtgtgattggaaatattaagagggagcatcgtctagaatccttagagatattgctcagcatcattttcctacaatgccataaaatattattcttaaaaattgtcagaggaaacaaatgttacacttcctaggagtgcttctgaattttgactcttaaacagaatcccctgtggagttcttaaaaagtacacatattgggaccctgttttggaaattctgattcagtggtccaaggggactgggcctgggtgtgtatgcatgtgtgttatgtgtggttttgtgtgtgtgtgtatctgtgtgtggaaagtttcacaagttattttaaagtatatcttgaggatcaagggctagtacaatagactacatttcatttctgttgaaattcattatttaagaactgtactctggagatttaccatgtcaggctgtaacaaggctattgctttcaagatggcaaggtaaagtcttagccgaactgttgtatggaggagcgtgtcatttctgataccaaaggacactatgcaggccaatcagcaacacaattacctatgtatttattaaatagtttcatattttagtttgaaatttttcatttaacataatttaacaaaataagacaaaacttccactgagttaaatacacaagtattcagacatttaatagtattctgactcaatatgatggtcaatgtgatttaccaaaaaatttcagtaaaaatgataatatcgtaattttacaaggtggatttaaattgatacttgcactgtttgactttctaccaaaataggagtacctggtaaaatgctgtggtgtatggagacagttatgagaaactggagggaggatgatagttgag

SEQ ID NO: 41563 - DNA, 1044 bp, Homo sapiens
tagaatatatctatactttagaatagaaacatatgtctagacatggaaagatgtccaagacatgttgctaagtgaaaagacagtgatatgctgtgtgtgcgtgtgtgtgtgtgtgtgtgtgtgtgtgtgtaacattatataatgtgtctgtgtgtgtgtgtggtgcatgtgtgtaaatgttcagaaaaagggatctggaaagatatacagaaaagtgttaataattgttaattctataatcctgtgagagggactttccctttttattctataaatgtatgaattattttcattttatgggactaaacttttaataatatttttaaaaccaacagaaattataaattatctttgcctgcattacagtgatgatgctaacagttaagggcatcagagaagtgaaaattattttcgaacactgcatagtacaaaacaatgtgtgtgcatactgtggatatgacatcatccttagtatttgtacttccatataatgtatattagatgtaactttggatgagtgtgagtaccctccacttaagcagttaatttatcttacattatctttatttatcagatctggtggctttgaataatgctaaatttcgcttctgatcatcccagagaatcaaaatgaaaaggttgccacatgtaggagttttcagtctgtttcattctctctctctttctctgtgactacaaagtgtttccctattctgcttttttcttcatctcttttctcattgtctctaattctaaaaacggttttctataaatactggaagcgcattgtaatttgacttcccaatagcaatgataaactttgaaatgcttaatattgtttaaatcaagacaacaaatgaaaccctgtctggctatcagtcttgttacagtctctcacttaggtaaagactcaagaacttttgcccatctcacgtctgcttcatcaggttcccaacatcctgtgcaccgataatgctaatatgcccaccatcaccttccccgattcattactcgaaggaaccctgggaaatttttggctcaaaa

SEQ ID NO: 41564 - DNA, 1030 bp, Homo sapiens
gattcgcaagttcctcgttcacaagagatttttcaaattgttttttattttctaaattgaatatgcagtgatgtgccatgcagaactctggttccaagttaaaaatgtccaattcaaatagctgcagggtatttattggctcacataaacgatggccctggaagtagaaccagctttatatatagctatactcgggagtcacacatagttttatccaccttcagttttgctacaaattgtgttgtcctcaaactcaggttttctggtatagaaagatggcagtggagctcaagtgcctaccttttctgagaccttagtctagtagatttccattcccaggattccttggagatacttgttgaatctcagagattttgattaactcagcatgtccatttcttaacccttgctaatgagaaagaagagaataaagcttttttcatttcatatcccagaaaatgtgcatgcagttctgctcccatttttcctacagtatttcaagtgaaccactcagtgacaatcccatcaacttatactgccttactcttttaatttaatatgaaatagaactgtcattaactgaaagggaaattgcttcagtgaatatatttgtgaagaaataaaattgcttcagtgaatatatttgtgaagaaataaaattcatgagatattataaatttgatttgccttcaaaattttaatttaacttttaaaattagttacaaaatatagttttaaaaataatctaattattcataaacttttaattgagagtttctttctgattagttgctgtctgcccctgtgcagctgacccattatatttacaaattggttgatctctgcatataggccataatagttttataaactgtaggttataaacgtctgctctaattaattttctttcatatcaactgaatttgatgttgttgaggcattagtgagttttttaaaaatagtttacatagagcttcattttgttgattagtcaaaagtattgttaaactggcttcatggtgtttgaaat

SEQ ID NO: 41565 - DNA, 1034 bp, Homo sapiens
tgtattccattcatcctgttctgttccattctatgcaataaatatttaatgagtgtttagtatgtggcaggtgttagtctatgtggcttggcatgtaccagtcaacacaacagataaaaaaattgctgctcttctaaagcttacattacaagaggaggagacagaaacaaaacagacttaattcgtaagtaaattttagaagttagtgagtgctatggaataaagaaagagttaagtaggtgggggatatcaggtgggaatggagggaaagttacaattttcaaacagggtaaggtgtgagaaactgtaaggaattttgccataaattgatctgagcgatgcattttctgatcactaagaatagcaaggccaaaggcactaggatgtgagatgcctggaatgtttaagaaacagcagggagatcagagtggctggagtagagtggtgagaggagagtaggtgcaggtgaggtcagataggaaagaaagatctgactacaaagggcttttgaaggtgttggtttttactctgagcaaaatagtcagccatggcagggctttcagcagaagaccacatgatctcaattatagtttaggaccctagcaatcctgttgagaaagacattggcttattctatactcttagctgtgaaggtagagagaattattattcatattattaacaacaaccacatacatcaaaaaaccctcaggatattttgaagatagagtcaaagggatttcctgatgaatttaatacagattgtgagagaatggaaggggtaaaacatgattccaaggatttgggcatgagcatctggaaggttagtgttgccaacaaccaatatggagaagatggcatatggagcaggtttgagggggaatgtcaggagatctttttttagatatggtaactttgatatatcttttagacatacaagtagacattgcttgtaggcaggtgggtatatgagtctggagttcatgaaagagatccagggcagagatacatatctgagagttgccaacacatag

SEQ ID NO: 41566 - DNA, 1066 bp, Homo sapiens
gaaaataactcttaaattcacatggaaaattaactttgtagttcccaaactggaatctgcaaatttaagttagttacttatagtaatagagcattagatgcaatttggaaaaatacagaaaagtaaagggagaatcattcatatttccgtctaaaatacagccatcttctgttctctacatcaccagtcattgctattagaatttaaaaactaatatgatttaaaaaccgtggtagaatatgtgctcgataagggctggaatttttgtctttctttaaaataccaaaccccaacatctagaatgaagcctgggactttaagaggcttgataaatctattttgactacattgcttatatatatatatattttttaaatggttatcatagtgtaaatatcacttttttcacttaatgtgacaacttttttaatgttcccacaaacattatttttaatgaatgcgtagcttttctaccaaatggatgcgacatattttgctgagacatttccttgtagttggtgatttcaataacaatactagaactctagtaaataatacgacattgaactgtttttttccctattcagtattgtctcctggagatataatcctagagttggcaaacctgaatcaaatggtagaaatatgtaacacttcttgatacgtattaccaaattggttttgcataagttttgtaccaattgacagctccacttgccataaataatcgtctctttggtcatacgcttagcctatacaatggggcattgtacacatatatgtatacacgtgggtcatatatatgataataatcaatgatgctctattttgattcataatttgcaattctttactagtgaaggtgattttcagttgttgcattcttttatttgttttgatctagatgttttagtatttttattttctaatgtttagtagaaattgtgtgccattttatttttatatttgtttctaatatgtttgttttgttagctacttactattgatggtttattttaatatataagaaatttccatttcatataataaaaaagcaaaaacaaac

SEQ ID NO: 41567 - DNA, 1058 bp, Homo sapiens
ataccacttaattttttcccctactgaatcattcatacttagtttagtgattctgttgggagcaaagagcaaaaccagcagctttcttatcaccatgagaaatggatctggaggggttatttggtgtcctcttcagaaacaagctatttgattaagtagctgggtttccaagatgtgcatgctcctgaagaaaagaaatgtgctcttctgtggtcaaaaaaaattgtggaggttgacccatcatctgttagaaatgcacttgcagttgttttttccagaaatgctcatgactcccagccccaccaagccacccacagacatttgcttgctctcacatttgttttgagaataataacattttataatgcttttgttggattacacattatgtggaatttgcgttgcctttttgtgactaatattgaataactttgcttcgcttaattcataagtaagaaccataagcaacatacagtgctgaaatgtttaactcgtttattcaagtgccaacacaaagtaattacaaaacaattctgggacgcaaaaccaagctactgttgtcccttcagggtcttctcggcagttccaatgagaaaagtggagagcaagtttagtgcagaatcttatgatgccaagaagcagggattccagcatatcttcttgcacacataggtgactgtaaaatacctctttgttttaaatcaaatctaagtaaggaaatacattcatctgtggtgaaacactttggaatgtgcaggttttctgatatcaagactgcaaagcgctgaaaactgcaagttaatggaaattcaattagacatttgttttatagagtagtctaactagatggcagcacgtaacagtgtactgttttgcttagtttgcaaaaaaaaattttatgtgtttgtgccttagaatctaaccacaaaacagagagaaactcaaacagggaaccctgtgaattgtctctaaaggatatggcagtcttggaaagaagtacaagtgatctagatttgatgagtaaaccaggctacattgtcattgttctaaaagatatt

SEQ ID NO: 41568 - DNA, 1052 bp, Homo sapiens
gaaaaagaaacagtggaggcttaaaagagcttgtttctttggagtttaattcttttaaaagtttctttgtttgtgaagttattcaattatttaaaggaaaacatgcttctctggggcttctttggttatctattgttactttggcagactgaaggttttgcacatccttcttcttcctagtcaggtgtggatctccaaaacagattcatatttgagaggggtgttgaagctctttgttgtttccaattttatgggtcatactcataaaggacaaagtcaagtgatgacaacaggggcacatttatttatttatctatttatttcttcaacttaaatggaggataggacaaatatgttactaaatactttctgcacatccactgctgaaaagctacctaaatatctgagaaagggataaatcttggcagttatacatttactttgtgggaaactaccttgttttcaaccttcttgcctcctgttgtaccagtgctccaactctttctgaaagcttaagttagccaaattatggactgacttacaactctgaaaagtttcaaacaaataaacacttaaaaactttgggtgaagtaaaaggcgagagtctagctattactaagattttttgttcaggtaccaagacctgtcagctagttgtctggtctatggtgttcccacaccacagtccatttccttctaggatgttagtccctccgtctgcatttctgaagactaaaatgtcagtttctcatttgtagttttaactgcctgctttatggtaattggatctgcctatttccagcctcttcatctggctcttggcttcagactgtcgggatttcattacttatatatgctttagcttatactgactaaaaattgctgcatctttcttcagactctacatcactccccgctctaaaccttgctgagcttttctcagtacctgacacctactttgcacttttaaacaaagtcctgatattttaaaaataacataaatgggaaataatggttcctgaaataaattatagtctttagcatttacttac

SEQ ID NO: 41569 - DNA, 1102 bp, Homo sapiens
ctggcttttacccataatcgccacctactggccattcccttgaactgcacatcccagtatataacccgtggagagaagggcataggtctatagaagcaaagcccaaagaccctatccaacatcctctatagtcacaacccctggagtaatgggaggaagggaaggagaaataaatacaataatatagggaaagaagaaagaagagaaatcctacccacatgaaaataattacaaaaattaaaagtgccatcttcttcagatgagaaggaaccatcataaaaattcttgagaaatccgaatgtactgacactaccagaggatcacagtagctctccaacaatggttcctaaccaaaatggaaactgagaaatgaaagataaagaattcaaagcatggattgcaaagaagctgaatgagatccaagattgaaaatcatcatcaacaacaacaacaacaagtgatctaaagcaatccaggaaatgaagaaagagataaacatcttaaaaagaaatcaatcagagcttctggaattgaaaaactgacttaaggaatttcaaaatagaatggaatgctatagcaatagactggacaaagcagagaagtaatttcagaacttgaagaacaagtctttcaaattaaccctgtcagataaaagtaagaaaaaagaattttaaagaatgaataaagttttcaacaaatatggacttatgtaaactatcaaacctataatttattggcattcctgagagagaagcaaaaaaagcaaatgacctggaaaacacatttgtcagagtaattcaagaaaaattccctaatcttgcttgagagagatacatgcagatacaagacatccagggaacacccgcaagaccctatacaaaataaacatcaccaaggcatatcattaccagactctccatgggcaacactaaagaaaaaaatcaaaggcatttaaaggaaaaggtcgtatcacttacaaagggaaccccatcaagagtagacttccaaatagaaaccttacaagtaaggagagattgaggacctatttttagcattttaaagaaaaaaaaattccaatcaagatcttcatatcccaccaact

SEQ ID NO: 41570 - DNA, 1063 bp, Homo sapiens
cgtcgctctggaggacctggtagaggaagtcgatgtacctggccgccagcttgagggtctgaatcttgctcagcttgtccgagggcagcgtggggatgatcttccgcagcgcggcgaacgcctcgttcagcgactgggtgcgctggcgctcccgcacgttggccatgacccgctgcgtctgcagctcctcgtaagactgcggactcccgccgccgctgctgctgccgccgccgccgcccgcgccgccgccgccgccacagcccgcagacttcttgccgcgcttgccctgggccgggctgcccggctcgtcgccgcctccgacgcccccacccgcggctccgccgggccccgcgccgccgcccgcgctgcgcctgctgctgcgccgcttgcgtcccccgcgcttgccgctcggcggctgctgccggtctggctcttcctcgctgttgctcaggctgtcgtcggccggcgagactggcgagctggacacgtcctgcatcatctctcgagcggcgacgcgtggcctcgcgggcccggggcagaggagaagagcggggcgcctcagcccgccagcttcccccgcgcgcggcgccggcccgggcgatgcggcccgcggaggagagagcaggaggacggacgggagggacctccgcggggagggcgcgcgggggaggcggggagggaggcgggagggggaggggacggtgtggatggccccgaggtccaaaaagaaagcgcccaacggctggacgcacaccccgccaggcctcctggaaacggtgccggtgctgcagagcccgcgaggtgtctgggagttgggcgagagctgcagacttggaggctcttatacctccgtgcaggcggaaagtttgggggcagcagtgtcattggcctgacgtgaggaggagggacttttcgaagttttataggaaagtttccgctttccagtccccctcccccgtcccacctcccttcctcggggtctaacaattcgtcctcccaaaccattcaaaaacgacctggcccgggcggccggcccctccacccgcctcctagccgccctccc

SEQ ID NO: 41571 - DNA, 1023 bp, Homo sapiens
caactagaaagttttaagtccatgtgcagcttttaaaaacgattgttccatcttttggggcatcgaaagactacaaagtacctgatttcagcttgctgaatgatctgcttcaaattgtaaacactatgagaacatttttttttttttgagacggaatctcactgtgtcgcccaggctggagtacagtggcaccatcttggctcactgtaacctccgcctcccaggttcaagcgattctcctgcctcagcctcccgagtagctgggactacaggcgcgtgccaccacacctggctaatttttttttttttttttttttttttggattttttagtagagacggggtttcactgtgttagccaggctggtctaaatctcctgacctcatgatccacctgccttggcctcccaaagtgctgggattacaggcgtgagccactgcgcctggcctgagaacattttaatagtaattttataggagaactaatttgaatgcttctcatattctcaaaaagagtggcctggaaaggatttctgcaaacaatatttagtaggaattgttttaattgaaagcaaaattgcatgtagaaatcacctgtgccagactcaaagtagcctggctctgcttgtgtaatgcctttcaaatggggtaaaattatggtttgcaaaagtgacacaataaaattcaactttgataaaaatttttatagaatggaatattctcattaaattagatgttgtaggtaagtcatacttaagcagaaagctttttgttgccattattattgaaaaacttacaaaaatcaatgcatacccttcttcagtaaatagggtatcgtgattacaactgatgtcatatttgccaggagccacaaactcaaacatctgcagggccaggtaagaaagataagcaagtgacataggtcaaggaaagcacatccaagagcatatcttgcctttaggaaaggcctccaaatctctcttattaagcagtcatttgttaaaaactgtcttttcttgagcag

SEQ ID NO: 41572 - DNA, 1044 bp, Homo sapiens
ggtgatgtatggctgtgcatggaattgtaaagtaatctgaaaaatgtcagcaaagtgtcaagtagagacctgtcttcctggtgacctttgtttggtcaaatacctaattgtttggcttttagctttgtgtaatctgtgaagtaggataggagatactaggaaattctttcaatattgtattttctagaaaaaataatacaacaaagacgtattgataatctaccacactatctacgttgaggtatctggaaccacagtggtatgaattgcactatctccctaatctttacactaattctggctaaaagacagcatcagctcaaattttcctgatcagttttttagcaggctttggctgccaaaatctcttctgtgttttaagtctgaagcaattacagttgaatattttgttgttgttcactatgaggagtatatcggttttaggtcacaggaatgatctagtagagatgtatttttctagtacacttgatagtaccttgaatatgtacagtacatgtaggcccattttatggacctctgaggcacagttttttcctttttaagttattagatatttctgtgatttatttgatgcactcagatacaaattcatgctataataagttaaattgtaacataatatctaccttaatcaaatatttatagtttaggccaggagcctggcaaagtaaagatgacacagatgaaatgcttgataagtaaataaatatgagaagagatatatattaaaacacctgtgaagtgaatcccctgtgaagaaaagaaggtctctaacaatataaacctgtatcaggaaaccctgtgattctgattctgtgcacagaaggatacatggaattctcagaccttttctagttgcaaccttttaattgtttgactttatattctgtcctctcaaattctccttagactgtgacgtgttaatgctctcttttatattttctaattaaattccatacacattaatttgagaactgttggagagtattgtgaaatcattgagctaatgggtcacatcacgtg

SEQ ID NO: 41573 - DNA, 1056 bp, Homo sapiens
cttgatgtctgcaagtcaatacagttaatctaggcctagtttgcagattttaccccattgcctagcttagtaggtgcttgacaaatgctctttgaactaaggtataaaagatgatggagaaaatagcactttgtaattaggagtaatgccttggaatggttttaatgaagctaatgaaacaactttgttttcattaatttcttttggctttgcatttgtaagacactaagagtgggccgggtgcagtggcacacgcctgtaatcccagtactttgggaggtcaaggcaggtggatcacctgaggttgggagttcgacaccagcctgaccaacatggagaaaccctgtctctactaaaaatacagaattagctgggcgtggtggcacatgcccgtagtcccagctactcaggaggctgaggcaggagaatcacttgaacccaggaggtggaggttgttgcagtgagccgagatcgcgccattgcacttcagcctgggcaacaagaacgaaactccatctcaaaaaaaaaagaaagaaaaaaaagacacaaagagtgagacaccaggaacttttctgtcttgacaagggggagaaggagcaataagtacccatatcgcccttttataaatgagccctgaaagttcagatcttttactttgtgtccccattcatctgtaagtactttcttggtcggttcatgttgttccccaggagaatggtattgtttaatttgtggggaaaattttgctcgaaatttttatgagaagccttgaaaaattagtagctttgacggaatgtaattgctagctcaaggacaatgagctaaaactctccaccatccactattctcattttactcttcaggagattaagggaagtctagatgacatgaacagaaaaaagtaaaatcatacaaggtaaatctaatgaaaccagtacttgaagctggggagcttcatacttcgttttatgaaatgagaatgttagcaacaacctagggggatcctcttcccattaacaacgtgttcagtataatgtgtttctgtgctttggtctc

SEQ ID NO: 41574 - DNA, 1035 bp, Homo sapiens
gatcctcccacctcagcctctcaaagtgctgggattataggtgtgagccacagtgcccagccccagaattttcttatataaatgttttaattagtatgtgaaacatcaaaactgttgccctttgtgtccactgttggccagaatggaccaagttatctacaacttgtctgttccattgactacactaaaaactctggacaagtttacttatttgttttcttaagtatctaaatgaggacaatgaaaagcaaactatagcaggcaattgagaaatgaagtgaaaacttgaatttgaataacagtgtatcatatgtgttcatttcatagagatctttttccctcctttgtctcccaggtttaaccctgcgggcactgcatagcaggtgcaggtagcaaacaatctaagagaaacctcttgtatctaaccagaaaagcaagaaaaggggccttttgctccaaaaccagttccatttgcagattacactgaaatagtagcagcttaggcaccaaaaaatctctagaaaatacccatatctctggctaggggaactagaaaatagagtctgttttccaagaaatctgaggtaaatcaacatcatttttctgtcttgccacttctactctgaaggtggtcccagtcgtggtgtaagtgcagaacattatgggagcccccagtaacttggcttttctagccggaggaactagaaggtgagacaactggaggttggaaaggcataggggaaattttgagagcgatataaaagatgcttcctaattctgtgtgtagatcaaaagaagtcctgggttcaaccttgcactgggctcaaccttgagcattgcatgcacagcacagacacaaagaaccacagcaaaggcctcaagaactaaacatcttaaaaaccaccatccaattcccagcatgtgctgagcagagacaaaaagcataacaaagcctttgaaaagtgaattaatgttggaactgctgctcaaagagggcaagatggaacttttagtctgaacctaaacgggttgagt

SEQ ID NO: 41575 - DNA, 1027 bp, Homo sapiens
tgctataaaaactataaaaaagaactaaatagaaattttagatttagaaaaatacaatattaaaagtaagtttatcagatgctcagtagctaagtggagataatagaggaaagagtcagtgagattgaagatagaccactggaaattataaaatctgaagaattgaaaggaagaagattggggagtcagaaaaaactggattgcagggatctgtgggacaataataaaaggtcttaaatttgtgtcattggtctcccagaaggaaaggaaaaatactgctgtaagacaaaatttgaagaaataatggctgggacttcccatgttaggtataataggttcaggaagttcgttgaatcccaagcagaaactaaaagaaaacaatatcatattgtaatcaatctgctgtaaatcaaagataaaaaatcttgaaagaagccagaagagaaggacacattatataccggggaacaaaaattcaaattatggcggatttcttcttagaaactatggaggacagagaaagaaaagaactatcaactatcaactcaccattttatgtccaaggaaaatatcctcaaaacagtatagtaacaagagcaaagtaaagatacttccaaaggaaaactaagagaatttgctgctatcagatctgcctcaatagaaatgccaaggaagttcttcaaggtaaaattaattataccagagagaaatttgaaattgaataatgaaggaagggcaaaaaataaaaataaatcgtcttttctgttttctcagccacttgccaaaagaaatgctaaatacctgggtaaatagagcagactgtttttcctctgctgaaattctttaacatatgtctatttacagttaaaaaaaattaacattgtcttgtagatagtcattgtatgttgatgtaatacatatggccaatataacagaaagggagggtaaggaagccaatagttaaaaagctgctttgttttactctgataatatagaagttgttatatatattttgaaaagttagata

SEQ ID NO: 41576 - DNA, 1015 bp, Homo sapiens
aaactcagatgcattatgctaagtgaaagatttcagaatcaaaagactgcataatatatgatatcatttatgtgatattctggaaaaatcaaaactataaggacagagaacagatttgtgttttctagggcataagcaaggaggagggagagttcaactacaaagagacactacaaaggaatttttggaagtgatagcaactcttctgtgtgtttattttggtggcgattatgtgactgaatgcatttgtcaaaactcatagaactctataccaaaaaaatgaattttactgtatataaattaaaacataaatgttaaaaaagtggagacaaactcattttgagagactacagtgtaaaaagggagagagatttactattttatattttaagaattcagaacagttttctgttaagcctcatgtgcatgcctcagtatcaggcaaacacttctgttaactctgccaaggataataggatttagagccaaagggactcctgaaaattattttgtgcaaccccatcatttcataaataagtaaactgaaggctcaagaggctaattgtcttccaaggctctaaatgtagttactcttgctgctttctagattttctctttgtctttgtctttcagcagtttgattataatgtgactcgatgtgactctctgcatttaacctactcggagttcattgagcttcttggatatgcagattattatttatttatttttttttcaaattggggaagtttttacctatttttcaaatattctttctttaaacaccttggaactaatgagtctctcagcctgtgctgaaaggttctgtgtgcatgttgcagcttgccttcagcactcagccagtcatttgacatctctgccttagccttcactttctgcttacctagagcctcaggattaggcacagattagttagggccttctcatgctattctgagcaggctcacagcactaaacgtgtgtgaccttctaaacatgtatgaccttctagatt

SEQ ID NO: 41577 - DNA, 1050 bp, Homo sapiens
tttgtttttagttataagattttttttttggtgtataatgaactggtataattggcatgcctttaaaaggtgatatttccacaccagtaatgctgtgaaattagcattataaaagaacaaagaaaactgtatactcgctgcatactagggaagagccgtagaaggaccttgtttatagggcaggcaagatgccaggttttgtttcttctgctagcaatacagctacaagttggatatagtaaatcctgcttgttaacaagaaaactacttgaactaattatcttgctcttgttttagattccaagagatgcaaaccataaacttgtttttatttccaagaagattactgaaagcattggagtaaatgacttttctcaagtggttttatttggagagttacctgcgttgtctcttggacatgtatctgctttccttgatgaggtactggtctgtctttaatatttaaagctttcacttatctccatgacatttgaaattatttaggacaactccgataattaaaaaaagaagagctaggaggggaagggaaggggatgggggtggttaaaaaaaaaaaaaaaaaaaaaagcttgtagaagccaggagtctctagccaggtggatggagtcataacatctagactgttcctgaaaggagctcatgcttactgatgctaatattcaacaggtggcaattgcagggatcattctctccctttcttccttccaacacaatagaagcaaataaaaagcaacttgaataggttcttgcaccttagcagcaggttttaagcttcacattcagagtagagacaaatttacactttgaaaatgagtattatcagttcctttttatacttgttagaaactaacagttaaagactaagattcactcatggcagataatgggaaaaggtgatgaaagtgttagaaatggttcttaaactttctttttctcctcttaaaatagagaaatagtcttcaaccaatgttactgacactttaatgtgcataagaactgcctggggattttgtgaaagaggttggttca

SEQ ID NO: 41578 - DNA, 1048 bp, Homo sapiens
tttttttgattacctcttccacagtggaaccatgagtttcatttttatttatgcttttcttcctctctccctacaaagaccttctgagcctcccttagtaatttcttaattggtttctcattccatccattaatcctttgtaatttttttttaatgtcaggccagctctttcttacaaagttaaccttcaaaaggccttgccctactgggtcctctggatctaatctggagtattttcttaactagtctctgaccctgtgcaggaatgcggaggaagtttcctcttttggtttttgttgaatctccaatgcctttgagaccttttgtgtcccagtagtggactttttgatcctttttattattagttccctgaggttctgcatttgtgtctgttctctgggattttttttttttttttttttttaggggaagtctcactctgttgcgcaagctggagtgcagtggtgcaatcttggctcactgcaacctccacctcccaggtttaagtgattctcctgccgcagcctcctgagtagctgagattacaggtgcgtaccaccatgcccagctaatttttgtattttttagtagagatgaggttttgccatgttggctaggctggtcttgaggccctgacctcaggtgatctacccatctcggcctcccagcatgctgggattataggcatgagccctgcacctggccccttgggatcattattatctcgtttgggattgacatttggaaatttttgttcagctggcaagacgtcttgcccagcaggttgttacctctcccagatggttatggcccctctcctaatcattcccctttcttttcctgtgaaaaggatacttgtgatagatatcatttcagcccaggtataaaaactggattctaggaattggttcagctggtttgctaaacccaggggatgttttagaagtggtttcatttccttcttgaaattcctaacttcagtacttgtaagaggagcatttacaaagccagtctctccctgtctatgggagcttccctaagagggaat

SEQ ID NO: 41579 - DNA, 1052 bp, Homo sapiens
atgtaaactctgatagagggtatggataatatgtttgatcctttctagggcttaagccaagaccctatcaagcaagtaagtgggagattgtgcttataaacagctcttttgaagtaagacagatgttctccttgcttctcagaatattttaggccaaagcattttgtgggcataaattagcctaatatcagtgtcaatgctgtatttcagcttactcgtgaagacctggtctttgtgctgtaagcaattaagaaagacagaattcttaagtgtatttcaaggaaatgtaaaaacaaagtgttcaatgcacacttatgtatatatattatgatgtttataacaaaagtgtgaaaacacacatgggaaagattgaaacttactttggggtagtggttttctgggcaggcagaaagagaaatgtgtctatgtgtgttactacttatttctgaaataaaataacagtatctgagaaaaacaaaacaaaaaaaacactggccattatatataaaacagacctaagaagactctgaaaggtgaaaagaaaaaggcagagtggctaaggatattgggactcaagaaacaacaacgtgatgatgagttccctggattttcctgttgcctgaagtaatccagacttggagctgaaaacactggcaaccaggaaatgccagtgggcacagaccagaaagaagcccagtaaaagcctgatctctccctagccaaaggctcaagaaggagagagcttaacacaaaagaagatttgtaagccatcaactgtccactctagccaaacaccatggaagaaactgtgtcccacccctccccttgccaggaagagctgagtggggagcctagacttacaccctttctgtctgaaaatgctccaactcccacccttgctggggtgatgtcagagatgaccacatagggagccatgattttcatccctgctggccaggaatgaacttcattctctgtggtgtccggagaccatgtgggaatcctggatttccttcttcacccagcctgatgttggagcaaacctgatggag

SEQ ID NO: 41580 - DNA, 1067 bp, Homo sapiens
tttactgaacaaatataagatgagatcctactgtcataagcttggcgggggtgtggcatcatcttacagcttctgtgtagattgccttccatggtgacttgtacaaagtggcgtttaataagtacttgaggctaggtggagtgactggtagttcaagtaatgaaataacatgctgatgagggtaaactgctgcaagtgtaatggcagaggaaaaaattacaaggctgtgtacttagaaaaatattgcatccatagggatagaatgatgagctcagaccatttactgttggtccctgggaaaaaaatatttatagatggttctctgaagacgactattccagtacctgctattgtcacagacatggccaggaagggcaccggaactgagcgctattctactctaatataaaagtatagtactttaaaatctgaagtgctggtgctcaccaaaaaccaaaaccaaatactactgaatggctctctaaaatttacatgaaggtaaaccgaagtgtgtaaaaaaaattgtctagaaaggacttcagctttgaaaagtattaaaatgtgaagtgtatatggtttaggtggccacagatttttaaaaatctttgaaagaggcgcacctaggaaaaatataaatatgtactacaccgaacaatggcaatggtgttatgaaaaactgtattatgcaatgaaagagaagtggagcaaaattaaggcaaaccttgcagatctcagatgtgatatttagaaagagaagcatgtggtgggaattactctttagtcttgaagtcaatgtgaaagaaaacatctctactcttcataaaatagcttttagttttactgtgaacaaagaagcaagaggttgaaatgacctttactctcctcctggagggtggtttttatacattttgcatgacaaacaattacaataatgtatactgcctaaaacattgagacttttcctactactttttggctttacaacctcgcctcagagtattttctctatgtattttctcttgaaaacttggagttaaggaccgctaagctggtgggcaagatgtgat

SEQ ID NO: 41581 - DNA, 1064 bp, Homo sapiens
gcttaataactaacatattataaagcccacacagaatgatcagataacaaaatgacataactttcaatggcgtattagctgatgagaagctacacactgaagcacaaacccgaatgctagactgcctggtttcaaatcccagctccgccactagctgttacgaatttgggaaaatcattccctccttgtaactcagtttcctcacctggagtgtgtaataataacagcacttttaaagcccttaacacatagttcctgggacatagcactatagaaacattggttatatacaaataaatgttttggttacatcattttgcttgcaaggaaagagctattttatgctagcacacagaagaatccacattgggtagtaaacaagacaagagactaatgggaatccaaaatcagactcactggataactaagctttgtgaacaccggcagtgaaggtaagtttgaaatctagggggctccattgactgagcaagaggagtttgtgagactcgactcctgctttgctggtcatgtgatcctgttcagtctgtgtgtctgctttctcctgtcccactatcagttgacttcctctgcttgctagtagtttctgctcactgataattttagccagcatggattcagccaggccctgactctgagaaagaatcttattagctcaaagcattgatttgagccaggacagtcatccacctgtggagtggttgtccttgtaacagtcaccactgtagccccaggacactgttgggggtggctgggtcgtgtggatgtaccagcggccataggcatgcagtcatggtgactggcacatctggtataattattcatgctgtgacctagagggccttaatatggatatatggatatttatatctaaagaatacatatgtaggagggaagaacaataacaagtatgtgaatcttgtttctattcttatatctgcaaagcatcttctaaaatgttacctggaacccaacaggaaataatattagctgtgaacggaaattgcagacagacagtggttcctttctgctgagaaagggaaatt

SEQ ID NO: 41582 - DNA, 1471 bp, Homo sapiens
tgtttttacatgagttctcataaaactgtgagtttctaagttttggcttttttttttttttcagtgactttgcagggttattgcttctctttgtctaaagcttagtttgaaagcaatggcagaaatatttctcaggatattgtgtctgtttctccaccttctctttcacacactcggtagataaaaatcaagttgtgaagatctgtatatgctggcttttgtatttggtatgtggagcacataaaaaccctttgtcctacttggcaagaagaaggttactcaagctgaatgctttattgtaatctcccaaatcctgtggatagcgcttaaagattaaataagttttcgtaggttatactatcatttttttttctgacttttagaaaaaaaatgatcatttacttgattttttttaagttgtatttttaatttgagaggatttcacatgaactgtaatgtttgtgttttcagccagtgcacaaagactctattagccttttcatggcacatgttcacaccactgtaaatgaaatgagtaccagatattaccagaatgagagaagacacaactataccaccccaaagagttttctagaacaaatatcactgtttaagaacctgttgaagaagaagcaaaatgaggtatccgagaaaaaagaacgcctggtgaacggcatccaaaagctaaaaaccacagcctctcaggtatgaccaggatgtgttattactgagtaatatttatgctgtttaacagaaaaatatatttccttttgaagcactactaaatccatttctataagatgccagctggtgaaatttacagtttcatgacaccaagaatacactgctactgctttcaaaagcctacaatgggattggccgactcacagctggattagggtgaaacgttctcttcctggcctgactcagtgtaaggtagtgtgggatattgaagggagcagacacagcggattgcctctcttgtctctgacttcttcagtgcacggtacttgtcgtcaaggttcttatcatcctaggatggaccagtatcttttttggtctcagattctcaacctccagtgagggcatcattttctggctaatgactgtggcgagatcccaaggtagagctgttcctcccttagtgacttgtctgctcctcttacacatctgtgtcctcagtcctgaggcccctgctccctcgaagggcgatgcctctaacttgcaggagtaaatcaggagagaatcatcacaggatgttaatcatgtgtgggtctgtacacatattatcattatttcgttgttaaaaaaggatttcatgaagtagttgttactactatagttttatatatgaggcgtaaagagtttaaggccagagagccagtgaggttgggttttagacccaggtctgtgttgctctgatgcccatgagttgtccatggcactgtgctgcctctctgtggctggaaag

SEQ ID NO: 41583 - DNA, 1020 bp, Homo sapiens
ataaattagacatgtatctgccattcagattattgccaatatcctttaagctacctttgtgctcccctccttgacaattctgcctccacttccaaaggtagccaatgttcacatattggaatgatgtatcagttccataaagtctaacagacaggacatagtaaatattatttacttaatatttttaataacatacataaaatatatttttaattcagtaaataaatatgtatttagtcaagtttctagaatgtgacaggcatatgaagatcaaagatctgtcccattaaaagataaataaaagatctaaatagacatttctccaaagaactacaaatagtcaataagcacatgaaaatatgctcaacatcattagtcatcgggaacatgcaaatcaaagacataggaaggtgaagattctgaatgttgcttatcacttcattgttttatttaaaataatgttttaacacgtgtgtgtattctgaaacaacatattcttttggagctttataaaaataccattatggtgtatatagtttaaaaggacttgattttttccctcaatcatatgtttctaagatttaatctacattgctccttctggctctagttcttgcaaattcgttactataatattgtttttgaaacagagtcttgctctgtcatccaggctggagtgcagtggcgggatcttggctcattgcaacctccacctcccaggttcaagtgattctcctgcctcagcctcccgagtagctggaattacaggcgcctgccaccaggcctggctaatttttttatttttagtagaaacaggtttcgccatgttgaccaggctggtctcgaactcctgaccttaaatgatctgcccaccttggcttcctaaagtgctgagattacaggcatgagccaccacaccgggtctattactgtgatattcaatgatatgactgactattcctcaatttatttagcgttcttattgaaggccattttggttatttttagatgttttgctat

SEQ ID NO: 41584 - DNA, 1050 bp, Homo sapiens
ttgtgaaaactgagcaagtgcccagaactagaaacttcccagccccctgaactcagcctcagggtaagcgagtttaatagtgcttcctttgattttcaaatctgtggaaggtttgtttcagtttttcccagacaaatattgttgggatagtgtttcttttcaaaaatggataggattcaatgctcatcagtgggaagatagtgactcctgaccattttcctcctagctggaaactacagaagactcccaagtatcaggaaatttggagaatttgtacaggaattatattcagagatagcaatttatttactcatcaaagagagctattggatagccaccataaagaccactcattaaaaaacaaaattgcatgatattcttaacattgtctttcactttttttaaccaggcttggtggagtttcaagatgctgatgaacttaaggtatgggccgagtggaaagaatttggtttaagttattaatagttgaattgaaattgtggccaaggatgagaactctaatctgattttatgtgcttctgctgtgatggattaaaggatttacctgaggccaaattggtatgcaggaatttattaaatggaatcataccccccccccttttaaaattacgcttttggtaaaagggaaaaagctcttggtaaatggataatactactaagccaagagaaagacaggattttgagtgaaaacataaatttagatgtcacaacattactaaagcaacagtgtgtaagatactggacgattttatttacttacttgcacagtttttgtaaacagtctagacagtactgtattttgctatttagtaatacctactgtgatacttcttttacaggtctggcgcttgaaagaatcagtgaagcttttcaagtagaggaggtatatttgaatatgtaacctttagtatctacagaatagaggttgcttttttttttttttttttgtccctttcacagtggtagcaaggttgaattttgagatggccccaatcatctataggaatattatttgacagttttggagac

SEQ ID NO: 41585 - DNA, 1060 bp, Homo sapiens
tggaattaataggggtgagccaccatgcccgcccagtatattctttttttttttttttttttttgagacggagttttgctcttgttgcccaggctggagtgcagtggcatgatctcagctcaccacaacctccacctcctgggttcaatcaattctacctcagcctcccgagtagctggaattacaggcatgtgccaccacacccagctaattttgtatttttagtagggatggcgtttctccatgttggtcaggctggtctagaactcctgacctcaggtgatcagcctgcctcagcctcccaaagggctgggattacaggcgtcagccactatacccagcagtatattcttaaatattactgttgagccatatatacgacaatggtggactttgaatgtccgcacatctgtagtaaaatgcaatgctaccttcattttttgttggtatgctaaagaaattttaagtatctcacttttaaaaaaataggtttgtgtattttatgtgcttacacatttttccatagtactgtagatcattttagtgatgaaatttgatacttttgacagaaaaacaggtcagtgagttccttgggatcaaaaaggggttgattacaagggcaggaaggaattgttagtgtgattctacagttctgcatcttgattatggtatgactgtgcgtttgtcaaaccttaacaggatgaattttgctgaatgtaaaatcatacttcaataaacatgactttaaaaacttaaccctccttggcatttcagtggtgtttccagtgaaatctatggcaagatggtttggggtcactatctacatgaactgccaagttggaaaatcaaaaatacatcaaaatcactcttgggacataagtcacggaagtgactcatgcacacaataaatacccaagaagcaggaccagacggcagttgtgtattggcacgctcatcagtgctgcaaaaattccccttctggatggcaacaacaatgctgtatccacagcagcattttaaatctcacctctgatgtatccattgttgtgggcatgagatg

SEQ ID NO: 41586 - DNA, 1103 bp, Homo sapiens
tgttcgaaaggcttacttttattttgtactagaaaagattgtctttccaaaatttacctcgtattcataaactggaaagttctgatggcaatattttgttacaaaattgtcattaatcacaatccaggattatgccaccatgactagaaggccccctaatggagtttatctgcactgcaaggggccagttgtctcagaatcatcctccgttgacatctccatctccaggacagctccacactaatctgtttcaaagacaaaatccagtctaatcagtttgatgtatgtttctgggaatagagccgaatgttgtagctgatggaatggagtctcataccattgattttgcagctggacaagtgccctgccatgttactgccactctttaaggcagaatagagcacattgtatcatttataggcctctcacagtgagaaatatgtggaactttggaaatcagaatctaaaactgcagtccaatggggtagccactattcacatgtgctattgagtacctaaaatgtggctagaccaagttgacatgtgctgaagggtgaaaaacaccaggagtgaagaattaacttgaaaaaaatgtaaactatctcaattttatattgattacaaattaaatgatgttttgaatatattgagttaaatgaaatacattttttaatgatacatgatgcgtattatatttctgttggacagtactggtctaaaacagttgattcactatccagtagagagaaaggtattgctgttttaccatatgtgaccttcagggaaaagaagaataaaattagcacttgaaaatggaaaaacttacagataagcagctattatttgaagggcagaaggtgcaggggtactcagcactacttagaagatttgacataaattctatactcaagttgctagtacttctggagattttaaatgaaagacttcagagtgtatttagtaaacactctgctatgcccactctacaagcatctgtgtgttcattaatcaagagcaggccaggtgcagtggttctcacagtggctcccacccagcactttgggaggccaaggcgggtagattgcttgaactcaggagtttca

SEQ ID NO: 41587 - DNA, 1047 bp, Homo sapiens
gtctggttccgtgtccccacccaaatttcatcttgaattataatccgaattgtaatccccatgtgttggaggggggatctcatgggaagtgattagatcatgggggcagtttcccccatgctattctcatgatagtgagttctcacgagatctgatggttttataagtgtctggcatttcccctgctggcactcattctctttcctgccgtcctgtgaagaggtgccttccaccatgattgtaagtttcctgaggcttctccagccatgcagaactgggagtcaagtaaacctcttttctttataaattacccagtcttggatatgtctttcttagcatgagaatggactaaaacaaggtccataggttgttcagggagcactgcacaccatccacagcccctcactccacttctgaaacattttcctaaagaagctgagtcacagtgagggcaaaggaccagaggccagcagggcagcagcgtaggctaagaatgaatgtgaatagaaatcagaggaccttggtgagaattctggctctggcattgactagcactgttgccttggttgcctttttgttgctcatctgtgaaatatgaatatttcaagtgctatctcattggaagattctatgatagtactatagaactgtacatggtagtaactgtcataatttgtggccttatatttatctttttgaatcaccatcaccaccatcatcatcagatgcactctaacttcacttggaggtatttatttatgcccccacttcattacaaaaatgtttaagacatgtttaagacaaagagaaaagattgagcttccaatctagttccatttctagatgtttcctcttcctttcctggtttagcagaggaaaaactggcctccttgtttccccattccccccccacccccccccctttcaaccacatgaagaggctgtatttgattacacttcagaagcagcctccgaacctactgtgtaggcatcaaataggacagaagtgagctgtggcaatgaccatgtcctcacatgacaacatct

SEQ ID NO: 41588 - DNA, 1057 bp, Homo sapiens
ttggataattcctagcttagttttcaccacctgtcaattctctgctgcccagaaagagtccatcaatcgagcttccacaaatgctaaaggaaccggtggcagctgatggaatcgggcaaagatcatgtaaaaaattaaacccagtaccagcctggccaacatggtgaaacccctctctaccaaaaaaatacaaaaattagccgagtgcaggcgtggtggcacacacctgtagtcccagctactccggaggccgaggcgggaaaatcgtttgaaccgggaggcggaggttgcagtgagccgagatcttgccactgcactccagctgcatgagacagtgagaccctgtcttggaaaaaacaaaaaaaaacagtagtttgaggaacagaaaaccaagctaaacagccaaaatgaatggctcctgtaaggcaaatttaatgtgagaaatagaagggaacaaattaaccgggcatggttgtgcgcgcctgcagtccaagctactccagaggctgaagcgggaaaatcgcttgaaccgggaggcggaggttgcagtgagtgagccgagattgcgccactgcactctaggctggactacagagtgagactctgtctcaagaaaaaaaaaaaaagcaaacttaaaaatacgatgtgtaaaaatatggttttacagttttttgacattcaattgaattgaaaaatagaatcgatactcttaaaactcaaaccgaagaagatcaaacaggaagttgcctcatgatacgaaacaaaaatgcaaaggaagccactagtgagaagataaaagaaagggaaggaagatacaggaactgcagtgtgaggtaggagttccagaaggaacagatggagaaagcaataatcaaataagactacgacttctttgggtttaaaaaaaaaaaaaaaaaaaaaaaaaaaaagaactttaactttcggactaagttatactgagtattaaacctgatcaatgaactaagatattcctccctcagatatattctagtgatatttttcaccttcaaagatcaaaagagagcttacatttggg

SEQ ID NO: 41589 - DNA, 1050 bp, Homo sapiens
aatcctttgtcagatgagtagtttgcagatattttctcccattctataggttgtctcttcactttgttgattgcatcctttactgtgcagaagctttttaacttgatgtgactccatttgtccatctttgttttggttgcctctgcttgtggggtattgctcaagaaatctttgcccagatcagtgtcctggagatttctccccagtgttttcttgttatttcatagtttgaggtcttagatttaagtctttaattcatttttatttgagttttcatatgatgagagataggggtctaatttcattcttctgtatatggatatccagttttcccagcaccacttattgaagagactgtcttttcctcagtgtgtattcttggcacctttgttgaaaatgagttcactgtaggtgtgttgatttgtttctgggtcctctattctgttccattggtctatgtgtctgtttttatgccagtacatgctgtttcgattactatagctctgtagtataatttgaagttgggtaatgtgatttctccagtttcattctttttgcttagggtagctttggctattctgggtcttttgtggttccatataaattttaggattgttttttctacttctgtgaagaatgtcattggtattttgatagggattacattgaatctgtagattgctatgggaagtatggacattttagcaatattgattcttccaatccataaacatggaatattttcccactttttggtgtcttcttcaatttcttttatcagtgttttatagttttcattatagagatctttcacttctctggttaattcctagttatttatgtatgtgtggctattgtaaatggggctacttattttattttatttattttatttttatatttttttgagacagagccttgctctgtcacccaagctggaatgcagtggtgtgaccttggctcactgcagtctccacctcttgggttcaagcgattctcccacctcagcctcccgagtagctgggactacagatacatgccaccacacct

SEQ ID NO: 41590 - DNA, 1657 bp, Homo sapiens
aagcccttaatcagcttaagtattagtacttgagtattaatccattccaaattgaacctaatgcctgttgccctaaagcagtggttcttaaaatgtggattcctgaatatagttgtcagataaaatatgggacatccggttaaatttaaatttcagataaacagtgtttttagtatgtgtacatgccatgtaatatttggggcacatttatactaaaaaaagtatttattgtatatctgaaattcaaatttaactgggcatcctgtatttttatttgctaagtctggcaactttatccctgaggcccttttaggagttgcctgagttcaaaaatattttctgataatactaagtgattaattgccatttttcactgtgttgacatttgcactgttggtgcagcagcattgaggagtagaactacttgtatcttagcaagaatcaaggcagaggcaataaattactagtagatgtcacaataaaaaaatgtttaatgccatttgaacttaagaacttcctttatgaagagataaaaattattaattttgttaacccttgaccctgagtacgcacctttttagtattctgtgtgacaaaatgggaagcacacaaaaagtgtgtctgccccatgcccaagtgtgatgaacaatcttgtgtaattgttcaagttggactgagctagccacttttttcaaagacaatatttatttgaaaggaatgacaactatggttatttagaagaaaacagttgatagtgtttattgccaatgaaaaaaattaaaactttcaagcaaaaattgaaattacggaaaactttgtcatcgtgagcatgatggcttctcagtacttaaaatctcttctgattaaatggatggcaacattcacaaatgtgagggccacacgcagcagctcatgcctgtcatcccagtgctttgggaggctgcggtgggagaatggcttgaagccaggggtttgagaccacctggacaatatagcaagaccttgtctctacaaaaaatacaaaaattagcctgagtatgatggcatatgccaagactcttagctactctggaggctgaggtggggggatcacttgagttcaagagttcaaagttatggtgagctctgatggtgccaccacactccagcctgggtgacagagcgagaccctgtctctttaaaaaatttttttggctgtgcacggtggctcacacctgtaatcccagcactttgggaggccgaggtgggtggatcatgaggtcaggagatggagaccatcctggctaacacgatgaaaccccatctctactaaaaaatacaaaaaattagccagacatggtggtatgcgcccgtagtcctagctacttgggaggctgaggcaggagaatggcatgaacctgggaggcggagcttgcagtgagccaagattgtgccactgcactccagcctgggtgacagagtgagactctgtctcaaaaaaaaaaaaaaaaatttttttgatgttgtataataacgtgccaatgtttagaagttctgcataactcagtgaactggcatttttcaaatgacttatatgtgatattacaaaattatgcatggctgaaagtccattctacatgcatgataaaccagtgaatgttaatataatgccacaaaa

SEQ ID NO: 41591 - DNA, 1033 bp, Homo sapiens
tctggttgagcacagctggaaggaataggcaattaggggaacaatatttctttagatagagtggttatctattcctgggagacagtattggaaatgagtcctgaataaagagagggtatcagttatgggaagatttggggaaaacattcctggcagtaggactagctattgcaaaggccctgaggtaagaacaaggttggcagtgtttacagactagtggggcctgaattactggaggagagtaaacaagggaaagtaatatgacagtaaggccagagagatagccaggggccagatcatgttgggcctaattgcactgggcaggcagccatgaagaactttaagcaaaagagggacgtgatctgattagaaaaagctaactcagcatgctgtgtgaggggggagaaaggtctgttgggagccgtggcaaaagtagagatagggagacaagttagaagacattgctgcttgtgactagagttcatagcagtgaagacagaattggtcatatttgggttctctgttggagcttgaactggcaggatgctgattaactagatatagggaaagagaaatccaaggtgattcctagggttttttggcctgagaggtcagtaaagatggggaagacaagtcattagaaggaatccagggaaacatttagtctttcctttactctgaagcaggtgtccttggagttaataataactggattacaaggaattctttgtagaaaatatcttgaacattttttgcctttcttagtaagtttgcccaattataaaagttacagcttttgggccagatgtggtggctcatgcttgtaatcctagcactttgggaggctgaggcaggtggatcacttgagcccaagaatttgagaccaacctgggcaacttggcgaaaccctgtctctaccagggtgtggtggcacattcctatagtcccagctactcaggaggttgagatgggaggatcactggagcctaggaagtcaaggcggcagtgagccactgcactccagcctgggtga

SEQ ID NO: 41592 - DNA, 1034 bp, Homo sapiens
ctactgtggaggctgaggcaggagaattgcctgaacccaggaggccgaggttgcagtaagccgagatgatgccactgcactccagcctgggcaacagagcaagacttcatctcaaaaaaaaaaaaaaaaagaaaaagaaaatcataaggataagaaaatatattgaccattcacatagtggaagtggatcatcataaaagtcttcatccttattgtctttatgttgagtagcagagggataggtgggtgtggtcttgctgtctcaggagtggcagaggcggaagaaaatccctgtacaagtggcccctgtacaagtggaccctgtacagctgtgtgtacagttgacctttgaacagaactgcaagggtccacttgtacagggatgtataagttgttctatgtgtgtatatatgtatacctatgtgtccggaattggtgggttcttggtctcactgacttcaagaatgaagccacggaccctcgcggtgagtgttacagttcttaaagacatcgtgtccggagtttgttccttctgatgttcagatgtgttcggagtttattccttctggtggggtccgtggtctcgctggctcaggagtgaagctgtggaccttcgcggtgagtgttacggctcttaaggcggcccgtctggagttgtttgttcctcccagtgggttcgtggtctcgctggcttcaggagtgaggctgaagaccttcgcggtgagtgttacagctcataaaggcaatgtggacccaaagagtgagcaacagcaagatttattgcaaacagcaaaagaacgaagcttccacagtgtggaagaggagctgagcgggttgccactgctggctggggcagcctgcttttattctcttatctggccccacccacatcgtgctgattggttcattttacagagagccaagtggtctgttttgacagggtgctgattggtgcgtttacaatccctgagctagacacaaaggttctccaagtccccactagattagctagatacagagtgtggacacaaagg

SEQ ID NO: 41593 - DNA, 1101 bp, Homo sapiens
agtgtggggcccaccaagcccacgcccactcggaactccagctggccagcaagggccctgggtagctctggttgccactcgcgcctctccctccacacctccctgcaagctgagggagccagctcaggccttggccagcccagaaaggggctcccacagtgcagcggtgggctgaaggtctcctcaagtgccaccaaagtgggagcccaggtagaggaggtacccagagcgagtgaggaatgtgagggctgccagcaagctgtcacctctcacctatacatatatacgtatacatatatatgattaggatcataatctagtttttctttgttttttgttttgttttgtttttttgagacagagtttcgctctttgttgcccaggctggagtgcagtggcgccatctcagctcactacagcctcggctggccttccgggttcaagcgattctccagtctcagtctcccgagtagctcggattataggcatatgccaccacgccgagctaattttggtatttttagtagaaacagggtttcgccgtgttggcccggctggtcttgaacttctggcctcaggtgatccaccggccttggtctcccaaagtgctgggactacaggcgtgagccaccgcgcccggctgtaatccagttttttttgtttttgcttttgtttttgtttttgttttgagacggagtctcgctttgttgcccaggctggagtgcagtggcgcagtcttggctcactgcaacctctgcctcccaagttcaagcaattctcctgcctcagcctcccgagtagctgggattacaggctcatgccaccacacccggctaattttttgtatttttagtagagagggggtttcaccatgttagccaggatggtctcaatttcctgacctcgtgatccatccgcctcagcctcccaaagtgctgcaactacaggcgtgagccaccgtgcccggccctagttttatattctaatttttgctttcagtttgtctctggtactaaaaatattagaatgaacacccttatacatagcaacctttgtttacatatataactatttcccaaggttaaatcctataaattgtat

SEQ ID NO: 41594 - DNA, 1025 bp, Homo sapiens
atttgattttttttgtgtgtgaattgcctgttcattatctttgcccaaattcatttacttttctcatttatttgtaagagctatttgtacattagggcattagttcttctcttgtcatatatgttaaaattgcaattttcctagtgtaccatttgccttgtaattttgcttagtatagtttctggcagaatttttaaaataaaagtttgaatataaatgtagtcaaatctttctcctgtgtttgttgttcattctacgccacttatctttagaaaatcttccccatttaaagatcagaataaccaactatattttactgtaattttacactttattaaacattaagtagagtgtaggctttaagtttcttcctcatggttatgaaaattttctaatcaacattagatattttcttgtttagcacctctagctttactatcaaaattattggcatttattttaaagattccgattgattcctcacttcaggttttacagacatttcaccagaggaattgaggcttgaataccataacttcttaaccagcaataacttacagagttatgtaagtttgtttcctattaatctactgcaataacagatgagctcttaattactgctttctttatcgtggcttgtgttttggcaaaaccgatgaggtctatgatcttttttcaggagtaggctatttttcttttctatattattttcattgaatttggttggttattaaaatgataatatatttttactttaataattaggaatattactatttttattataaattacccaacagtcaatcccagaaatgaaacccttttatcatttgacagatatttattgaacatctgttaggtaccaatccagtgatgaatgctagaaaaacaaagttaaataagatacagtctgtaatacagattaacatcctcatatatcaaatatcaaaaaaaattaaaaatcttgactagaataagttgagtacctgaaggaagcagtttaaatgctgtatttttctgtttct

SEQ ID NO: 41595 - DNA, 1157 bp, Homo sapiens
atgcacatttagaatgtaatgtatcgttttgcgactgaagaacacagtatgttccttgtcttaaacagaaatgcctttggaagatatatacccacctgtctccaaagatctatggtcccgactgtggcaagttcattatctttgtaaataaagttatgatgtttctacacccattaaaaagttcttaagaattttattttaaaataagatattcacatttataattttaatatttccaatttctcagatggtttctactctgtataaggatatgagagtaatgtctccctacacttagtgaatggttgacagtcccaacaccccacccctttcttaaatatgtgcttcctgaataactagactcttgtgcaagctaatttctttcatcttttagttcttgtaatgctatttgaatttagtgggacctcttggaagtagtctgtccttgtgtgagaggtggcccaccatcaccatggatgagagctgatggagaaaggataactgagtccaaagaactgtggaacttccctcagggctggaaggtccctgctccttgctaactgcccagggccccttccataggttagaatgtgggacaacccacccatagctgacttaacatgtatcaggagttcatgccttctttatactgaatggtaacccattgtatggatataatttgtttatcatctgcctgttaatgaatattacactgagggagagaaaccagaccaaaaaaaaaaaaatagtgtagaccatgtgattccatttgtatgaaactctggaaaagacaagtctcatttgtagtgatagaaagcagacagagtggttgccagggaccaggagcaagaatgcttttgagggctgggtgcagtggctcacgcctgtaatcccagcacttcgggaggctgaggcaggcggatcacaaggtcaggagtttaagaccagcctgaccaacatggtgaaacccggtctctactaaaaatacaaaaattagccaggcatggtggcacacgcctgtaatcctaactactcaggaggctgaggcaggagaatcacttgaacccaggagaggttgcagtctcaaaaacaaaagcattctttttttttttttttttttttttttgaggcagagtctcactctgtcacccaggctg

SEQ ID NO: 41596 - DNA, 1024 bp, Homo sapiens
gatcacctggattttcaggacttccagcttccttggcaacaggtcctgtcagagctccagtggccccagcctttggaggtggcagttctgtggctggttttggtagtccgggctcacattctcacactgctttttctaagccatccagtgacacttttggaaatagcagcatatccacttctctgtcagcctcaagcagcatcattgcaacagataatgtgttattcacacccagagataaactaacagtagaagaactggaacaatttcaatccaagaaatttactctgggaaaaattccattaaagcctccacctctggaacttctaaatgtttaaaagggcaattttaaatacaaaaaagaatgatgtttaaaattgctttgagtgattcatacagagatgtatatatgcatacatgtatatattcataaggaatataagcttccatcaatagtgattttaaatttgatttttttcttaactctaaatatttaagtaaaaagtaacaaaaactctgcaagcaagggaatttttttgtactgtaattttgaatggaactgaaaaattatgcacgaataaagtacttttctcatgccataccactttactgtctcacaatttaaagttttaaacttttttttttaggaaggagataatttctgtaattattagggggaacatgctcaaatatttaacctacttttagagtaaacattagtagcatgacttcatgttcaggattctctcaaagagataaatcagtttgtaaagagtgacaagcttttagttttagaaccataggggcatttcccccccgataagtttggttccctctcaactttggcggtctcgtggaccaccatttgagttttcttcaacaatcttaggctgctttttattttggcctcacttttatagaattctatttattcatcacattagtctgtcaaatggatgagttgtaagagaaacaaattgtgatctcatgtgaataaataatgtgtgtagtggggtcaggattc

SEQ ID NO: 41597 - DNA, 1024 bp, Homo sapiens
gataatctcataaatattttttacctaactacatatatatatatatatatatatatatatatatatatatatatatatatatatggctgagcacagtggctcacacctataatcccagcactttgggaggctgaggcaggcagactgcttaagctcagcagtttgagaccagcctgggcaacatgatgaaaccccgtctctacaaaaaatacaaaaattagccaggcctgatggtacatgcctgtagtcccagctactcaggaggctggggtgggaggatcacttcagccctggaggtcaaggctgcagtgagccgagatggtgccactgcactccagcctaggaaacagagccagattctgtctcaaaaaaaaaaaaagatatatatatatatatctttcaaatatctgtatatacacacaatcacatcatatgtgaaacttcaaataaaagtttaatgtgtaaatgtatataatcagatcaatctaaaagaagagattttctataagcgattgtcctggactctttgagtaatcagtatcatattaaaaataaaggcagggggtggaattctaggtcacagtttagtaaactttttccataaagggctgggtactaaatctcttaggctttatgggccacacagtctcgatcgcaactgctcaactctctcattgtagcgtgaaaacaaccatagacattacataaataaaagagcctggctgtgttccagcaaaaatgtatttacaaaaacaggtggtaggccagatttggcccatgggacatagtttgcctgttttacactaatggagacaaaatggacacagcaaccaaacgcaatttgagaatctacattggatcctagcttgaggaaaaaacagtgatgaaagatattcgtgggacaactggggaaacttgagtacacactggataccagatgatattatagaattgttaattttcttaaggaatggtaaaggtattgtggggattaacatttagtctaggttcttcatttcctgga

SEQ ID NO: 41598 - DNA, 1044 bp, Homo sapiens
tcctttggagtcggctttagaacttgggcgagcttttaaatttacagcctgtaatactccaagctgaagatcagaatatctaaatctttacgggaaaaaaaattagattttcataggtaacagttgttaataacccggtggttttatatgaaaactggaaggttcaaaataataattactcaaaaatgtagctctttcagtgactgatcttaggccacagtaattctcctaggcctcagtttcttcatctctcaactgaaggttgtggaccagatactgcctaagagcccttccagctcacaattctgtgacccgttatgactgagattcaatttaatatgctccaggatatcacctcctacccattttgtggtgctgtttttctttgcacagcatttctgtgattgtggtgtattgctccttttaagtattagtagaaagtcatttgtcactggtgtctggttctacttgcatatggttaatagcgaaggatgtatagtggctctgcgtaatctgagcaccctgaccataaaagttgagcggtgctatgatactactgcccaggttcaccttccaggaggcctttaccctgctatctgtaaaaacactttggatctaaacaccctcatggaggaacagtcagctgccggcatctctgggtgcatacacgtctatctgcttggccatcctgatacaaacaactatttgtgcatttcagatcatactggtcccaagtttgacatcgatatgatggtttcacttctgaggcaagaaaatgcaagagacatttgtgtgatccaggttcctccagaaatgagatatacagattactttgtgattgttagtggaacttctacccgacacttacatgccatggccttctacgttgtgaaaatggtaggatgctttcttttctcttttggaccattaactgagtggaatagtgacagtgcatcaggccaaggagcaacacttagagggtaaacccatcatacaaagttacagaagaagcccaaattttcagaatttgcatgaattcatttt

SEQ ID NO: 41599 - DNA, 1914 bp, Homo sapiens
tatctgttttaacaaaagaactgagcacatttataggatgacggggtcccattaacatgtcataaaggcagatgagatgaaatcagtggcactgaaacaacctggctttataaacagaaggtagtatctgcagcccctaaaggtgaaggaaagctgggatgaacacaagtgatggatgtaggtgggtaccaaatgctgactgagcttagctttttcagcctcagaggcaccttggtgaatgaatggggtgaccctctcagaagggctggggcaggagaattcaggagagaggtgaaagtgaataagatttagagggagaaatagtttccctaagttattcatcacagggcaaagtatagcaatgagaaatgagtaagaaagattaaaaaaaacaaacaaacaaacaaaaaaaaaagaccttcagcaagaacaggcttcccccatcccctctccctttaataaaccacctggctttttgcagtacaaacacctgaaatgtaaacgtgaccctcatgttaagatagaagggaaggacactgatgactggctgtgcgtggattttggtaagttattctggcgtattttacaggtaactgttggtactacgctaatcttgaattgttttcagttgcaaaaggattgagatcaaattgatgaatgtatttccaggtaagatttttgaagtgtgtttaaggtaacaaaagtttttttagttataatccaggtggtcttattcacatgtagaattttcacctaaccaaaccaaagtaccctagatgatgccctcctggaggaagatatatactacatggtgtgtatctactagccacacagatcaggaaggtggtggacaacaggataacatagtagaggcgggagagattccttagtagtggtagaggaaggtttgggggctgtggtgcataaatgagatgaggatgaggttattccaggcacaaaaaaggacaagagcagaagactagaattttgaaaagatctaacaactttgggtattaatgtgtacatagtttcaaagcacctcccaacaagataatatttacaaaggggaaacataactgtatgtcaagaactgaggagtctgagattttattctgcttgtaagctaatacattgtcccgccagttttcatggacactggtaaaagacaagactattagagggttagagacaaagaacagtttattactcacagcagtagccagcatccattttgcactggtttcctgagctctggattccatagggcaacatgggccagatgacaccagcacacacagttgtaaaactggaactcagatgagggtgtctaggttttttataactggcaggaagcaggcctacttttgctctgatggtttctcacttttgtcgctattaacgttttggaccaggtaattttgcatgtgggggaggggtgtctcttgtgcacggtacgatgtttagcagtatcctcccttctccaattgtgacaatcaaaaatgactctaaacattaccattattacctaattgagaaatgctgctgtaagcaaagctgccctttgccctggagggaggcagtatctttctgttaagaatattcacgatacaaacattcttggatagtcaaaacaaaaggcagtcagtgtttttgcacaaaagatgtgcagaagtgtgttacccatggagaattgtcaccgaagagaatcctgacaccattagtctctttgataaagttactatcaccagcaatgttatatattgacatatgcctcctgtaggtacactgagaaaggcatagcatcacttctgtggtatttttgctgggatggagtccacagtgatgctaatctgggaaccacacttgagaaccactgctttattcctagagttagccagtgtgtgttgtaaggta

SEQ ID NO: 41600 - DNA, 1029 bp, Homo sapiens
ctccacctcccagagtgctgggattacaggggtgagccaccgcgcttggcctaaattttttattacacagtatcaatgtattttattcctttgagatgatctctaatatcagtatatttaggtctctcctgttgagctggtcagataccctggagaagcacttcctgtctgttgctggagagtataggcctgtaagtgttctgggatctgagcgagagaaaaaggctgggcaaggaagagtgatctcagcactcactaccttcatttactcttccagtttccagtgtaaacccaggccctcaactgctctatccccttaagaaaatacatctcagatcttctgcagtgggggaggttttggagtggtgcacagaatttaaggatgaattgcttcatagaaaatagttaatgcatgctgggcttaatacctacctaggtgatgggttgacaggtgcagcaaatcaccatggcgcaggtttacctatgtaacaaacctgcacatctgaagaaacaggagtgtggcgtgaccatagggaagcaaaagaacacaaggaagtatgcaaccatgaagcgcatgcttaaactcagagatcagaggcttaaagaaaaggatagattaaaacctacaaagaaagaagaaaaggatcccagcgcattaaaggaaagagaagttccccaacacccttcctgcctatttttccaatgtaatgcacagctgggcccaccttactacatccttgttgataccaactttatttattttttcttttttttaagaaaaatatatttttattatactttaagttctagggtacacgtgcacaatgtgcaggtttgttacatatgtatatatgtaccatgttggtgtgctgcacccattaacttgtcatttacattaggtatatctcctaatgctatccctcccccctccccccaccccacaataggccctggtgtgtgatgttccccttcctgtgtcctagtgttctcattgttcagttctcacctatgagtgagaacatgcggtgt

SEQ ID NO: 41601 - DNA, 1045 bp, Homo sapiens
ctgttcatatccttcacccacttgttgatggggttgtttttttcttgtaaatttgtttgagttctttgtggattctggatattagccctttgtcagatgagtagattgcaaaaattttctcccattttgtaggttgcctgttcactctgatggtagtttcttttgctgtgcagaagctctttagtttaattagatcccatttgtcaattttggcttttgttgccattgcttttggtgttttagacatgaagtccttgcccatgcctatgtcctgaatggtattgcctaggttttcttctagggtttttatggttttaggtctaacatctaagtctttaatccatcttgaattaatttttgtataaagtgtaaggaagggatccagtttcagctttctacatatggctagccagttttcccagcaccatttattaaatagggaatcctttccccattgcttgtttttgtcaggtttgtcaaagatcaggtagttgtagatgtgtggtattatttctgagggctctgttctgttctattggtatgtatctctgttttggtaccagtcccatgctgttttggttactgtagccttgtagtatagtttgaagtcaggtagtgtgatgcctccagctttgttcttttggcttaggactgacttggcaatgcgggctcttttttggttccatatgaactttaaagtagttttttccaattctgtgaagaaagtcattggtagcttgatggggatggcattcaatctataaattaccttggccagtatggccattttcacgatattgattcttcctatccatgagcatggaatgttcttccatttgtttgtatcctcttttatttcgttgagcagtggtttgtagttctccttgaagaggtccttcacatcccttgtaagttggattcctaagtattttattctctttgaagcaattgtgaatgggagttcactcatgatttggctctctgtttgtgtgttattggtgtataagaatgcttgtgatttttgcacattgatattgtatcctga

SEQ ID NO: 41602 - DNA, 1043 bp, Homo sapiens
tacccatgattgttttgtagtgttaccttctgccagacagcctgccttggttctgtttttccacgaggtgaccttggacttggcctctggtaaatcactacattctccctctcttccacagttaaagggatgatagtagcttcctgctgtgccttataatcactgattatgtttagcatagttagaatctttttatacccaatatctttagcatacttaatagcatcatatacccttcttttgatttttgtgtgctatgaaataatcaggctaggtctatgtttttatgtgattcttttcccttcttaaactatttgatcttctcccagaataaggaagttaaagtagaaacagagcaaccttaaagtggtttattttctaaattggatccttcatttctatctcagtgatgatgccacctaccaaacatgtgaattagaccttcagcaaatgttcatttcaaacatttgtcgagtgtctactgtgtgatgaagcaccaagctgggtgagctgagagtaaaaggatagataggataggatctctgtttccaagttgcttttaggggttcaaggtctaagatagggaaggggttcttactgctagcaccttcagtgacagagctttatgggggaaagtattatggatgcacatataatattaatacaagcatagaattcccttaaagatgtcatctcatgacatgtaaacataaaattgtattgtgaatatagagaaaggaggatgtttggtgtatttgaaagaactccaagaaataagagttttgttctgatattcaatgaagtgattttatgtcatggagaaagatagatataatctcttagtctctttttttgtaatattaaaacagttgattttagaaaatttaaaagctctgtatttaataataatttagaacattgtaaagttatcatatagttgtttctcatttatcctgactttttctttaattgccaatttctaaccctgactgaaataagtgattagactgcacctttataattctcacacctcagtttaatgt

SEQ ID NO: 41603 - DNA, 1051 bp, Homo sapiens
atatctaaatttttctaaatatagaaaaggtacagtaaaaatatggcataaaaaataaaatgggccgtgtgcagtggcttatgcctgtaatcccagcatttgggaggctgaggcaggcagatcgcttgagcccaggagtttgagaccagcctaggcaacatggcgaaaccctgtctctacaaaaatacaaaaaattagctgggcctggtattgtgtgtgtgcctgtaatcccagctacttggtgagggctgaggtgagaggatcacctgagctttggatgcagaggttgcaatgagctgtgatggcaccattgccctccagcctgggtgacagagtaacaccctgcctcaaagtaaataaataaaatgttacacttttatagggcagctctgttacaatcttatgtggccaccattgtatatgcagtccattgttgaccaaaatgccttatgtaacacatgatttcatagggaaagaaagcctcttccttttggtcaatgaaagaaggtggagtgaagaaaggtgagagtaaggagaggaaatataagatgtttttgttctgatttcaggtatagaggaacctagggacagagggactccagatttttagccatgtggatacctagaccgaggaaacctcttgctggaatttggttcctttttgatgtggaaggagcccataattcccagctctctgggggtgtgggaaggcagctgacctgtgagtcagtgggccagtcatgcatctatcatagcagggggcagagctggaggtgggttccctaagctcggggactcaatagaggaagtgacaggtattgagggagtctgtacttatagtcggagcaagcatgaggctaccaggccctatcaagctgagagaccaacttattaaatacaagttgagcatttgagatcagtagcacatgcagccgccagagggcagcacaaggacgtgcgtgggccagagccccttctcccatgttcccacatgccccatggaagccactggggccaggagcggggagagactgagcaatcgtcccacact

SEQ ID NO: 41604 - DNA, 1217 bp, Homo sapiens
cagttgtttggccaaagtggctgtgggccgagcacaggctgccgcgggggcgttcgctgctgagatcgtgctcgcggattctcggtacgtttgtctgaaaccaaataggtgctggggcttttttattttggctgggtggagggtcagcaggggagtcgattgaggtatccgaccgtgtggtgacaggatgtggattggttggtagatgtttttttgcagaaggactttttaacactttactgggagtttattctcaatcctaccagtttctgggattgcagctcgagattacatttgttaaacttccatcagttgggtgtgcatctgtgtagggggtgggggtgaagcgagggagagaattgaagactgccggggaagctcagaaaattctccgcattacttataaacagccgggtaaggtcaggctagccacgttttattctttcctacgcctttggagagtgttggaattttactttgtgcttcaagtatattacaagtggtcttgtagtgtagctgagaacgtttggggtgcgttaaaatgcgtttcaattggagtatgatttagcagccatttcttcccgtgaaattttgcaaatcatttgtaaacttatgttggtcgaatataccaggcgaagtaacatttttagtaatgcggtatatagtttccgtatataggtatagcaacggacctcaagtaatattgcttattgtaggcatctactgtgcaatgatagggtagtgggtagtaggcctgattatagttatgtcttctgaggccttgttaacagtaaacaaagaacttttgtgggttgtgtcattttgaggtcatttgtaccttaaatctatcatatatttaaataggtgtttaaatgcgtgtttgcacgatgtgttactctttaaggtccatgtttccttcattctggactacggttacataatacacaaatggtaacacttttaattgctcaattttgtcctatggagactgcacaccatctttatgaaagaggtgtgtatgtgtccttactgatgccaccgaattcttgacatctggaatgtcaaaatgaattattttgcattctaggttaaatcaacactggaaaaattaaggtgtttaagcaagtctagtagctctatataagacagaatctttttttttctttaggccaactgttggatttttaaaaatgaatcatatttttaaacatttgagg

SEQ ID NO: 41605 - DNA, 1034 bp, Homo sapiens
tattaatttgtcatttatccctgcattatatactgttaaaaacattggaaggacgaaggacgttaactggaatgacgatggatgagtgtgggtactgtcatataggggaggggaaagagcagaggaacttttaaattattaaattattattattaaattagaggaactgagaaaataaagatactaatagtaaggaatatgttatttttaatttaaaaaatttttttagacagcatatccctctgtcacccagtcgagtacagtggcctgattgtagctcactgcaaccttaaatttctgggctctagtgatcctcccaagtaggtgagactacaggtccacaccactatgcccagctaattttttttttttttttttaatgtttttagagtccaggtctcactgtgttgcccagcctggtctcagaactcctggtctcaagccatcctcccttcttggcctcccatagtgctgggattacaggcatgagccaccatgctaagttttgtggggaagtgtggaaagtacgtggcttgattcttatcagaaagtttcactttacttttgtctgagtcttcctctctgacatcttcttttcaatttcataaaagaacactatagcaaatacatcttacaaccatgaccatactgtctctagaaagccagaatattatgaaacatttagtaggtgagcaagaaaagtggagtgattctgatgccagaaatagcaccgagctaatacagtttgatctatttgttatttagaatacaccagtgattctctaagggtgcagttttgccccctaagggacatttggtaatatttgaagccatctttggttgtcacacctggggtggggtgctactgacatctagtgggtagaggccagggttgttactaagcaattcattgggacagaccccacaacaaagaattatctggcgccaactgacagcagtgcgaagattgaaaaaccctggaatgtagagtaggcaggttcttccctggacatgtttggagacataggtcaatt

SEQ ID NO: 41606 - DNA, 1046 bp, Homo sapiens
ccagatatcatcctaccaacagcttacaataccatatagattcttactctttgtttcattgtgttcttatcttaagggtatatcttagacatttcaattagacaaatatttctaaatatttctacccatcttcatttagggttgcttttttctgctaagtttatttttctgttttaccagtttatctcttgaggcatcactctatttttaaataattgagggcctctgatgatgtatttaggtattctcttttacagcattttcatgtgcttcaagtcccaggtctgggttgagctagttcttgagtccagatttttttcatatactgtttgaacctcttctgattttttagtatataaaaagtttgaacaacaagacccttaagggaaaaactatcttggagttcttttagaatgattttattcttgcttacagataaagattgccatacgtataacagctacatacaaaaagactttataatggtttatagcactaaatggaaaacactgaaattctagaatgaaacaaggtttgcaagaacttctatttggctttattgttttggttaagcagagcaaaataattcatcataatatgaagataaaagttgaatgaatgtatcataattgagaaaggggtgtgtttttagaaaaacagtttattttgtccttatcccacctccatttgatgttgatgtaaacatattggccatttaatataaaatataattccagtctgcctatgtataacaactacactgtacaataaaaagagatggaaagcaaaagtatttctttactgtagtggtcaggatatgatttgtagatccaaattttgtgtgtgtgtgtgtgtttggaaaatttgggaggcaaagttctcaagtaagtgcagatcttcttttagtagatacttcctgtctgctttgtatacacatcaattatatcttcatcttccattttcacctgtacaggtgtttcattaattggcctcccatcacatccaaaaccaagttgcctcattgatagatcagttgttaacaatag

SEQ ID NO: 41607 - DNA, 1047 bp, Homo sapiens
tggtggcttagcgtagggggatagcagtgaatgggcaagggagtcagatggcttttcttcagtcacctccattgtgaccgaattgaagaaccagtttatcattggatctgttatgaattctaggtatttttgtaagtatatatataaagtattattttgaaaacagaccctatcaatgaaatttattctaaaattacatagttttgggattcaaattagaacatttgataaaatatctcagtgattctataatatttcacatttatgaatgtttattaggtgtgtaaaacattttcaaacaattttgattcattatactacatattttcttgtaaaataatgaagttttgacttgctttgttaattagtggttgggtgaataaaaatttactcaaagcaggactactacattgtgagagtaaattggcaacagtgctatttatttgagctctgtttaaaaaggaaaaaaaggactctccgtatatctagctttctcctgtgtgagcactacactttaacaaggatatttctggacatagtaggaagcatggactgtggtggggagagattggggattagtataccagttaagaggcttttaaagtagtctaggcaagagaatattagaaactctaaaccagacagtgaaatttttagagtggaattgtggtgaagattactttgagacttttatgaagtagaatgaaaagatttgaagaagaattagatgtctggaggttagggagaagaaaaaaattggatgattctgagattataagcatcagagaatgggtagttggtgatgtcgtaatataaatgagaggtagaatctgtagtcgcagtaggcttggttagagtcagtgagtagttttcaaaatggtaaattaaaggcaccatctttgggactccctggggaaaaacgtaaagaaggcagttgaagaaaggtgagtgctgtaactaatacttggaaattatcatcatatagaaactagatgaagcctcagaaataaatgagatcactcaagaaaagaatgaaaacctgagaga

SEQ ID NO: 41608 - DNA, 1056 bp, Homo sapiens
tgagcaagtctgaaaattatttttaactatcctcacacttgattgatggtttggcagggtaaagaattcctgggggaaatgtttttaaaggcatcattgcatcatcttctacctttagatgtcatcattgagccattcagaatcattcctgattcttgacacgtgatttttttcttttttctcagtattctgatatttcacaacaaaatatcttaatatgagtccattttcatctgttttgctgggtgctcagtgtactccagcaacttacatctttcatttctggaaaatgttaaatatttcattattgtttttctcccctccattttgtctctcctttctttccaaaacccatctggtttagatgccctctaatcaggttctctaattttcttctgtttttctactcctgtgcttttctactttttgtggtatttcctcacatttaccttccatgatttccattgaattttttctttctgcttttgtatttttattttctaagagctcttttgtttcctctgtaactatcttattctagtttcatgagtatgatattcttctttttctttgataatttttataactgtttcttttttcaacctgagtagtttttacctatttgtttattttaatctctttcatttactaggcttttctcagctatccagtatcccaagattcttagctcattaagagtgggggactaaaaacctgatgctctgatttcatgttgaatgtcactgtagctagtttgtagctgggttatttgggggtaatacctgatcttcatgtctgtgtctttcttgttgactggtcatattctgtagactatgaagaagacttcacatctgcctggaaagtaaagaccaagctgaaggcttcagatagtcaggagggagaatcaggtggaggggtttgtatcagcatttaataatcctgtcttctatattatttcattgtctttggtcgagaggtacctcttatcttactctctccagaaaataagcccctagttttcagttctgtgtagtggaggaaggtgggtgatatggt

SEQ ID NO: 41609 - DNA, 2184 bp, Homo sapiens
tgaagtaatagtggccccaaaccatctcaaagttttactaaattctggtagaaaataaaacttaaaaagaatttcagtaagatgaaataagcacactataccctaacttggcagagacagtgagctctggtcctttcagcttctgataagggcattcctgccaagatgggggctccaccctcatgacctagtctaaccctaatcacctccccaaagactccacctccaaataccatcccactgggaattagggttttagcatatgaatctgggagggacacaaacgcctaggccatagcactgatcaagcttcggttatcaccaactgagctggggccctggggaggtacatggggacagccccaggcaagaaggccacagagtcacactgttcttacctcaagctctagcagttttgccagaataaatgtgcctcatttttataacggcctttgggcaattttcagcacccttaaaagactgcctttgatgatgctgtccagttttatatttgcttttttgcagaggggaactgccaatctcttcatgccaatattatcagaaattgagtaatgtttgtaataaaagattttcaacattttactattactaaactttcatagtcacaactttgttatcaagtgaaagaaatcattgtgatatgggcaatattgtttctaatgatgaaattcattaggatgttcactgcagcatttcttgaagacatgggaaaaatagaaacaactgccatgttcctcagacgctaaataaactacactcatcctatgaatctgcaacaactaaaagaataacatggtttcatatgtactaatgtgaaatgttctccaaaatacatttttctgtgggaaaataagtttcatatatcactgatatagtaagatattacttatataaatacagtaacacattatgttttagatatttatataagtatagaaatgaagcatatatcttcatattttctacagatacaaatatgtaaatatgtaagaataggtctataaagacataaagaataggtctataaagacataaagaataggtctataaacacataaaaacaaagtataacatgcattacccctagggaaagagcagagatggaaagctggccaagttaaaaaggctcttgtctctatccagtaatacctgaaattttttacaaaattaatttatgtatacctgtgtaataaaacaataatttaacaaatggattgcccaagctatcagctatgtatatggaaagtcaacatcatgaggattcctagaagtttctatacaaattcacagagattaaagaaaaccatttgatgaaataaaattaagcacccttatataaaagattttattaggtgaaacatgcttggcatcatttctcaagtcatggatttgtcaacccaaagatgatctccttatatagaacatttcatcttttaaaatcccatgacttatatgttagtttgtgctttttatcatggatttctttcctagtagtaagccatttcagtatgtgtcacattcaataatatcttttaataactttaacaggtgcatttcaagttacaagatttctttatgcctacagttaagaattactatgaatgaaacttattaacaattactcttaattctttaaatcgtcatcttatgaatcaagtattttctgctagaaatactttaccctaattacaaccttcatagattgtaaaaaggaaacagactccaagacactgtggcaataaatggaaataatttgtcttccacagttcttttaagaagaaaatgattttataggtgataggagagggccttgagatactatgtcaaagtgaatttaagtactatctttatattttgagctctggcttttcatattctagcatttgttgttgagattagtttttcactgacactttgaaaaattagtcagaaagagatggttgatgagttgcagaatatagataaaatagaatagcatttatgtttttagtaaagtaggcatttaattaggtttttttttgtttcattttgtttttttgagatggggtcttgctatgttgcccagactggttttgaatttgggcttaagcaatcctcctgcctcagcctcccaaagttctaggattataggaatgagccactgctcctggcctatttactttt

SEQ ID NO: 41610 - DNA, 1050 bp, Homo sapiens
aagtaatgatgtcccagatgtggcctagttgttggggatgcaaagatgatttctgcactcataaaacttagagtttagaaaggaagttgcacattaaataccaaaaaatttaattatataggtttatcagaattatgaagtatagagtactatgaaagtatgtcttaggagaagttatcctaattagggcagttagggacattgatattttgcccttaaagaatgagtgtgaattaggtatgcaaagatggttgtgtataggtggtggtaagtgcagggagggttttgcatcagggctggggtaatactggtatgtttaaagctgtgggagtggtgcaaattgaatctagcaatatattaaaatgcttataagccataaaatcacattttaattcctcataagttatatgtagataccaggctgttggggtagtctgggtacgatatgataatggcaaggactcattagggggtgatggaaagaaactgatagattctagattctagaaatatttacgaggtagaatttactgcttctttgctgtgtctgtttctactcctaccacttttaagctttgaaatacttttgaatatttttgtacagtgtttctctttagctattccctttgttcatgtggttttttgccttaatactttgctgctgttttaatagagattgtgaagaaaaagaatataaactcaggtagtcaatctaacatattttactgaaccctaggcccactgatttgaaatgtcacctttattgtatattgtttcatttaactactctgaagatttgtctgttcctatgataatactgcactatttgaatatacagtgtttttacagttgatagcaggtacctccttgacatttatgctttcctaaaaaatcatgttggctagttttacgtactttctttttcaggtaaattttaggataaatttacccaaaatgcttttgggatttctattaggatttattcatttttttttaaagaataatttggagagaattggcatttttacgttattggatcttcttacctca

SEQ ID NO: 41611 - DNA, 1044 bp, Homo sapiens
gataattgacattttcttagaaaatcacctacttgactagatttttaaaataaagttgttcattgtattcttaaaagagatttaaaaatctctatacctacagttattttctcatctcgtttctaatgttatttgtgtcttgcctttttttaattaattgacacattaataattgtacatatttatggggtacttagtgatgttttagtacatacaatgtttagtgatcagatcaggataattagcatatccattgtctcaaacatttttcatttatttgtgttgggagcattcgaatatcctctcttcagccgcttgaaaatgtatactgttgtcaactatggtcaccttatggtgctataaaacactagaacttattcctcatatctagctgtaattttgtgtcctttatcacatctcttcctaccccttctttccccctattcttccctgcctctagtaacctctgttctactttctacttctgtaagatcaacttttttagcttccatgtaagagtgagaacttgtgatgtttaactttctgttcctgatttatttcacttgatatcctccagttccatccaggttgctgcacatgacaggattttattcctttttatggctgaatagtattccattatgtatatataccacatttgctttattcatttatctgttattggacactttgattgattctgtatgatgactattatgaatagtgctgcagtaaacatgggggtggcacagatatctcattaatacactgatttcctgtactttgaataaattcccagtagtggcattgctggatgatgtggtagttctatttgtagattttaaggaatctccctactgtcctccattgtggctgtactagtttacatttccaccaatagtgtaaaagagttcctttttctccaaatccttggttaaatttattcttagggttttttttcagttattataaatataatagctttcttgatttttaatgtgtgttgtttgtgtatagatatactactgatttttgtgtatttgt

SEQ ID NO: 41612 - DNA, 1583 bp, Homo sapiens
tttaaaaatcaaaataatatcaagtatcttatctgaccacaatgaaataaaactagaaaccagtaacaagagaaacataaaactgtacaaaaacatggaatttcaaccacatgatcctgaatgaccaatgaatgaagaaatttaaaaggaaatttaaaaattccttgaaacaaataaaaatagaaacacaatatatcaaaacctgtgagatacagcaaaagcagtagtaagatactagtttatagcagtaaatgcctgcatcaaaaaaggagaaagatttcaaataacctaatgatgcatctgaaggaactagaaaaacaagaacaaaccaaactcaaaggtagtgaaaggaagaaaataataaggatcagagcagaaagtaaagactaaaataatacaaagtcaacaaaagaagttggttttttaaaaagataaaatcaacaagaaaaaaagagcaaatccaaataaaatcagaaacaaaacatgtcataactgatattacagaaacacaaggatcattgaagactattaggaacaactatatgtcaatacatttgaaaatctagagaaaatagataataaattcctggacatataaaacctaccaagattgagtccagatgagatagaagacctgaacagaccaacaatgtatgatacgactgaatcagtaataaaaaaaaagactcccaacaaaggaaagtccaggactggatggcttcaccactaaattatcttctcaaactattccaaaaattggaggggagggaattcttctaaactcattctacaaggccaaaataaccctgataccaaaaccagacaaggacatcacacaaaaagaaaactacagaccaatatccctactgaacataaatgcaaaaatcctcaacaatattatcaaaccaaatccaacaacacatcaaaaagatcatacaacatgatcaagtgggattacagggatgcagcaatggttcaatatacacaaatcaataaatgtgactcatgaacagaatgaaaaataaaaaccacataatcatctcaatagatgcagaaaaagcgttttgtaaaattcaacattccttcctgataaaaactcaataaattaggtagagaagaaatgtaccttaacaaaataatggccatatatggcaaacccacagctaatatcccattgaaagctgaaaagctttgagcttttcctgtaaggactggaacaagacaagagcatccactctcaccagtcttattcagcacagtactggaaattccagcaagagtgacagaaaggagaaagaaataaaagccatccaaattggaaagggagaaatcaaattgttactgtttacatatggcatgatcttacaataaagaaaagcctaaaagactctacaaaaaaaactcttagaaatggtaaattcagtaaggtttcagaatacaaaataaatacacaaaaatcagtagtatttctatatacaaacaacacacattaaaaatcaagaaagccattatatttacaataactgaaaaaacttttaaagtctgttttatctgaaatgaaataagtgtagcttttggttttc

SEQ ID NO: 41613 - DNA, 1034 bp, Homo sapiens
aggtattgctaatttgttactattgctaacagtattttggttatgttgtttaaaaggagtgctgatctttgagacatatacattgaaataggatttctggaatttgcttcaaagttatataaggtagaaagtatataggagtgtgaaacaagattggccatgagttgctaattgttggagctgatcattgtgtggtttattatattattctgttttcttcacatatgtttgaagttttccataataaaagctaaaaataaaaacaaatgtacaatgtcaaaagaaagaaaaataaataatgggaagtactgctaaccacatttatagccacaggacaaaagtacttttaaaaattgattctattgttccctgcccacttaaaggtaacttgttgaccttaagcaaaattactaagtagcttagtttatattctttacttcttatgtcatctttcttcatgttaatccaatacttgttttccttctcctttgtcaagtgcacattgtcctcttgttcgcttctttaccttcaaaaattgtcagtcatccatgaaacccccatggatgaacctgtccaagttaacatacaagagaatgctttgtgagggagatcagggatagaagacaggaaataggtctgatagagtattagaaaaatatttgaatatttagaaaaatactggtaaaaatgtgagaagcttgttggaacatttggaaaaaacttaagagttccatatgaaaaacactattgattttgtttttaaaaattgagagtctgaagatagggaaagtaaaagctgaaacctctagtattctaacagaaaatagataatgtccaaaatgggtcagtcacaaagtagcaatattagcatattatccagaaagaagagaaactacgaacagatctgattagaagaaacaattaaattcctagtaattacttctgggagtaggataagttgggagaagggtaagcagcatggaacagaaaactgtattttataagccatttagtactacaatctgacttttaac

SEQ ID NO: 41614 - DNA, 1050 bp, Homo sapiens
actggtgggagtaaaaatttactgattttatgccattgatgttggtctttcagaggattatcttgttcattattcttaacagttgcaatggttggatgacttttgagcaggtaaggtgctactgtactcttttgatgataaaaatgaaataaagcaaagagttatccaataatatgcaacattcaggcagattcttaataaggaaaaacaatggtagttcagtattcctataatataggttaaaaaaaatcccaggaataggggaggaattccgcttccaagaaagaaatagtaagtcacagcagcctagcactctcagtataacaaatagaaggaaaaaagaggcacacattgctagatatgcagagaggcagaaatatctggccactaatcatgagaaaaacaacagaggcagtcccataaatggttcttttattagcatttatacacaaggatttgaaaataacttattaatgtacttttagtagaagaaaagggaaaaaaacatgtaaaatatttttagaaaatcagaataaaaaataatcaaatgaacattttaggatcaaaaatacagtatctgaaattagttcactgatagaagactagacacaacagaagagggaataagtgaatttaaagataggttattagaaaatactcaagcaaaaactaatagagaagaaagaatgaaaaaaagataacaatatgtgaaacatactcaaaatatctaatatatgtagtttgtattccagaaagaaaggagagagggaagaagaaatataggtaaaccctatacttttgcatttcactttattcccctttgcagttactgcctttttaataatcaaaatgggcaaaataaccagctagcattataatgacgggatcagattcacacataatattaaccttagatgtaaatggctaaatgccccaattaaaagacatagaccagcaaattggataaagaatcaagacccaccagtctgctgtattcaggagacacatctcatgtgcagtgacacacataggctcaaaataaatggatgg

SEQ ID NO: 41615 - DNA, 1024 bp, Homo sapiens
agatagctagaagagaagattgtgaatgttggcatcccaacgaaataaatatttaaaataatggatatggtaattaccccatttgatcattatactatgtatatacatgcattgaaacgtcacattgtacaccataaatatgtacaatatgtatcaattagaaatataaaattaaatttttaaagataggttcctaaatttttctttctgtgaatttctttgctgaaactcttcacccagttctcttaatgagttgttgatctttttcttattgatttgtagaagtccttcgtaagtagggaaattagctttctgtcttgaatatgatttgtgttttgaccctagtttgtcatttgtattttgactttgtcgatttttgatgagaaatttaaaacgttcattaagttaattttattgggccttttttgaaataatgtatgtatctttcagattttgtgttatagttagaaagatccttcccactcaaaggttataaaaaggttattgtgtatttcctctgaatactattaaagccaagcttttaaaatgttgttttttcttttaaaaatttaacagattcccttttctggttttttgacatctgtgtggttctcctgattctacagatatatctaagagaagctcagcagtgctatttagaagtttcctgagtaccttgatatgtaacttatctaatctcggaatttgtattttggttaactaggcaatttctgatatgttctttactcactagagaattccattctgatttacttacacttactcatctttttttttttttttttttcagagcaaagctcatcctttttgatataatgtatgcagaaacaaaatagaaattgagttctccattctctctgtctcatttctactttctgctcaaaaattcttttttatttttgagtattagtgagcctgtgttgatcttgagttttaggtctctagaataaaagaagagggtggtgcttgatcacagccaaacttatttcccatttacttagct

SEQ ID NO: 41616 - DNA, 1026 bp, Homo sapiens
tggcattttctagtctaattttttttttttttttttttttttgagacggagtctctgtcacccacgctggagtgcagtggcatgatcttggctcactgcagcctccgcctcctgggttcaagcaattctcctgcctcagccttctgggtaactgggattacaggcgtccaccaccatgcctgcctaatttttgtattcttagtagagatggggtttcaccatgttgggcaggctggtctcgaactcctgagctcaagtgatctgcccatcttggcctcccaaagtgctgggattacagacatgagccactgtagtttaatttttttaatctaaatctcataaaacttcttcctctatttcaattacttttggtcttttgatatttttctttttgtttagtaagagttttttcttctttctcggtatttcatatgacttttagaatttcttcttttaaggtctttctttaaaatcttgcttaatatatagctttcttttccacttaagaacttattttactcctgtgaattacctagaaaaaatagatttaagcaagaaaaattgtcttttaaaaattagaatgttttatttggactctgaaggatccactctatggtaaaaataacatctaaagtatgatagtttaggtatctgaaaaagtttagttgatactgttaccacttgaaatgtggatttttctttagcaatccttgaaatggatcttaaaatataagatttgctatcttacatggttttgtttatgaattaaattttgataattacgcttttcctgtcttcagaattgtatagcaaccatttatcagaaaagcaaggaatgcttaaaagttggagccgcttagtgttcattctcaatttgaacttaacactcggctttactcctactatgaaaggatgattagaattactttcggccgagggcggtggctcatgcctgtaatcccagcactttgggaggccgaggcgggtggatcacgaggtcaggagatcaagaccatcctggctaac

SEQ ID NO: 41617 - DNA, 1382 bp, Homo sapiens
tttgtcaatattggcttttgttgtgattgcttttgatgtctttgttgtgaaatctttgaccattcctatggccaggatggtattgcgcaggttgtcttctggggtttttacatttaaatctttaatccatctcaagttgatttttgtgtactatataaagaaggggctgagcttcaatcttctgcatatggctagctggttatcccagcaccatttattgaatagggagtcttttccccgttgtttgtttttgtcagctttgtcaaagatcagatagtcatagatgtgcagccttatttctaagctctcttttctgttccactggtctatgtgcctgtttttgtaccagtatcatgctgttttggttactgtagccttgtagtatagtttgaagttgggtaatgtgatgcccccagctttgttctttttgcttaagattgccttggctattcgggcccttttttggttccatatgaattttaaaatatttttttctagttctgtgaagaatgtcattggtagtttgataggaatagcattgactctgtaaattgctttgggcagtgtagccattttaataatattggttcttcctatccatgagcacgggatgtttctccatttgtttgtgtcttctctgatttctttgagcagtgttttgtaattctcattgtagaaatctttcacctccctggttagctatgttcctaggtaatttattctttttgtggcaattgtgaatgggattgcctttctgatttggctcttcctttggctgttgttggtgtatatgaatgctagtgatttttgtacattgattttgtatcctgcaaaatttgtatcattcggaaggatacaaaggactttgtatccttggctgaagttatcagctggaggagcttttgggctgagactatggggttttctatatatagaattacgtcatctgcaaacagaaatagtttgtcttcctctcatcctatctggatgccctgtatttgtttctcttgcctgattgctctggctgggacttctaatactatgttgaatagaagtggtgagagaagtcatccttgtcttgtgctggttttcaaggggagtgcttccagcttttgcccattcagtataatgttggctgtgggtttgtcatagatggctcttattattttgaggtatgttcctttaatacctagttaattgataatttttaacatgaagggttgttgaattttattggaagccttttctgctctattgaggtaattatgtagtttttgtctttagttctgtttatgtgatgaatcacatttattgatttgcaaatgttgaacagaccttgcattctggggatgaagcctacttgatcatggtggattagcttt

SEQ ID NO: 41618 - DNA, 1118 bp, Homo sapiens
tcttcagggtaatgaacatgctgctggacaactggcactctggaagagcctggtcagctctgtctgtaactgtgctcttcaacagcaccatctcctctcaaagtattttctttcacttgtgattgcttgtttgatccattggttatttgggagtatattgcttattttccatatatttttgaatttctaaaattttctgttataaaattaaggtgatttaactttctttatatattacaaaatgatcctaagataaaatagaaaaacattgttattttagggagatgggctatgttatgcatcctgttttcaatttaacattgacatcttgacatcttgagcttagttaacaaatgaagtattactttgttgattgtgtcttcattatttgaagagcagctaaaattgagaattttgcctatcataaaaaattacttctaaaaaatcacattatgtagttgcgcagtatagaagtctaaggaatcagttgtagtcaaaccttcatgttctaatttctctgttctagaaatggaaagcagtttaaatatgtggcaacgtagattgttttttgaagtgttagtagagaataggattgtagttaaaattcacttgtaaactaaagaacatttctctaagaattaagattccctcagcatggaggtagaggtaatacatgtgcatatacatatttatttcaagcagcgcattcccctatatggtttcactgtaggacttcaccgaaaaaacattaatttttaaaattaatgttcacaatgttgaaccaagtcctattatgcatttatttggggagttacaagttgccttagaagtttttttatttttttatttttttaaggtttttttttttcccctcttattattatacttttaagttttagggtacatgtgcacaatgtgcaggttagttacatatgtatacatgtgccatggtggtgtgctgcacccattaactcgtcatctagcattaggtatatctcccagtgctatccctcccccctccccccaccccacaacagtccccagagtgtgatgttccccttcctgtgtccatgtgttctcattgttcagttcccacctatgagtgagaatatgcggtg

SEQ ID NO: 41619 - DNA, 1025 bp, Homo sapiens
atcctgaagttttatgtacatagatagcagttcattttttaaatgttcgagttgccatatattatgtatgtgtgtgtgtgtgtgtatatatatatatatatatatatatatatatatatatatacagctatgtgtataatatgtaaaattctcccaaaatgtatgaatataaaactgaatgtattcattcatgtaattataactagcattctaaaatttttaattactcccatttctttgacattctgaaactttttttagattgttttaaaacgctctggttccaccttgaagctgataatctttctgaaaaatatatgagaaactcagaaagtagtcattattataataaatttaattttcttagggaaaaagggcagggttctggatggaaacccctttggaaattcttatttaaacttttgaatgaatctttaatatgattcaggctgagattatgatacctgcccttgtcttatttcaagaggtttgctgtgagaattcatgtaataacatctgtaatgtatttggaatttttgggagaaattcattcttttaaataatgggattattgtatatagtacaaatgaatactcacaaaatttaagaatacatttgactaataattgagcatcttgtcagtttttatgcaagcatatattgtatacctgaggaagatgacagttctataatttttttaaggtaaggttatttttaaattgcatttttgttctaacgttttgcaatttatattctttttaaaatatttcccataattcatcatgctagcttctgtgttcttggaatagtttttgaaaaatgcagagattcgaacatgagtccttaatatactaaacagtgaaagaatgatgatatctcatttctaaagtaagcatggttcacaccactttggcaatacactgcagtactttttaaaaaatattctctagtgataaaagtaaagacagggtactggccaagatcctaattctgacttctgactgtgtgatcttcgatgaaattta

SEQ ID NO: 41620 - DNA, 1078 bp, Homo sapiens
cagcaacaagtgcaatttctccatgttatgttgagctctgttggagcctatggtgagtatttgatgtgaaaaccttgctgtgggaattttttattcttccttttccccccacgccagttcgttttggtaagtcttttatttgaacacaagacgcatgcttttttaaacctctagtttttgaagtaactgtagaagagaatctttaaaaaaaaaaatggagggcagaatgcttgttagcaatctgaaaatcaaagctgaacaagctgcttaaagtttctgattaagaagtttaaaaagaaaaattaattgctactgctttccaggtaattgtattattagtttctgtataaaagaaacattattgctgttgtataaataaaattttcctgtggtacaattaagtattgatttttcagaaactgtccctataaatcttttcacatatttccatgtgctgtccaaaacaaaaattattgaaatgtctaatctgtgagattatatactcctggtaaaatatttttgtatatataaagaaatatttactattggaaaaaagtgtttcatttataggtagaactaaggtttagagataataatggaggatatctgattagcgttgataattttttttaactgtttgcattttttaacttttaggtttgggggcacatgtgaaggttttgttacataggtaaacacgtgtcacaggggtttattgtacatattatttcatcatccagatactgaacctggtacccaatagttatctcttctgctcctccccctcctcccaccccccactccagtagaccccagtgtctgttgtttccttctttgtgtttataagatactatcatttagctcccacttagaagtgagaacatgcagtatttggttttctgttcctgtgttaatttgttaaggataatggcctccatctccatccatattcctgcaaaagacatgatctcattcttttttatggctgcatggtattccatggtgtatgtatatatctcatattttctttatccaatctgtcattgatgggcatttaggttgatttgtgtctgctatt

SEQ ID NO: 41621 - DNA, 1069 bp, Homo sapiens
ttaaaatgtccatactactcaaagtaatctatactttgtagagattcaatgcaatccctacaaaataccaatgatgttcttcacagcaatagaaaaaaaactaccctaaaatttatgtggaaccacaaaagatgcagaatagccaaagctaccttgagcaaaaggaacaaggctggatgaatcacattacctgactttcaaattatactgcagagctatagtcattaaaacagtatggtaatggcatataaacaaaaatacagaccaatggaatgggatggagaatccggaaacaaatccatacatttatgttgaactcattttcaataaaggtgccaagagcatacattggggaaaggatagcctcttcaataaatggtgctgagaaaactgtatatccctatgcagaagaatgaaactagaccctatctctcaccatatacaaaaaccaaatcaaaatggattaaacacttaaatctaagacctcaaactatgaaactactataagaaaacacgagggaaactctctaggacattgaactgggcaaaggtttcttgagtaacatcccacagacacgaaccactaaagcaaaaatggacaaatggaatcatatcaagttaaagacttctgcacagcaatgaaacaacaaaatgaagagacaactcacagaatgggataaaatatttttacactacccatgtgacaagagattaataaccagaatataaaaggggctcaaacaactgtagggaaaaaaatctaataatcctgttaaaaatgggcaaaagatctaaatagacatttctcaaaagacgacatacaaatgtcagacaggcatatgaaaatgtgctcaacatcattgatcatcagggaaatgcaaatcaaaactacaatgagttatcacctcaccctggttaaaatggcttttatccaaaagacaggcaataaaaactgctgataagaatgtggaaaaaaagggaatgcctgtacactgttggtgggaatgtaatgcaaattactacactatgaagaacagtttggagattcctcaaaaaactaaaaatagag

SEQ ID NO: 41622 - DNA, 1462 bp, Homo sapiens
caatcccaatacgtatagaaaggtgcacagaaaggactaatgaataaagttagcgcctgtttaaccactatccaggtggatcaatagaccattttaaatgtgtacttttccagggtgaagactgaaagggactagacaaagaagacaactaaacagagagagaacagcagcccctattctggatgcaccgcgagaggacagccttccttggccacctaggcctgtctgggggcatcttgtctacccacccaccagtcttggaaaacaatcccctggcccttattaccatctccagtcaaattattcccttcccatatttatgattctctctctgacctctacccagtcattcaattcctcatcatataattccttatctctgacttcctgataaggtcagtggacatgccctttttaaaatgataaatgtctgatctcatatctgaactgtcagccttctcacatctccaggtttctactattctcttttgtaatccaaacaaaaaccaccctaaaaatagtctctgtgtggtggctcacatttgtaatcccagcaatttaggaggctgaggcaggaggatcccttgaggtcagaagttcaagaccaacctgggcaacaccagctaccctagaggctgaggtgagaggatcacctgaacccaggagtataaggttacaagtgagcaatgatcatgccactgcacgccagcctgggtgacagagcaacaccttatctctaagaaaatataaaaataataacaaataaaaataatgattttaaaaatagtctctatcatcaccatttggtaaggagacattaagagtccactaggaacctcacacttggccttttccattgtcctgacccaaggctctcctgggctcccggctgcccttcacaggggattcaaacccaccggcagtctgaaaggcttctttccatccactcactgccccaacacccatacttcacctacacttcttccactgcaatcaagaaaacccactcctcaaccagggttaatcagaagtaatcaccattcaatcacctttgaaatttataaaacagagaatcatctcctgtaccaccagcccaaaaataagaatggtgtaaaaatttatcctattcatggactttttttgttaatatctcatggaaaacaaacattttgggcaatgccttgggaagaagggcagagcagagataaagaggttaggattctatccctactctaatattactaaccgggagaatttgggtaacattcatttccctgaacctcagactttcatgagcaatttggagataattaatgatagctacctgacgggttctgctgcgggtttatatatggaaagcatgtaaggtagagtctcacacatagcaaaggctcaatctctccactgtgtttaggccacagaaatatcattttctaataaacaggacagtcctaggttctac

SEQ ID NO: 41623 - DNA, 1032 bp, Homo sapiens
gccccatttcgagacaaagcgcatttccccctcccctcccccacccgcgttccggcggaggcgccccctcccccagccgccacgcggggctgggtcgagacttgggcctcccggagggcggcgcgtggtcccgcgtccgcgaggcctggcggcgcgcggccggctgtcccgaggctgcggcgaccgcccagttaacgtggccgccgcgggggtaggcgcgtgcggtgtggcgcagtgcccttgagcccccgtgccgcggcctttgtttctccccgcggatgcgctgaccacgaggcccgcgctcccgggtgggggcgggcacccgcgcttaggcctctggacgccgggcttcagcggcgggggtcgggagcgggtgtttgcaagaggtgattcttttttcaaagtgtcacgaaacggggttgaagcatcttaagttttttccttttgttatttaattaccgattggaaagagggagggtttctgagcagaaaccaagttgggattgcagaacagagaagattcacagtgctttaccgttgtgagttgtttgggtaatcgtgcctggttttaaaccgaaaggattgtcctttaaaaatggaacatggactttattataaatgggacttagattggaaaagacattggtcccctattttaagccatgtgaagctgttttaggtaccaggatccccagtaaagtctttctagactcacatggttaggacacgtacttaagtacatcataagcaatgtaggtaggagcgcagatctactctggatttgtattcacgtttgaaatgtgcgctctctacttgggggttggaatccaaacagaatttgtatttagttaccttttttgtgtcatgcaaacttaccttaactgtcatgcatttttctagtaatagctcttcaagtctgcaataaaaaatggcctccaacaaaactacattggtaagttaatgaaaacctaaaatatgtaaggatttaactcaagttttttttccccacagtataactttgcatctctgtgg

SEQ ID NO: 41624 - DNA, 1026 bp, Homo sapiens
ttctcagcccataggatcttctgattaaccatttcagggttttttttcccccatttttaatcctctcataaaaattttccccatttttagtcctctcataggaaatcttgagccattggaaagagctggttcacgttggtttcctgcttctcttaaatagtgtcataccaaagaaaatgcctgtttaaagtgaatttggttaccagtatagactttctcttgagaaaccaggaaggaaggatttttttcaccttagggaattaaaataaatttgtaatgttggtctcttgaagtgatagctttatagttttgttctaagtggtaggaaatattatctacagagattatggaaaaataatcttgtcctttaattgaacctcctagtggtctctatagttgaccctgcagttggtatcaggattttgaaccatgttttcattctgcatttatcttttctctgtatcattgatgcttttgacattaatatttgaattgagaagggggctggggcttttaccatctgggggtggatacaaggtctgtcataggttcacctaagacctgtcactactacttgcttctctgtatcaccctttaggtacttcctgcatagttgtttgttgcagtgttgttaaaatgagtgaaaattagtaaacttggtcttttaagactacagggccgggcgcagtggctcacgcctgtaatgccagcactttgggaggcccaggctggtgaatcacttcaggtcaggagtttgagaccagcctggtcaacatggtgaaaccctgtttctaataaaaacacaaaaaaaattagcccggcatggtggcatccgcctataatcccagctactctggaggctgaggcatgagaactgcttgaacctggggaggcggaggttgcagtgagctgagatcacgccactgcactccagcctgggcgacaagagtgtgagaccctgtctcaaaaaaaaagactggaaaaaaataactgtttccagatagtgtttttttattgtattatttt

SEQ ID NO: 41625 - DNA, 1966 bp, Homo sapiens
cggttgacatgaacaacttcgacttgtaactgaatttttctttttcttaaaacaggaaagattcagatgaggcagacttggtgctggcgaaagaggcaaatatgaagtgtcctcaaattgtaattgctttttatgaagagagactaacttggcattcttgtccagaagatgaagctcaataattgttcacattgttcttttatatatatttatatatatatataaaaattgggtcttagattttgatttactagtgtgacaaaataactacatcctaatgaaaatcaagtttgatatgtttgttttgaaagtagcgttggaagagttgttgggggttttttgcatccatagcactggttactttgaacaaataaataaaagctttctgtagttgcttcctttatcagaaaagaacatttgataccatggtatatcatttcctcttcattaaagaacagcttttctaaatgttgggggaaatgtccatagtcattactcagtcaaaacttgtgttctcatgagcctaaggaccattctagatttattacgtgttttttgtgtgtgtgtgtgtgtgtgtgtgtgtgtgtatccataaaatgcatatgtaaatttttttttgtttttaagcattcacccaaacaaaaaaatcacaggtaaacccatgtttctgagatgccattattccaagcaaaataagagataatcccttcaagttaaattgaaaattttcctgaaaccatacatttcaagtgaaataagtaattctagataggacaatttaaattggataattttaaagtgtctataattgcagtggtttatttgcaaaattcctaaaaggaaaaattttatcactgccatcacagcaggtttcctcatccagatgaggaaactagacaaatgctagtgtgttttaactagctaaacaaaactaagttaaatgaacatttaaaagtttccctagcgggccattccttagcaaaatgttggaatccctgttgctacattgactaaaaggtcatgatgaatggaatatgtaagacttggctcatagaaacctaatcagatggttagaggtgttggcagtttaggacctgctgtcataaatgtgtgaacaaccttttgtaacctaacctattgacctgcatgttttttctttaccccaattcattacatggaggctcaatcttgagtttgctttactggttcagcaaaagccaggaagaacaactttgtagtaatcaaaatgttatccaactgtatattgtttactttattgtaaatactggtgaacagtggttaataaatagttttatattcctttatgcaattattagacttttttctttatttgatatgcctttacagtagaaatagaaatgcccacactcattggattatctttgtttataagttagatgataccagtaaggcattacagtacatatcctagatcttttgagcttacgagttttaaacttgaatatgtatttccacaggaatgtttccacagttgggaaataaaagtttcatgtgatgcctagggtcaattgtctcattaaaatgaggttttaaattctggtttgttgtaactgtcttctaaagaatgtaaagtattctgatagggctcagtgtgatgatagacacattttaattgatttccaaaatccatacagaaaaaggtaaataactgatgtttattaagtacctccttatatatatatatatatacccaccactgctctcagcggtgggttcacagatgatagagaaccttctattcatattagtagttggtggccctacattcaattttactaagggcatttctgaaaacaatatattgtcctttggccatgcatggtggcacacacctgtaatcccaaaatttggggaggccaacgcaggaagattacttgaatcccagaagtttgagatcagcccgggcaacagtgagacccccacc

SEQ ID NO: 41626 - DNA, 1077 bp, Homo sapiens
tgggcatggtggtgcatgcctgtaatctcagccactcgggaggctgaggcaggagaattgcttaaacctgggaggcagaggttgcagtgagcagagattatgccactgcactctagcctgggcaacagagcgagactctgtctcaaaaataaataaaaataaaacaaagtgccaaaataataatttttttttttttggcttaggggagtagggactgtgtcttgctgtgttgcccaggctggtctcagactcctggcctcaagggatcctcctgccttggctcccaaagggtttaggattacaggcatgagccactacatctagccctaaatcttttatttttaaagataataagtctgttatcctgaaataaaataatacttaagacctgtggaaaaaaataacaaaatgatttgaagtattaacagggccctcctgcctagagcctcccagctgaactgcctagggaggggtggtctctgctagagtggaagacctggtcctctgaatttccaggtgagtgttcccagttgccttttctgctacttattttaaaaggtttatcccagcctccatctctgaaggcaggatgtatgcagcaagagtattgcttaattcagaagggtgatttaccctggatttcgtggtctttaagtgctttaaaagaattaggccgagcaccgtgtctctcactgtaatctcagcattttgggatgctaaggtgggtgaatcactggagctcaggagttcgagaccagcctggccaacatggcgaaaccccatctctactaaaaatacaaaaattagccaggtgtggtggcgagcacctgtagtcccagctactcgggaggctgcgatgggagaatcacttgagcctgggaggtggaggtggcagtgagccgagattgtaccactgcactccaacctgggtgacagagtgatactctgtctccaaaaaaaaaaaaaaaaaaaaaaaaagccatcatctctcagtttagttgtgttttctgagtatagcttaaaactagttatgttacttcatcattggtattcattggtgttttctcagcatcacta

SEQ ID NO: 41627 - DNA, 1045 bp, Homo sapiens
gatatgcaaatattttctcattctgtgggttgtctctgatggtggcatttgaagcacaaaagttttacatttttatgaagcctaatttacctatttttttgttgttgttgctcatgcttttggtgccatatcaaagaatcctttgccaaatccaaggccatagagactaactgctgtgttttcgtctatgagttttatagttttttgctcttacaaaatggtatttgatccattttcagtcaatatttgtatgtggtataaggtaggagctcaacttcattcttttgcgtgtggctatctacttgtcccagcaccatttgttgaaaggatgattctttccccattgagtggtttcggtgcccttgttggggaaatcaattgactagacagaaataaacctatgggtttatttctcaattctgttcctttgatctgtttgtttgtacttgtgccaataccacaatgccttgagtgctgttgctttgtagtaagttgaaattgggaagtgggaatcctcctgctttattcttctttttcaggattgttttggctatttggagtctcttgcaattcctatgaattttaaaatcagcttgtcagtttgtacaaagaagacatctgggattctgatagtgatcgtgcttgaatccatagatcactttgggcagtgttgccattttaagatgttaaattgtcttccagttcatgaacatggtatgtttttctgtttattttgatctcttaattttttccaacaatgttttgtggttttcagagtatacattttgtacttcttttgttaaatgtaatcctaggtattttattcttttttttttttttttttttgagacagagtctggctctgtcgcccaggctggagtgcagtggcgtgatctccgctcactgcaagctccacctcccgggttcacaccattctcctgcctcagcctctgagtagctgggactacaggtgcccgccaccgcacccggctaatttttttgtatttttagtagagatggggtttcaccatgttagctaggatgg

SEQ ID NO: 41628 - DNA, 1031 bp, Homo sapiens
ctgcaggccatctgccggcgccctgagacccaggagcctccgcgctcccgcgtgggcctcacagggccggtccacagctccaacatagtagctgaactcccttcgttgcgttcctctttttctggaggggaatgttagaagagagagagagcttccttttataaccttcctcattctgctgcacgtctagagtgggtgtgggggctggcaggtgggaggggcggtggacaaatggctgatggtggacgggacactttaccccaacgacacctcctcccctttccaactggctgtgtagttgcttatgagaaccttcaagtccttccctagagagacacatgcaaatctgagcctcatcccaggccaggggtcctgttcctcatcaccctacttccctgaggctgctgaggtcgttaaattgttgtttactattaggtttcacgtcaaccctgggcttgtagagagaaaaagccaaacggagaccaagaattgatgcagtcttgggtaggagaaatcgagagcttgtccaggaagctttgctgtataaattataagcaatgctgtataaattttactccaaccatgtgtacaatgttggaatcagatgaaatttatagtgaatgaatgtatgtgggtttggggtttccactcctcttcagcctttcctcccgttagaacaaggaaggttttttttttttcaaggaaggtacatttcaaatatgttagtcaccctttcagtcttctgtattctgttctccacgtaccgaagttcccccaaacctgtcctctcaagagaaaaaacccatgctgactctggactccctcagtaacaatgaaacattctccccaaacatttcctttcagaatagtatttgtgactttgatccatcccaagcatggttaagagggagcacgggcaggaaaggcccactttctggggttgggcagccacccctgccccagtttcggctcctgggaatcctccgactggagaaggggaaaggcaaggcagtcctcctggaggcggcttc

SEQ ID NO: 41629 - DNA, 1069 bp, Homo sapiens
ccttcctcttgtctcaactgcaagaggcatgccttcctcttatactaatcctcctcagcacagaccctttacggatgtcgggctgggggatggtcaggtctttcccttcccacgaggccatatttcagactatcacatggggagaaaccttggacaatacctggctttcctaggcagaggtccctgcaggcttccacagtttttgtgtccctgggtacttgagattagggagtggtgatgactcttaaggagcatgctgccttcaagcatctgtttaacagagcacatcttgcacaacccttaatccgtttaaccgtgagtttgacacagcacatgtttcagagagcacggggttggtggtaaggtcatagattaacagaatctcaaggcagaataatttttcttagtacagaacaaaatggagtctcctatgtctacttctttctacacagacacagtaacagtctgatctctcttgcttttccccacacatacccggcaaatttttgtatttttagtagagacgaggtttctccatgttggtcaggctagtgtcgaactcctgacctcttgatccgcctgcctcggccttccaaagtgctgggattacaggtgtgagccaccgcacccagcccatcacgttcttaaattgtagaccgctgtttatagttctcactgcagccatgtttgtagaattaaccagcaaataccttttccataacaaaagtaaaattttggaattcaaagtttcaacctttttaataatgttaaaataatcatgaaagatcctaatgatgctccttgtatacttcttttggggactttgttgtattcttttggaatggatatgttaaatctgggctttatgcatttctgtctttttaaagcttattttgtcccaaataaacctttagaagaagataaaaatgtcctctaccctaatatgtgtgggccaatatcatagcattttagaaaccaacttataaaaatctaaaaagtaaataaaagtggtgcgggtgatacctgggcggaatgtcttggcactcaggtgtaaaggattctggaaata

SEQ ID NO: 41630 - DNA, 1028 bp, Homo sapiens
tccgtaaagagatgaatagtgtcaaatgttttttaccttgacacagaacaaagtaaattgtaagatttgtcccagcatgcagatacaccagaaactaaatttcatgaaacacttacccttaatatactccagtactttctcttctatataattacaaaataaatgccagtcatgaaccactaaattggttttatcacttcttactgggtttgtaacctgtagtttcaaccattcctttggaggctaaaggtgactaaggttcgtccagcttcagtattctgttgtctacaatcaggccaatcagaatcatagaacatggataatctaaccttgtggctgatgcataaatttttgtaatattcctagcaaatggatatctagtacctgttttaaacatctccaattttcaatatttaacatggtatttagtccatctggaaaatacagattgaggtatgtatatattcatgttgtaagtagaaaatgtgttagcattaggtgagacatgggtggtctgtttgtgcatatataaacatcttggtgctaaaggtctttttacaaaatttgccaattggctgcaggcaagacttgccaaagatgagagattagtgaatttagtggatttagggggaggcagatgtctaagtaaaacaaataaaacacttacattggaggtataaattaagttttttgaattttgatatatgtgaaaattcttcagaggtgaatttgtaatgcatgtctaatattttaaatattaattttctttagtctataactccctcagttgttggatctgctagacattcagtatgtgccacctttgaaaataatactctgtggtcaataaaaaataaataacaagtatttaaaaactcactgtgtttagtgaaattaaattttaatcaaaacacatttttatatttgatcatatggatagttagattatccttgagaaattggatagcaaattgcattttaatatagtagaaactctactattcaatttatgtagatttttatagcat

SEQ ID NO: 41631 - DNA, 1030 bp, Homo sapiens
tattcccacccccactcccagtcctcagtagacttttatattggttcttcccttgctcctcctccagcctctttcccattgtaaagtatatacttgcctgtcctaaatgagtgggttttgccctagtgaagatacaaggggaaaggatattctgggaatataagcttaaacctaagagaagaaaaaatttaactttgagtaggaaggaagaatctagttttgataatttgcgaaaggaggaaggacatatcccagattcttgtcaagaacagtgtggggaatgagacatggcaagtattgttaaattgaaataacatgaattttataataggaagtttaataattttgtttgttaacttcctcttaggatattaccttccaaatgatgatggagaattttatcagttctgttacgttacccataagggtgaaattcgtggagcaagtacacctttccagtttcgagcttcttctccagttgaagagctgcttactatggaagatgaaggaaattctgacatgttagtggtgaccacaaaagcaggccttcttgaggttggtgttcacagtgagatagtgattcattgataattttaagaacagagctcatgttggttggcattttaagaattttaaggttatgtgagagttgccacaaaaatcgaatgctttggctgggcgcagtggctcacgcctgtaatcccggcactctgggaggccgaggcaggcagatcacgatgtcaggatatcgagaccatcctggctaacacggtgtaactctgtctctactaagaatacaaaaaattagacgggcgtggtggcaggcacctgtagtcccagctactcgggaggctgaagcaggagaatggcatgaacccgggaggcagagcttgcagtgagccaagatcgtgccactgcactccagcctgggcgacagagcgagactccgtatcaaaaaaaaaaaaaaaaaaaaaaaaaaaaaaaaaaaaaaaaaaaaaatcgaatgctttttaactaaaataataaattt

SEQ ID NO: 41632 - DNA, 1098 bp, Homo sapiens
agaacaggtcagttcctattaaccttctgccacagctgcttttatgtttgtaagatggttaaaatacttttagacttttggtaccaggcttgttgaggtagtccctgacaactatttccagatgttttacatctaattgtagaatacttgattttttttgtttagaaatacaattagaaatgataaacgctgaataaaggaaaaatgggatacataaattaaaattacttttcaaaaaagcataatttggtgaaataagatgtagtattagacaaaattttgaaatttttaatgggtgaaatgctatgttatcctaagaaacaaactagttaaaattggcagaatttcttgagctaagaaaaagagagacaggtacaatgaagcagaaaacattgtggcttcattagtgatagaaatagacttgtaagaagccaaaaacagtgaaaaaacagttatctagtcattgacttgtttatttaatattttcacaagaaaagcagtttgttctgaaacttacacagactgtgatcttatatattacagtctcatgtacagtagagccggttgggcatatttatgcccatttacagtattgagctattgtttcctgagggtggggtctgttctgttatccttttgtccaacaaggcctccagcaattgcttaataattgctaaatgaaccgctagtgcagtgattctcaaacatttgtatactccagtggagtggttatatattgcacacctgggcagagatgttatacaagtaagtcttaaattctgaaaagattttccttgctttgttctatttgtttgaggattgctcttttgagttagagggtaaacataatgtcaagtactatgtacatttacaaatctccttataaatgtgaagtcttcaattctgtcttttctatcgttagcctttttagttaaaaatatgcaagtatttcccagttttactcctggggaacacttagtgtcctgcagcagactataggagtaggattttccatttggttaaggaactacttttttcatttgaacctttgaagcaggtataccaagtattaaaatatagtaaaatctcataatatgt

SEQ ID NO: 41633 - DNA, 1040 bp, Homo sapiens
gattgcacagttagtaagtgatagaggctagcagtatggctccagtccgtgcttttaaccactgctgtatacttctgagggccaaagatgtgagctgatctaattgattatttttcaaaacagctttattgagatgtcatttgtgtatcataaagttcaccagtttatacaattcaatggattttaatgtatttacaaaatcatgcaaccattaccatagtctaatttaggaacaaattcatccccaaaagaaagcttttacttacttgtggttactctaccgtttaccttctgattgcttcccccagtcccagacagccactaattgaaatttctgtatctatggatttgtgtattttggacatttcacatgaatggaatcatataatatgtggcctttgtgactggcttatttcacttagcataatgttttcaaggttcatccatgttgtaatatatattgttaattcactccttttattgccaaataatctattgtactgatgagtattttttgaaaccccatctttacatttatcaaagacttctgtgaaaattagcagtttgtgtgtttcattgtgttcttgtttgtattttggagtgctagatacgtattggaaattgaaagagttaaaactgaggctcagagaaccagtgattttgaatcttgtttttcaaataggagtaaaaagagctgtgcctctgttaagtttttcagttaatttagcttataatttttttggagcctaaactatgaattgagtttttttcatataattgtattttcaacttgaataataagatggatgtgatgtacttcaaggcatttttgaactatatttgagaatattaaagtaatattgccaaaacaatgtaatggaggatgttacaaactgttaaatgtattcatactgttttgattcttaagtttcacaaactgggtaggagacatcaccaggtatttgggaagtatcataggtatgggagtgagagaatgtgcaagatctcttctctggttagtgtggacctcttaagctatc

SEQ ID NO: 41634 - DNA, 1052 bp, Homo sapiens
ctctccataactcagggagaccactggattctgcctgagtttgcctctttgccctgtggccttaaaagtctctctagacagtaataagctggagcagttatagaggtgacctctgttgtttcttttctttcagggatcactgaccttttatcctgatgtccagtggcttgagagctgttcttcattcagttttttagttttcaggtggtagagttcatttggttcttgttactttatcttggcacgattttagttgcatctaattgtgtgttttagagtcgctatcaggagaaatgtttatttagaggagccaagatattctttctcaagtgatttgaattatctggtattctaggtacccaggtttaaaagcctgtatggtttttctgcacgtatttggcattctgttcttagttttctattccatggtactcaaagtagctggttcagaaactttgttactggtctgtgttggaatgaaaaatgtacactgcaatgtatgtaaatgcattactttcttcactgagaaagtattgctatgaaaagctgttaggtgaacccaacagtgtggttagtgatgtagttgatttatattttgtacaagtgtcttgtcttgatatagcctggtaactgtcggtggtctagtactgttcgcctagtcacactcttgagtagctgcttgtactttatattacgtagtttaacaaacgtggacttttatttaatatgctttttattgtactcaagaatatagataggttctgtaagattgtatccaggattattcagttgcagatataaaagaaagcaagcatccaaaagccaacctatattaacttcagttaccttgatttttaaaaaacttatacaattggccaggtgcggtggctcacgcctgtaatcccagcactttgggaggctgaggtgggtggatcacaaggtcaagagatcgagaccatcctggccaacatggtgaaacctcgtctctactaaaaatacaaaaattagctgagtgtggtggcacgcacctgtagtcctgctactcgggaggc

SEQ ID NO: 41635 - DNA, 1532 bp, Homo sapiens
cgtacgagacagaacgatggcagacctgcatactgcacgcttggaaaacgagaaagtgaaaaagcagttagctgatgcagtggcagaacttaaactaaatgctatgaaaaaagatcaggtaaaacaagttaattttgaatttgcattttgatttaagaaaccactataatctcacaaagtagtaaattgtgttaagataagacaggtcagatttctgccttattttaaatttaaaattttcattccttttgtttagtcattgtgacttcttggcttacagttaatgtgtgctgtaaggaaaacttctgtaagcagaattcttaatggttggtgaaagctgccctattgattaaatatattgatgtcagatatgtattgttttgtttggaatttcttactagctgtataaaacagtattatggttgtttaagggagtaataattgctcttcaggaggtggattatttttctctagttttttaaatgaaccttagtcctaagaatgtaaaactggacttaacaagagaccctatgttgctctgtagccaaaatcccaaaataaaaaagtggccggggacagttgctcacacctataacctcagcactttggggggctgaggtgggaagatcgcttgatcccaggaattcaagaccagcccgggcaacatagtgagacctcatctctacaaaaattttcaaaaattacccaggtgtggtggtgtgcagctgtagtcccagctagtccaaaggctgagacaagaggattgcttgagccaggaggtcaaggctgcagtgagccataattgggccactgtgtttcagcctgggtgacagagcaagactctgtctcaaaaacaaaaaaaagaaaaaaagtaagattgaagttggggttactattaacattaggaggtatcagatttttatttttttcttcaaatgtttgtttctttctaggacaagactgatacactggaacacgaactaagaagagaagttgaagatctgaaactccgtcttcagatggctgcagaccattataaagaaaaatttaaggaatgccaaaggctccaaaaacaaataaacaaactttcagatcaatcagtaagtatcattaaatttacacatagtaaaatgtgttgttagtatttttgttcgaaaatcaaatttgtaatattccaaatatcaaccttttaaatattatttatctctgcttgatttcaagtcattggccaaatattgtaataactcttctttaaaaaagtctggaattttaatttactggacagccaacaaaggaagcaagggcagtagcaaggaaaaaacagaaaaaagtcttcttttctagataatttccctcttaagttcttgataaatatctgtcactcaaaactcaatacttattattgactcttgtgaccatgacatctatcctcattggagttcaccattaatcatccctaggtcttagatggtgtctcagttgtaattggcaagttcttcatactcatattatgaagattcctattcctatta

SEQ ID NO: 41636 - DNA, 1615 bp, Homo sapiens
ttaatatgcacacctcgagtaactttattttgcagtcagaagatttttcacattagaaagtaattcttatgtatattcagaattaaaaaaaattcttgttgttacaacaacaaaaatcacttgcaaatgaagtgttttagtaagtaattttagtaagaatatggaaagcaaatttgagttgacctgttctttctttctgtttctctgccctgggagtgattaatagccacaggccccagcacttttgagtcagggttgaggtgacctacctactctttcagcctaccctagtgcctacacctgccatatctcctctcttctgcaccagaaactgtggtcaattgtcagatcaaaaaccttttgtgactcccgtttacctaatgattgtaataactttaacatcataattatgacagcagcaaacatttctatacccctctttgccattaatgctgaactctttagatagagtcacttatttgttcttcatagcagtcctatgaggtaggaattgttactgttacaactttatagtggaggaaaccaagagacagattaaatagcatgccccaaatcacttagctgctgtgggtagagacaggattgaatctcatgagattggctatagaagttgtggtcttagccacctgtcaaatggactaaaccagaggttttcatactttcttagttctagtaacccctaggccaaaagaaatacagtaagtcctcacttaatgtcatatataataagttactggaaattgtgactttaaacgaaatgatgtgtaacaaaaccagttttttccctcatcaacgttgtaatgaaccgatgaaagaatgatgttatttctttcaacctgctgtaagtcctttcacttaaagttgcagtttctaagaactgctccatgatgttaagtaaggacttgctgaccgttaagtatttgtcttctaacaaatttagtgaccattaaaaaaaaaagaaaaaactacacataaattgaaagaaaattaatgtgtttatttcattcctaaataagtagttactaatgggatgtgtgtgactattggccactgtacaactcctcaagccttagaatcagattggacaagccaccttcatttcctgtttctcattgattttcacaatgtggcacttgctttatatcacagcaactgccaaaaccagcatctcgaagataagatggcattgaaaggaatgtgtagcacatttaaagttgaatctgtgagcgatctccagtgactgtagttgttcacgtggtatatgacaaatgcagatgctcctcaacttacgatggggttacatcctgataaacccatcataagttaaatatgtgtttttgacttgaaggatattttcagcttacagtgggttcattggaacgtaaccccatcataagttgaggaaggtactgaatgtgtattgcttttgtaccatcttaaagttcaaaaattgtaagtctaaccattgtatgttggagaccaactctaatgaatatttctgtgtacttctgcatatataatatccttagaaaattaaaattatcccacagtaaccctcggaatttactgtggtgccctaggtactttcatacct

SEQ ID NO: 41637 - DNA, 1055 bp, Homo sapiens
cggctgcgcttggggatatgctgttagttcatgacatgagagcagctaacggctgctgagagataaaaaggaaataggcaatttagatgatgtgcctggtttcagtgttaaatgagcctgtgtgtttggctgttgatgtagcacgtacagatctctaaaaactgctgggatgcagccatgggaatccaaatcagtgttttctttgtgatgaaaactagatgcacaaatttttagaagtctcacttgacaacctctgaaatatttaactttggattttgttcctctatagcagagttttgaggcttgtagtttagtgcattgctttgctttaacacgtgttaatccagttggacttgcttccccaagaatatgcatatacaaactcacacatactttattagtttttcattatgatttctgtatatcatgcaatggatgtatcttgtcagagagactgtctttcttgtaattaagcttacagttattaaatgagaacgtttgggacaataatgcagtctgacagtattgaaagtagggccaggcacagcggctcacgcctgaaatcccggcactttgagagaccaaggaggacggatcacttgaggccaggagtttgagatcagcctggctaacatggtgaaaccctgtctctactaaaaaatacaaaaattagctgggcatggtggtgcacacctataatcccagctactcaggaggctgaggcataagaattgcttgaacccaggaggcaggggttgcagtcagccgagatcgcgccactgcactccagcctgggtgacagagtgatgactccatctcaaaaaaaaaaaaagcaaaaaactggtcacccagtctgcagaatgataaagtcagtaaaagttacctacgtatataggtttgaaaaggtctactgttctcagcttcatttacacatacaggtatggtaaatggtatgtgtaaatggtatgtctctattcctctgaatactgctttttatttcaagaacaccacagtgttagtttatagtgaaatactctgcaaagtttcaaacatgt

SEQ ID NO: 41638 - DNA, 1048 bp, Homo sapiens
tactttaaatttcatatggaaccaaaaaagggcccatatagccaagacaatcctaagcaaaaagaacaaagctggaggcatcatcctacctgacttcaaactatactacaagggtacagtaaccaaaacagcatggtacggatgccaaaacagatatatagaccagtggaaagaacagaggcctcagaaataatgccacacatctacaaccatctgatctttgacaaacctgataaaaataagcaatggggaaaggattccctatttaataaatgctgttgggaaaactggctagccatatgcagaaaactgaaactggaccccttcttacaccttatacaaaaattaactgaacatggattaaagacttaaacataaaacataaaaccataaaaaccctagaagaaaacctaggcaataccattcaggacataggcatgggaaaagacttcatgactaaaacaccaaaagcaatggcaacaaaagccaaaatagacaaatgggatctaattaaactaaagagctttgcacagcaaaagaaactatcatcagagtgaacaggaaacctacagaatgggagaaaatttttgcaatctatccatctgacaaagggctaatatccagaatctgcaaagaacttaaatttacaagaaaaaaacaaacaaccccatcaaaaagtgggcaaaggatatgaacacacttctcaaaagaagacatttatgcggccagcaaacatatgaaaaaaagctcatcatcactgatcattagagaaatgtaaatcaaaaccacaatgagataccatctcactccagttaaaatgggaatcattaaaaagtcaggaaacaacagatgctggagaggatgtggagaaacaggaaggcttttacactgttggtgggagtgtaaattatttcaaccattgtggaagacagtgtggtgattcctcaaggatctagaaccagaaataccattcgacccagcaatcccattactgggtatatactcaaaggattataaatcattctactataaagacacatgcacatgt

SEQ ID NO: 41639 - DNA, 1051 bp, Homo sapiens
gcgggctacttgtatatttcgttgtcagtctgcagaatgtgtttgatttttatttttccctccttctctgacatgtgtcaaggaataaagactggatacaggtccattacgtcattctgcaggccagtaagtgtttgattaacggcttgagctcctcaagggttcaggagcttagaatgctgacaaagcaactctgctttgcatccccctaccctccccacaacacactcgtgcaatcgccggctccctgggcatctttattgccctctcttcccagcccctccctctccaccactcccccgtctacaccgttatcactctagccccgcccccgcctttttacagctttccctggggcgagcacggtccctggagtgtgggtaaaagcttctggggtctgaggggaccactgtacctgatcagcgcgcaatccgcccttttgtattatttaagaaaggcaccagtaagccttctcctctagggcgaaaatgcttagtcctgatagaaaaggcaaatcaggaaatgtttgcaagcgttatgataatactctgtcctcgtggtggtgacttaggaaagcaatacacccactgcaaacaaagtatttcactttacgtagtgcctgccctttagcagaagagggatgctgacaaaatcaggtttagctgaaaggatcaagactaaacgtttcatttccaaagtgagggaatgtgagtcgttgaacctaaacttccatacaataaattgctgcgtgcgttagtttctagctcttaaccttaagtttctatgttgaaagaggaagtcgaatacgtaagtcattgaactgagtcagaacctccgtatctggcagttgaaataaagaccctgtgtatgacttgttgcaagggatcaaagtaaaaagaaccctcggtgtggggggtgggggggtgggggcgtgagggaggtgtgcagcagaaattaaatttaaaaaagtattaacagagttttggatagagggagagaggggattggagtggtccctgatttggagttggtgaaaactaaataaagaaaa

SEQ ID NO: 41640 - DNA, 1076 bp, Homo sapiens
ctcagaaaggaggaggcccaggcttgtgcataatatcaaggaacattctgtggacaagaggatactatttctgacttattctctgtgcttcggggaaaaacagagaaaattgcaggaaggagatggtttgctgtgtggagagatggagtgtgctgtgtttgctcttttggctccaaagagggaagaattttggaacaagtagacctatacatcaatggaaaggactgtctcagaaattagtgacctccctggcatggggtgtcagaattattataggaagagtttctagaagcagtaagaaggagggctggaccagttgctcctggctttttttggattatgaacactttaaacaattaggtaaaagctatgagccagttttcataaaaataacatataggcaaatattcatgagaaggttcatggacccagaagccatggactccagaatgaaaaaatgtctgggctcaataatgatgcttaacaatgctatggttatatggacacataaacttaaaattgctgcggttgaatgaatatgatcagtttcatgtggttcatcctacatgtgttggtgcatacattacatgtattaagctgtgaaagtaaccagagctaatgaacttccggtgaagtgtataatccggaatggaaattcacattcattggattctcatttatgtttctctatgagagtaactgcctgtttgcccaatagcccatacctagacaaccactgattaataacaccttacattgtttaggagtttcaaagtaatttaatagaaattatcttattagggtgatataacaactcagtgaaatatgaaggatagatattatccttcccattttagtggatgcagaaactaagaatcccagggcttaagtggtatgtgcagtcccagctaaagtaagtgccagacatataactggaattcaggtatccttccctcccttcttccttttctcctgcttctctttgtccatcctctctgcctccatgctagccacatacacttatggaaccaagtgtgctctttgttactaagaagcagcaacaaccacaaataaac

SEQ ID NO: 41641 - DNA, 1675 bp, Homo sapiens
tatgtagtgtcttaagtgtttactgggcagagcatgtgagagacaaagcacaagaatcctgcccaaagaccttactacctagggtcacattgattgttatgtaacagactttcacccaagagtagatattgcttaactcattcatttctctagagctagagtttagggtttcctttaacatgtagatgaccttaacatactgatttgtatttttacttacaatagatattcacactgaagaatatgttgcatactccaaaaacgggcagggtatgagatgggaatgagagtgtggactgagttgctgtcaaaggggggtgtcggggccactgaggatgggctagagatcactgatccccaacttgaccatatagggcctctcggtttttccttacttttatatttgaaagattttttttctacctgataagtattgattaattcatttttctttttaaattaatggcattcataattgtcaatcagaaattgtgataaacatgagatgtctgatgttaccatactgaatcaaaataattgcagccaacagtaaagaaagttgccattttacttgacatgtgaagctttcttgtgtgtgaataactaaatgtttacatacacgttaaccttttggaaatactgaaaattgaactgatctctgttattacattcacagacttcctaggaatccagagacccccaagtggggagcaactggatttagcaattgccgtaagttcccatctgcttctaacattctgtgatttgtgaacacagcattacaactaataaaatcgaccagttacaaatgttgcttccaacagcaagttttgaaatacaggtccaacatttttgtgggaaaggagcaaacagagatacttctaaaacttggagagcagggtaaagactgggaatagctgcacttcactatgtcccatgattttccttggtgaacaaccaaaattagtgatgtccactctgttgtccttgaccacagacagatctacttgtgatttaagaaaaaccccaaccccaaaccgaaccaaaccaaaacaacagacccttcatgtgatgctttatgtctacatcctgaatagaccttacaccatcctctgtatcgtaagctctatactgcaggcagaatgaaaaaccagacctgactatatcaaccctctgttggttcttcactgcccatagggtaaaatttaacctccttggcttgatgtacaaggtttgcattatataactatcatctgcacctgattcctctccatgtatactttgtgaacctgctagactgaattttccatcatccttgcaaactaccagacctttcttaaatctctgcctttgcacatgccattctgctaactggaatattctctctgctcaatctttgttggataaatccctataatagccagttaagacaatagcacttattatgtactaggcattcatttaatccttacaatgaggtggttgccattatcagccccagtttgcagaggaggaacctggcccagagatgtttggtagacttcccaaggtcacagagccaataaatgaggaagctaggatttgaacctgtgcagtctatcactcaggacctgtattcttaatctctgtgccacactgcctatctcctaagatggcactttcaaaggtgaaggaa

SEQ ID NO: 41642 - DNA, 1543 bp, Homo sapiens
cctttggtatactgatttcctttccttttgatatgtttctcaaaatcctccagcagtggaattgatggattatatggtagttttttttgtttgttttttgagaaactttcatactgttttctataatggctgtactaattcacattcccatcaatagtgtataagagttcccttttcccgcatccacactgtcagcatgtgttaactttttgtcttttcgataatagccattctaactggggtgagatgatatctcgttgtggttttgatttgcattttcctttatgagttttaaccactaagttgtatagtaaatggttaaagtcacattaatcactgtaatgttgtgactcaatatcagagtttatcttgagtcagtatcactcatcattgagtctcttaatattgttaagatcacttagtcacattttctattacattctctttttgaataattagggtaaatgcatatgtaaaatatgtcattcaaatatacagacattcaaagatcattccttacgtaggacagtaatagaagctaattttaattgaacacctactttggaccagacactgcagagctctctatatgccttatttcgtttaatcttcagaacaactctataaggtaaagtcaagaactgtgaagagctgagatttccccctacttgcaacctaattagtctactagtttcatggatgctggcagtagctatgagactcctgggtcagacacaaagttctttattactcatggccagcaagcagcatcagcctcatgttcatatcacttcctcttgttcctagctcctatgagagtgatgtggagtgacccaggtggctgctgaacatgcagggagtttacattatggctgaagaactctgggcttagaaatctcattctcttttaatgttgggggaagcagccttgcctgacctttgctcccaagggagatatctttattacactggacagtaagcaaacctgccatctgctccagagggacacactaagtctgtcttctaactctgctgtgcaaacatatttgaaaaaattccagaaccaaggccatctgtacctctgctgctaggacatacatagtccatagaggactgtctcccaacacttagtcgctctattttacaggcaggaaaactggatttagagaggtggaatcattcattcattccagaaatatgtattgaatacctgtatgtgttaaggttccttagctaaaaattggaggagggggagtcaacacaggctctaggccactaacttgtccccttacccacttaacccctctcctcctcagccactgtctcatcttgcctccccaccttatggctaattatataaaatgataattcacttacgatgatgatgactctttgggacacatgtttctcctgccatcaaattcttcctctgcagcttgacccagccccagatacccaaatgccataggtcatttacctgagatgtggaagcggtattggtagatcctgatacaagtcagaatggtgttttgaggtggaattt

SEQ ID NO: 41643 - DNA, 1030 bp, Homo sapiens
ttaaatggtaatccagaaagtaagtttactgatattgtttggctgtgtccccacccaaatctcatcttgagttgtagctcccataatccccatatgtggtgggagggagctggtagggggtaattgaatcatgaggttgggcgtttcccatgctgttcttgtgatagtgaataagtctcacgagaactgatggttttacaaaagggcagttcccctgcacatactctcttgtaagacgttcctttgctcctccttcactttctgccatgattgtaaagcctccccagccacgtggaactgcgagtcaattaaacctgtttttctttataaattactcagtctcaggtatgtctttattagcagtgtgagaaccgactaatacatttatactcagactttctttgatggagccagcctccttgaaagcagttatttttagatgttccaacagccatctatcttacaaaaggattttctcttcagataggctctgcctatcaggttctacagtaggctgcagaaagaggaaattactttgtttttgcactttaacagcaaagtcaagtggaggaagaaactaagaatccttggaccttggagcagggttttactgaagagtgaaagtgggtcccgggagccaatattcttctttttctttttttttttttatttgagacggaatctcgctctgttgcccaggctggagtgcagtggcgcgatctcggctcactgcaagctccgcctcccaggttcacgccattctcctgcctcagcctcccgagtagctgggactacaggcgcccgccaccacgcctggctaattttttgtatttttagttgagatggggtttcactgtgttagccaggatgatctcgatcttctgacctcatgatccgcctgcctcagcctcccaaagtgctgggattacaggcgtgagccactgcgcccggcctattcttctaacatacttgagagggtgagggaatgattgcagctttgctgagggtatccaaggcctgttcatggtag

SEQ ID NO: 41644 - DNA, 1027 bp, Homo sapiens
ggccaggcagtgttagagatgatttagtctaaccttttcattttacaaacatagaagccgagcccagaggggttaaatgacttgcttttgttcacactgctgggagcagcaccacggctgggatgcaggccgttgtgacttctgctttgaggttctttctattctctgctcacacacctagacttgatgaggtagaaatgaaactctggcttcttaatcaattcataagcattacctactcctcttaccttttttaaaatggcatttgcctcctctttattttgttcaagtttcttcttcttctcctcttccatgtaatatgtgtgcatggaagcaaagtatatcatatgccaaagaacttaagttaaatattatcatttcccctgaccactcactaaaggcaatcttctctaaattgttttttgtttggttttgtttttgtttttggaagttactgctaaactcaataacatgcttctgtctttgtttctttatttgttagctgttgtaacatctcttaagtctctgccttgaaagatgcagattcagctcagttgtcctgtgcctcctctacctctgccttctctcattactttattccattattgctttcgctattggctgtacacttaaaccttccctttgtggcccatcaactttccatcgttttgcgtaagatggagttctaagctctcttaggatccttttcttgccctcctctcttctacatttccacctttggcatctgcatagttacttccacattgttaagtgattttcctctgtattttgtcctgcaacctcaatgatatcttctgtgcttttggttaactctaacagtgaaaaatgagtaaattgcattcataattatgactatgcaattcgtgtttgttgcttgaccaaatcatgtgttaggatccttctctgggggacctgaggtcgtaactcaagggcctctcaaagaagaatattcctaacgtcaatgtcgaattggttaactttttaaaaaacttcattggttgcttaa

SEQ ID NO: 41645 - DNA, 1050 bp, Homo sapiens
gggaacctggctctttgtgcctcaagtcaaggtaatttgggcaaaacatattactgatttttcagttgctgtaacagatgtaaatgatgtaacaagtatgccagcactggctgtgatctggaaaactttaaaggggtctgtgctgtgtgtctatggagtgggtgtgaggtgcgcaaagggaagtagaagtaaaattatgattcagagggagggtctctgcttggtaattctcctcctggaagaactcccccttaatttgtgcattcattgcaataacttgactggaaagtaactattctatactagtggctggcatctaagattcctcagatctaaagttatcccagctatgttaggctttctgcaagtctttctgtggtttgggcataaacaagtaaggcccaggttattcaggtattttacaatgaatctggattctagccacttttctggggtgccattctgtccctttgccaaactgtgtgtgtgtgtgtgtgtgtgtgtgtgtgtgtgtgtgtgtgtttgtctatatctatatgtactttttttttcctggaaaattattcttgagtgaagctggtttgtgaggttgtagcttacaaatagcgtgttttgaatctgcctagaggtttcatggtacatagtacatgtatgtgtatgtgtgtgcatgtgcaaatacatatgctgtggaggtgggacaagggaacaaaaggttgcatgtgcacagaagtatggcggtcctacaggagcatccctatgtgggtaccattgtctagagagtgttgctaaattgatctctccatcctgggtcctgggaacttaaatgtaaaggtgggttggctttatatgcaattcacttgccttactttaaaagtgatccctgagctcacattcttgaataagctccatatggtttcccaagcagatactgcattttaaagtatattcacattgaacatatacatattgacaacaatggaagttgcgggaaggtgtcactctgcatggtactaactttagctgccagctccctttaccgagggagaaagg

SEQ ID NO: 41646 - DNA, 1037 bp, Homo sapiens
tgctgtgagccatgattgtgccactgcactccagcctgggtgacagagcgagaccctgtctcaaaacaacaacaacaacaaaacccacacagagacatttagtttatacatataaaattgacttatcttctcatatgattttaaatgtatgtttcctctacatgaatggcacttgagagttaagcaggtgagtgcaaggcacgtgcctagcaggcgtgtcttgcttatgacaaaacacttggcatccctgatccttgcccactaaaggcccataacacccctccaatcatggtaagaaacaaaatgaaacaccccaacaatttccccaaggcccttgaagcagggcctgccctactatgtgctgctgttctagatatatctggtatttaacatcaccgatgaaattgctggaggtgcaagctgcccccaagggcattgcgatgaaacaaaataaaatctttgtaaatgaaaatgctgccctctttactttgttggtgtgtgagacaggttttgtaaacctttttgctggaagaggctctggtccaaacaaattcctaactgaaagagactcctctccaattctttttttttttttgagatggagtctcgctctgtcgcccaggctggagtgcagtggcatgatctcggctcactgtaagctccgcctcctggattcatgccattctcctgcctcagcctcctgagtagctgggactacaggcactcgccaccacacctggctaattttttgtatttttagaagagacggggcttcatcgtgttagccaggatggtctcgatctcctgacctcgtggtctgcctgcctcggcctcccaaagtgctgggtttacaggcatgagccaccacgcgcggctccaattcttattcctgtgtaagtttcctcataacttctgttggaagtcattcctgtccaacatgccctcctcttccaaagctgccacagttgtaggtaaaatggcccagctgttcttcctggggcaccagattggcctgagtgtggctccagaggcacctg

SEQ ID NO: 41647 - DNA, 1025 bp, Homo sapiens
tgaagttgtgattttacagtggcctcagcacaccacctcatttgtcctcaaatggagcttcccctgtaattgtgcggagtggatctgagcacctccctgacgtgcatgaacacggtacctctactgacttctgttctgtttatcaaataatgaacagagttttttaaaacagcttttgacaaaagaagtagaagggggcaaagccacatgtgaaacctacttcaagtcatcagttacacgtttaatcttgaggcattaaaaatcattcacttatcagtgggcacatgtcaattcccagacacatttggaaatgcttacagtgtggaagccccgagccgaactgcaggagctgtggagatggatggacagactgggatagcttcctacctgttggaggaatcagacaaacagagcagttcatgatgatttgggagtggaacaagggtgaaggtgggaggctcagaaatttcctcatggtagcatttgaaccaagcctttaagtagaacaagattttgctaaacatagaaggcagaaagggcactgctgactagctatttgaagaaaatagcgactagctattcgaacaaaaatgctgtttgtaaattaaatcctctaagtatgtggtagactctcaggtagtggcaagagattcagaatcacagataggtatgagcctggcagaggatacaaatcaaagctgcagagtggagcacctggaccttccggctcaggagtgaatactgcgctttggggctttgatgcttcatggaggaatgcggggttaaagtagtggggggtgggtgaaacactgcaaagccagtattttaggaagatcccccaggggacagtgtaaaggaggaatgagagaggggagaaagcaggaaggagattgataacagtctactgtccatggctctggccaagagggttgggtgagaggcctatttgtgcttgtgcccgacactggtggatgtgggtagagatctgcatgcatttcactccttggtaaggatggacaatggac

SEQ ID NO: 41648 - DNA, 1397 bp, Homo sapiens
ctctaagtctcagattcgtcattggccaaataagggaaaaaagtacaaccatcacatagatcattctaagaacaaaattaaattagtgtttggaaaatggctttgtaaagtgttaaaactctacaaaggttaactaatggctatttttttttcccatatggaaaaagccactgaatgaataatctttcgcatgagtgtccatttatgtcagcctgctaacgtcatacagtgtggctttgaagtgtagaaggtgtgactgtcaggttttaaaagggaagcagagagactatttctcttgcctctctgcaatgtagcaagcacagctgcaaaagtagtgatttcacaggatctgtagcacctcactggggcagaaacagtcaaaataaggacaactgagaagccagactcaggtaaattgaagaaatgaaataaaaacagacctgaagggcataataacaccttcatttagaaaaagtgttatgttataagtaagtacttatgtttctcttgcggtctttctagtaaattccatccagtttttacccaatcgcttttatcctaaacatatgactggagttaaaaaaaaaaaaaaaaaaaaaaaagctccaaaatgtttagcttagttggtacttcataaaaatcgggaatgataatgttctccaagataatgtcctatctctcatctgctgcaagggaattttcactgctgcaagggaaagcttcaatcagtcttgaaagaaaagtgttgggggtggtggaaagcctgtaggcgttgcagttggcagatgtgtgtttggttcctggctctctcctgctattgtttacctcaaattttctcctctgtaaattggggataataaaatactttttcagtagggttgtggtgaggactaagtcaacggcaataaatctgagttgccttctcttccttctttctgactaagcttttcgtgtcacaagaccaatattaccaatcaggaagcatttccaaacaagtactcctgcctcatcccaaatatgccctgaatggtctgacttttctcggttcaagtgagtccagattctgagagataccggaagggcgcttagacgacatctctccggtgtgttgactcctctgtggagcctgagtctctctgagccccaaggtcaaggctttgcaaatcggggctatgatccggaaaatgtagtgctcatatggttctgggcgtcagaacatgattacatattcctcagtcatagaccactgtgagttaaggtccccatagaaacagatggcacacttgaaggggtaatcaaagaaagtgcaatgtgcacaggctaactggggactagccacagccacagcagggggcttttccaacctctgagcctggagggacagggggccaagggaa

SEQ ID NO: 41649 - DNA, 1076 bp, Homo sapiens
ctatcatagtcttttctctcaggagttcatgggggcagttattttaaatgacaatgaaatactttcttttctggaaaaatagagatgacagggtcgacctaaaccttggctatgttttgttctaatttttcttttttgttttctttcctttttgtgcacagtgagagcaggtaaaaaggaagagagtttgccaccagtcagcatgttttctgaggttatatgtttagtcccattagaaacaagctaaattatttggttacattcaatatttccttcaaaacctaagaatctctacacttgtattttgttaaccacacacatgtcaaataaacttttgttttagagatgtgatgtcttctgcaagaaagtatattgtactgcatggtaacaaggggacaaggacctaaatgcggttcatacgcattcagcgacttactcaacattgcacctctcatgcttcacacaagtgcttattaccaagtatgttctgaactattgaacccatagagaggaaagctataagacaggattatgtgaaacaaaaatcagaattagccagtaactttgaacaaagacctcctatctaaagaaacatatggaaaatttaaaaaaaagaaagaaagaggaatctaacatatgaaaacccaatcccactggaatgttttcctatacacagcataaacgccacataaataaaaccacaaacctctgcagaagtacgtgagaggacgtgagcccccagcactctctcctgttacggccccctctgggaagtaagacccgggttagtttccagagacaaaagctgtttggaaatccttcctcctgggagcagtgggcctcattggaagggaacttctgacagcctctaagcataatataaagtgtgacgcaatcccaaagggggctgtgattcaggttgtaggattctgagcttttgggataccaggggatggcaaatatctttgaagaacagggatattcttctggtttgaacagaatagtaatatttaaccgcagtgttatgtgtcaagttcaggccttctgggggagactactggctctaaactgcccag

SEQ ID NO: 41650 - DNA, 1052 bp, Homo sapiens
ggatgattgggtagccactatttccaatattgctagttgccatgttaaaacaaaggggaagggggaatgctagagtgtcttacaccaggaattagatgctggcccctgggtgacatgtcactttcattcattactcaatgggcagaactagtcacatggcttcatgcaaccacaagagagccagaaaattcagtcccaccatgtgaccagaagtcagacagccaaaaacatttgggagcagcatttttgataaccataatatcattccctgaaaattaaaaataagcattggtttattacattgtacagaacatagaatactaaaaataatttgtcatgttactctaaaatcatatgtgtaatttaaaaatatcagataataggtgggcaaggtcttcataaatggaaatatactgtacagatttcacagttacatttgtagatacatatgtcaaataattaggcatggcatgtaattctttcccaaagtctgacttgaatcacgattctcttctttcatcatgtatatctcctatttttggttaatccatagataatgtctagcatacttatcataccttagacttaacttttacactgttgtgtaaaacattaactacatttgaaaagttccaaatgattttgcaaaattccagtgctactgaggtctaaattcactttcatgttttgcacatggttttctcatatgtataagaagaaatggaaaaattttaactcgtcatgctgccattattagttattcttcatgaccacaaataagcattcatttaaacacttattttttgtaaaatgctgcctacttaggtaggcattaggacacagctcatttttttgtatatatatgttattttaataccttcagtattgttcatttacttcttcctgttttattccttaaatacaaagtttaaagtgcaaacccatagctcctaaagaaatatatagtttagtgattaatcagcatagttggatatatccagggactatctaagaagtagagtgctttcaaaaaaagttcccagggaaggtat

SEQ ID NO: 41651 - DNA, 1026 bp, Homo sapiens
acttgccttgctgagactacttgtggatcgatccagcagagtgctacaaacttggccttatgaattaggaattaccccatcagtcacattatcaggcctggggcaggtctcagtttcttcatatgtaaaccaggaaaaataatttttacataatatggttggtgtaaaaactaatgagatgctgtatgcaaagcacttagcagaatatgtgctcatgcacgtgcacacacacgcacacacacacacatgcacacacgcacgcacacacgcacatacacccttttactttcactctcagatcttgtccatacactttctattcagaaaactcctttatctatatagccagcccttgcctctgacctgttagtatcaaacttccagctgttacttatgttcccatttgactgtcctttagtcacatatttcttcgggctatgaacagtgactttttaaagctaacccattatggtggtgattttaggatttataggatcatacaactttagaaatttttttgaaagatgaggaatatgaagtccagagaatgtaggtaaattcccccatattacagtattctcaaatctagatttctgggttgttgaaattgttttctacacacacaacagagccctttggatcagggagggcaaagcattgaatttagatcaaaaagggatagtgtctgaaggtaagagaggacttagtagtgataagatggttacaaattgtgtaaccttgtgcaaggaagctcgtttcttcatttataaaatagtatcgactcttgttacctcatagaatcatgcgagatctagattctagacaatatgagtgaaaatgttaattgcaaaatcctgcataaatattaattttgtcttctataaacacacaatagttatatgtgtatattagggacctaggtgtatatgtgtgcctcttaataaataaattagttgctaataaaacaatattcaacaaaacccactctttcacacatcccttatctgtaatgccgaatttacgaac

SEQ ID NO: 41652 - DNA, 1803 bp, Homo sapiens
cactgcactgcagattgtgttgatgtggccttgaagtattttagccatttgtgagtatttgtctaattttttttaaaagattactccttgattatggcagaattcaaagctagataaatcaaaaatttagtcaaacttacagattttttctattctcaatcagctgttttactttgctaagtatttaatagcaaaccttttgtgagcagtgagtgcagaagaatagagccaatgggtgagagaacaggcgagtaatcttcatggtagaagaggggatttcatcagactttggcccatgttgtaactgtctgttttcgataatctttccagtcattctgcaccaaattcataattatttcctggtcatattaccttgttctagtattgaacatctgttgttgctgagacaaataagttgagtacaactgtgaatcatttgttcttaaaaatgtaggaaaatcattttgtgaaacccttaagaatatattcggtgtttatgggaatgtgctgaaatttaaaatcactttacaagaataatgaaaggagatggtggtcacaagtcaatgtgatgaggatgctttttggtattttgttcattgttattatacagcattattgaatgcccacattgtattaagaaacaaattagatacagtctgtgaacagaaattcaaaatgtgaaaggtgattgaaaggaaagaccagttaggtagtaatgaattctgaagtccagctgttccatccggaaaagaaattttaaaaggttctgatatttctctaagtgtttcaaagccttttagtccttgtctatgtgaaattataataatcccccctccaccagatttttcctgtcacattctcatgtcataatagtcaagggcttgtatttagcctgtatggcttcaggagaaaccatgaaaataagtgatgcttacaagaggggtacaaaatctcagtcaactcgttttacttatttataattaatttatcatgcatgcttgactctctcctccactccccctcaaaggatatgaagtgccttttttcttttttaaacaagcacttacatagcaactattatttgccagccaaataataaggttctgagcactttaaaaaattaacttaataaaaataaaagacatgcattctatattttgttgcaatagaaatgtatatgtatatatatttaaaaccataaaaatagcatgcaagagaggaagaaattctcatcatctagtcaacttcctttggttgagtaataaattttttttttgatagacatgtgtatgtagaagactaaggaattaagttcattcattcctcaagatagtcaaagctggcttcttaaactgaactataagaaagatgtgtatttcatccatattgtcttcatttctgatagaatggttttacctcaagtgtgtgcccttgattttactaaagacatttttccaagaacagtttcgtgaagcccgtggtcggggtgtggttttagatattctccattgcattattcatgatttcttatatgaagccctgtgtgaggaaattcttgcagatctgaattccaggaaatggtttgcttcccctgaggaactgaaatatttttctccttatggacatgagaatcatgtaactggttctgtttctcttttcgctttgactgccaggttaacacaaagccaagtttactgctaaactttgaaaaccttttcgaacattgtgacgagcatattttacttcctccctagaccagactttcagttctagtttatattttctctggttctgatttttaat

SEQ ID NO: 41653 - DNA, 1033 bp, Homo sapiens
ttagtaaagtggaagatggattaatttatctggagaatttggctaaagaaagttcttgcttgaactttctatgtgtcttacacaaaaaatattggaaagattggactggttctgcacaccacctttaaaacttctagctgcagttggtctagaaaattctgttaaagagcaaatagagaattgatccttacttgacccatgtggctgtccattggggaaaagtctgttgtacagactctgtctctaatcccagcatccttttccagaagcatcccaatgtgtatatagaatcagcgcaggctgtaagcaggttatgtccactggagaaagccctcattatctgtattaatactatacatagcagacaacacgttccataatagcctcaatttccatattaatagaagcttataacctcataaatctttaataagagaattgtttccccttagaaaagcatgttgtaattcactatcaggtatcataaatgtcaacttgccaatggcttagaactcagactagttcatatcctgaaatatataagaaattttgttcatcatttttcattcaagaaacattttcaagtgcccaccacatggcaggcactgtccaaggcattgttgaatataccactgaataaagatgataaaaaacaaacaaaaatacctgccttcaggtagtttacctctagggggcaagagaaacaataaatatgtgaaaaaaaaatctataacatgtcagatggtgataagtgtgatggagaaaggaatagcagggaaggggcacagggcatgctgcgggtggtcaggcaggcattgatggttagtagatgtgcaagcagagacccaaagtgggaggaggtctgaaccaggtacgtactggggagaagaatgtttcaagctgaaagcacataagtgcaaaggcctgaggctggagggtgctctgtgtgttggaggaattacaaagagacccaaggcgggtgtaataaggctagagatccgggtctgggagggcagatcctgggaggccttgt

SEQ ID NO: 41654 - DNA, 1045 bp, Homo sapiens
tgatttgttatgcacagagcttaggaactttcccagaggatttatgaacataaggttattgctgaatttgttggcatggttggcccaggcattcctgtccattgctctctaaccagagcaacaagcctttggataaggaagcctgggcttctcagtgctctagaatgtggtgggcatgcgagtcccacccttgtaaccccacttggttggtctccaaatggctagagggaaacaagatggcccagaattctggcaacccctttctcagtgtgtcgtgcccaagagctcttccccatgctgccaggccacctgaaagtggcctccaaacacttcctgtgcgatccacactccccccatgtggattgtgaggatgtgacttggagtgtggtctgaactcaggacgagggcaagaagtcagctccattccatcgctctctaaaagtcacacatgactttattttctcactggtaaaatgggccttttgacaactttgaagttctaaacacaggaagttagaatacatcaagatctgaagaattgacattaaaactggttcctaggtaggggttgttagattcatacatcactagagcatctcactttgaacattctttctgatgttgactacaagaagtgtccaaaaagcgagcaggaaacaggaatccaaactccacgttcacagagacaattacaccgttgtgacattgctgcctggaagaggcgtctttttcctgcatgtcagcagtaaggaaataattccttgatccagatctctgctagatttttttctttatttgtattacaacaatacatgtgtatatgttttaggcacatgtattacaacatacatgtgtatatgttttaggcaaagttgggaattcagactttgggaacaatttcatgccaatttctgggaagttctggcagacattctgattatacctaaattgcttataatgttcaatccaacaccagctttaacagataattgctatcaaagtataactacctgctgccctttgattttgaagatggcgtcactga

SEQ ID NO: 41655 - DNA, 1432 bp, Homo sapiens
gtcttgtgatgaaacctttattcgcttaaagtctttatcttttggtggcatatgtagctatgtcccctattttattcctgatataatatatgactcttctctttttttctttcacgacgttgctaggggttgatcaattttattagtgtttttaaagaatcaagctttggctttgtcagttttctttattgtatatttgtgtcttaattcattgatttctacttttattttttataatttctactttctctgggtgtaatttgcccttctttttgtaacttcttaagatggatacttcgatcattgattttcagccacttttcctttctaatatgtgcatttaaagctgtgcatttccttctaagcacaactttagctgtatcccacaaatttgatatattatgtttttattatcattcagttaaaatagtgtctgttttcactgtgatttcatctttaaccaatgagttatatagaagcatcttgtttcaagtccaaacatttaggtattttctagatatctttctattattgattctagcttaattccattgtgatcaggagaatgtatttagtatgattttaattctctgctgtttgctgagacatacattatggcttgaaactaataacctgctatggtattttactttaatagttcgacatctttctatacatctactggaaagttattgcatacatcactggaaagttgcttaatctctacatgtctcagttttcttttgtgtacactggagataataacagtgtcttcctcaaagaggtcctgtgaccattcaatttggtaattctttaaaggttttcagaatggtacctggcacatagtaaatactcaggaactgttagctgttattacttagttgattaaaattatgactgattatcctgctggatcaaatataaacatccactgcctgtcaccagcccaccttggctgtctgctcttacttgctgctaaactttaaggcctatgtcttaaatatcacttaagtatcacagaatttccaagacactgtaagtattattttctgtgttttacaaataagggaatttaggcacaaaatcggtaaaagacttgaatgaaagcctgtttctcaagatattagcaacagcctgttatctggttcacatctatattccttgctcatattttattctatacaaataaaagaagtaatagttttgcaattaagtgtttttgtggttgacatcattttcaggtgttgcctttggactcctacagccttcaggccatgggaaggtctgctccctaatcagtaggttagcctaacctcagtcactaagtttcagtctgagtaaaggcacagtccctgagggctgaacatatgtcaaggttcccagcccttaacatcctccaaagacaaaacctgccttcgtcaccttgtgggaa

SEQ ID NO: 41656 - DNA, 1046 bp, Homo sapiens
aatgctacgagtcatgtggctttgctgtgtgagttcacgttcctgcccagtgttccctcaagatgggaatgttaatacatttgagggttttgtgtcattgttgctgggggtggggaaagaacagtagagaagtgggtaaatgatgccatcactgaaggtcatggcttaaagaagacctaaatgacaaagcagcttacaggttaagaatgtgtttgccctgtcaatgcatatgcgtatgaatctatttttaagagcttcctaaagctcctcaaaccaaagtgagcatgagtaagactgtcgctatctaccacaggctaatgctggggatattcaggccagcctccttcctgctggagacagcggggcagcaggtcccggcttgtcactggtcctcagcccttagccaggacaacttgaagcccctttgagtaatgcagaccagaagtcattatttcctgctttgtgttttgctgaatatcacggctatgaacatagctttattgttggaaagttgctgtatctttcacagccccgagaacatttacgagggcccttctgggggatgctttctgggagggttgacagacttaaccatatggctcccgttaaatcccatgcagagccttgagaaattacctctgacaagggggccggcagccttccactcacggggttttatgtgtggaacgaaacataaagtactgatacttgaggaaatataatgtttcttaacattcaaaagttgtaacaccacatggtattgtggtcagatgaagggggtagagccagaacatgggagcaaatggctgggtattctgagaggcagaaaaataccccagctctcgtcttcgaatctggtccttgcctctgattcttcaggcaagcattgtgtcttagtgtcatctcagcttcccacctggaacacagcaagcctgctctactcgggagagaaaatcagaggtaactccccaatggctcaagcccttcgttagaaagggccttgatactgacactgaagaagagaaaggaagctaatatttattcag

SEQ ID NO: 41657 - DNA, 1586 bp, Homo sapiens
agtttaataaagacagaactttaatttgttcattctcaatggtaaccttcacggggaaccacatttttactaagtcacagtagtgtattgtttgtatcagttcttaatgagttccattgttaacttttacgtcaaagaccctgttgcatcaacttctttttagtcttatgataggaagcttgttttcaaggtgtttccatgaaaagcatttgatccttcatatttccgtggtggatttctctggaaagttgggagttttccaaagtctaactgttatatcagtttttatggtgatgggtctcatttttcttgtagtatacattatcttctctactaattgacttaattttcagtccttatctccagtcaagaaatgaaaagaacttacaaattttgttaattgtactgaaattagacgtgtggtgagttttagaggagcgtccaaacagaactggattccatcagagccttgaggaaagttagacggcagaccccaagggagaagagggcagaacacaggctgacatatgacaattcttgggaaactgtttaaatttcttgggaaaaacaagataactgatggtttttttaaaattaaataagtaaatagcaggcagatcccagaacattgtaatgtgaaatctaggtgccataatataaagatgaattattaaaatatgggcacctcgaatccactaacttgggcccaacagagcctgcccaggggctgccaagcatgaggggtgtggagattggccaggtgggcagggctccccatttcccaggtatgtcttcaaccacagcagcttcacatatgtgaacttagttgggtttccacataagcatttctttgaacaaagggctcttcagcaagagcatagtttgaaaactacaaaattggaagatgcttttttctctatgtaccacaaacaagaggaaaagtgaattattgggtatgataaagcaagtaccatcttaaagatcaatttccgggagaaccagtgatgccatcatcatcatggaaagtggatgagattggacaggcaagctgtggcttctgaggtgataggtgattgaggggagaataaaacatgaaataacttctagtatttggatgcgagggaagaaaatcatcagaagggaaacatagagacttgatggggatctgtccatttcaatctctcaggaaagggtagaacaacaataacaaaggaagttgtatcatttcagtctacccttttaggcagggtacacttacacatgattgcaagaaggtgcccacagcactgagcttcaagaggagcagagaggcagcattcatgggcagagccgcctgtgcttcagcctccaccttcatttttatttttatttttatttttgagatggagtttcgctcttgttgcccaggctggagtgcaatggcatgatctcagctcaatgcaacctccacctcctaggttcaagcgattctcctgcctcagcctccagagtagccgggtttacaggcatgatcccccacgcccggctaattttgtatttttagtagagacagggtttccccatgctggtcaggctggtctcgaact

SEQ ID NO: 41658 - DNA, 1023 bp, Homo sapiens
ggctgcaaacctacactgccataaacatccactttgaggcaaacaagggagttttttctttagcctcgaatgttctgctcagtagtagttgcgggattctgaagcacacacttcttgttgattaagctgtctgccctataatttgcaaagaatggaagatcagcattgtagagaggtatgggggcttttcaactcagccttctaagatgttcttagcagctaataacattccagcagccctgaaccaacttcctgtgtggacacagaaggaaaggacaccagggacttacctggggaaggagagcccagggtgggccttgtttttccgtgtgtgtgtttgtgtgtttctgcagacactgagcttaatcactgagaaatttcttttaggtggtgcctaatgcatctcagcccctcagccggagggctagggctcattttcgtgaccgatcagagttttaactgctgtgctcctaatacatgtttttgaaaaaggaagtagcttatgtgacaggactgttcttttgatctgttaacttttcctaattctttttgaagcgtcctctgccttattccctggctctgagtgatttaaaggcaacgtccttgagtttatatgctcccagaaacctaatgctccgagaaatccaataaagccccaccaccagaattgttctggggcatgagggggcaagagatgaccacccagagtgagcccgcatgggagggtgttaaaagcaactagacatattcattgtctgaggctctcattgagtcaggatgggtgcaggctgcagacacctgtgcggtcggaactaggttaacgattacttgaacatttgaaaatttaatactttcagtcagggaagtgtatttacctttgagcataacagataataaagggcccctttggctgcataacctccctatttgtttgaattctcctatctttagaactttgcatctttttttggatggagtgatcctgggttttctgtttctcaagggctcatcaaatcactatgt

SEQ ID NO: 41659 - DNA, 1026 bp, Homo sapiens
agaaatctgagcttgtggataaaactaaccgagaaatgtgtacaatgtgaggccccaagactgaatgcaaggagaaataggaagaggaaagctgttgcacagagtatcccttgagtgggcgtgaatgagtgtttgcatacactcactgggggcggaatgaggccttccaggcactggaacgtgcaaatacatctggagcgtgctcattgacaggaggatccaatccataataacaagctgggttcactttgctgccataggagaaaggtgtgtgtttcaccatttgccttatggatttgaaaaacattaaaccaggtagtatttcagagtttaaatgaagtacacaatgctcagtggttccagcaccaaactctggaagtgtagtgcattggaaggaaagtggtttaatgtcgttttatctgttgaaccacaaaatgataaagaacattgactcttacccaaaataagaccagtgcccacagggctgtgtgtgtgtgtgtgtgtgtgtgtgtgtgtgtgtgtgtgtgtgtgtgtgtgtgtgtgttttaccatgtgcatacttggaaagatagtattctaacaaagccagccttgggagttggcttgcttttaaggctcacagtagaagagttaaacagaatttctcttcctccctctggctttctctgttttcctccagactttgcccttcgaaacaaacactgaacagcgccgtacatggtgtttcctgggtaatgtcattggctgtgagcttggtttattaatcgtggcatcagggcactgagagatcttatatgacttccccttataccatacagatttcacacccatgcctctctctctgtctctctctctctctctctcacacacactcacacacacacacacacacacacacacacacactctcaaactttctttgcccttcattttggtttgtgtctttccttactcctaaaggagaaggcaggaccaagactttttccccctgatatgtatccacaggtttcatattttcccatgttc

SEQ ID NO: 41660 - DNA, 1694 bp, Homo sapiens
ttctctgtttcttgtatctcttgtaaactggtaattaggggcttttaggtttgatttagagtcaagttcaaatttttggcaggaatacttcccatgtggtatggcacatttctattaggaggcaccaatggttggcttgtttttctctttgggccattggcagtcactgacacggtctatatccattatttctttagggattatgaaatggtgaagtctgattctgtcattcattctttgtttattagctggagtacttctatgaagagaaccttctcctcatcaactctttggttaccctgaattccagttcaatacttcttcaagcgtgtgacccatttattctggtttcagagagatgccttttttttttaacctaatgggtacccagaaacaactataggaaataaaacctcacccataaagggaggtattgagcagcagaaaaactccagaacaggggtctccagggtcttgactcaacctctggcacctgtatgatgttggacaagctgtataatttctcagagttagtggactccaggcttctatctgcactccaaccagagaggcagttttttctatttgttttaaacaaataaagctacagccttaaaaaattgtgtacagtttattactaaggtatctttcagcttaaacagtttatgattttcatttatgatttaaaaaaacaagtccatgttaggaaacttagcaatctgatgaccaacagataccaagtgttatttctaaaaatgcattatttcatttattaattcaatagttcatttatttctccattctttaaacaagtgtttgtactatctaagtccctataaagcataaagcttaggcgtagacattgtaggcactaacattttggggatcacttggaggtaccattcttgaagcctcagcctgaaattcacagagttgaggaaaggatcctggaattcttggaagtctttctaaaaatcatccacaagaaggattccaggtacatgagagctaaacttggaattttccccatggaaagtctgtttgctatgcagagccagcttagggagtatttaacaacatccctgggagggaagagcaatttagaacatctggagactgctcattaattgtttatatgataatgttgatctgaaattgtagaaacgaaaacctgatctgtgatccctccttctcaacccatttcccatttcttttttacccgtgcaactgatgaatgcacacaggtcagaagtatgaggactggtttgaggacagtttcaggttccaaataggaattatggatcctactttctctttagtgcatcttatattccactgtgggtgtgttcattattaacagtggctaagactgaggggctgaacagggaaaggagagcagaaaacagaattccagaatccaccatttgaatcacactggtttgtgatggaggaagcacataaataacatctacagttctcacctctgaaactaagagcaatgggggcttcccttcttcacagtttcacccagttcttattcacagaaggtgctgttctcctagcacttaataattcaataatgagagttggaagctgtcccagcaggagatgttatgaaacaaccttaaagaataatagagggggaaaaagagcagcgctctatttttaaaaaatcagagcctttcttggaggcc

SEQ ID NO: 41661 - DNA, 1059 bp, Homo sapiens
cttcgagttctttttttaagttgagtgtgctgttctttttatattttcatattcttttctaataatatattcacacaatacccttcacttgatgaaagagaaacacgaagggcaggatcacacagctatggccagaagccagagtgtgctgcttgcccatgcccttttttgagggaccatgtctaaggctctccactggggggtgggagggaggagggatatggaggaagaggagtgtggaatgtgtttagagtgttccaatatgggattatcatcacacatgaaaagattggcagggattatcaacaccatggtactgatgactttatcatcttcctccttctccaaatctacccctactgcatcccctgcctccctccttgagggcaaacaccatatactgctcacttctttcctgtgtggcacttacttctgctatgaaaaatcattcctttatataattctttgtttaatgttccctttcctacactgtaaactccatgatgattgatagatactacgcctgcctatgacatccccaattatttgttggattaataaattatcatagtcatcctagacttttccctttcaatcataacctacaacttgaaagtttgtgttctatatgctatttatctacttggaaaatctcatgtttgtctttttgtcttcatccttaccatacctgccttagtttagggcctcatcaccctttctgtggttttctaaatggtctcttttatccagcctcctcactcctgcagctagagctgtttttctcaaatgaaaatttcactgagtgcagtggctcatgcctgtacccagcaatttgggaggttgaggtgtgcaggttgcttgagcccaggagtctgagatgagtctgggcaacatagtgaaaccctgactctacaaaaagtacaaaaattagccaggtatggtagtgtgtgcctgtggtcccagctacttgggaggctgaggtggtaggatcacttgagcccaggaggatgaggctgcagtgagccatgatcgtgccactgtactccagcctgggtaaca

SEQ ID NO: 41662 - DNA, 1030 bp, Homo sapiens
tgaattgagggtgttcataaagatatctgagtccttcaacttctacaagtcaaccaattaagaacttatgtttaaacataaaatattggtttaaacaatgcatttatagttgttattttttattttttactgtgtttttccaacaatacttggttaatagtttggccaaggaatattagactaggtatggaaatgaaaaggaattcagacagctcagtgcttcagactgtgtgggcttatcaaattgtagcttgacatcgtttttggtgacttaatatgcatctttgggaatctttatcattagcctcgttagctacagagactctttcctgagtgtaaatattgatttatgatttttaattaatggtctctcctggatttttccaatgtttatcaaattttggggcttgttttgtatgccaaatgaggtttatcagcaaagatacggactaagaatttttaatatggaacaatcactgcagtgttggttaagaaaatcttgatccctgccttcattcaaattgctatcttaaagaaagaaactagacacacacacacacacacacacacacacacgaacacacacacacacagtgagggctggttgctaggaaggtttgcatattcttttttcttttttttttggaaacagaatctcactctgttgcctaggctggagtgcagtggcacaatcacagctcactccaacctcaacctctccggactcaagcaattctcccacctcagcctcctaagtagctgagaccataggcacctaccaccacacctggcttattttggattttttggcagagacagggttttgtcattttgcccaggttgatcttgaattcctgggctcaagacatccaccagcctcagcctcccaaagtactaggactgcaggtgtgtgccaccacgcccggtcacattctgtttcttgatcttaaacaagagagaatgcaccaatacaattgatattattataacttctgcagttaataataatacactccacataatgtttaga

SEQ ID NO: 41663 - DNA, 1075 bp, Homo sapiens
ctggttctcaggtcttggaacttgggctggaacttacaccactggctctgcttcagggttgaactagaactacaccaccagcattcctgggcctccagcttgcagacagtagatcataggacttctaagccctcattgtcatgtgaacctgtccctcataatagatctgtttatcactttattttctatcggttctgtttctctggagaaccctgaccaggagctagagagttaggaaaacctaaaatttcctcttcagtgagaaatcctcccactcttatttttccatgagcaatttttcagtctaaagatcccgagcaaacctagagaaatcattccaggtagtctagtggttagggggaaaaaaaacaaaaaacaatagaaagtggaagagagaaacatcagtcacatctttctctaaaggcctggtgctgccatctccttaaatattttgaaggaacaatttgaggtgatacctgctttatctttcaaagccattcctacttgcaccatctctgcactgactatgttaacagtgcaaaaggtcatcctctgagtgtctttggatcaggattatttcatgtgttttcaagagagatagtgccggttaccatgacagcattaaccaagggtaacagagaacaaagcttttaaacttagaagaaagaaatcgtccagaaaggaaagaatatttttgacatggaaacccaaagggcaggttggaaataccattacaaattggaatgtgttttttttaatgttcttacttatttgtttgtggactaaatccttttgcaaatgagatttttttaaaattgggctgccaccattatttattttgcaacaaagagtgattgtaaatttttttttaagtagctaccagtacaacaacaggagcaacaataacaacactctttgcatctgggcttatttcattggccgaaaactagactaacctgtaaaagatgtttatagaatgtgaaaataacataggggcaacactggtgatacatcagtggagatgtatcttggtaatgagaagaaaaagcttactcctattaagcagaaaagggga

SEQ ID NO: 41664 - DNA, 1051 bp, Homo sapiens
gtcagcattgtccagtagaactttcagcaataatggaaatgtggctggtgcaactgaggaacggaattttaaaatcttatttaattttacccaatttgggccaggcatagtggctcacacctataatcccagcactttgggaggttgagacaggaggatctcttgagcccgggagttcaagaccaaccagggcaacatagtgagacccccaactctacaaaaaataaaaataagagaaaatgaaaaagtacataatttaagctcaatttgaatttgacaataaccacatatggctagcagctactgtattggacacagcagatctagatgaaatcttataaaaattatagcatcatagcgcagagttggaagggatatttgagattcccatagcaagtttgaagttattttttaatgcaaagtatgttgaatgcaagataattaggtttatacctggtgagagggtctgggagggtatagagactgtcattctcaggggtaagataaatgataactggatcataaagaatttatgttgaaaaaggaccactgattagcaccaaagtgtgtgatttctcttgatagtcttttatttgaagaggagatataaagacaatgggatttagcctttaaaaaaagagtatccaactcaatttacaaacataaatatgggtgtaagacaatgaacaggctgtattgccctcgacgctgaacctcttgagatataaagaggaataggaagatgataactttggccgggtgctgtggctcacacctgtaatcccagcattttgggaggcttaggcaggaggattgcttgagctcaggagttcaagaccagcctgggaaacatagtgagacctcatctccactgcaaataaaaataaaaaaattagctgggcttgctggtgcatgcccgtagtctcagctgctcaagaggctgaggtgggaggattgtttgaacccaagagattgaagctgctgtgagctatgatcatgctactgcactccagcctgggtaacagagtgagaccctgtctaaagaaaaaaa

SEQ ID NO: 41665 - DNA, 1027 bp, Homo sapiens
tttacatctaagaagatttttttttttctcttttgaggatcagttgtgacccactaggaaggttttagcccttctctcagtgtcctcttgttttagaaatatgtcaggacagccaactcacaggacaatacatgagacaattattgtgtatggaagaaaagtaaggaaaaagagggactttctgagagaatttcaagtgattaggtgcatgtaatacttttccatgcagccaggatcccaaacacacataatccctcctgaaaatacacctgtccatctgcaaggcaccaaccccattaccctcacctgccatactgacagagggccataagtacatggtggatgtagttgtaaaataattttttcatgccatgtgttggagaagtaggtgatagttacaagtttcaagggggtgtctctgaacaattggtttccaaatatataccctgtcaagacagaaggaattcagggaccaagccagagcctgctttgataattctcgccagtgatattagagcagggtcgatcctcagttccccttgctgttgcaattgtattctccaccacccccaccaccatatccccttggcctacacttcaagaataaaattgcagctggacattgtggctcatgcctgtaatcccagcactttgggaggccgaggcaggtggatcacaaggtcaggagttcgagaccagcctggccaatatagtgaaaccccgtctctactaacaatacaaaaattagccaggtgcctgcagacctggctacttgtgcagcggaggcaggagaatcacttgaacccaggaggcagaggttgcagtgagcggagatcgtgccactgcactccagcctgggtgacagagcaagactctctctcgaaaaaaaaaaaaaaaaaaaaagaataaaattgctccaaagcactattctagtcattatgtctcctttgtaaaagtagtggaaccaatcagctatccaagccagctgcttagatatatgttggcatggctcattagagtacagtta

SEQ ID NO: 41666 - DNA, 1046 bp, Homo sapiens
aagctcatagaagtaaagcatttactgttttaccgtaagctctggaagtctgtttcctgtgtcaagaatctttgttgctgtaatttcacctgctcctaggatctgcgtcgtcctgtgccctgccataaggatgtaactctcagctcaaagccaagggctgctcaagggacagacacaccaggcacaacaaggggagcccccgctaccttgggcttctcttcttgctttctgtaccaattctcctgctgtcactatcccctttgaccgtgttctcatgttctctgccacatgcgagagaaagtaaaacgtttttgagaccagttggtacatggtctgaaaagtgcttgcaataattctccctgtctacaggggacacttttcaagacccccagtggatgcctgaacctgtgatcataccgaaccctctatatactgctttttcctatccgtgcatacctatgataaagtttaatttgtaaattaggcacaataagagactaacaacaatacctaataataaagtagaaccattatagcaatatactgtgataaaagctatgtgaaggtggtttctctttctctctcaaaatatctcattgtaccgtactcacctgttttctgactgcagttgactgcaggtaactgaaacggcagaaaaccaagctgtgaataaggcagggctactatatttgagctcattgccttttagtcggtgattttaaatgtatctctccgttaagaccatttacctgaatttgggctactgtgtttccatcattaggaatgttttctgtagtcattaatgcagactaagagaagctgacactttaccccaaaataatataaacatatttcatctatgactactttgatacagagtacggcataaggggatatgtagcttatatgaggaaattgtcttaagtttgtctttaattctacatatctcccatgtgccatctaaaaagcctggaactataaatcaatacaagtcaaaacaaagaagttcactaatatgaaaatatataggcatgtgcatgttggta

SEQ ID NO: 41667 - DNA, 1031 bp, Homo sapiens
taggttttgacacaggaaaggccagtgaattgcctaagggtacttagtgccagggttggggtataggaggtgcagtagttacacgacaggagtcaccaagggcagatcactcccttgtcttctctctgggagcacctggagctgacttcagcagggctgacaatttaagccagtgaatcctgcctgcacatggttcaggatgcatgctgcaccaggtcacctaggcggcccctcatcctctgtccactgtgaaaacacgggacacccaggtcgaagggaatgctgaatgacaccatgtgggtgtgcagtggtctgtgaccagagggttcactggaagcaatttgcaaaggaggacttagaaaaccacctggatggttattgtaaattaaaaaaggaagagatgccacttttttctgaataatttttaatactaggtttatggctgggtacatgtgatagtcattacagcttatttaactctgaaattatctggcccctcaaactccaccgggactgtagaaatcttgggttaaattttaaaaacaacatttgaaagaagatgatatacttttccttgaggagaataaattcaaacctaaaagtggggggggggggaaaccccagctctctctaggaaggatctccattgtttctcatatttgctatgtttctcataacgtgtttgagctcagaaattcacccaggcacacaaaaggtctactctagttggctgttgagcccctccatccctgcaatccaagttgtgccttttctattgggttatttggaaagagtccaaaagcattctgaactctgagctcaaatctcaaaggtttccacttcttcggagccgaacatttcatcaggggctgggagtgtgtgagtgagttacaccgaacagctgcgcggtacccaccaccctctccccaaggatgacacgctctgcaaaggagggtgttgtaagcattcctgagcaagccagctaatctggagacctagcctgttggccgggggctacttctaagaagcct

SEQ ID NO: 41668 - DNA, 1050 bp, Homo sapiens
tggcactgtgaacaagaaaataaagtgagatggaggtgagtgaattcagttatgagaactgaattctattcctagcttgaataaaagaagtttgtaggccaggcgtggtgacttgtgcctgtaatcccagcactttgggaggccaaggcagatggatcacctgaggtcaggagttcaagagcagcctggccaacatggtgaaaccctgtctctactaaaactacaaaacttagccgggtgtggtggcgggtgcctgtaatctcagctactcgggaagctgaggctagagaattgcttgaacccaggaggcagaggttgcattgagtagagattgtgccattgcactccagcctgggtgacagagcaagactctgtctccaaaaaaaaaaaaaaaaaaaaagtttgtatttgcaatagcatatgtgtgttattcttatctttagttgggtgaagttaccatttaaacttgctgcctccctctcacatatattttctagtggttaaaaaaggatgttttgtagactggagagaaagggacttccaaggaggcaagtggaagggttaggatggcgggtagtggaattagacaacatctctggggtccaagaggcaccttgagagttccatgctgggatccccgaatctaagctgcaaaagggcatatggtgtctcaagctgcttgaaagaagtattgtctcagattttacttagtaagcattggtcaggaaggccaggtcaacattaagaagcagaaattagtgtagactgagaatgagccctgtcatgtgcctgacagaaaataggctgggccaatctggaactctacttaaaaaagaagcagctgtggctgggcgtggtggctcacacctgtaatcccagcactttgggaggccgaggcgagtggattgccagagctcaggagtttgaaactagcctaggcaacacggtgaaaccccctctctactaaaatacaaaaaaaaaaaaaaaacaacaaattagctgggcgtggtggcatgcgcacgtagtcccagctacttaggaggctgaggc

SEQ ID NO: 41669 - DNA, 1059 bp, Homo sapiens
tcactgcagcctcgaactcttggggtcaaatggtcttcctgcctcagcctcctgaagtagctggagctacaggtgcacaccactacacattggctatgtttttaatttttttgtggagactgggtatccctatgtagcccaggctagtctcagattcctggactctagcaatcctcccacctcagcctcctgagtagccagggttataggcgtgagctacttagcctgacccagtcttataattctaaatgcactgatgaagccagaacctaaagattgatgtttcaacccaacccgttcaccttacagattaagaaatcaaaggccaggcacaatggctaactcttgtaatcacagcatgcaattcgggaggccaagatgggagaatagcttgagcccgagagtttgaggctagtctgagcaatgtagggagaccccatctctacaaaaaaaattaaaaaattagccgggcatggtatcatgcacctgtggtcccagccacttgggagactgaagcaggaggatcacttgagcccggtagttccaggctgcagtgagtcatgatggcaccattgcactacagcctgggccacagagctagacaggagggagggagggaaactgaagccatccaaaaatgtgaagagagttattctatatcataaaaccattggtgtcagtgcccagaccaagctctaaggcggtgaggagcacatttctgccctgccaggccagtgagcttcctggtgccaggaattctgtcatattgcccaggctaatgctttgcagtccctttttgaattctgactcctggggatggtggggtgggagggagcaaccaacaggcaggcccttgagactctggaaatcattcaggcagctgtgcagagactcctccctctggtctggagagaggggtgcagaggccacaagatagcttgctttttgcctccagccatcagccccactggggtctagttagtgggccagaagttgtgggccctaatagcattggggtaaatgtcctggagtccagctctttgcttcccaccactctct

SEQ ID NO: 41670 - DNA, 1050 bp, Homo sapiens
tcagcacagttcccgagatacagcagaagctgagtaaaagtttaacaacaacaacaaaaaaactttaaaaataattttagctgtgtttctgttggatcgaatgtttattgaagtcacacaaagttaggtgggactaaaatcggccctctgcaggctttctgagttcttagtactcctaggaaaagtgaggagtaaaacgcaggggagtttgtgctcagatgatgagcttcctgcttgatttcaactctctcctgtaacctgtgtttatcttgatggccttatttatatctatttcctttcgataaaaatagaagctccaaaaagtgaatctaccacacaagggaggatacttttaactcaggcctaagtttcacagatagagttacgatgctgccctgcgtgtaggcatccagctagatggtcattttctgagtcatctaacttctgagttttcatttttttaagagtataattaagataggttcccagggatttaaaaaaaaaaaaaaaaacaacccaccaaccctgtgagtaaagtagacagtctatatgtggagacccatataaggagatttgtgggcacctgcccaacttgagagaagcattaagagctattcgaaacctactgaaatgtcaacacacttttgaaaaaggtccattagggatgcaaatgtgcagctccctgattatgataagcactggaaagaaaacagtgaaacccattaggaggctttgagaactgggttctgaggcgcagggaagacaagtctagtttctgcgggtgctggggagatgaagcccagcccttctctgcaccctgaaccagtgattctaatgatttaaatggccccccaaaatccctcttattttggataaagccaattaactcatttgtaaatgggccaactttgaaattccatcaatggcagataaaattcattttaataagatttattctgtaaagtacaaactgtgacttgcttctgtaaaggatctgacattagaagctcacttcaggcttttgatgtgttttggttggttcttgcaggg

SEQ ID NO: 41671 - DNA, 1031 bp, Homo sapiens
agttcttcatgtatatgaataaatactcagggtctgtgtctgagatgttactccctgtggtttactttggaatcttcttatctgcttcagggtctgtaccttttggagggaccttccagatagatattaggtagattctaaaacacaattccaaactgaatttctctgccagttgattttcactggattttatgccactgcttgactcaaaagtgtccttcttctcttcttgctggcaaagaaggaaaatgcttccaaaggtggtgcaggtttatacttatttatacgtatgaaataaatcatatgatttggcaaatgaatagtgaatcatgtcagttggaaacaaagggaactggtctgtacttataaaaatagttttaccccacaaatgtttgttgggttaaatttactgagtaagcacaccacgaggctgattcatgttctaagaaaatgaatatttccaggtccacagcatctgagctaatgaactctatcatagggttggggcttagggagtacagctattctctgccccaagctcccacctctacccctgttattgccaatacatcaatttgaagggaaaaatggtagcattggctgctcatgtttgaaagaatagtactggaaaaatgttaagtgaatttgaatatgtcactcagcatctctgttcttattatgcttgcatttttactggagaaatcagttattgccatatactaaccatatagtattttctagcagctttgggctgctcagatgaaaagcttttacgaaatacaaagtagtgaaggaaaaaaaaaacttgcacgattttaatgtcagccagagcctccccaggtttctctgaactatgggctttgttgttctatgcctaattttcttcctgtgtaagactggaatggattccagatttcaactaaaactcttgtttcactgttttcaaggacttttccaaaggtcacacatggactattgtgatgaatgcactctgcagggtgtgttcccagagcacagaagtaaccagagag

SEQ ID NO: 41672 - DNA, 1047 bp, Homo sapiens
ttttttgcttggaagcagtgtttagaggtttgtttttattctaagcttaagctttctgatttttatagttatacaacttatgtgatacaaaaatattggcttctccaggattattactctggctctttcacattttctgtgtttatctaaccaagactttgattatttaaatatatgcctaagtatctgaaataaatcagagatgtgtttgtgtcattcacaatgttctgaggtaggattacagggatcctgctcttatcccatttatgacaaatcaatctctggccatttttatttcctcagtcactatgtacgtatatagatttatgttagttaaactttatcattatcattgggtgggtaagtgttgctgactccattctcaagcaagaaagttaaacagaaaatataaggagtgtaagtgttattaatggagtattcttttaaagttgagtgagtcctctgttaaccaggttgtaacctccttactagtgtctaggctccctgagggggagggatctgaacacctggcatatagttgctagaaaatatctacttatcaaatgaattaatatgaataattcattatataatagtattaaacatttactgagtggtaatcatgggccatattactgtgtgcttcctctctctctctttttttttttaatggaattttgttctgttatccctgctggagtgcagtggtagaatcatagctcactgctgcctcaaattcttgagctcaagcgattctcccacctcagcttcccaagtagctgggactacaggcagacgccaccacgcccagctatttttaaattttttacagagacagggtctcgcgatgttgaccagtctcaaactcctggcctcaagcgatcctcacatctgggcctcccaaagctctgggattacaggcatgagccccaacacctggccccgtgtgcttgctatgtggtaaggagtcagcaaggaactacacacaaagcactatatggttttttgtttgtttgttttgttttgttttgagacagagttttgctc

SEQ ID NO: 41673 - DNA, 1239 bp, Homo sapiens
tatgtttttagtttctcaggaccaataatacattatgaacgtattacctggccatgcagggatttttttttttttttcaaccttgttaaattaactgatttctacttgactaaaggttgttgagttaccaaaaatgttgtggaattgagcacagttcaggaggttttacaatgcttcccctggaattccaaggtagatcttccacaaacacttccattaaaaacaggcctccgtgcgcactcatgggtggtgttcccaaagtgtgtttaaaagtcagtcattcagaactcaaaacacagttttcctcacaagaaatgtcagagatggttactttcccagggctgcccacaaaagccttttattccataacgtatctgaaagagcctccctccatctgttgagggaagaatgaaatagtactggacagaaatccaccccagccacccccaccctgccatccctgaggacaacactttttatttgctgaggcagccacctggacttcagggagaaagaaaggaaacacatctctctctgagtggattctatctctgaagccatccctggaagagtcctttgtagagtgaatgtttatcagccgagatgtgtttctttcctttgagatagctccataccaacaattaagtacgttttgaactttctcttcttttattaccatgatcttcgtcatgactgttctgcaccattactggatttcgaaaccagaggaatgatgatcgtatgacaatcaaaattaatatcccttggattcattgtttagcaagggcacggatctcccaccagccaagatatatccatttcatagcccttaaacatagccataatgtaagccaggcatggtggcttacacctgtaatcccagcactttgggaggccaatgcaggtggatcatgaggtcaggagttcgagaccagcctggccaacatggtgaaaccctgtctctactaaaaatacaaaaattagccaggcgtggtggtgtgcgcctgtagtcccagctacttgggaggcggaggcagaagaattgcttgaacccgggaggcggaggttgcagtgagcagagatcacaccactgcactccagcctgagcaacagagtgagattccctctaaaaaaaaaaaaaaaaaaaaaatccatagtgtggtgttctcacatttgattaacatattatgactttttgatgtctgagtaattgattcttattaccattgaaaccagaga

SEQ ID NO: 41674 - DNA, 1093 bp, Homo sapiens
ccagtctctccctctgagaaagcttcagacaccaggctgggttggccagcctgacacagtgcctgtcctgtaagtgatggcaaagcgtatcctgaccctactttacctaacacgaagatcaaagcctcccagcatgtaatggatgctgaaaaacagcctttgtttaccagtcttgccctttaacttgttaagggcgcccctcccctgaagaaacacactttctcagctggatgcaggagagggaacagaattgtggaagatgtccttaacaggcccttctagaatcactgctcacggtggtgtctccattcccataggaggaaagccagaaccacaggccagggtcaatgaacgtattccagctgggcctgtggccatgtggctggctgcagattttgctttgttacctgatggctttggataagcaggataaaaaataatgacttaatagaccatgagttttaataacatgtctgcaggtcactgggaacagggacagcatagagctcatgtgtagtgttttgctttgttttcttgacaagcaaaatgagttgtcttcatgggtactgtatgcaaatctaaatctctacaagccaaattttgtggtaaattctgtgatctgtgggtatgtcaggattttatgaatgagacaagcacatatatgtgtaggacttctttgaaatcccagttatcactctagctgtcactatgaggaagaacaatgtgtgggcaaggaaaagctctttgctcaaagccagagccagcaatcttgaggacagagacagcattctaagtgtgatcctgctaaaactagagagaatgtgtccaagccaaggacgacgaattactagagctcagtggtatgaaaaaagaagaatctcagagttctggagaaaattctttaaatacccagggcaggctttgtggaggtaccttcatccttgagaagagagacttcagtatctgtggaacaagtgaagctagaacttggcatcggagcatagtgctgagcaaagaagcctctactcagatagatttgagttaccacggcatgccagtgaggaaaagcagcctgcacaggccccagcgtgca

SEQ ID NO: 41675 - DNA, 1049 bp, Homo sapiens
gctactcaggtggctgaggcacgagaatcacttgaacctgggaggtggagattgcagtgtgccgagatcgtgtaattgcactccagcctgggccacagattcaaaatcaaagctttttagattccctgtactatgagtctagtggttctttcaactcttactcttgaaatgtactgaagcatttacccagcatacaagatgatgcttttttatttcagcattcagtaactgcagactattttctccctgtttgcactgtagttttgtacactgtgtagttttgcatttaagatgacaaaacagtaaaatatattcaaactgtcttagccaaaatagggctaagttctgaatgcatattaaattggaacttgaggaatagaattgtgttatttctgtaactttgaactctgagggagaaaatattccttcctgctagtgcatctcgaagcattttgcatcctaaaggaagtgtggacttcattggttgtgttgtgacatatattagagcccagactgtagctaagtcgactctctgagcaacagacactctggaggatccagagacagtaatgaatgaagccatttggacagatctgtgcccttcgattttcctgcattcaacaaagcagatggtattcccattccctatggaaaacatcaagagaaatcctgaaaaatccctaatgtacctgatttacttggaaattataagtcttgcttgcacagagctatttgaaaggcttccatggagaaattaaaaatttctaaaatgttaatgtgtggtcttaaggaatctacatgaatgaaatgatctggcaatgtttccgttttcaaaggaatcaggcttgaaatgtaaaatttgtgttcagtcataagaaccttccagaagcaaaccccagaagtcaacctgagaaatacttttgtgaagatcaaacaatgtccagggatgaatcatccacagcatttcctaccaaagttgagaagccagaccttcagcaccaaggtggtctccatgctagacaagaatatttctctcacttttaaaagta

SEQ ID NO: 41676 - DNA, 1050 bp, Homo sapiens
tccagagaacatttttagtcacatttttagtcaaacgccatactagaacatgtatttagaaagaaaaaaaaaaactacaaagtcaatgatgggcaaattgattcacatttgtacttagtttataaggaaacgagaacatcaaggtttggttgcctttatgggcaagttatttcacagagcaagttatataacaattctttgaatataaaagccattcactagctaattaccaattagccaattgccctctgtttcaagtcagtaagtggccaatagtatatgcaattagttaattgctattataattagctttatgaacagttgctttttttaattgtatgctaaaaagaaagagcccaggttggtcttgctaaaatttgaaccagatcatttaggcagtatcccaaaataccactcttaaattgtattaacttggctgattactgagatcttgccattttgcttaattgtatgattatctgaaagtaggaatagaatcctttgaactctgagattctaaggtgatttggaataaaatctgcctttttgaaattataatttattacttttgatcaaaattttcagagcatctatgccaagagaattctgctttaaaaataaaattacaagcgacaataattaccaggtatacaaattctggttttagggttgtatttgcattttctcctggcttcttgtgctcctcctgcatgtaaggatgtgattgtagagtgctggtttcaaggaatttctcttaatcaatcctgaacctaattacacctgaaaccacgtcacttatgcctttgggtgaaggcacaggaaaagtatcatgggttacaggttgattaaacttagggtaggaggatacagaattgaaagataagtccctgcaatggagattaaaaatcaattttttcctatttgagggttttgtctggggctggcaataagagattataattcacaaaaggaaacagttaaaggcaaaaatatccgagcagttagcacattccctcttaatgcttttctttgcagtagttagctcaggaa

SEQ ID NO: 41677 - DNA, 1045 bp, Homo sapiens
aactttataggtattaccgtcataaacctgagtgactaagaaatgggagaggaaaaaaaaaaacaccttttattgagaatgaagaaggaggaaggagtgaagtgcatgagggaaagcattaggtgtccagacatataaagaaaagagtcaggtgtagaaatttcacaaggtgctgtgtgtctgccttatgaatagaaataaagctctatgtgtgggggtctccaagccttagatgttgctgagtcccacacagaccttgcaaggactctataagcatagtaaaactttttaataaagtgctttgccactcaggatttccttctaatgtaactgtatggtaatgcacaagcaactctcactatctcacacacacacagtgtgacagggctcagtgctgcttcaggcatcaatttaatgctttcaaaggcccagcttcccaatcacctagaaagctctcctggatctcctttcaccctggtgagcgctctgaggggcaggcaggcccggctggagtatgcaggtccagctagtcctctgcattaagaactgtgtaatagtcaaaataggatttcatctgctttcctggcttcatgggcttcttttcataggagtcacagtggcaacgatgtcccagaggtatgttaggaacacaattttaccactattagaatgaaaggagcccacaacctgctcagaggttttctgtagatgacagatgagtcatccatattgtgataataaccctgacctttctgttttcaccctgtagccatacattggctattttaaagttgttcatttgtttttgtttttgttttagagacaaggtcttgctctgttgcccaggctggagtgcagtggcacgatcatagctcatggcaacctcaacctcctgggctcaagcaagcctcccacctcagcctcctgagtagctaggactacaggcatgcgccaccatgcctggccaatttttcctttttttttttttttttttttttttttttgtagagacagggtcttgctatgttacctaggctggtctcaa

SEQ ID NO: 41678 - DNA, 1049 bp, Homo sapiens
ataagacgacacagcagcaataaacttacaagtaaaattcaataccaaaacaaacacaaagaaatttaaaaaacaaaaaacctagctcatcatgttgtgaaaatgaaaaagtgaatgtccattcaaaatattttactatttcttgtggagtttttcagtgatgtaatgcttgtagccaaattgcttaaagagtgtttatatatttttttccttataaattgtctattttttaaaaaagctatttaaccacagctgaagtggggggtaaggccaaattgccaacacttgttaaaagattaatactcttaagtggcactctgatacctttccaacttgtcatcagaaaggaatcaataattaccaactgttgtatttagaccaacttacaatatctagctcattagaagccaggatctagaaagctccttctaagccatttaagatattcttacattgagcttcatattatagaactttataggattggatattttacaatagaataatttagcctcaggactgagaatgtggaagctgaataaattagctttaaatacatcattaaaatcttatgcacaataagctcattagattctagttttctcctttagaataccaatgccacagacactacaggagataatgaaaggtatcagttgtgttgagtggagggagtttaagagaaaggacccttcccaaccagcagccagtagaaaatacaacctactcacctttttcccttctaagttctgctaaatcacatctgcctcatagagaaaggaatgttgcctttgagaactgtcttggagaacagataagcttgaaatgttctctctagagaggacatagggtttgggatcctctgaaaaggcccagaaaaatagctcagttcaaatacaatgttctaggacaattggaatataaatattgtccaaaaatataattaaaagaaaaaagtttagcactgtgtaaagtaagtgttaactgaggaagtcccaaaaaggtgctgtcactttaagttctggacttggggttctttgtatttgtaa

SEQ ID NO: 41679 - DNA, 1027 bp, Homo sapiens
caggcgtgttcagggtgggtcgggggttaactaatactgaggttagaaaattagactggagccagcttggaaagggcaagaatgctgagctctagagactgatgttgttcaaaattagtagattgggaagtctgtttccctttttttttttttttttttttgagacagagtcttactgtgccgcccaggctggactgcaatgtcgcaatctcagctcactgcaacctccacctcccgggttcaagcgattccctgcttcagccccccgagtaagctgggactacaagcacccgccaccacagccagctaattttttgtatttgtagtagacacggggtttcaccatattggccaggctggtctcgaactcctgaccgcaagttatccacctgccttggcctcccaaagtgctgggattacaggtgtaagccaccgtgcccagcctggaaatccattttcttaatgaaagagaataaaatagaacaaaatagtacagaacagaatagaaccataggacaggagtatgtgctttccagggaggttgtaactgagcagctattaacagtagaaatttattgtctcatagttctggaggctacaagtctgaaattaaagtgccagcagggccaggttccctctgaaacctggaggggaaggatccttcctcgctgcttctaggttctggtagccccaggtgttccttggcttgtggcagcatcaacccaatctctgcttcagccttccagggctttctctctgtgtcttttcacagtgtctcccctccatgtgtctgtctctgtgtcccaatttcacctatttatgaggacaccaatgacattggattagggtccactctaatgacctcattttagcttgattacttctatgaagactcattttcaaaataaggccacttcactgctgcaatagatatttttagcccttctcttgtattgagaatattcaaaggttggccaacaaatcggtttgcaaagagattcgttaagccttctttgattggctttcc

SEQ ID NO: 41680 - DNA, 1035 bp, Homo sapiens
gtaaagctatgatgtgtgtgggtaagagtggggatagctgaatcctgaaaattcaggcagaatggctcactttattttattgtgtagcctagtctttatgtgataatattgatacttaagtttaccagagaggaaaatatttccttcaacatcctctacgagatctgttttcacatgtgtagagctgactgtatgcctgaataggtgaattatgcatttcacccaactttcttttataatttgagtcattagacatggccgtagagttaacagtttaatataaaagtgttcctggagattttgcttgttctttttggactgtaatcaaatgtgaaagagattagtagtagcagtatttgtgatttcaccctattttaaatatttacagatgcttaactcttagagagatacttctgacattccaacacatttcagctctgtataaacattcctttgggggctttcattttgttctgatagtaaaaattgctagaggaatgtaactgaaaactgatttccaaataagataccctgcggcaatcgaaatatcctatgtagttattatccactgtaaagtacactttccctcagggaatctgctatcagagaaaattaaaacctagccacccattttaaagcccattaagtcattaggtggctcttcagtgttttcctaatgggctacacagcacaaggagccctcccagagccagtgagaaagcattgtgcagactcctgcaagcagatttctttatctgggagtcacagaagtttagacctgagatggaccttgaaaattattcagcttcttccacttgcagaagaggaaactgagcacagaagaggtcacgtggttttccactatccacagctggttagaagcagaataagggttgaaacccaaatgcctgcagcatcctggcatcacagagccttcatggtcttaaaggtgggatgaattattctataccagaataatgttttggatggcagtattggaaaactatctgccttgaaagttgcttcagatgaatg

SEQ ID NO: 41681 - DNA, 1039 bp, Homo sapiens
ttgctgatcagctttccattactatagattagcttgcatttttaaaatttttaaataaatacaattatattaattggtatctttcactttgtgtagttactttaagattcatctatgttatgcatatcaatagttcactccttttcattgctgaattcattgctgaattggactgaaatatatttgtccatttacttgttcaaggacatctgggttgttcccagcttttgactattacaaataaagctgctgttaacattcgtggacaagtccttatgtggacatatgctttcgtttctcttgggtaaatacctaggttgacacatatagtagagaatgtttaacttttcaagctataaaattgttctcaaaagtgttgtgccattttccattcccaccagcagtgcatgagagttttagttgctccatatccttcccaacacttattgtgtctttttgattattgccatcatgctaggtgtcaactcaccgtgatttaaacttgaattttcctaatgactaatgatgtccagcatctttttatgtgcttatttcctgtttgtacagtttcttttttgtaaaatgtctatttgatttttgcacagtattttaattaggttgtttctcttcttattaagttgtaagggtttattttatataaaatgcaaacccttcataaaatatatattttgcagataattttgcccagattttggcttgccttttcatttcctctttttcatttcatttcatttttttgaagagcaaaagtgttcaattttggccaggcacagtggctaacacctataattccagcacttcggggggctgaggcgggcagatcatttgaactcagaagagaccagcctgagcaacatggcaaaaccccatctctactaaaaatacaaaaattagccacgcgtggtggcatatgcctgtaatcccagcatccctggtggctgaggcaggagaatcacttgaacctgggaggcggaggttgcagtgagccgagatctcaccactgcactccagcctgggt

SEQ ID NO: 41682 - DNA, 1025 bp, Homo sapiens
gtgcaccctgctcttcttactatccttttccatagctgccaaagtgatcttttcagtatgaatcagaacatgttatccccttcctaaaagcttctgtggcttcccattgtgtctagaaataaacagaaagtctccactatgacccacgtggctgctaggatctgacatctactcagcctctgacctggtcttcctctgcgtgcggtttcattcctttgacgccagctccactggccgcctttcctgttcctctaacatgcccagctcgtgtctgactcagccctttaaatctgctgttccctcctccagacctgcaagatcaagtctctgctgaaatgtcacatcctccgagagacgttgcctgacatgctgttttatgttcatctgaacacatttttcagcatttgaagttatctttttaaaaaaagcagttcattgtctgtgcctcttaagggcagggactttgtttattgttatattctcagggtctatacctatgcctggatcatagtaggggctcagttattgtttgttgaatgactgtttggcattaattaattaatttcacaacttggagtggaattagccatctgcattcatatgaaaaatgacttaaatccctatgatatatcaaattaaggcaaataatcagccaataaaaatgggtttgccacaaatttgaccaatcaaaggttaactactatgtaaagagttattacaaactaataaaaagaacactaacacaccatttaagggacattatagtccaggcaggaccccacctaccagagctaaccagcatttgcacctcctcagttatggttttgaggtctcctgcctccttaggattataggggacccagcatctctcttggtgtcagaaaacaggaggtgatcctccaatatcatgctgacacacttacagtcctcatggaccctttgaaaacagcccctccattttctttttgccaagcttgggcataaggcttatttgtgttaggccatgctgccatcttgggagaacc

SEQ ID NO: 41683 - DNA, 1052 bp, Homo sapiens
agtcctttgaacatctaaatatatgcagcattttacagaaataatgtaagcgaactaaccgtttgtggtcagctggaaaacttaactttcagagggatttgaccagctatactgacctagaaaatgaaataagcagtttggaaaatctggtttgtgcatataattatttttatattatctcaggctgtgccttgcaatgagtaaaccacggtagttatctgacctattgctctaccactgccattgcttcaacacagtaattatgtaagactcagcatgtttttaactaactaaatgcatgcaggacattccttagcttcagcagcctatctggagactactcaagggctctttatcagtctttcagtttgaatggaaaagagactgtaaaatcatgacctgcgttaaaatgtgtagactgggagggccattgtggaaatatttaatacaagcacttggcacttttgttagctgaaaatgccctgaaagtttatgacgtatcaaatatttctaattaaaatagaaaattaatcttcatgatgaaagaatcctaacagcgctttttatatgaatacaaatatttagttgggatataggttatagaatgtctttaaggccctgaagtcctttggatttactgtttttcattctagttcttcctttaatagctcggagcaaataaaagtgatttcctttagaatgtgcacatgctcctaaggatatctgaataaaagatacgtatctgataatttgccatctcagcatcatcccttgggcagcaggttggaaggcaatagtttaatctgaatgtgaactaatgcttatgcgcaaagacatgtatgtctcttcctggatttgaaggaactgagagtagagcagtttaaccaggattccctagatggcttatcatcctgatgagctagcattgcaatcagaagacattcacttttgcttaaaacatgaaattgactggtagagttcagatattaataaaactagttttagcctgtagttttaacccttttcatcttacatttaagaaaaaaaagaca

SEQ ID NO: 41684 - DNA, 1046 bp, Homo sapiens
aacgagatgcttgtgaggtatgaagaaaagggaacacatacactgctgatgggagtgtaaatgagttcaactactgtggaaagcactttgaagatttctcaaagaacttactaataaaacagaactaccatttaaccaagcaaccctattactggatatataccccccaaaatataaatcattctaccataaagacacatgcaagcacatattcatcacagcactattcacaatagcaaagacatggaatcaatgtagatgtctatcaacagcaaactggataaagaaaatgtagtacatgtgcaccatggaatactatgtagccataaaaaagaatgaaatcatgtcctttgcagcaacatggatggagccggaggccattatcttaagtaaattcatacaggaactgacaaccaaataccgcatgttctcacttataagtgggagctaaacactgcatacacagacacaaagaagggaacaacaggcactgggccggcttgaaggtggagggtgggaggaggatgaggattcaaaaactacctattgggtactatgctcattacatgggtgacaaaataatctgtacaccaaacccccatgacacacagtttgtccgcggaacaaacctgtgcatgtatcccctgaacctaaaataaaagtcggacaggaaaaaataaaaagcagataccctctggaggtatggtttaaatgttgcagccattgtttactttctagcaaataggtttatcagatcttgtcttgaaataagcttccctggaggagaaaggagtttagaagtacaaggagagcctgaggggaagagtagaatttctgtgagaagataaaaggcatgataagtgtatactgaggccagtgagtaataccctcacttgtctcttggatttctccaatagtggatcctgactattcttacaagttcccctatagagtaattgacagtgagatcatcccaggcctggtttgaagcccatctttgtgactcagtaaatacattggttgtcctagtgtgtctggcatttctt

SEQ ID NO: 41685 - DNA, 1075 bp, Homo sapiens
tggagtgcagtggtacgatctcggcttgctgcaacctccacctcccgggttcaagcgatttgcctgcctcagcctcccgagtagctgggactacaggcgtgtgccaccacgcccggctaatatttttgtatttttagtaaagatggggtttcactgtgttagccaggaaggtcttgatctcctgacctcaggatccgcctgccttggcctcccaaagtgctgggattacaggcgtgagccaccgcacccgcccatatatattctttatgaaattaaaacttcgggtctgttatgtgtattatcccctaatttcatgtcatcaggcagaccattaaatacttttgcatggggaatgatcatatgtaagtatgatctttaaaaatagcttatagaaataatatgtatttattcatttatttaacatatattgatcatgagctatgtgccatggattcttctaggcaccgagggtatggtagttaacaagacacataaatgtattgaggattgtctttaaggagcttatgttctagctgagagttacaacaacaacaaaaataggtacaatttagggaagaaaaaatggggcaaatatgaggatataaagtattaagaagggctgaatttgagataggatgatcagggagggccttcccaaggtggggacttttagcaaagcctaaattaaatgaggggactggttagtggatatctggggaaagaacatactaggtaggggaagagccaggacaaagaccctgaggtgggaacatgcctggagtgttcaaagaacagcaagagagccagagtggctggagaaaatgagcaaggcggggcagtagtcagaaggaagttggcgtgtgtgaggagagggtggttcatagatcttaggagatcgtgtaggtcacagcagaggctctgtcactctgagtgcatgggacatcactggaagcagctgaactggcaatgatgtgacctgacttttattttcatatgatcggtctggcctctgtatggagaagggactacaggaggcatgggcagaattaggtgcagcatttaggggactgttcca

SEQ ID NO: 41686 - DNA, 1050 bp, Homo sapiens
tgtgctgtgtgtacagaaaaaagataaaatgccatctactcctatgagattcacagcctcttggaggagacaaatatgaaaagaaacaaatcatagcatcatgaaaagaaccacaggccagcaatgccacagaccaaagatgagggtggggggcggtggggagtgggagggctgtcaaacaaggtgtggtgttgcaggactttttctttcttcttctttttcttcttcttcttcctcttcttcttcttcttcttcgtcgtcgtcgtcgtcgtcttcgtcttcatcttcttctttcttctttcttcttccttcttccttcttccttcttcttccttctttcttcttctagtctcactgtgttacccagcctggagtgcggtgaggcaatctcagctcactgcaacctccacctgccaggtttaagtgattctcccacctcagcctcctgcacagctgggattacagatgcatgctaccacacccagctaatttttgtatttttagtagaaacagggtttcaccatgttggccaggctgatcttgacctcctgacctcaagggatcctcccgcctcggccttccaaagtgctgagattacaggtgtgagacacagtgcctggcctagactttttcttagttcagtcagagacggggttctttgtcccatggccatgaaaattcaggctcgcagacaatttgaatggtgactaaaacagggttttattgggtgaaaaggaagaaaaggggggaaacagggtctctcactaggccagagtccctgctagagtgcttcccacctggcctttggaatctcagtttccacatagaaagagtgggggccaggctcctccccaatgcaaactgtgcaaacttctcaaggttccaccccagtgtgcattcctcccagtgcacaggctggttagagattctctggggaccctctcccgcctggctgtctcagtggtagctgagccaagttttggaaaatgaaaaggagcctaccaggcagaccatggggggaaaccttctagaacatgggggcagttcagg

SEQ ID NO: 41687 - DNA, 1078 bp, Homo sapiens
tttctcagacaagagtgatttgacttgtaacacatgccttttttctttcttttcgttcatttcatgtaaacaattaggtgtgatgttacagtgagctttcacctttaggttgtggtcagctctagacccagtgagaggctgccatgtcataaacttgatttaaatgccatgggtgtgccaggtgtttttgggtgaatgaatgagacatatgccctcaagccccagataacttctcagtctatttcagaatcactgaatcatgtgacagtatgagaacactttatctctaataaagctggagtgtaatgactcattctcacatagttttaatgtttatcgatttcaagtgttctttcttgataagaaaaggtttgtatgtgaacattcgaaagaagagcaacgggcattttttgttctttcaattttaacacaagtacaatattttaacctttaccttgtgatttttgggtgtatgcagtgcagcttgcctataggtgatttagttgttcgtttctgacctcattacaaagaagtggtggaagctgggtggatcttttcattccccagtatattctgccagaagctggtgctcatggatcatttgttcaaggacttaaagttcaatttctagtcaaggtaaattatggctacatcaggctggtctggcacaggtgatctcgatgatcttctgaaagctgtccatgtgggctccagggtagggaacctagaggaacttaggcaggccagggagccaattctatagtatttgaggaggaaccgatcgcccccccaccacgatccaaacctacctacagggccctctgttaaccaaagaccttgtattagcaaggagttctggctgaaaattccttttgtcattgggggaaacaaaccctaagcaatgtatgtgatactttcttggagcccaggccatctgggtagcatgagttttctttaaatacatcccgagtaaggcaatagatttccttcagagcatttggcaattaagactggggctgtcaactaggcttactgttaaaaacctgccctgctttcccaggctgcctggtctgaaatt

SEQ ID NO: 41688 - DNA, 1666 bp, Homo sapiens
ttaaatttcaaaatctaccatggacatatttcatatctttaagtatttgacattattttaatggctatgcatagttcagttgcatggatggaactttcttttttttaaccagtcaactattgttacgtatttaggttgataccagtttttctttctaataaaccatgctgcaatgaacattcttgtggctaaagctttgcacatccttaatgttttttttaagtattaaatcctagaagttgaattgtttgatcaaaaactgccacgattcttacatgaatctatcctgtataccctttaggatggcacagagtatctgtgtagcaaaagttagcaccgaatgttttccacactaaacctgagatagggaaagagcaggaaggacttttgccctttactctcggaagttttgtttgtattactgcctgctataaatacaaagagaaggacttggctcctcctatattttggctgttgcaagccctaaatatttaattcaatatgtttaaagtaggccttatgaactaccggggcggaggattttatgacacttttaccatgatgtgcaaatttgtatatccacactttatctgtaggagtatctacatacatttagttatgggaggcagaggatggagcgagagacgggccagcacccttaattcttctctgtgttgaacagagatgcatgtttttgatatgctgaggagcattactataaaatgcagactaatagtatttcactggagaatagaaaatacttagggaagctggagtgctccgagacaacctttcaatccatttaccaaaagagcttataatggaactcaggtttcaagggaggtcaaacactaataaatattgagaaaaaatagttaaaaggacatcaagttaatattttacaatctattctttgatcttggaaggcttgaaatatttttctacactacttctgtgatttattgattcacccctgccaattggcatattggaacagacacagatgccttgcttttaactacagcttccgcttctataatgctttgcaatgccaacagatttttatgtattcactggcatcacttattgatactgccacagttctggaatatttgctagttaaaaactggatcgttgtcagtaaaagcgactgaaatgttattgatttttgtttcaatgctgtaataacatctcttggttttgttgtattggtttggggggaaaagtaaaacaccctgcatttcattgactcttccacctttatctgtattcaaaatatgttcagaatctgattatttttctacttttgttgtcaccaccctagtcttggggaagaaaatatatctgtcacggattacaataacctcttaactggctgtttccactcttgcctctcttcagtctattctgaacccagaagcccgagagagcttccaaaatgtaagtcagatgatgtcactcctccgtctttgcactcagagccagcctctgcatgctgagcctcatcttcctcacctgccacatgccccactccccgcttccattgcaaagacagagctgtcaggagagagtctggattggcagcactcgtttgcagctaccaatctcaaggcccagatgctctgccttccctgctgtttctgaaggtgattgtccctgctgctgc

SEQ ID NO: 41689 - DNA, 1063 bp, Homo sapiens
agaaatagctaagctttctagagtatggagtctgtccagataatcttggtatagtctccttttttggagggtgtgtggtagcgggggaatcatgtggtccctggaactctgtatgcaattatttgctctgctgataaaaaaaaatgttttattgctacaaaaaggggtgtaggtagcttgaaaataggtttcgatttagtcattgtactagagttctgggaaaacaaattgttcttttgaatttctgaacaataataatttgcttaagacattttgcacaatcatgataagtaacacatcttggtaaggaagtcttgcattggcagagcatctgtagaaggactgctacacagataatgagcacagttatgtttaaattaaattaagtgggcaccaagggatagaagtagatagggaaggaggaagtaattgaagcagcaaatagtccgaggcacagaaatggaaatatgtgtaaactctgcaaatttaaaagtcacttgatgccataaactattttattaatttctctggagttttaaattggtacgagtaatgatgactgtggaaaaaaaatcaacatatgcgtcagaattggggaagaatctctttgtgtttaggcactttgggaccgaaggatatttcccagatcctcgatgtgcaaagtgtggtccatggaccaaaagcattcagtatcctggggacttaatagagatgcaggatttcaggccctgcccagacctactgaatcagaatctgcatttagcaaagtctccaggtgatatacatgcatatcgaagtttcagaagcactgccccagagttgctaaaacagttcattcattcattcatcaaacgtttttagcacctctttcgtatgccagacattaaactagacaataggagggagagatcattagaaacataggtaagacatggtccctgcactcagggaacatataattgaagtgggacatatgagatatgaggctgaggcaggtggatcacctgagctcaggaattcgaggccagtctggacaacatggaggaggcctgtctctacaaaa

SEQ ID NO: 41690 - DNA, 1065 bp, Homo sapiens
gatccaatcacctcctaccggggtccctccctcaacacgtaaggattacagttttcaagatgaaacttgaattgacgcagaccgaagccatatcatagcccaaagtggaaaatagtctcaatgtccatcaattagaaattattacataaatgaactaagtatattttgctatactcatgtaatggaagtccaagcaacagttataaaaagaaaataacatagatctatgtgcgctgacatggatagatgctaaaacaatatcatgaaattcaaacagcaaattgcagaacagtatgtatggtatgaaaccatttttgtaaatttttattctagctattcacagaacaaaatctggaaggattcacacaaatctcttaatggtgcttttttttccccctcaggttgggaactttctacagtgtacatgtttaaattattggactttttctgtttttcagcaatggtgtattactttaaagttcagtaaaaacaacggaggtattactttatttttgctgtgctcttgaaccaggaagatgagcttttatgccacctattccctattgccccgattgttccctagtctttctcagacatggaggagctttctgtaggctaatcccagaattctttgttttccctcaaagaccagaacagcagcatcatctttttggggtttagttaaaactttagcacgtaaggttttcttaaggtggctttcaagtcttaacctgcacttccaggcccctttaacccgcttttctttcctcttcttttcttttcttaacatgttcagattctttatggattatttcaacggtcttattacccattttttaaaggttttgatcattttctaagcatctgtatcttccccctccttccccatcctttcatgagaggagacacctgtttcccagcctgcttagaattactcgttgatatttgtttcacagaatttttaaaagagggccaaaggaatcggacatgaccttttgcagcagaaataactgtcttttgtctcactcctagctcttcctgcacgaatactgtacatgctgtgtg

SEQ ID NO: 41691 - DNA, 1028 bp, Homo sapiens
ttggatgacacctaacttcagaaacctgtacttctcccttccctaccctcacccctttctcctccattcttagcatcaagtctatctccaaatatatctcgcattgtccactgtactctatccccatgaatgttgtgtggtttgggccattgtcatttcttgcctggatttcattgcaggtaaagagcctcccacctgatctccctgcttccactccttgcagcttccctgcagctcacatatacacacacacatacacactccagtcaccagacaggagcccaaatcatcatcgttaaatataaattagacccttcaatagctttctgttactcttagtaacaaatttcttgccgtgcctatgagccatagtttgcctcctgtgtctgtcactgccctgtctgtaccattcttctccaagtgcactgccttttagccccactagattctattcccattcattaaaaaaaaagaaagaaagaaaaagaaaaaagcactgtcactatcactgggcctttgcacttgccctttgcctgaaattctcagacccaggttctctgcacgtctaggtttcaggtcaaatttcacgtaataagaggcccttcctaaactccataaaaaagtagcacctccccaacccttggagcgtctctgtcatattgccttgtttattgtatctgtggcactttatatactctctgatacactttcttaacatatttgattgttgcttgtatatgcctctccaggagaatacaacctccagagacttcatcagtcttaatcatagatatatccttagcagtgagcatagccaagcaacagtggggaatcagtaaataaatcagtaagtttcaaaatgatgaaaaaaaaggatagcgattgctagcataaggaatttgggattctcaaactattactaatagcatatcagatttactcaatgctgttattaggatagtgagctagacttttggcagttgttaaggtactaacttaaacacagactaaaattttttcctggacta

SEQ ID NO: 41692 - DNA, 1074 bp, Homo sapiens
cacaacatatatatatgtagacctcttacagttaaatgcatttcagtaagattaaggcgctctgctaaagagtcttttttttttttttttttttttttttttgggagacggagtctccctctgtttccaggctggagtgcagtggtgccatcttggctgactgcaaccttcatctcccgggttcaagtgattcttctacctcagcctcccaagtagctgagactacgggctcacaccaccacacccagctaatttttgtatttttagtagagacaggtttcaccatgttggccacaacggtctcaatctcttgacctcgtgatccgcccaccttggcttcccaaagtgctgggattacaggcgtgagccaccgcgccaggacactaaagagtcttaatgaacctggtaaaccagattctcagcaacttgtgatatttccgggaaacttttttaacagaatgggatgaaacatggccccttttgcagcattggatgtggccacgagagccctctgttggaaggggtatctctcagatcattggtacaacagatgagcagttgggaacctgtagactctgaagaaggaaaggtcaaagttccatttgtagtctttcagaattaaaggcttggcctataagaatttgtaggggtgggtgggtggggtcctggatcaactgtgggaagaagaaggattttgttccctgaataattcccattgccgttaatggaaatgaaactgtcagggctacattggtttgttttcatggcctctggaccaggttgcagaactggcattactcattttgcaataaaaaaatgtctggccgggtcttatgatgatagtttataaatgcccctgttggttttctctctccttatacacaatcactttgaagttcccgcaaagttaatatttcactttgttcctaagtccccatttatgaacttaatgaagtccaagtatcagaagagaaagttaaagtttacacatgcaactttgattgttctcaagtgactcattggtttaaaaaattatttaaaaagtcaaagcactgtcatttgcaagagacactt

SEQ ID NO: 41693 - DNA, 1671 bp, Homo sapiens
tgagggtggagtcaaaaccaataataataataactctatcataatattgactgtttgggggccaagccagacttgtccctaaatatgtctcagacttctttctcagtctgacaaatgcttgcccttccttcaaggctcatctcaatgccacttctttgaagatgtttctgaccttgaccttggagtacctcccatctgctcctctgaacgtattgcttctttcaccctgcccctggaacactttgaacctgcctttactacagcctgtttcacagagggttttgtgattatttgttcagatgtctatctcctcaactagaccaaatgtttgcttcttgaagtgaggtttgctctgtgtgttagacgtcattagctgccttcatgtggcctggcccagcccatggtgaagaaagagagagggggacagaagaagaaccattctggatcgagagcaaattctctgggaaagtgaagttcccctgtgcccattcatgctccataaatgactgtatgagctccagggtttaagtctcaagctcacaatgcatgaatgtccccaaggcatactcgttcaaaatgcagattcctgcccctgccaccacccgccccctcccccccaccaccaccaccaacacccctcttctcgccattctgatgtctagatctgaggtggggcccagaagtctgtgttttcaccggcactccaggtgatattctgattcaggtgatctgaggacacttttgagaagcactggtctccgactaggagggttctaggaatgcaggcatttagggcacagggagcgtgcagactcaggccctggtggctgcctcctgggctggggagggcacgctgcagcctgcactttgtctccagaaagcaccaggagctggaagatcctggggatattgcccttcatcttccccatctgcagcccagaatccttctcaactcattcaggccacagtcacacagaggcacactggtatgcctctttttccagaatattctggacaaatattcagcttattaaggatgcacctcctgaatatttttaatgctagtcattctgagctgtggaatagacatgcagggagctagcacgggcgatggcctgcagctcgggaacgtgaggcccccaacaaagtgaccacaaccagtgccaccatcagagcaggtcctggatgacctcaggcttccttcaggctgtacctcctctgctggcctcagcagtgacagcaccatgtcctttagtcaagccacacacatccttgaagctgccacattctctgcacagagagtcacgtctgtgctcccgctgagtgataatagggtcgtgacctccttggaaagggagaccatgttccttgcattgtcatcagcccccaggccgtctcagagctccccgtgcctctgcaagccccatttgatgaatctgagaacgagattctggaaacggtctgagtgctgagcagtacctgtcacactcactcacataacaaagtatgtttgtttcccagaagacagtcattgtatattcctactcattaagttactataattatacccacatggggtataattgattttaatttcactctgaggttgctccaggtttcaacagcaagtctctggccttggagaactctctccctttatttagcatttaa

SEQ ID NO: 41694 - DNA, 1026 bp, Homo sapiens
gagcagcccatagcagcaggtgggggcctctgttacgacagccaccttcaccgcaggccaggtgtgacatcagcctgcaccctagcagggctccttgtctccccctctcctccctgcatggcaggctcaggtatctaagaaagcaagaacatgactccagcaaacccacaagtggtagaagaagcccgaaaagcttgtctatcgttaccattagaaaccaggcaaccacaagaagaggcagagaagaggaaagaggagcaggacggggaggaggcatcgagacaatagaatacaataggcgttctctgcctccccctctgccactcaggcaagtcaggcgtggctgcccctttccaaggtggcagccacaaactcagttctgatccttatgttcttctaaagcaaattccccttagcatatgtacattgaatcaccagattaaaatattgctacctggctttcacccccagagattctgatttaattgatctggggtaccaagtagacttctggatttttaaagccccctgagcaattctaatgtggaataaaattagggaaccactgcattattggccagataattcctaggtcccatgccccacccgccctcaaatagagcttgccacaggctccactttaagagggcaagggcaaacccatcacccttttgtaacagtagaaatttgggggcaaattcagacccatccaacatttattgagcacctactacttgccatgccctggattcgtgcctccctatgtattatctggcttagccagcagggagcttctaagagggtacccttctaaaggcaaagcgctgtcttgaggtgtaaatacaaactgtctggtctttatgttctgtggctttctaattcatagatgttcctcggacaaaggatgtttcacaggtgccaagagaggatggttttaaaaggccagaggtcatgaggcaagtgttggaagaggcaaagatctgaggggctctgatttggcttcaggacctttcattagagcatcag

SEQ ID NO: 41695 - DNA, 1056 bp, Homo sapiens
ttattttttcttaggtaaatgacaaaacccttaggtaagtggtatttccgtttgtaaaggttattcttccccaccttttccagtttttcaccaggggaagcatttctgtctcctgtcatgtgtcttagttaaaagatgagatccttatataatgagacctctagatattctcgttctgttaatacttcaaccaactctttaatctttgctataaatttttgactaaaaatatttttgccactgaataaaagatcataaaaaatagacccagtgcctcctgtaaaagaaagtgttaaaatacaaatatctgataatttgtgcttgttccaactaaattgtgggcctgcatccaagttgccttagcaccagcctgtaaaatgctaactgtgtctaaccctatgtcattgtgtgtattagtttagtgcaccattagtttagttttggtaataaaataacactgatgttacctgaaagaaacacgtactaccccatgagatctctgctcaattttactatggttttatgctgtggactctgatgagtattttccttttcggtctttctgttcttgttttaatatcaaggaatgaggcagtaacacagtgatgatcaggctccttctttcaaggagcctgaaatactttgtaagaaaagtgtagttgtgtacaacaatcagcttatgcacctccttggaactcttaggaaaactatcatggactctttccccaaaaaagttgcactgacacacatattttacgccattttcaatttttgtacaaatttagattaatcctgctgggaaaaaagatggtaccatatgatccagcaattccactcttgcatatacgctgaaaagaatgaaaagcaaggtcttgaagagatatttgtacaccaatgttcatagcagcatttctcacaacaccccaaaggtgaaagcaacccaggcactcatcaatagatgaatggctcaactaaatgtggtgtatacgtacaatggaataattcagaatgaatttctgatccatgctacaacatgaatgaaagttgaaaacatta

SEQ ID NO: 41696 - DNA, 1043 bp, Homo sapiens
aactaggcacttataactcttggtgggagcaaaacttagtgaaatgccctaagatacaatttgtcagtaaaaaatggacctagtttcacttcaagtaattttcttgacatggcttcacttcaagtaatttttatttaagtaactaatcatagatatacagaaatatatagctataggagattaatgaaagtattacttgtaataataaccaaaaagaaagaaacaaaaaacaacccacattttttatgacagcagattcaataatttattatatatcctctaaatggtatatgaagcagccattaaaatcatatcagaattaaaaagaagaaaatgacaaatgttggcaaggatgtggagtgatggaaactctcatacactgctggtgggagtgtaaattgatataaaccctttggaaaaccgtttgacagcacctaccacagttaaacatgtgcatcctaggtagatatccaagagaagtatgtgcctgcatgacccaaaagacatgttaagaacatttgtagcagcatgaatagcacaaaactggaaacaaccccctatgtccatcaatggcagaatggattgataaaatgtgtgttatggtcatgctctaaagtattatacagcagtgaaaatgaatcaacaatacatgcaacaatgtggaggaatagccacgtgacaaaagaatacatgctgtatgatcccatgtatataaagctccaaaacagaaaaaaataaactacagtgtttaggaatgcaagacaagctggtaaaattatgaggaaaagcaagaaagggataaccataaaatcaggagatggcaccctttgggaggagagtgggggactcaggatcagaaaggccctgggtgcttctagagtgctggcaagactctaattcttgacacaggtggcgatgacatacagtatcactttatagaaatacgttaaactgtacaaaattattttatgtgcttttctatttgtggcactggacaatttaaaaggttaaaagagaaaaaaatcatatccaaattaatttgt

SEQ ID NO: 41697 - DNA, 1063 bp, Homo sapiens
gcctttgttgagtttcataggagcccggagcataagccgctcgcaggcggtgtctgagctgagggttacggcaggaaggtgacagggggtacaatgccaaagggtgaccctagggtttgtctctggagcaatgattcctaactggagctttctgttatacccaaatcttctggctctttgccttggaaatattttaagattccagggtaactaacgattcctagaaaactgccagcgaacctttcctccctccaccaggtttgtcttttcatctgtacgctgctgtgcttgcgaaggtcaccatcgttgggaggctgggatctttggagccacttacttctttccccaaactgttctttccttctttaacctttcttgtcataaaagggaaaaaaaaactccacccacgtcaggttgttgctggtggttagagaaccagccctgcccagggaggaaaagctctcatcaggtggggtgaggaggggtggcccatgctgagctccacatctagtggtgctggactctgcaatgtgacttcctggctgccaagccaacacgccacatctctgcagtggagggctggcttggcagccaggaagtcacgtttcctagattgtttaataaaaggacaggtaacatgaagtgagaaaaacaggatacatgtagacagtgtagtcccaattacgtaaaagaaaactgtgtgtgcacaggcttgcctatgcactctcacataaaggctgtaaggacatggaaaacgtgtcatcactgggtatctggggtggaaaagggttgggtgatttttattttcttttttttgtgagtctgcgtctcctcagatgtctacatggaacatttgtttcttttataattagaagaaaaggtttttaaaaaggaatgaattatcacttacccattggctgagttggatcctgtaacaataatgcttcataataacaggcatctactaaatagctattgtgcccccaagtactgtgttaagcacttaacatggattgtctaaattatctaaatatttacaacaatccaatgaggtagggaccgg

SEQ ID NO: 41698 - DNA, 1048 bp, Homo sapiens
caagccaaggggagaggctctcagaaaaaaccagccagccaacaccttggtcttgaccttctaacctccaggactctgagaaaataagtgtctgcggtttaagccactcagtctttgtactttgttgtcagccctaacaaactaatgcacaatgtctttcttagcaagcgtgtgcagaaaccaactgaggctccctcagctctatgaagtcccagcttccatcctctgagatgctgccattaacctgaggaaaggcttttaggggtaaacgtatttttcttgaggcagaattcagtgttcctggacagaatctgcaccttgtatcttcaccccgtgctcatacatggatgtggatgcacatcctttcccccaagtgtctgtgctgttttgttttggtcgtacttgctttgttttgccttgttctgtctactgtttagaaaaagtgcagaatctctgattagaaggagccttttagggctttgcttctaatgacataaattgctgagtgtgctgcagtagcaatgcatttagaatcaatggacagatatctgctatttctagaagcttatatggagaattgtgtcaattccttgcaaccttggatggtctcagcattcattataggacagtctttcagtaatcacaaagtgaattgtccctctcacatgccatgcagcagctgttggctcccttttgggggccactgttgttctaattgattcttgctggagtgatggggctcagttatggctggagtggacgagcagacccagggttagcctcagggggacttagtgtaggctgatagttgcaaacatgtaccaaagaaaccacaagaagtgaatgttaactcactttttacaaatcatctcactcctgccctttctttgtctccattttttctcactctactgtccctttattattttgtctctgttgccagagtgagcaaatcaaagtacaggacaccctgttaaacttgaatttcaattaaatgacatataattgttttagtataagtgtgtagcaaactcacactaaatcaatt

SEQ ID NO: 41699 - DNA, 1074 bp, Homo sapiens
tggtcacttgggctgggaaaggcctggtcatttgttggcctggggatatattatcatctctgtcctgaaaatgaaaagaaattagaactgagcaagtggcccagtgggcatatcaaatttttatgtgtccatggttaaaaaatgagctgtgcaaagagtcggcagtgaaaggagcaacattgcaagcgtagtttgtgtccgttaatggggctcactgttttggccagggtgtaagagagataataagcttattgcagtgtgttgagtttaagttgcaatctctaaataatatgccaacactgttatttctttatttatcacactgagacatcatctgttgacttgctactatgagtgatgaggatttagcttccttgaatcatccctcttctcttcttccccaccttcctccttattttttttatccttatggcactatttttacttccttttgtggttacctttgtaactttaaataatacactgaagcctctgttgcttttggtcagcttttgacagcattctttcaccctctgttttgtgaaatgaggttgtggtgcctctcccttttgctacatctcttttctatcttccatgtcccaatttttctcaactgtattttttattttgtttgtttttatttatttattttgaaattaacatatagtaagactgacttttgcaggggagggtaacaactttgtaaattgcaacacatgcatagatttatgtaactaccaccaccatcaggacacagtgcaattccatcacccctaaaaactccatcgtgccacccatttgtaatcacaccttccttccacccataatccatggcagccactgctcttcctttattatcattattattccattgctgggtagtagtcctcagcttattaatctattcacctcctgaagtacattttggttgttttcagttttgagcaattatgaataaggctgatctaaacattcatacataagttttcatatgaacataaatctctatttctctatcataaccagaccataccatcttgattactgtagtttacaggaagtcctaaaatcagg

SEQ ID NO: 41700 - DNA, 1085 bp, Homo sapiens
ctgtgtttgttatttgtgtctttcaagacctaaaatttagtcaaggagtattatacatgtagggctacacattaatactctagaacgctggttcaggagtcagagagacctgaagcctggcaaacagccctattactgccaactgcagggtcactttagcatcctgagccttagtatcttcctccatttaaaataatgggatttactagtttataattgtaagaactgttaaaaatttattagtacttacaatgtgccaagcacttttctaaacattttacatggattaactcagtctttgcagcaatttcaaaaaacagttgcctttattatgcccattttccagatgaagacactgagatatagagacgtgggtttgctgaaggtcacacagccacttattaagtggcttcagagtcagtgctccattagacaatacttttaaaggtccttcttgcttgatcattatgtaattctagctgattcataatgtacctatatttaaagtatgtttgacctagaatagcagactatttcgggggtgggaagtggggaggaattcagaagtgaagaaagctttgactgcccaatgttgtgcatatgttttgccacgaggaaattttctaacctgtgctttctactttgtagttttaggtccttttcctgcccactcagctgataggagggctgctgttgtgaactccagccagccgaaggctgcttgtgcctctccagcaggttaaagctcaagcacattgcattactgcattctgaaaataacaaaagcctgcatcatactggccagatggttttcattaaggatgtgctataattttgtttcccctcaggtggaggaaggtgactcttgccctatatactatatatactagtgctgtgtaaacagtaccaggaagacatctggagtatgaggattcttggtttcacaaccactggtcaaccctttttgttgttgttaacattttaacatctttatggagataattcataaaccataaaattcatccatttaaaatgtacaagtcagtgattttagtatatataaaaagtgtaactattaccatgat

SEQ ID NO: 41701 - DNA, 1227 bp, Homo sapiens
aatggagacccctagaggaggatacagggtataggggatatttctgcttttcagaatttgattttgtttcttttcttatttcattattattcattgcttcttatatgctttgtttaaaagtacctatgagacaatgacctggtaatctagatgtaacttactaaaaatcagtatattttaaagacgtgctgaataagtggaaagccatctcttaaacataataggaagacctaatattatcaagaagttagttttcctaaatcttcaaatatattatagtctttgaaaatcagtatacaaagaaaagcttgaacaccataacagcgggttggcgtgggggaatcccagggatttgttctggagtaagagtaaaggttttcgtcgtcgtcgtgtaactcctcaaatatataatgctgtgtgcgtcccagtttctagtcataaagccaaaatgggatgaagggcttggtcagaggagatcatcttatatctccagcaccttaaagtagtgactgcaacattgtaggtgcttaataaacattggacaggtaggtagatggatggatgtgtggatagagccatttatcagaccagttttggaaaatgttgagattggggagcatccttagagtgcttctaatggagtggctgaactctcaccattgatctataggaaattcttctagcatgggccatgaggcgtgtgtggagaaaaaaatgaactgtgacataaactaattagatgcttctggtttgagagggagctagtgttctctgtggctttttttcagtgtcacagttgggttctacctccttctgttagtcctctctctgggccatgagtcctcaagaattctgcccccacgtgatttcccgagtctgccccatctagcaactgctgatctgccataaaaatgagagctgacatttctatagcactttgtgaacaatgtagacttcataaacttaatcctcatttcaatccatttttacaggttagggaactgtaagattaaaatattgcttaagaccagcataaggtctgaagcagagtggctttgaggcccctgctttgaaggtccacatttctcctacaaagggtcttttccaccattcctgggccacctgcatttttacattccccatacatccctgaatttcaggatggtctcagttatattctcccctctgtgtcctgatttcaagtactaaaagtatattcagcatgtc

SEQ ID NO: 41702 - DNA, 1046 bp, Homo sapiens
cctagctactcgtggagctgaggcaggaggatcacttgagcgcaggagttcaaggctgcaactattatcacaccactgtactctagcctaggtgacagagcaagaccctgtctctttaaaaaaaaaaaaagtacattatacaaatagcacatcaaattctgatgaaagtgttcctcatggagtttttcttcttttcaagataatgcatatggtaaaacattgcggcaacaccatggctgggtagttcgaggggtttttgcggtaagtgatccttcttgtctcctattattaactgtattgggtatgccagtggctagggctagaaatctcttcttacccagttatttatctagtcatgattgtcagaaacaaagttgtgtgtgtgtgtgtgtgtgtgtgtgtatgtgtggtgtttttgtttgctttgtttttgaggataagaacaaaatgttatttatttcatttacgtttataggcctttggtgtgtggaaatgtcagcagtaaaaagtgtctggaatagcaaagactgttaaagaaatatgaataaaagagttgatgctttaccctagccaattctaattactctagccaattccaatgaccttgtgaagatttgcctcataagtggttgcctttctgataaggtagtaaaaagcttaagtatcctagcagaagtacgtaggaagcagtgatcctaaatacttatcattgaagggaaatgatgcattcaggtgatgaagtcaacctaatagctccctctgctgcccattgtattcattccttttaattcttaggtcttagttgatttttttttcactaattgaattttgtccttgaatattaactgtattgggtgtgccagtggctaggagggctagaaatctcttcttagccagttattttcattgtgaaggtgttttgtattcatgtgttttggctctgattacccaccaccctcttcttcccagcatgtttaactaggaagaacacaaacctgagactcttagtctcctggggaagtcacttagactgctttataaaatag

SEQ ID NO: 41703 - DNA, 1026 bp, Homo sapiens
aggctgtggtctcagagctccaatccagacccacctgcctactgaccatcccttagagaccctaccttcacctgaaaccccaaagccaaacttggttgcacctacagcttttccatccaagtcagttgagtcaccattgttctagtctctcaggcaagaaattcagacactctgaactcttttctcacttcctctctatacctgctgtgtcagcaaggcctgcctcagcctccaaactcccagtgctgtgcacagctatgcttgatctctggattctctgctcttcaacctgtcatggccttccaaacctgaaaatgctccctgtgactctatgccaggctttaagtcccttcacaaacttggtatgcccttttctcatccttattcctggaagcccctcaaaatcttcccagactcaacacatctctgctatggattttacctctaaacattccctgcatttctaaatgatactttatgaattacaacttaaggatgggaagtgtgactccaaggtaactggactaattctttggtgttaggttctggttattggtgtagccacctctctcattaaatcatgaactttactttcctgtcaatgtgccccgcacctgacagtgccttccttgtccgtcgtagaattccaaaactgtcctaggagttgggcgtcaccaccaatgtgctttgtgattcttccagatgtgttagttctgttagccagctagataaaaatatttttgaagcaaaaccatacacttctattccctcctgctcccttggctgctcaggaaatactttttgagtgcctgaccactcagagtataaataatttatgtgtttttttatattttgtctttgctaatgcacatgcaaaatgtttgtattttataggtgcttatatatatcaaattatgaacgattagaatgcaaggtccagctcatggttctcaccctgtttgtgcattagaatcacgggaaggactcaaaaaacaagcaaataagaaaaaatatatgtatcactta

SEQ ID NO: 41704 - DNA, 1056 bp, Homo sapiens
cacctgccctacttttcttttttttgttacaatagtagctaaaacttactctgtgccaagcatatgtgtactcttctaatcactttacatatattaacacacttaatccttacaataacccattgatatagataccattagtatacctactttacagatgagggacttgaggcacagaaatattaagtgacacacccaaggtcacccaggtggtggtaggtgatagtgacgagatttgaacccagcactttagcttcagtttctgcgctcttagctaccgtgcaacagtgcctctcatgaggtttgttccgttcttggtgttttaattacatcttttagggctttaataattttaagcatgtttattttacattccctttccaattgtcattctattatatgaagttttagggtatcttttagtgctatttattgtgtctgctgacttttaagtcagcaggattttgtcctcctgcatttcattatttgtgtttgtgagcttatctttaaagaaggctgtttttctgtgagaatccccgtggcctgggttgtaaatgtgtccctcaagagcagttttgcatttgccacagaaagatcaccagatgtggaactcttttttggctgtttatcattttgggagtcatttatcatcatggttcctggaccatctgcaaatttgaacctccaaatttgaggtagaaaaagaccctgagaattcatttctcagaggacatttttccccatccagacagaggcatataaattcttttttgtctctccgtgccagtgcatcgatggttctcctaatctactcttttcagtgtgggtgtagccttttaaaaactgctgcagttttttaactaagcccagctgtggcagcatcccacatccttaccactcacttctctctttgttactgacacacctggagacttcctttctctgttgccagttcattcatgcatttaaaataatttttgctgtattttgtcaagcattttaaggcagtatggcaggagagttttcagactgtttccccacatcttcttttaagaa

SEQ ID NO: 41705 - DNA, 1008 bp, Homo sapiens
gctacactgcagtttatgattctgttattgtttgagtgatatacttttctaagtttactttgtaatttaaagcccagatgtacttactttttaacaaagtaggtttacaagcttttcataggtgcacctgcttctgaattaaccgcaacctgagttgcctcaggcagtgctctcagtgagtcacattgggtgtctgatttactcattgtgtgaccatagccttgtggcagatggtaagcccaccccttcccctctgtctcccccatcctcctgcagatgcaaagggggaaagaaggtacttaagtccaccatttactgaatattcactgcatgtcagctaggcactgtgccaggtacttactcagcttttaactctgtcatcttcacaagtctacagaggacaggcttcaagtttttgaaatgtggtggtagatgttaatcccctctttaacttggataataatttgaaataagctggaacttttacacatttgagtatgaaaatggatgctgagcagaacttactaagtagaacttttgttgttcttccagaatctccactgattaagaatcaactggcataatggatatacaagtactttgtaccattacacttttgtacaatggaagagactattacataaatgacattgtggtggtttgacagctttaagggtctctaattagtagggaagagcatttgagctgttcgctaaagctagagagcccagacgttgtctttattgggttggggaagcctctagagaagtctgctggcatgagagcaacgtgtgtcgaaaatggacctttgcaactatgaaacacagataattggggtataaagatggtacattggcacctagttattctcatttggatctgagcagtattttaagtctgtaggtctagttctcagaaaccctgcaatgagaagaaaggagaggaaatgtgtttattgagtgatagggatatggggccagtgtgtgcttggcatggaccatgtctcca

SEQ ID NO: 41706 - DNA, 1055 bp, Homo sapiens
gcctgcttggcttctcaccacagcttgttttctatggtgattgtgtttagaataacaggggcggtggggaaggtgggcaaaacctgggatgactaattgtttttctcttgtctgtcctgtggcttagagatagcagccagtatagggaggccgagggcgggaggagggggacgggatgtgacacagctgtttgctgcagggatgatggttatttctagcatcacttgagttgagaatccctgatggggggggaagcaaacagatcctttatgagacaactgagtgttcctgttctcctctaggagacttggaaccatggcacttgcaagcccaatggaggttcttttataatagtggggcgtatatttggggattgctgggaagctgtatacaggttatattaatacctccacgtttgtgggtatggaaaaggatgaaactggatactggctctattcttttctatttttaaaaagtctctgttatgagctactgttgctttgttttccccttttgggatttaggaatgtgtatttctgtggctagctgacagtctgttttcattctagctgataaacctttaaaatgaatgctcacttctattttgaagattacctacttccctttatcttcattggaagataaagtcccatcaccagtgtctcagtgtttcccctaagttcgattccctgcccactgtaaatactgcacatgttcagtggtatttgctagaatttctatttatttttcaaatctgttctaatgctgtctccttctctgctgcgtttttcaagcttgtcttctgtttctttgaacatagtaagcttggttgcatagtagactatgtctgatgatatttcattttgtaagtctgtttggtcttcttttgtttctgctagttctcaaacctggtatcttgtttctctgtgtgtgggattatctttgtgtgctagttattgtatttgaaagtttacatgtaggaataaagtgaggcctgagatgacagtaccttactccagagaggatttctgtttgcttccgtcaggacttggggg

SEQ ID NO: 41707 - DNA, 1068 bp, Homo sapiens
cccgaataaaggaccacagagatccctggagaaactttgacactctccacctccaccaaatagagcactgcttcccaatggcaccatttatctgtttgttttacgtaagggaggtttgttacagataagacataggtaggggttttgttgctgtcatcacagttgaacgtatttgttgaaacgcttacccaaatgctacaggttatcaagtgggtaaaaccagcacatcatttccctgaaaatacatgggaatctgatcaatccatgcagctgcttttttgtttatcgtgggccagccccaggaggagtgtttttaccttcatcttagagcagtcccctgctctgcctactgcactctactggttcttgggagagctatttctgtgagcatgttctgcagggggttgcttgtcatctcttaacccaattatgagggaacaggtactacagtcatgaagaacccaaggtctgttgtcaggctacccggatttaagtctcagttctaccacttgctggctgtgtgaccttagacaagttacttaacctctctgtttctcagttcatttgtaaaattagaaaattaatgatgatagttcccttagggttgcagtgaagattaatggagtttttgttgggtactcagtgcagtgcgttatccacggtaggcactaagtcaatgttagtatgatgtggataggatgaggatactagacaaaatactgtggagaagtgagcaggttaccgttggggggaaccttagattattggtggagagagaaaacaatttgctaagtgatttcaacatgaaaaggcattagaagggtaagtcaaaagtttatcaacattggttttggtaaaattacaagcattcactgagtacctgatccacacgactcactgtgctagaggctaggactccatagaggaccagtggatgcacctgtcctcccagaggggcacgtggccaaagcgctcagggttatggatgattttttattttcttcttttccacattttctaagttttctatgatcacattatcagaaaatatattttttaatgaaactg

SEQ ID NO: 41708 - DNA, 1062 bp, Homo sapiens
ttggactaacagtattcccatcacctgggagtgtgttagagatgcagaattgggtcccacttgagacctgttgaatcatcatctgcgtttgaggtagattgctgagcacattatccacacctacacatagtgaaggagaagagagactgcctaaggggagtccctggaaggtacatacaaggatctctgaagccacagggcacttgctcgatgcacaaaagccatggttgattggccgtgctctccagggtacagacaccacctccccttcctttatgaagaccttctagcccactgtgctgagtgccccctccagagacagtagctgctaaatgccacctcaatatggcctcacatagtttacactattatccaaaagacctgtagtcggccctacagataacagatactctcttgggtctgaggaactgaattctccagagttggcagctctgcctttctggtgcaacctgtttggatagatgggccccagcagtgcttatgtgatcaccgatagctcacaggaagctttgtggacagtgagacactggaaatgctaactctcttgtccagagtgagcataaactattttcccagtcagctgaaaaaaaattcactgaaataggaataaatgattataactgtcaggaataatttaaatataccagtcactttcgttttttggcccacctttttggtatgagaatgtgtggttgcagtaaaagccagggctccagaattcttcccagtctgtgtgtacgcctgtctcttcttgactgttgaaaattgggatccagaagttaaatttagacttgcccaccataggtgggattaagcatagaggtgaggatgctagattactacatatctgtaagatatgtcccttagaattccaggcagtctatttctggtgctttctatccatgcttccaaattgtccctcctcacaaatttagacattagcatttcatattgcatttttaaaaaagatttattccccagcggaaaacattgaaacctccagctaataggaacagcattaacagctgaatgggagtctcc

SEQ ID NO: 41709 - DNA, 1953 bp, Homo sapiens
ctcaggaggttgaggcaggagaattgcttgaacccgggaattagaggttgcagttagccgagattgcgccactgcactccaacctggcaacagagcgagactccctctcaaaaaaaaaaaactctgtcataataaaagtgcaattttgtcatgctttttttacacttatgtgcatctttttaatgtcatcaagtcattcaaaaatgccattttgagtggatatataagattccatttcaataacaccataaccattttgctgttgaacattttagttgtctctagatttttagaaatgtgttataaataatagcaccaataaataatagcaccgtgtgtttttaggacagaaaatacagaatcagtttttgacatcttggtgggacagtgagcacagttcatttcatacgactgctgacatcccagatgtgtgtgtgggcacatagctagctctctgtgcatatgtggtgccacattttgatacttaaaaatagagactctccaggctccccagtaaaacctagccctttgggcactaatccattgaaagattgacatttccgtctaacaagtttatgaaaatcattgtaggggtggttgacggggaagtctgcagctgctgggttaagtactctttaatgtggatccgatgcctttggttgtcttcctgcctgtgggccatttggcgctcacagctgcttttctcttgttctctccctgtagttactggggcttccggatgcagatgacgatgcgtttgaagagtacagtgctgacgtggaagaagaggagccagaggcggaccacccccagatgggggtcagccagcagtaaatctgggggctcccctgagaaggagagtgagccccacagtaacctaggtggggtcactgcccctcctgggttagcattttgcattagcacttcgaaataggacatctggctcccagcatccaaattaaaatgaaatacctttttaacgaccacaaaatatctgtgatgagctttgctcagaagtgacctgaatttcactcccgcttcagtggggtttctatggagttgtcttggtagcctttgccattttgaatttagagtccattttgtggctgactattctcttaagtttatgttggagaattaacattcgctgactcgaatgtagagaactctgaatgtattaaggataggttttgagtcctcacaggtgaccttactgagggaaagcatggcagagaagaaatgcagtctgcactttttatgtactttttaagtgtccgtaagtgaaaggttttgcttataaagcatgaattttaatatctagtcattaaactgcacaagtgcaaatacaagggcaggaaaggataatcacttagctttggactaagagggtaagagaggcccagaagcctttaagtgttttgccattactgagttacctgggtatgtagcgactggttcgtggttaggtgtaaatgttacttgcttgttcgactgtttcaaaacatgctaattccaaagccacttttgaagtctatagtggaaaatatagatggggtgaaagatataatgtattgatttttaaagctgtttataagccgtcccacgtataaaatgaaacattttaccttctctctttctaatgagatggccgcttgttaaatcatgaaaacatccagaattcaagtgccgcttaaactttgaagccatagataaatttgttagaaaagtaaaccaggattaaaagtttttaaaaatatggtagaatccttctttactttttaagtcttttatttaaaaaaaaaaagtcaaaaaaaggattccattgtgtaatttatttaaaaatttaatcacatgtttcgagggacttaattgtggtgtatttgtaaagggacacgaaggtaggaatcttttaatcgtgggttagcttggttaacagggaacgttttaataatc

SEQ ID NO: 41710 - DNA, 1023 bp, Homo sapiens
ggaggtctggccagaactgagatagttgggagcccctaaaaacttgcagacatacctgtggatccccgaagtacaagacccaagagcactgtgcagtgatggccacaggcttcatagaccaccggaattcaagtccaaaacgacaggcagccttgggaggccacagaggctcctggtgttgccccggggtttcattttggcccaacaaggaacaggaaggggaaacaatacaaaggctttcctcccttctctttcccttgccccttctgttcagggtttactgttcctgtctactaaggaaggcttgacccataacacaaatagtattgacaattactctgctgggtgattagatgagccttggaccctgaggttctttcactcactgagaagatacattggtggaaaggacaacaaatatgtcacaggcacgatggaagcccagtcttaacatcttagcacttagtggcataacagcgatttcactagtactattagatttcaaaatgctgagtttggatcctcgtgagtatgggctgtattctttgcaagtatggaacagtctgattctgatgacttttcagttgttttgtcatgaagccaacagtgctgagtaaatatgccccacctgtgtgtgctattacatataaaaatttttttgtaacaaacttttatgtagtccttgctaagtgccacacactgtactaagtttcttttaactcatttaatccctccaacaatcctacaaggtagatattatggttgatattctctttttacagatgaggaaactgaggcacagagaatctaagtaactctcacaagatcacacagctagtaagtgccagagctgggatttggacccaggcagtttggtttcagaactcttaactactctgctgaataatgaatgtcgtgggtgttggtcttacatttactgaaatctatgattttttttcacaccacagcacagaggccctgcctgcccgtatacttcacgcagtgcatgctgctaatatccat

SEQ ID NO: 41711 - DNA, 1025 bp, Homo sapiens
tgggttcaaagttcaaatttgcctcttactatgtgagcttcgagttctaaataaatcttaatgataacatgagcttattacaaagatttgatgagataatatacactaagggcttagttcagtgcgtggcacatgacatgtaatggtacctgttgttgctgggagtcttgatcttagtatgggtggtttaaaagaagaaagtaagtgggtcagtcttagtttctaaatccattgtacagtgccatccaatagaacattctcgaataatagaaatttctatatctgtgctacccaatacagtttagtgtcttgctgcatatagctattgagctcttcagatttggctagaggaagtgacttttcacatttaactgatttaaatttcaatagccatgtgtgatctgtgactaccatgttaggcagcacagctttatgagattaatattgtagaatcatgtgacaaaaagcagcattgtgagagaacagttacgtgaaaatataaggaagcatagagctcatggggttgagccagtcagaatcgcatttttaattagtcatggacactactcttattatgtcctttattgtacaaacaaaaaaatagaaaacatttccaaaccttaaatgtcaaacagtccagtgtcaagatgtattagtttgttctcacactgctataaagagacacctgagcttgggtaatttataaagaaaaaaggtttaactggctcatggttctataagctgtataggaagcatagctgcttctgcttctggggaggcctcaggaaacttacaatcatagtggaaggtgaaggggaagcaggcacgtcttacatattggagcaggagcaagagagagagaggggatgtgctacccacttctaaacaaccagatcccatgagaactgaccgtcaggaggacagtaccaaggggaggacggtgttaaatcacgaaaaaccacccccatgacccgatcacctcccatcaggcccctcctccaacattggggattgcaattcagcag

SEQ ID NO: 41712 - DNA, 1055 bp, Homo sapiens
actttgttgaacctaagcataaaaatggaccattttccctgtatctttgggtcttcatcctgaagactccagggtcacataaaatgatgatcaaataaatctgtatgccttttctcctattcttctaccttgtcagtgattttcagcgaaccttcagagggcgaagggtaagttttcccttggcccagacaccagcaaatgtaagtaaagtatttttctgagtcctgtgagccactttaacaatatgaaacagggggaaggggctgtgggaacccctgatttacagctggtcagtcagaaatatgggtggcctgggccccgtgactggcatctgaaatagggatagttttgtgagactgagctcttgacttgtggggtttgcacaaactctgggttactaactctggtgtcagaattgaattgtaggacaccctactggtcttggaaaatttgctggtgtcagaaaacatcccagagttccctaccgcaatgagcttaccacgtgtggcagggaagagagataatgaaacaagtcattataataagataatgagtttgaagagggggaaggatgaggtgcccagagggcccacagcagggggatttgtcctaactgagaacagatagaaagtgtccctgaagttgggcgcagtgtcttgagcctgtaatcccagtactttgggaggatcacttgagcctaggagtttgagatcaacctgggcaacatggcgaaaactaatctctaccaaaaaaaaaaaaaaaaaagttagctgggcatgatggcacgcacctgtaatcccatctacctgggaggctgaggtgggaggatcatctgagcccaggaggtcaaggctggcaaagagggcaaggaaagagctccagggagagggaggagcgtgggcctgtgggagggctggctgaagaccaggctggaggtagagtgggcctgcatttgaaggacacctatgccaagtaagacaagcactggaataatcctaacctcaggatgataacaacttcacaaagcctttcagacacctgtggatatttcccct

SEQ ID NO: 41713 - DNA, 1054 bp, Homo sapiens
taaggtccctcatctgatcaggtgatggtggtaagatgcttccacatggacaccttctagcttcatcagggtatagccctgccagagactgtcagttgtttctgtttttgtgtgctgtccacgaagggtccccagttggaagagagaaagggaaaggggagagaggtccctgtaagagccaaagaaatattgtaggtgcgaatagctggggctggtgtcatgggccataaaggaatttaccaagacagttgtagataaagaaaggcagatttattagagaagctatgaaaatacgttgcaaggttgcaatgagcagcacaacagagaagtgactgtctgcaaataggcaggggctggagggaagttttatagggtcatgctgaagggggctacatgtggaacaatgtcattgtgcccaccagttgtttgtgactagccatctctcagaaaaattggtcattgttctccccaacctggggctccttcctcattgttgcttacttatcttatcaggactccgtaagactatttgaaatttatagtgaaaactatgtatatttccccatctagtctaacaggttgtagacttatttcaaagtaacagcaaataacacaaatattttcccaaatccaatatttacaggaaatgcaccagtctctgatctgcccctgatgtaagtgtcagatgtgcttccagggctgtggcccattcctgtggctggccaagggtccagcctgaccaacagaacgttgctgtaactctaggaatgagtgcacactcaacctgagccggggcttattggctgtacctcagggttgccagcctttgtcaagcttcctactttgtggtccttctggcctacactcctacggcagatggtcagggtcacctttcatgagaagggaatatgtattggtagccaggggcctgcatgccatttctggcacaaacacattgcaggttgcaaatccctgcttcacctttatgaaaatggtattgatgaccttcagggcagagcagtgttttcttaaagtagcttctgtccaaaggtaa

SEQ ID NO: 41714 - DNA, 1034 bp, Homo sapiens
tattcgggcttcgaaggatgaggaggaatctgcattgcaaggtgaatgcccaggggttggacatgttccgtgacaataaaaagtccccatctttctaagatctggctttctcatctgcgggatgaggataaggaaactgcccttgcctcactcatggcatccttgggagtgtcctctgacggacccaaggcagaaatgttttaggaactatgaactgctgtacaaattattatataatactcagcccccagcacaaacattgactgtcagcagagagggttagaacaattgttttgcaagttgatgaattattttaatcttttataaagtgaactctcccagaatggttttcattaatgtccgatacccacaactgaaccaccacgccacttgtcttttactaaaacactgataaaacagaatccagcttgcctttgtgaacgtgttaaaaacgatgttttcagggagaacaatagaaaagtagccagtgttgtcagtttgacattcctcgctaggatttattcaggctgctgatgtctatatgcaaacagtacatttagaagccaaatgggttctggtgccttatgaatttctttcttctccccaatttgcatagaggggaggccagcaggaaatgtagtggcaatcaaatttcacttgtaatgaaacaatgcagtgtttttgactgtggatgggtgtttaaataatcttgacagtagcagctggttcctttcttcctttgtccaattaggtgctgttttttctgcaaggattactcaaaggcagtcaaaccttgatcctccctgtgtcaaaagtctgcctgaaagcctgacttctcatcatctaagaagaaacagcacatttatttttctgtctgggtgtgacaccatttcagagaaaggttgctagctttgagctgaaatgttatttcatccctggagtgtaggtgaaggctgtttcttctagggattggagagaactgtgccagctaaggcaagtactcaggatagccagatgctgtcagcaaacaaaga

SEQ ID NO: 41715 - DNA, 1005 bp, Homo sapiens
tgtcataataataataataataataatggctcaaatttattgagcatttaccagacttactatccaaatgatcacatttaattctcataaccaccttgtaagggaggtactcatcactcccaatttgcagatgagaaaactgaggttcagagaagttaagtaaacagcctaggtcatacgagtaggacacagcccactccagctgaggcagagcctgtggtcttctgaatcactatgctatgcggcctgggtctctgacacttagccctgttcgtcctccagggagagacatttgaccagtattaagagcctactgtgtgccaggaatagctctagacactggtgatgcattcattcactcaacaaatatttcagtatttcctgagtgctcactacatgccagattctgttttgtgtttggggtacatcagtgaacaaagctctctgccttcctggagtttacgttctactggagcaggcagacaagaaacaggacacatttaagaaaatcatatggtatgttagcaagtgatacactctatggaagaaagaaaacttacagcatagtaaagggtaccaggaatgctggagttggggtagacagggtacacttttaaataaagtggccaagagaggtctcattaagaaggtggcattcaaacacaaaaatggaaggaaatgagggaagtaactgtgtccacatatagggaagagcattacagacagagggaagaggcagtgcccagcatgttgaaagaacggcaagagggtaacatggccagaactgtgaatgaggaagagacagcaatagagatgtgatcacagcatggtgaggacccagtcatggcaggcccccatgtcactgtgaagactctgagtgaaatggagcgccctggcagggctctgagcagaggaatggccttttcttgtttttgtgtttaaagaaccactctgaatgctattttgagatgaactctaatgtggcaagggtggaggcaggtcaga

SEQ ID NO: 41716 - DNA, 1071 bp, Homo sapiens
gtctttgagagaaagcccaggcacaatcactgctgtctgggcagagcctcagaaatcaacttgctcacttaaggcaaaggaacatttactattatactgaactttgtctacactcaaaaatgggatcagaagaaagggaaaggtttgtgaacctcaagtccaagaataaaaatagagggctgaaaatgaaaactcttattttttagctgtctcaaaaggaagccagacattacagaccaaggaccactactataaaagccttggatataaagtcaaatttctcacattttaaaactctatgctattgcttccttcctctcctcctcctcctcctcctgctgagtgaagagcataggccctaaatcaggccacttggtccagatttcccttctaccacttactagttgtgtgaccatggagatgttacctggcctctctaagcttcagttcccctgtctgtaaactggagataagaataggacttatctcctagaggtacatttggaagaaagaaagaactactacaaaacacacacacacatacacacacacacacacacacacacacacacacacagagtcagtgcttcaggagcaatgacaatgggggatctttgtcatagcctactgccaggtttgagaaaccccaagggatacagtagatggtacagtgatggaggttgtcactaggctggatggggggaaacaattgaaagaatgtactcgaagctcagtttggaggtccagcataggagaatggctgggggaggcaggaacaacagcctaactcatttaaagaatagtagaatcaaatatatccctcacagcttccagcgcatgatctttataaatgtgtctgaatccaggaagattgcttcatagcaagacacactttcccccgttgccatggaaacagcactgttctcatgtgtcaggagcgcatgcagacacacacacacgcacacacgcacgcacacactgtatgttaatacattctggtgttctttatacttctaaaaggacatgttcagagccagaattttactaattcctatcatccacttgttatct

SEQ ID NO: 41717 - DNA, 1086 bp, Homo sapiens
gcttcttaactagaattgcactaacatttactaagggtacactgcgtgctaggaactgtgtttgatgcttccatgtacatcattttattcaatcctcttaggaattctatgaggttggaagtgttatagccatttaaaataagggcaatctgaagctcaaagaagacaaaccacttggtcaaggtccccaattgttaaccatcaaagtctgaatttgaacttggtttgtctgagcccaaagtccatagtttttaacctcactagcctaattctgtaaatagatctgggatgaacaggactctttcatccatgacgccttcctatctgctgagttggtgagagtctgaagaggggccaaagccagggacaaagtgagaccaagtccctgagtcacacagtgaccttgagtgcattccagagatcagactgaaacatcctcgatgatctcttctgtggtatcatctacccttgattttctataaataggaataatcaatgttgactggactgaatgacacagaagcaaacgaattgtttgtcctccaggactgtaaccagcaatcagccttgtattcagtgacatttgggccagtatttacttctttatctcatatctgttttgtctgtgattaaattccactatgaaggtgaccaagaaagctaatgttttgaattttcaagatttcattgttaagaaatctgttcaaggaaaggccaagtctttgggcagaatgaccaaatgctcctaagcctcaagtttgcgaactttatttcaaaaagtagagtactggtctttttagctaaaggttcccattctgtaggtctcatgggggtgtcctggaatcaaacctggggattgaatataggcagaagatccaggaacacacattgggaacagttctaagatacccacatttcgttcaagaggcatatataatcatcattggctggctggacacttttcctttattgtttttctttccaatcaacagggatgaagaatagcccttgttgaccctacatgccaaaaacaaattgcacgagcctccaaataatcactttttggagggtatattttagtacaaa

SEQ ID NO: 41718 - DNA, 1034 bp, Homo sapiens
aactctcataacatttggcttagtgaagtcaaatggtacaaaattcaaaagtaaaaggcacatggtataaagtcttacttcagcatccagccatctagttcccttgcccggagatagcaaatgttagctaatggatcaactttgagcaaattgttaacccaaaacttacctctttatcatccaagacaaacactgcttccatgccccacctcccatctgtgctctgacttcctggctggagacagaattctcaatgaaggagagaaacagaagtagtttctcttcagtgccagcctcaccttcccttcccttctctttacgtctcccctcccctaccactcctgggtctttctttcccaactcaaactatcaccactttacactacactaaaggtatcctcaggagaaggttgggacatctgctttaacttccacaactcctttgctaccgtgactatcattctgggtttatcaccaattaacataccactcacgctgtgaagtataagggctggtgtggctggaccaccaaagaagactcatttgctgtaatattcctaaacacagaaagaaaaaaaaataagattttctttctctaagtattctagtactaaaccttatagctacatatgtacaggaacagagagatatcaggacatgctattgatctcatttgcaaaaccccaaaataatagcaacaacaaactaagcatgcacacattgactagcagtttaaactgttaacagtgaatatgttacttaccaactattttaacttttaataagaagcatgaatttcatatatatacacatatatatgtatatatgattttcagatcgcagatcttttctcccctttttattgtggtaaaataacatacgctttaccattttaactatttttagttagttgtttgtttttaacagaggtggagtctcactatgttgcctaggctggtctcaacctcctggacccaagcactcctcccgccctggcctcccaaagtgttgagattataggcatgagccactgc

SEQ ID NO: 41719 - DNA, 1029 bp, Homo sapiens
ggagatcgagaccatcttggccagcatggtgaaaccccatctctactaaaatgcaaaaaattagccaggtgtggtggcacgtgcctgtaatcccagctacttgtgaggctgaggcgggggaatcgcttgaatctgggaggcggaggttgcagtgagctgagatcacaccactgcactccagcctggtgacagagcaagactctgtctaaaaaaaaaaaaaaaaaaaaaaggtctccaatttcatccaggatccaggttgctgcaaatgccatcatttcattcctttttatggctgagtagtattccacggtgtgtgtgtgtgtatcacattttctttattcacttgttgattggtgggcatttgggctggttccatatttttgcaattgtgaattgtgctgctataaacatatgtgtgcaagtatcttttttgtataattacttcttttcctctgggtagatagccagtagtgggattgctggatcaaatggtagatctatttttagtttttaaaggaaattccacactgttttccatagtggttgtagtagtttacgttcccaccaacaatgttaaagtgttcccttgttagcacatccatgccagcatctattattttttgattttttttattatagccatatgagtttcatttttttctcttcctgagacggagtctcactctgttgcctggctggagttcagtggcgagatctcggcttactgcaatctctgcctcctgggttcaagtgattcccctgcctcaggcttctgaatagctgggactacaggcacacaccaccacgcctggctaattttttatattttagtagagacagggtttcaccttgttggccagaatggtctcgatcttctgacctcgtgatctgcccacctcagcctcccaaagtgtggggattacaggcatgagccaccgtgcccggcctcatatttttcgtaaaaggtgtgatggtcaattgtgtcatcttgactgagccatggggtggctagctgtttggtcaaacact

SEQ ID NO: 41720 - DNA, 1051 bp, Homo sapiens
tgtggtgtggggggcaggagaagattctgagaactggcaactggttaaatagaaaatgtacctatgggagggaacaatgatttatcccaatacaaatgaaactaatttgaggaataaccacttattgagcatgcacatggatcgaacattgtgctaagaattttacatatagtttctttatctttccaatcttataaggagattgatggatattatgattccccattttacagtgcaggaaactggagctcagagaggttaagcaacttgctgatatagtttggctctgtgttcccacccaaatctcatgttgaattgtgatccccaatgttgggggagagacctggtgagaggtgattggatcatgggggtggatttcctccttgcttttctcacaatagcgagtgagttctcacaagatctggttgtttgaaagtgcgtagcacttccccctttgctctctcttcctcctgctcctaccacataagacttgctggcttccacttcgccttctgccatgattgtaggtttcctgaggccttcccagacatgcctcctgtatagcttgcagagctgtgagtcaattaaccgtcctttttataaattactcagtctcaggtagttctttacagcagtgtgagaatggactaatacacttaccaacagcacaaagctagtaagtggtggaattgggatacgtaataataatgctaataactcacacatgcgtaccacggtgtccgtggtgttctgctcagttctcacacccaccctatgtattatattatgttatatctccatcatcagatgaaggcaactttaaataactagcccaaggtcacatcactaggaagaaagggtgccaggcaatttactccagtaatcatatgcctggtcactacccttgctctcctccaggtctgtctgactttgctatctcagctctttttatgtagccagagaatccatcagatggctcttccctcctttctcaagatgtggtcagcagaccatcagcatcaacatcacctggaagcacattagaaagaat

SEQ ID NO: 41721 - DNA, 1047 bp, Homo sapiens
cttccagtagcagcggaggcgccaatgggaccgcgggcggcggcgggggcgctcgggccgccgccgcggggaggttcccggctcaggtgcccagcgcgcaccagcccagcgcctccggcggcgccgcggcggccgcggcggccccggcagccccggcggccccgcgcagccgctccctcggcggggccgtggggagcgtggcgtcgggggcccgcgcggcgcagtcccccttcagcatcccgaacagcagcagcggcccgtacggctcgcaggactcggtgcacagcagccctgaggacggcggcggcggccgggaccggccggtgggcgggagccccggcgggccgcgcctggtgatcggctccttaccagctcacctctcgccgcacatgtttggaggtacggacccctctccgcgcacccgcgctcggtcctcccgcggctgcacgtgggccgtggccgccggctatttttacccttctccttttctccttctgccggggcgccgggggctgcctcccggaccagcccgcgtcggtctccatcctggaagaaacccggcgcttaacaccggcggtgccgctaccgcatagacgcgtggttttgtttttaaacatcctgagcaccctcacctcagcggctgcccagtagagaaagtctattttccagtgagatgactggagcaaatgttgttttacaacaaaccgacgaaacagcccttgtggttgtggtttttagtaccaggaagtcaggaggagaccagttgctaaatgtagttctatctggggactcgagtggggaacagtttttaaaggccaaaagtcaaagcgtctcaaatgaacactgagttaccatgtttggaccgacttttagtataaagctgtaatcctgaaatctgtgtcagtagtcccagttactatgtcattttaattggatgaatgcgttaatgaaaagtttgtttttaaacctcactaaactgctacttaagatcacagttaatgtgagtcctgcttaatttggaaagcatttaaaaaatggaaaagtttc

SEQ ID NO: 41722 - DNA, 1019 bp, Homo sapiens
tgctgtatttcattcattagaagcaagtcataggtccagttcacgtgcaaggggagggaattatacaaaggtttaaacaccaggaagtgtaggaatcaagaatagtcacatcagttctttctgccacatggattatagatagattgacagctgaacatgtaacttcttttttaaactcattttaatttacttttaaaaagttgtactaatgcatatggttaagtatagcattaataaacatgaacttaaccccttttaggggctggacattatagatactgagggtacaaatatggagcttctttatgcactgctcaactctccattgaatttgagagatggatatatgtgatcattatacaatgcaacaaattctgtaatagaactgttaacaaaacacttagtgaagtatctttgtctaggctggtcaaaaaatgcttcacagaggagggtacgtttgaactgtagtttgaaggatttagaagttgtacggagagagggcagtacagactaaagaaaaatccacaaaagtgtgggttttgatagggcatactgaaaagttaaatatgtctggattgtagggtgcatagaggaatgatgagaacctgaagctagaaaaatagaaagtggagccagttgaaagattttatagtgctgtaggtttgttttatctaatgaagtttgaaagcagggggagtatcatgattaggccattgggcacaattaacactcgtagtttacatggatggcaaccttctctagtggtgcagacttcaggctgtatgcagcaaccctgatcaggattcagttcttaaggaggagagtgtgatagcaggagaataagttaggattcttttaaaatataactgatagaagatgcctatgttgaaaacatggcattggtgagggagaagaaaagttagatttgattgagatttctaagctagaactgatagaattgacctgggtacatagtgatgtctttaaccagtattaaagatgaaaagaacaagttttag

SEQ ID NO: 41723 - DNA, 1050 bp, Homo sapiens
tgctcattagagatggaaacagcttctagcaaggtataatctttgggactacgtaaaattttttaacccataaaaacttgtgaggtttttgatatttataagtgcagattggtggatatatttcgagtaatgtcacctatcagagtcattatttcattcagggctctttttttagcgacgaaaatattagtgtgtcagaaaattatagatgtattcagtcatttgaatttcataagttccgaccatgtggaatatcctaatttttgcttgaattgtgattagtctgtaatagttctttaatttacctatttatatgtgagctgaggaaaaaaagaagaatgaagccatgcatacataatgggttatttatttttatttttattgtcttttttttctttcctttttgtggagaacagggtctcgctatattgcccaggcaggattatgtgtaatatgtttcagagagccagtgctcagtttgaacaacacattttgctatttttgttggtttttaattttttctactgttacctctattctgttcgttctcattttgtaaagttaattttgttctttctcttagcttcttttattttttatttattattttttaatgataaaagcgtttaaggctgtgtttacttcttgttacatatagtcacttcccaaagctttggatacttaccattttcattatcattgagtacacatttttgtttcttttaaaatcagttctatcggggaataatcatgttaactgcatttcgatattttcttttacttggaagttattttaaagtgtggctttattgtggtggtccttactagtaccctttcgttacttctagtgttaatttagaaatattgcaccgtggctgggcactgtggctcatgcctgtaatcctagcactttgggaggcccaggtgggtggatcatctgaggtcaggagttcgagaccagcctggacaacatggtgaaaccccatctctactaaaaatacaaaaatcagccgggcatggtggcaggtgcccgtaatcccagcttactag

SEQ ID NO: 41724 - DNA, 1060 bp, Homo sapiens
aatttttaatgtttttaaaatttctgaggtctttaaaaatagttttttttcatatattccatttttgttttgtgggtacaatacctttttctaagaatattactgatacgaatttacatgtgcatctgtttgtgtatatatgtatgtgtatgtatatatatgtatgtgtatgctttgttccctttcctgatgactcggtttcttcccacttgctttttctgtttgtttggcttcattcttttgttagatattttctttaaatgtttggtgatctttggctaactcctgatacttttaaagtggggggcactaaaaagcaaattggaagctctctgtgcatgtagtgtcctctgtctgggccattttcttagggatattactgtcttttctcttgggctggtcatattttccagaaatggcttttcttgcctggaatacacaatcgtttatgctagtgatctaggagcagagtgagaagaagattgagagtcttaatactcaaaatgatactttcatttaatctcaatatttagtatcaatacaggacctctgccttcagctattcctgttgtctgcaagtctagaaacttttccctttcctaataacaagcttgtagtagagtgccagggttggggttgcttagctgctgcaagtcagggaggacaactaggagatctcacagctccttacgcagactggcgatgaatctttctcttttaggcctgccttcacccctgcttccagggatatcttgtgcttgccagttcttgtgcctgctgtaaatcagtttgcttctctgctttcctagttctgcagtgaaaattattattctttaattttctttccagagtctaaaggtactgctttttatttcatcttcttgattttttataggtgtattccctttaaaaattacatttttatcattttagtaggatgtttggactgagcagaaactaatgaatgtgtacaactagttatctttacttagtttttttttaattgcagaagaaataataattcactcctataaaaatttggatgatgcccctgggcgtg

SEQ ID NO: 41725 - DNA, 1035 bp, Homo sapiens
caactagccattgcttcatttttctgtgataaaactaccgaaaagtatgaatgggtgttaccagtctattatgtttagggccatgggttgggtcttgtttgaacagcaaggataggtggacttaagggatattcatcatatagacttagggtaaatcattgagagagctgattgatgaaaatagcatgacttgcttcctcattaacccaccaaaaagttataggaaaatgagggaaataaaggactagggtgagttaaaaagggagctctgtgcccctggtgtgctggaactagctcttcctggagttgataaattattaggacttcggcaagccagatgttaaatataaccatcattaaaattaaattatataaattgcatttaaattatatttaaaacaaaggaaatactcaaaacttatgtcctagttttattatattttactgttatctgtgttcttgaggttattgacacctgttgtatctgtgtggtggaaattctgtcagtgtgcagttgcacatctctttcctattctgtgttcaatgataccactttggtgacttgaaataggacagactatttataccatggaaatcagcaactagtacaaatcaggatttttttcccctggagaacagttgttaaatatctacccgaataccactgggtataaagttttgctgtttgagatactgattgtctttcatcattgtaaatgtacttattttctgaagcttcgagcattctaatcttacgtaaagttttattgttcttaggaaaataggtaactatactagttttactcatgttttaaaagatatcttaagcttcaagggagatatggcttattttatttagcttttattttcatgtagatagtatttttgtaagtttgttctccttgttttttaaaacattgtcatttaaaaagtatacttaaaaaacctttataacaaataaccacccagaatttatctttcttgtaagccattagtttcatttcttgaactcattttagcaaggagtacactttt

SEQ ID NO: 41726 - DNA, 1029 bp, Homo sapiens
tttggttctggagcttactatcattctttggtcttaagttttctgcaactgaagggaattggaaatgtgtttgtttagaaacattattctgggacattgagcttaattgagaattttagctgtggctggtacaggtttttcctagtgttttgctttaagccaatgcgtataaacagtagccatagaggctagagttcattgttgtaattattctgaaacccatagttgtttaaaccttttttctcttcatttgacttccacaatataatctaagacccaggtgaaactaacatattgctcatgttacatgtggcctcataggctagtgggcattatacatgtgagaagttagtgtcgggtaagaagctgtggctcagacatgcatttctccctctagtttgtgaattcccagagcaaatgccattactccatccttcctccctccctgcctttctactgagagaaaattcccagagcagaggctgttgtcatatttatgaaaacaaacaaatagactgtaactactgttaaagctcatgctcagttccaaaagtgctttgcatacttagtcagatttctagaattgcccccgagaatatggactaagttaccgttggcactgaggcatcctcctattctgtagtgagcttgtttcacatcagtgaagaataaaaaactacttaacctccctgtgtctgtcttgtgatcattctgtaccctcattcactaccttcctcccccagtggtgatgtgtggccatttcgaggttccctggtggcagaatatgttcggtatattcgattttacaaggtccatttgtattaggtaaaccactgatccctaggtccttgttgtgttattggcatactctctcatattataaattaaggatgccttgtttgtattgccacatggattttatttagttttccatgagagctgacctgtcctgtgctaccatagtttaagttgacttttctaccgttgtgaatagtggtttagttctttcccttcatcagctgtttgata

SEQ ID NO: 41727 - DNA, 1068 bp, Homo sapiens
cgtactgtttttccccttaggctctactttgtaggcagttggatggctctcaagtgaggctttttaggttcacagtattgcacttttgtttaagtttgtttgccagtacccagatgattctgatgtttcaaatcagttgcctcttgccctcgtttatgctaagtttaacttcagggaagcaaattttttaagtttcaaggcaagaattctttagttgatgcttaaaatctggttgcagttttaggatctctgctttctccccatggttgatcagtttcacagtattcgatgtagcctgtgtttggccattatagtttttttgtagtttcatttttaggggtgtctaatcttttggcttccttgggccacattttttatagtttcatttttaggggtgtctaatcttttggcttctgtgggccacacataaaatacactaacaatagctgatcagctaaaaaaaaaaactgcaaaaaatctcataatgttttaaggaagtttatgaatttgtgttgggccacattaggccatgcgttggacaaacttgttttaatcgaatcctccttcctgttttttttctttctctttttggtggttttcaagaagttgaagtaaacatacctttattcctttcttttaaaatgcatgtactacagtttgaaaaacattgtacaaaatcatatatttcatttaggaaattgaatacctggaggattagctgtgccaaaatctttttcccaatccttataaagttcggcatgaggtataattctagcctcactcatttggttgcagtgagtttcacatcacagtgaagggaggacagttcctgtgagaacacatgtgttggaactagagagctgccaaaacgtctctttcaccacccatcttattagttgtctctcacagtgcttctgttcctgtctacactctagcttcatgtggccttctttcttgtgcttgcctatagtttctgttctctcgtaagttcagcttacacctgagccgtcatggacaccactgtctctcttttacttacttttgacctttctgcttaagctctttact

SEQ ID NO: 41728 - DNA, 1541 bp, Homo sapiens
tggatttgcatcttgtaatgtgtttaacaaagccacgaataacctataatggtaagtccaatggtttaaaataatattttaagttagaattaacttacattttatgaatttcatgtttcaagtataatttaaaaggagggaaggacattgttttctctatttttactagtgcattaatgcagtggttctcaaattctgtgatctcaagacttctttacacttcaaaaaattactgaggacttcaaagagtttttctttacttgggttatatctatccatatttgtcataaattaaaacagaatttataatttttaatttattttgttaaacataaatataattatgttgacaacttttaaatgaaaagtaaattttctaagacaaaatatttagtgacaagagtggcattttcaggatttttacaaactctttaatatcaggcttcatgacaaggaattctcacatctgcttcttcattcagtttattgtgatatggcacgtcttgtgtcctctggaaaactctgctgctatactggagagaatgggaatgaaaaaggcagatatggccaggcacagtggctcacacctgtaatcccagcactttgggaggccgaggtaggcagatcacctgagatcccaagtttgagaccagcctggccaacatggtgaaaccccatctctactaaaagaaaaaaaaaaagaaaaaaaaaaattagctgggtgtggtggtgcacacctgaaatcctagctactcgggaggctgaggcaggagaatcgcttgaacccaggaggcgaaagttgtagtgagccgagattgtgccactgcactccagccttggagacagagtgagactctgtctcaaaaaaaaaaagaaaaaaaaacaaaaacaaacaaacaaaaaaacagatacttagtgttaccatgaaaatagtttttactttgttaatctaaaaggatttcaaaggctcttccacttctcctactgtacaagattctttggaccacagtttgagaactgctgcattgaaataaaatcttttgggttaagcctaagtaaaatgtaatgttcataatggccattttcaaaagtaagtaagcatggttgaaattgcaacttttttctttttgtttaagagtatagagtaaatgaagggaacatatatgaggagtagggagaataaaagtttattcaatagtaaatagatgcctaatgggagaaaaaagtcattaagagaaacccaaaactctacctatgcagtgcatatgtgtctctgtctttcctcccatatacaaatttagtctgtgagctctggagcgaactggtatttttttaggtctggtgttttagactgtaccattctttcctgaccaaaatctctagatattccaaaacctaggaaagattttaaatgtagccttggcatactttggaatagacttgggggggaaaaatcaagtagttctgtcctaaccaatgaatagaataaaatgaaggaaaaatgaaagttgttttcaaaattttataaagaaacagacttc

SEQ ID NO: 41729 - DNA, 1035 bp, Homo sapiens
gctatagttgtctttctgtgcctggcttatttcacttaacataatgtcctccagttccatccatgttgttgaaaatgacagatttcattcatttgcatggctgaataatattctattgtttatagataccacgttttctgtatccattcatctgttgatggatacttaggttgaatccatatcttggttatcgtgaatagtgctgcagtaaacatgggagtgcagatatttcttcgaaatactgatttcatttcttttggatatatatccagtaacaggattgctggatcatatggtagttctctttttcgttttttgaggaacctctgtactgttctccataatggctgtactaatttacattcccaccaacagtgtacaagggttcccctttctccacagccttgccagcatctgttattgcctgtctttttgataaaagctgttttaacaataagatcatatcttattgtagctttgatgtagcaaattcttagtcttgattgtattggtctttaaactatacctgattatggtatactttataccatataaagttcagtttttactttagacttctgtgattcaaggcagtaagatttatttatatttaaggaatctttgttttacttgtggttggtactatgtttgtgcatgtgtacttagaagaggtacaacttgaaataaagttgtcttctgggagttaaattataaacttgtgaatcaaaacagagctattcagaatcatcagaaagaagaacaactctatggacagagcaagatgtgactattaccctgttaaagtaaacatgtttgaagaaagattgagccagttggaaggcaatttgttctgtaataaaaatgatgaaaaaagctgccaattgctacactgtctgtgggagaatctattttgtcaggctcacacaaatattgcaggtgattgtatcaggctgtcagcaccttgattccagtttgcatatacagcctgctaatcatctgggttcctgtctaacatgtttgcaggaaagagcatat

SEQ ID NO: 41730 - DNA, 1024 bp, Homo sapiens
gagtagtttggtatcttctcagccactgagtagtttggtatcttctcagccactgagtagtttggtttcagggagggcaatattaacacagtggctccgtcttggggggaactatatttaattcttaatattttaagtattttaaggtaacatgaaaataataaaggaaaataatgaaagtattaataatgaaagtattgtaggcatagagatgtttttcttatagctttagttatctgagattttaatttttttgttaatttctaggtagtttctcatttaatttttaactttttctttgattcagagattatgtagaaaagatacattataatgcagagaaaatttaggggagcaggaagatgtgtagtgggaagtcattttgatctcgatattagagaaagctgtccatacttctctatattttaaaaatgttttgatgttttctgtgtggccaagtacatcattgagttctggaaattgtgaatataagagaagcatatatattttcttctgtagagtgtaaaatctgcatttttctgacacatacatggacatgtatgtgtgtatatatgtatgtattagaaaacatgcgtgtatgtgggtgtaattcccataaattgaatttggttgtattattgaaatattttgtatcctttattctgtttgatctacatagtctgacaaatttaaaaagtttattaaagcatccctactgtggctgtggttttatcaattttttctcatttttaaagtctcttacttgttttggtaatatttgccttgcagcagtgttttctggttttatgtatttcataactatgttgtttgcacagatatttatgacttatgttcttttcggattgaatctttttatgttataaagtattcatctctatcccatgtaaggcttttagccttatattcactttatctaatttttttttcttatgcttgttagtaactgtgaagggtctgagattatagccacttgccagccagcaagttagcctggctacatttt

SEQ ID NO: 41731 - DNA, 1036 bp, Homo sapiens
aaaatctgggtgctcctgtattgggtgcatatatatttaggatagttagctcttcttgttgcatcaatccgcttaccattatgtaatgcgcttctttgtcttttttgatctttgttggtttaaagtctgttttatcagagacaaggatttcaacccctgctttttttttttttttgctttccatttgcttggtaaatattcctccatttctttattttgagcctatgtgtgtctttgcatgtgagatagatctcctgaatacagtacactgatgggtcttgactctttatccaatttgccagtctgtgtcttttaattggggcatttagcccatttacatttaaaattaatattgttatgcgtgagtttgatcctgtcgttatgatgctagctggttattttccctgttagttgatgcaatttcttcatagtgttgatggtgattacagtttgttatgtttttgtagtggctggtactggtttttcctttccatatttagtgcttccttcaggagctcttgtaagacaggcgtggtgatgacagaatctctcagcatttgcttgtctgtaaaggatattatttctccttcatttgtgaagcgtagcttgactggatacgaaattctgggttgaaattctttaagaatgttgaatattggcccccactgtcttctggcttgtagggtttctgcagagagatccattgttagtctatcatttttctgttttctaattcattaatttagacttttgtttatattatttattgtgctttccttaggtatgcgttttctgagtttattgtgttgggggtattaatttttctttcttgtttttcagcagaagtatacaagcctatgaatttttctctgaagatgttttagctctgtttcaaaggttccgataagtagtggttttttttagatgaggtactttgtattttgggggtgtcttttttaactcaaaagttatttgagagtatctttatccaagtgtagaggacttttttccccctggttttgctatttgtttccta

SEQ ID NO: 41732 - DNA, 1040 bp, Homo sapiens
cttcaaatatatgaaaagcttttatgaaaagacttggagagatgatataaagcattggattgttatatcaaggcagagcattttagctaatcctagaattgtttcaggagtgagagtctctttgttcagggactcaagacagtaacagccggcttttctaggaggctgagactgatggcaaggaactagaccagatgacgtccagaggtctagtcctgtgtggtaccatttccttttatttcaataacttctcttaaatttgagaataaaagtgttgaggtaataaacaccctcaaggaattctgttgctgtattggtggaagatgatttaagagtagcagattagaatattgacagagaagatttgagataatagcagcaatagcacctgaaatgagaactgcagttgagtgtcataagactacgcatgtgcatgtgaaatgtggaagccttggtagactgcagagtactaaaagactgccaattttaacctttcctgtgaacttacttagatcatgccttgacacatttaaaatatgaattgaggctgaacactaattgcttgagataaggagtttgaggctgcagtgagctatgaacacaccagtgcactcctgcctgggtgacttagcaagtccctgtctaaataaataaataaataaaatgtgaatggaagtaagaatgctaggtaagagaagtatagtggtggagtggtattttgaatatatgtgcacatatgtttttatttcaccatagaaaaggtttggaatgccttcattgtcaccttatgtttgagacaaaacgaaactgtggctaaaattatagaagcattttaagggaagtactgaaactgatgctaacaaaatgaaatttttgtcttagtattttacatgccaaagtaatacatctaaatccttcatctatagataaaatttgtctttttagtctttcttagtgcattttgggctgctataacaaaataccttagatgagtaatttatacatgacagaaatttagtgctcacagttctggaagctgg

SEQ ID NO: 41733 - DNA, 1079 bp, Homo sapiens
taatgcaaaagtcattgcaaaaactgctattacttttgcgccaatttaatagttcacttgtttactttttaacctatattggcttaaattcactttttagcccctctttgtcataaggttctgtgctgcatttgctacaatagaagctcctatggttttaaagaaagttcagtgttttgtcagtgtcaagtgctacttgatgattatatttgtctggaacagtattcacttaagtctgtttatagcaatcccttttttgacaaaatttacaaagttggcatttttactttaaattccatctctatcagtgacttcctaaaaagagcaacttagaaattgggggaaaaatgtttttaaagcccaaatgctccagtttttattcaaagtcaaagtcgttattctggaaaatacaagtaatgttctatataatgtcacttaaaatattcgtaaatctattttgcaaacactgaatagtataagtaagatataaaatcacaatagatatttaaatactaagctgaaacttctgacaactaattattatgggggacacaataaagattgaaagcctaggttaccaagttggttttagctttctagaatctttgtaaatactcacgttcaaataagatcacacgtgcatatatagaaagcaatatgttctgaaatttcactttagtgccactgtttgtccataatggatttattgccaattttgaatcctcatcttactttgatctggcttttttttcccccccttgccagaatgtttaggagaaagtaaaattattccgttttactttggctttttgccagagatacaaactaagaatagtctgaatatgtgtttttcagatctggttacaagacggattatagattgtgttttagagcaatgttgtgattgaaatataaataatggtataactttttttgtgttagcaaaaacaacattaaaaaggttatgttacataatatgtaggttttggtttcttagtgcaagacttatatttctcttaaatgttgtataattatttcagttttcactcactagctactttactaaaatgtagccccaa

SEQ ID NO: 41734 - DNA, 1067 bp, Homo sapiens
atcacattgctgagaactatataaaactacatagaggtaaatggtgcttattaaatatgagtatagtttgttacttgctggaagtcttctagttcatttggaccattttcttaccctgaggtgaactcaatatctgttggcaatgggtggttaaatgtgaagtgcccttgttcagtgtcccttgttcttgtacaggtattttcttagtttaaaaaaaaaattctagcatgccaacatttgtctttggcctattcctttttttctgaagtgtgtaacttctgattttttctttgctatgttgtaaataacagtagctaaattctctgttttactatctacttttcttttcttcccagatcatttcattctaaaattaaattgcttggttttctttagaggaaattgctacatggtatacttgtagtagtgattcatattaaaaaaatagctggtaaatctttctaggtagtaacttatccaaacaatactttgagtatcatattttgtgaatgacttgcttaaactgggaaactgaatattctttttaaatcatataattcctgtattaaatgtgaaacacacagtctccaaagtcacctgattctctgtggaaaatgaaaggcattgaaggaaaccagatacattaatacttagttttggttgaaagtgcaacattactgtacttagaaggggcttggtttatttttagatatttaagctatcattaattttagaccaatggctaataataagagagatttttggttgctcatttatggagagacaaagaacagcatggcataaacaaacatcccagaaataaatgaaaagttttaagtgataaaattgtgttttctatgaaccagtgttgtacatgaaccaacattgtgtttcttagctctgacctgtacagtgaggtacctgtcaggacccctagtcttggcactggaaatgacaaagttctcctattactaaattctcatgccttccttttctgacttagtagattgaaattggtaggtactaatgatttatgtttgataaacttaagttctgctgatatcctg

SEQ ID NO: 41735 - DNA, 2779 bp, Homo sapiens
gtagaaaataagagaagagtgctttcaaggaaatttgtcatattctcccttctatctagaagttgacaatgaattgcaataaaactaagaaataactgaatgctgaaaaataccatgaattaatgttatggcttctttatttttgtatatccattcccacaaaattgaatttaagattattaatgaaaattctatattaagtaataatgcttgtattagtaatgggtaaagaagtctttctttgttacattaaccgttagtaaaagatgtactttgacatttctgatgtaaaacctatatgtaaatattgtaatttaaatatgattggacagctgttaagttttggggagggaagcagatgccagcgttctctgctgaaaagacaagatggcgcttgacggaccacagcagatggagctggaggaggaaaaggcaggcagtggactctgccagtattatctgtccaagattgaagaactccagggtcaactgcaatataaattggatgggggaaagccacaaggaacagttctgaactccaggtgcatttgcagctgattttgaatgataagacccaaaacctctggaggcggcaggtgcacgggaatgaactaaatgttaaagtgtgcctattacaggaggagctacagctgctgcaggaataggactcctgtgtcagggaagtagtccaggccatgggtaagaagaaagtgttggtcaaggtgcatctcaaggacaagtttgtcatagatgtggacaaaaatatcagcatcagtgatgtgacacccagttccttggtggttctaagaaatgacagctacactttgcacaagatcctacccaacaaggtggactcattggtgtcactgatgatggtgaagaaagtaccagattcagcttatgaaatgattggtagactggataggcagatcaagaagatcaaagaagtgatcgacctgcctgctaagcatcccgagctcttcaaagcactgggcattgcacagcccaagggaatgctgcttggaagagactgttggcctgggctctggctcatcatagggactgtgtacctttattcatgtctctggctctgaattggtacagaaattcattggggaatttctgtgatggcagagaaaatgctcatctgtcatcttcatggatgaaattgactcttttggctcctcagagctggagggggatgctggagggaacagtgaagtgcagcagatgatgcttcgagggtggctttgaggccaccaagagtatcacggtttatcacggctgctaatacgattgatatcctggactcggcactgctttgcccagggcacattgacagaaaaattgaattcccaacctgcaatgagtaggcctggctggtcactttgaagattcattctcagaaatgaacctgacccaggggatcaacctgagaaaaattgctgagcttatgccaggagcatcaggctgaagtgaagggcatgtgcacagaaaccggcatgtatgccctgagtagcgagtccatgtcactcagaaggactttgaggtagtccaaagtcctatctcatgccaaaggacagtgaggaaaaacatgtccatcaagaaactatggaattgagggcacatcctttgtgtgtatccctacaataaaactcagtgggacaagcaaaaaaaaaaaaaaaaaaaagttttggggagggatgatctgctagtgtataatcaataacttttaacatttagcttgtatttagtaacatttcattgtgttttgaaaaaaagtaaaaaatcttttgaagcacaattttcatgatgtaaaaggtattgagtttcctagtgtaagaacatgaattctggaaacagtcttagggacactgggcaagatagaggcctccacccctcccccccccaccaactttgtttgtaaaaggagataatactgcctacatcagggttggtgtgaggattaattagaagagtacatgtatgtaagcaccagacacatagtaagcacttaataatgttagtggctagtataaacagtaaacatatttgtgcccatttatgaataattttagtattcgctccagtcatgaggtgtagtagtaatatctaagaccttaactgaaatgtttaaagaaacctaggtataacagagaacattatgggtgctgatttccactctcactaaaagccagtgactttactatatcagcaagtataaagcactacttgactctgtagattgtatggaccaagaatgtagatatgagacagctgatctctacgaactgaatttttagtgagtaaagcaagcaagcatgtaatagagaacaataaaagctctgatagacatatgtacaaggtgttgtagaggtacaaaggaaagttattcagactaggcaagagagtgattaaacttaagtattgaagaacaaatagatcatagctctaggggatgtggaacatacaaagtggaaagtttgggaagagtattcccaaggcaaaaagcttagcacatacaaacataggaggaaagcgagacactcttaaagagttgctatgctttgggaggtggaggcgggcggatcacgagatcaagagattgagaccatcctggccgacacagtgaaaccctgtctctactaaaaatacaaaaattagctgggcgtggtgcgcgcctgtagttccagctactcaggaggccgaggcaggagaattgcttgaacccaggaggcagaggttgcagtgaactgagattgtgccactgtactccaac

SEQ ID NO: 41736 - DNA, 1051 bp, Homo sapiens
cttgggatatccttgtgggtcaaggaggcaactctcctcacggattccctgatttgataacaacatactcatggaaacaccaatccaagttttcacaagtttctcttaaagttaacttaagacttcctagaccaagaattcctaccacgcaaggcctgtgaaaatattgtaaacttaatatccgacagggagatattcaaagatgccaaagtacctgtttttataaatattaccacatggtttaagatttgacttctcacataaaatgagtaaaaataacaatgatttttctgcagtaccttaatgatgctgtaattatgaagcagggttttaaaattctgccatgtagtgccttatttttatagtaatgttttctatgaaccttctaatttaatgtgtattaagagatttaaagagtatgtaattaaaaaatatctttccaacaaagtcaccttgagatttaatgctttctaattggcttgatcatttgatggcaagataactagttgggtaactgaacatagactctacagtgttagcaaatatgaatttatatttcagaaaaatatcaaataactaatatcagagcctgtgtgcctgcctttcaaggtagtacattaacacttggaatattaaatctgtaaatactaaggatattatccaaatagatgatattcatcaaatggtatataaagttcatccgttgttggaattcaaatgttgcaaaggccaaaggtatttaatatccaaactattgttttagcatatatttattctttgaaatctggtgtgtattttacacttacagcccatctctattcaggactatagccacattttaagttatcaagagtcatatgtgaccagtggccactgtgctggcagcacaggtctagatgactctgggagacacttctactcctatctctccttacctgaatatttctgaaggccttctaattccaactttgtgaagactcttgggtctctttcaaagtttatttaactgctgcacttgagcagaacttgtcctaaattattactaaaattg

SEQ ID NO: 41737 - DNA, 1046 bp, Homo sapiens
cagcaccatgcttcctgtacaacctgcagaactgtgagccaattaaacctcttctcaggttttttttttttttctcagtctcaggtatttttttatagcagtgcaaaatcggcctaatatattgtctgtatagcattctgatgattagttcttcactgtgtattaagattgacttatgttgctgcatgtatggctaattcatccctctgactgcttcagaaatattccactttattcatatttattcaacattttacttatctattcccccgtgtactaaaagtcaaaagcattactaatttaataatgtcatatttgttcttctaattattttttgctgcataacaaagcactcctaacttagtggcttacaatgataacagtcatttattttattcaaaaatctgcaatttgggctacaattggcagaacagctcatctttgctccttacagtattggctggagttggcgatgactcagcagatcaaggctggaagactcattctcgtcaggtggttgacgttggctgtcagttggaacctcacctggggctgtttgccagaacacctacacatggcatgtccatggagctatttgacttcctcactgcaatggctgggttccaagagcagttatcccaagagaacaaggcagaagtgcatgacttttagaatcttgtctcacaagtcacacagagtcacttccaccatcccctgttggtcaaggaggacatgaaggtcttcctaggagcacggggagaagacagacttctaccacctgttggaaggagtgtcagtgttacatagcaagagaagcacatggaatgggatgtattgtgatgcccatctttggaacagacaatttggcatatctgtgaaaattaaaagtctgatttggatataacaaatgagactgattagcaaagatgtctaattataaaagttaaagttaaattccaaatatactttttttttttgccaaagaccaaagactaggttatagccaaggaattctggctccctatatccctaggctttttttattt

SEQ ID NO: 41738 - DNA, 1045 bp, Homo sapiens
gtcagctgtcttggcactggggggagggtcatttagcatggaaattagattataatgaagttagaggttcttcagaggtcaagtgagctgccatcttggttcccaccactcttagctggtttggtgtcatgatggggagcttttgaccacagacatcccgtttcctaaagataaccagagttaaggtggggaagaaatttacttaggtcacacagacgttacactgggtaacaacattactttgacaacaaaaataaatgcactttataacagaaaaaagtccaggaaaaaattgagacactttaatatttgttattggtctgaaaaaacacccaagtagtcatgggaaagattagaaacttgtttaacatctttgcacttactttataatttagtatttaaatattttcattatagatccagaggggcctataaccttttcagtacttaatgtctctaagagtcttaagctggtcttgggtgcagttcattccattttaaggttgagagagtagtgttgggatgtcctctggtaaaatgagtctcagcctcctcataatgccattctactttcattaaaattcttcttcatgatcctgggttaatggtcatggttttgcctttcagctctagagcaaggtttttttcttgtaagtaagcagttggttactggaaacagacctgtggtccacctggaagtgaaccaaaatatggatgagcagaaagcgctttcccgcttggcaaaggctcatgggcctggctccatagggtggtgccagctcctgccctgttcttttgtgctgtgaagacacaggtgccccctatgttcagtgacttgacacttaaatggcagtatggtctttggtaataataatgaaaactaacagctatgcttttcactgacaaaggtaggatattgcaggaagcttgatgttgaatactttggggttttactttgagaactcctagtcctgtattggaccttgttggaaagttccctgagcctatgagtgagaaggggacaacttgggagtcccacggtgag

SEQ ID NO: 41739 - DNA, 1068 bp, Homo sapiens
tggggaaagagattaccatgaaacaggccctagcagtcacttacaaatacagttgaccctcattatttgcgaatcccatatttgcaaatttgcttacttgctaaaagtgtctttgtaatccccaaattaatacttgtggagctttcaaggtggctcctggatagacacacagtagtgaaaactctgtcactctttgcacacgtcccaagctaaggtcaaaaaaggtgacccttcgtcttcttgtttcagctctcatacaaagatgacctgaggacagagacagtagaggacagtgcagggtagtgcaagaagctgtggctctggggtctggtcaagatgcccctttcttctgttaggaagctttcccactcctctgcctgctttcgcatctcttccaaaatacaagtgattgcatgtgactcccttgttagagcaggctctcaataaataggctttgcttgatttcatttggttcatcttcatttatttccacaatagaaaaagtacctttaaactggatgccagataccgttcccagaatcaaaggaggaaaaacgtcaaatacttggtgaaggttctctgatgggcataactaagtttagccttactttgggtttttcgaatttggccctcttcgattccatgggccatgtgagggaaacacacagctctccctgacaggcgggccttctcctggcctccctccctagaccctgaacagtgcagcagagcctggcaatgtgcaggaatccctttcccagagtgggactttaatttagaataatgtcactgaggagctccaacagaggagtccaggctgggcacaggcaccccagggtggggcccttgcagctctcccacacaaggcaaagcgaagtcacagcccttctctttgcagacagcctcccagtcccacgaggataacccttgggcagaagcccacacatagagctcacatggacaaacaacgctcagggatggtgcagcgggaacctgtgtcaacaaagaggaacattttcctaaagtagcataattggaaataaggttcctttgccgtaaaaaaacctc

SEQ ID NO: 41740 - DNA, 1031 bp, Homo sapiens
attttttattgaggcataacattcaaagagcaaagtgcacagatcttaagtatatagatcaagtcctttattttttaaaaaagttatatgtagataattagttatatacagataatttttctaattagcaaatgaatcaagacaataccatgactgctgttgtaaaatcaactgtgggattcatgtaaattaagaactttatgcttggatttactttttaattgtctagcattgaaactgaaaagtgcattgtcctttttcccattgattgatatatgtcaacactgttcttacagctcatttacagaaattgatgtctgataagaagtgttctgtcgaaaagaaatcagaaatggaaagtgttttggcccaggtgagtactctagagatgttatcagagtaacctaggtggtcgctgtccttctttcagtgtttaatgactgttgcatttcccattatgctgaccctggccacattgtaatgaagcagaggttaattctgtcctgtatagcgtctctttttttgcatttttattttcttctctcttttgtgactaaccctttatttcagcccaaactaacaagtccgtgttaataggcattcaatttgtctgaccttggaaactacttttctggatttaatagctaaaaccacaggagtgactgatgatgggtagtgttcagcactggtgtggagacttcggggcagataacttgatgagcactttctcactggctacttgatctgcctctgcttggaccctgatttcatgctattattcttagaacctcatgagcaggtcctgacttttctgtccttgcttttctcagtttgcctataggcctaaagttttataatttgtataatatttaagctgacaaattttagagaagacaaaaaagagaccacagagataatttattctgaccttttaccaattgcaggaatactttctatattagaagtagttcttatccttttgttgggtcacagaccaccctaagaatgtgatcaaaactgcacgtctccct

SEQ ID NO: 41741 - DNA, 1174 bp, Homo sapiens
atttacattgaaaactttcttaatttggctgttgaatcatctgctgatttattttgatacttgtggagtgtaattttatcccttgcttgaagctcattgttttagtaattactcatggtttagaaaattatttcttacattttgatactgttgaagccacacgttcatctcattttcttatccaaaggcatgccctttattagaaaaaatggaaaatgcctctaagtatccctaaaattttccattcagaattttagatttactgaggttttgtgtatatgtttttgatcttaacagtattattcatttccaagtacgttgtcagagttgggaagtaactagttgatttgacaagtcaatttattgtttgagcattggccttctctcttatttcagatctgtgttctaggagagcaatttgttttttgacttgccatatcagatgcatgtacagctgtcaatataatcttcaatgaaaagtaagggacccatgggaaatggtgtagcactcagaaatggccctggtggattcactggctgaaagcccatctgttgcttaagcacagagtagcgttttctgcaccttagtgtctgactccttttcagctttatgaagcatcattgtttctttaaaaggccctgattcaccttctgtggtaggaagacctctactcctattatgtggatttaacagctcagaacgaattcttttgtttctcttctctgtctgtttttgtggcccatctctggatgttccagttttaaaaaccatttttaacttgtttatgaaaaattcaaaacatacaaaattttatatgttaaataaaaacataataaacaattatgtacctatcaccctgcttcactgttagatttttttgtatctattcccctctcactttcctgacttctttcccctaattctttgtgtgtggtagggtggggacagagccccactctgtagcccaggctggagtggaggggcacgaacatggctcactgcagccaggacctcctgagctcaagaatcctcctgtctgggcctcccaaagtgctaggattacacatgtgagccatggtgcccagcctgaatttttttgaagcagatctcaaacattattttattatacctgtaaatttttcattatctatctctaaaagagaaaaatccttt

SEQ ID NO: 41742 - DNA, 1055 bp, Homo sapiens
ttaggtaattagcttgatgttagcttgttcaattcatgccttatatcctttgccttgaataacactttatttaagaagctcttgctccaaagaaaccaactgtatgatgccattatcagtcatttacttttttgtagcagtaaaaaagaagaaatcaaactgctatgaaagctaaagaaccatttcatttcgcttttaatttcccattctttgaaatgggatgaagaaacttcatttagtgtatacttataaagacttgctaatgctttaaggaaaaccattttatctgcatgtcactattcaatatcttatttcttatttttcatgtgatttttgcgtatgttttcctaatttaaaaaactatattaatctgcctttaacaagttattttcagttaaaagtaataatctttttggatgtagctggagggaaggaattaatacttcagagaagttagatcatgtttattttaaatagtgagtaataaaattttcattaatgtgtttaaaaataaccttcacatgtaccccataaatttgtacaaatataatacatcaaaaaaataaaaataacaactacccagacaaatttaattcaaaatttttttggccattcccttaggaaaccaactttctgtttagtgaaaaagaccactatagtatggagcctttatcactagaatgcagttgaaaatagaggccttgttttttgtttgtttgttttttgtagttaaatatgcaggtttatcgcttacgtttttgctttcagagaattcacaatggcagaaattgagcactttgtagatcccagtgagaaagaccaccccaagttccagaatgtggcagaccttcacctttatttgtattcagcaaaagcccaggtcagcggacagtccgctcggaaaatgcgcctgggagatgctgttgaacaggtaggattctggaggtaacttaacttagattgtgcctgttcagggtttgcagcaattagcaaattctatgtgttctgggtgacaagatattttattttggcagtcatttgcttttttacagtac

SEQ ID NO: 41743 - DNA, 1035 bp, Homo sapiens
tccttttgttgttgttttgtgttggagtttctgagctcatatgagttttatatttgcttgctttattacagacaccccatgtgataacatgtgcttggaaagcttagtagttttttctttttttctttttttttttttttttttgagacagagtcttactctgtcacccaggctggagtgcagtggtgcactctcagctcactgcagcctctgcctcctgggttcaagcgattctcctgcctcggcctcccaaatagctgggattacagatacatggcactgcacccagctaatttttgtattttcatgaagacaggatttctccgtgttagccaggctggtcttgaacttctgacctcaggtgatccacccgccttagcctcccaaagtgctgggattagagacacgaaccactgtgtctggccaagcttagtagttttgatggttgaatttccccaaactctttggatcaagggcaaaaaaaaaaaatgaatcttcttgagaaggactaactaggtatctaccaaaataagctctttacaaactcttgttcttattgaaataacgggttcttaagagtttgtcatagttggggtttctataagaaagcaccacatacagagtggcttataaacaatggacattgatttctcaccgttctggaggctggaattgagagatcagggtgccagcatcgtctgatccttgtgagggccccattctcagtcgcatactgccaacttcttgttgtatcctcacatggtgaaagagggcaagagagctctctggggtcccaaattccagtgattagggctccatcctcatgacctaatcacctcccaaaggcacctcctcctaataccatcacattgggagttaggatttcaatatacgaattttgtcaaggacacaagcattcaattcattgcaggttctttgaaaataatttaaattttgctttttaaaagtatcttatgtgtgtatttataagaaagggaacctggcatcaatgtgatcataatgctcttatataat

SEQ ID NO: 41744 - DNA, 1050 bp, Homo sapiens
ttaatttccataattaaattccagaatatgttagtttaccccacagactcagtataacaatataaatccatccagaaaggaagactactttgtgtacagtgtgaattatatatttttttctttctttttttttttttttttaagatagggtctcactgtgttgcccagattggtctcaaactcctggcctcaagtgatccttccacctcagcgtcccaagtacctgggattacaggcatgagccatcacacccagatcagtgtgaattatattttataggcttattagctgcctgatatatgaggctattcccatttcaaatatttatgaaatttgaatgaagattatatcatcgaattatcattgaatatatgaaaggtttataatctgcatgcatttgtgaatgaacccaatataagtaataataagtaagtaatgtttttattgattatatctttttagggttggattgagattgttggatgtgctgatcgttcctgttatgacctctcctgtcatgcacgagccaccaaagtcccacttgtagctgagaaacctctgaaagaacccatatcctttctggtcactccaaaaactcaggattcacatgtgaacatcttgctaatgaataagtccaagtctttaccttgttctatggataaatggagatgttttagacactgtagtaacgcttgtttaaacctattattttacctatccctttgttcctttcctattctctgtacttgtagtctgacgtgtgcccactcaatgtttggcctttaaaagaagcatatttagaaaaatgctctgaatatctttcagaacgttaatagtttttctcagctgtttccaaaacgcacttcacacctgcacctacctacgtgctctttaaataaagggtacctggtgaaagctttttccattaaaagatgagtgccatttgatagtagctgaaataataatttagctcacttggtctgaaaatcagcaaaatagaaattttctttctttagtaggcagtgaagttatgagctgatttcttagggg

SEQ ID NO: 41745 - DNA, 1139 bp, Homo sapiens
agttgaagatacctgtttcagaaaaatttaaaaacatttctcgtcttccagaattaacatctatttatactaaaacaatatcaaatcccattaaaatggactaagttatattactagttaaatatcattatccataaacacagtttgctttattaattattctcaaataatggctgtctccttgtcaattacaactcttttttttttgagatggagtctcactctgtcacctaggctggagtgcagtggcgtgatctcagctcactgcaacctctgcttcccaggttcaagcaattctcctgcctcagcctcccgagtagctgggactacaggtgtgcaccaccacgcctagctaattttttgtatttttagtagagacggggtttcaccttgttgaccaggctggtcttgaactcctgacctcaggtgatccacctaccttgacctcccaaagtgctgggattacaggtgtgagccacctcgcctgacccaattgcaactcttttatagctgttaactatgatacacttagactgtgctcacagagagaatgcatgtgacactgtgtatgtaatggaaccttgaatgcatgcacacacagacttcagacagaatagtaaaaacggaagaattcagtgaacaccagtcagatgaggcatgagattatcacaggtggaaactagcaaaatacagttataacatatgccaactatccagcttctgagacaaccacatgagggctctctatcctagcactgaattgcttgggagggaggagaaatccaaatggatattcaaaatgtgaggaaatacctcctaagctgaaatacaggtattacatgaagctctttataaagatgaattcttataacctgaaactgaatgggcatatctcaggacacaaatacatggcagccagtgattttgagggggataatattttatattgccatatgaaacagaaacattaaacttcttttaaactgatcttcatcaacacaaatgtccaaatttattttgaaaatagtgtgggtattggattgtaaaattacttctgtaagatggcatgctggttcatttgtacatttgttgggacagtaatgagaacccttgtgtttttaccagcaggcctatttctg

SEQ ID NO: 41746 - DNA, 1041 bp, Homo sapiens
gtaatagagataaagtgtagctgctgctattcgtagtttgctgactggtgaaggaatattctagtacctcaggtttcatttttacacagtataaacagaatttggtgaaaggttttttcactccagctttctcttcaaaggcatgtttcctatcagcaaatagtttttaggtatgttctagtttctttgttctgatatacagagataaaaatccatctagaatagagatatttttagtgctaagaatttttttcttttcttttctttttttttttttgagatgaagtctcgcccttgccttccaggctggagtgcaatggcacgatcttggttcactgcaacctccgcctcctgggttcaagcaattctcctgcctcagcctccggagtagctgggattacacgcacctgccaccatacccagttaatttttgtatttttagtagagacggggtttcaccatgttggtcaggctggtctcgaactcctgacctcagatgatccacctacctcagcctcccaaaatgctgggattacaggtgtgagccaccgcagctggtgaattgtttagagagaatctgaaatgcattatgtggtatttgagagaatgttattgaatttctatctctttttcagtggaagaagttgttccgaatgtaattgaaccttccttcggcctgggtaggatcatgtatacggtatttgaacatacattccatgtacgagaaggagatgaacagagaacagtaagttgttgtgtacagtgtgctgttatagtgtcagaaaataaaaattttctgaattacattgtgaagtacattaataagactctagaatggtcaattagttattactataatctagtgctattaacactcatctttgcttaagtatgtatagacaaaccagtttcctgtgttatcttatttgagctttaggttattctagaagctattgttttagttgcctggtgctctctattcttagactgaacctattactttggggaacaatctatattatgtcaatggaaggaatggta

SEQ ID NO: 41747 - DNA, 1032 bp, Homo sapiens
tctggggtacttttggggtaaagatgtgaattcctaggttctactctggagatgctgattcactaggtctgagacccagggatctggggtttttttaaaaaaaataagaatcctgagtgatttcactgtgaaagcttgacagatcataaatgggataatagttgtctggggtatagcctttcctagcattcaagtattgctgaagatagaagtttataagaagtcttcatcagctcccacaaattttcttttcggtctgatgcttctgaatcactgctccttgccttcttcctctttatctccttgccttacttcaccatttttacctcacctctgcctgcagaagttacactcctgggcagattactaggaaagccaaccagaagaatggctagaaaggagaggttgtatatgtcaggttaattgaaagaaacagcgtcatccacttggccattctaaagcttgagtgtacgtaatgttagacatcaaccgtgtggttctttctaggacatttaacctcaaagaatgaactagtgagttctcggcaccagtactttagtctgacacactattgtaatacatagctaataaagttagtatggtactctctgccctaaagttgcatcttcatttcccaaccttgaaggagcagccctattcattcaacagattgtaagaacctgggctaggccccaggtgcgcaaacataaggcttggttctttttgagaaatgatgacaaacataactgcatgtgttctttttagatgtcaagtctgcttcaagctttgtctgcttatttttctaataaaaaggttttagaaaatcttttagctgttcctttgaatctaacaatattaatataactagagctttaatagaaatttcgtaagggctaaacaagaataaattagtcacagtgttttatgaattgcatgaattcccatcatgaagagaaatttgattaggctgtgggaagccaaaaatgtttctaaattattagcacctagttcctcaatccatttgcctataaa

SEQ ID NO: 41748 - DNA, 1051 bp, Homo sapiens
tctacagccacagaatccacagccctgaaaggaatcctggtggtcatctggcacatccacttatttcagagctgggaaatggggagagtccattgacctgcttagagccataaaaatagaggtggtggagtcaggactcaccttctggccttggctcttggtcccatatttgttccccctatagctgtatcagatggaggtatgagtgaagatttggattcccgcaagggatttattaaactttagggatatttctttctcttgcaactcaacttgttgctttcttgtcttggtcccatttataagtctcctgagcttgtaagacagtagttagataacactgggcttaactccattgttttatttttaatttactttgtttattttggatagcggaagccctgaccaggcatggagtatctcacaaagtagacgattcctctgggtcaatcggaaggcgctatgccaggactgatgagattggcgtggcttttggtgtcaccattgactttgacacagtgaacaagaccccccacactgcaactctgagggaccgtgactcaatgcggcagataagagcagaggtatctggccttctctttggcatttttagccttagaaatgtgtactgcttcttactgatttgtgttggattttgatgtgtttatgctccctttcctttttttttctttttaattttaatgaacggcttgtatcagacagagcccagattctcaagtcccccggtttaattatgaaaatatccattagcacttctctaatattttataaacatttgtgttgctccaggcttattctccagcagtttgcttttatacttgtttgtttattgggcaagagaaatatgatcctaagaatttgttgccatagttttattggtaggctttggagggttagacattttaatgttttatttttacagacgcgtatacatgtgtatgtataagcttttccgtgttcatatattcaaaacagtgaatcatgtttcagtagttttggtcaataggaaggcagtaatggagatggtaga

SEQ ID NO: 41749 - DNA, 1026 bp, Homo sapiens
cagccaccctgggagaggggaagggtgctgaagagggtaccagaccgggtcaggacctggattatggttgtgtggaaacagagcatcactttctccgtttgtgaactaggaatagtcatctctggcttgcctaaattggactcagtaagaaaatgcaaagtcctttgtaaatcttcaagggctctataagtgagtagggccattgaactcagcctgccatggtacagatggggaaactgaggcccagagagggaaagatggttgttcagggtcacatctggcatccctggcagaaccaagactggcacctggtgcccctgtgtcacattgtgctgctgtgccctgcaagaggcatggagcagtgggggcccagggaggccaggaggaaggctgagggctctgagttttagacttccatcgctggacacccacacagactcctagggaccaaggggtggctctgttcatgaacggcttcacggtggaacctcccctttggctttaagttagaaaagatgaacacagaagagtacagagagcaacatagcaaacacctacagagcccctgccccacacgagcaaagggaaacactgggtcacgtgggcaggaacctctctcagtcctcagctcctcggtttcattgacttatatagttttcacattgattgattgtgttattgatgttccttcaaaagccatgtgtgaatggttgggtgtgaggcctcagcactcccttttgactctgaaattctaggatttcagacatgatccagcttaaaaaaaaaaaaaaaaaagggcaagctcttctgttttcttcaggaacaccacgatgacctgccatcagctgccatctgctctgcggctctggggagctcaggccctgtggacccagaggcagcccctgcactttcctgcctgtgtgcggggtctgccttggccctggaggcccccacctcagatgttgcccaccacatctggtggggaaatggttctgtgaaagcagatggaggatgggatcgcaccct

SEQ ID NO: 41750 - DNA, 1026 bp, Homo sapiens; identical to SEQ ID NO: 41749

SEQ ID NO: 41751 - DNA, 1029 bp, Homo sapiens
ctattgtgatttggatatggcccctgccttatccacctccctgccagccgcctctctgatatcagtgactcgcccatggggtgcagccctcccctgttggggccacacaggatgctggaattctggggtctcaggcccagagctgccgtagggccacctgaaccctgacgactccagcggtaccggccagcctttcactcacatacaggtatggccgtgcctctcagccctgacttggagatgctgctctctgacgcagggacattcccaagttggattttgtagctactaaagccagggagcagaagctaattcaggatggggcactgcgtggggcttgggccactcatcctgagtgtttgtgtcttctcagcttacgcttcacagtttgacctgctatgaggacctggtgacttttcttcaacaaagcattcatcaggtatgaagcatgccttactcctgtgggatgtgcgtcactaagccttctgatttcactgtgggaacaatgctgtgaactggagttgttctcctgtcgtcccaccctgggatggcgaggaagctgggaaggagtaatgctggcccctggttgggggctgaggagaatggacttggggtgagggatctggctcctgccattgcatcctcaagagctggtcctggaggcagggcacaggtagcagccacagccaggactactgacagcagagctggacgggtggggtcaggacacaggaagcagctgttagatggaggtcaccagagctttctctctgtctgagtggaagcagccgccactggaatacaggagctctttgtcagtggagtgggtcctgggaccagctggtgaggtaaccagaaagcggcttcttgggtgggttggagggcttagcagtgtgatacacaccttgattagtatccctggggtggcagggctgctctgggtgggggctctggagcccccccgcctgccagaggagagctgtacatccactcctggccatgagctgggcgggacgtggccagggccag

SEQ ID NO: 41752 - DNA, 1069 bp, Homo sapiens
taaatgtaataatagttccccaaatttacacagagttggggtttacagtgggtttctgtgtctgttacttcactgcaggtaggtaggcgttacaggcattggcggaaggggaaacagaccacagaccaagaaagtactgcagctgccccaggactgcatgtatgtccatggcagaagtaggcaagagttctagaaggagaaactgagaccaagaacactttgtgactgtccaaggggagatggaaatttgtggcagattaggtaggctttctatggaaagggacaccgagaccaagagcttcgtgacttccctaggcagcatgcagagctggtacaagggactggtgacccaagtcctcctgagcctgtgtccccctgtgcagggggagacatcagcattactctttgccattgtcagagcacttccacagacattgtctcaagaatgtgcaccataagccaaggaaataggccaggtgggtcttcattattcttattttgcaaagaggaaactgagggcagcataaatgaagtggctggcctgagatcacagaatgaagacgaggttgatttaacattgttgttgattcattcattccattcctacttccaaaaaaagactggaagttgctttgaaaagtaaatgatgtcctcagggctctgctgtgcccccgcatagtcagcttgccctctcttgcctgtggacctttgcacgtgcttctccttttggagcgacgttcacttttctgattccttactgtcccttaggtttctgttcagacatcgctttctccaaaaacccttccttgatactccctccccgaacttgaagtctgtgttgaaggcccttcctgtgtgtttttgaaggagcctgcatttctgtcatggcagaaccccttctcccagccttttcaaggtgcttattgttttttcttccctaagttatttccccaagaggagagatccatatccaccttgtttttttttttttttttttttttttttttgagacggagtctcgctctgtcgcccaggctggagtgcagtggcgcgatctcggctcactgca

SEQ ID NO: 41753 - DNA, 1069 bp, Homo sapiens; identical to SEQ ID NO: 41752

SEQ ID NO: 41754 - DNA, 1020 bp, Homo sapiens
gccattctcctgcctcagcctcccgagtagctgggactacaggcgcccgctaccacgcccggctaattttttgtatttttagtagagacggggtctcgatctcctgacctcgtgatccgcccgcctcggcctcccaaagtgctgggattacaggcgtgagccaccgcgcccggccatatccaccttgttaacaagtacagccttagccaggagcatcctcttggcacagaaatttcaccaatacaatctttttaaaaagactaattgaccaagtgaattcctggatgacaataaagagtatattttgaggaaaagaaaaggtaattttatcagaagcttgagctgcaatagttaccatagtagagcaccatatttggctctgagcttcctggcagccaaggcaaaaatgtaaacatggtaagttttataattttcattgtctgttccaggagaaacaagttgggattttttttttctaattttaagtccaaaatgtgattacacataaggaacactgactattataacaggcggtgtcttcagtcacagttcatggtttccaaagtggaatgagtgaggccttcacactgacttgaaggtggggatggtgtttctccggggagcagaagtgacatggccgatcccagtaggctgtggcccactgggcttactggacagatgggcagggcagagccagctttgttttaacagctaacacaggtgccaggccctgtttgaaatgctttataaggattaactcacgtaattttcacaacttgataagggtaggtgctgtgattattaccctctttttacagatgagaagactgaggatagaggagtccaggagtgtttccatggtcacatagcaaggagtggcagagcgaggatttaaattaggcggtcaggccccgggacaccagctccaaaccagagttgggaggaggactcactttggatgcaaaatctaagggggtgccaaaaatctcagaaattagcaaaacctatcttttttaaaaa

SEQ ID NO: 41755 - DNA, 1020 bp, Homo sapiens; identical to SEQ ID NO: 41754

SEQ ID NO: 41756 - DNA, 1065 bp, Homo sapiens
ccccaaccctgctgccttgtgagagttgggtatcaagtgaggcattgattctctggcccgccataggcactgggccaggggaaccttcttcctggctccattagctatcccctcatccccaggtctgtgttccatgtctgcgagaactttgctgacaccagctgcctgcctgttccacttcccccatcaatcccccatcatggtgggtccaccttggcagttgttcctagaaaagctgagtgggtgagtggtgagtgggaacactgcccccatacccaccaggtgacataccactgcagtgggaaacagcaggcttaggggtaagtcctgctgtctgtaggaaggccccaccgtgtcaggaaggggatacacgtgacatcgtggcatgagctcaggtcatttcaaaggctgcagtgagagcccaagctcctgataagatgcagctgtgtgcccacagcatcttgtccatcttgctcggtaggtggggctgcagggtaggccagtctggtgggcaggtagaattcccccacatcaggtcaaccctcatagaacccctgggctggacaccatggaagaaacagctgagtaagacttggctcctgctctcagagagtttgccatcagccaaaagtcaagtttggaatcaaccctgttaccagtccagggaaagatgcaccacccacccttaaacccagctctgttgccctgcaagaacccccaagccacacagctggctgtctggcagcttgcttggctctacagaaaggcctttgggcaccccctgttatcacctcttcttttacagacagggagatgggggcctccagaatggaggtccgtgtcccagccacactttgagtcacaagctccaaggactgtggcttacgcttttgctgtcccagcccattggaaggtcacttagtgggcagtgacttcccaccacctggctttgttgcctcggtgacattgcacaagcccagactgctggtttcgccttcagagaagagcatcctaattcaaaccatcccagaccccatgtgtctctgcgctttgctgtgacgcaaa

SEQ ID NO: 41757 - DNA, 1065 bp, Homo sapiens; identical to SEQ ID NO: 41756

SEQ ID NO: 41758 - DNA, 1030 bp, Homo sapiens
cctaagtggcctcaagtgggcatctttgcaagtgagcctttgctgatgtggtccatctcccctgtgtgagtgcacttagcccctgggacggccacaaagcatagtggaaggtgctggggcttcctggggaggggtcctccgggggcagctgcatggggagggccttcatgacctcacagcagcttccattcccttctctttccatgagtcatgtttctaaaagtggcccaggagtaagtggcagccagacggtggtggcggggcctatctggccaggcagagggagggtgaggctgaggccagcagtggggaggaagaagagagaaggagagacagggagggcagggccagaagcaatgggagacaggccttggaccaaggaaagagacggggtggagaaggagagagagagggtggagacaatagggaggcaggcacagaggagaaagaggggtggagggagccaggacctcaccgaaggcctcctcagccctggaatttagatgcagtcgggcatggggtggaatgttctggacttttgggtatgaagccgtgtcccctgctgggccttcccacctttttgcatctcttctcctaggagtgctcctgaccatcaccttcatgcctggggctcgccccttgcctctggtcttggtaccccagaataccctggcctggatgcagctggatgcaaaggccccagctcaccccaggcctctccagcttctaggcagagtggggcctgggtctaggcaggtattaggggctgggctggagtttcattaacacagggggtgggttcaaggcctgatttccactacctgccgtgtaggcttgcctgggaccctgtgatgggctctgaaggcccatctgagggtccgcccttcatgcctgggcctgggaggcctgggtatccttggggtcctgggacacagtccctgcctaccctcctcaccagtcctcaccacctctctcccctgcagctggctgatggtgtgaactcgggccagggcctgggcatcgagatcat

SEQ ID NO: 41759 - DNA, 1028 bp, Homo sapiens
ccatgtgacctggccttagcgttcttcttttccagcctaaggcttaggctgatgtcctagaaggggcgagtttccaggctccactccagcactgagtcctgcctgctgcagtcccctgtcttctctgagaggcaaaaggcaaatttgctaatttgctgtcaaacctcgaattccaataactgactctgtcctggagggggaggggcttgcaggaggtggcagagaaaacagtggcctgtgttgggggtcccaggtccccccgtctctggctcccaccccaaggtttgtctaagatgcactgcactctgcagcaacacctccacctccagaccaccggccggcccgggaggagggtggcattgaactctcccatctgagggcctggggattgggtgtgacctgagcagtccagagtgaattttgaaaggggatacaggcagcggaagtgctggagtgagagatacagtgggactggggggcagtcaggcatggtggcagccagtgagtgattcagcctgatttccaattcattcctgtagaagccaacttaatcacttcctccattcatgtatttctttcgttccgtcatttatttaaagtttgtttattgaacatctactctgggtcagattccatgccagactccgtcttctcaacaacgaaaggcaaaatgaatcaatggtaaaataagattttcttaagacacactttcctccacactccctccttcctctggcagtggcacaatgaaggtgttatttacacctgattcttaatggttcattaaggcagggccttttagcacctctgttcacaaaacttgattggtgagacttgccttgaatactttgcaaggagagaatgggattcctgtgtttcttctcagttcccaggtagcctgttgtgatgactgtggctgtgtaggatattggagagactggagatgtgggagcacggatctccctcctcctctcaaatgcctctgcttgtttctgttctggaggtctccagtgtccccagcttatagt

SEQ ID NO: 41760 - DNA, 1029 bp, Homo sapiens
catgcagttcattattgtaattctatgaagatgtatatttttctaatttttttcctgtacatacatatgataaagtttagtttataagctaggcacaagagattaacaaaaaaatttttttaatttttaatttaaaatgtttcgactttttaattttaaaaattttaaactttttaaacaaatttttttaaacatttagaaatcagtcataagagattaacaaaaataactagtagtaaaatagaatatttataacagtatgccaacatcactactcttgggctttggggtcattattaagtaaaataagaattactcaaacacaagcatcttgatactgctgcagtcaatccgataactaagatggctgttcagtgactaatgagagggtagcctgtacagcgaggataagctggttgatgggatgattcacaagtcaagtggaatggagagggacagtgtaagatttcatcatgctcctcagaatggcacacaatttaagacttatgaattgtttattactgaaactttccatttaaaattttcagaatgtggttgaccatgactaactggagccattgaaaatgaaactgggcaaggtgcagtggctcacacctgtaatcccagcacttcgggaggccaaacgggaggattacctgaggccacaagtttgagaccagcctggacaacatagaccctgtctctatttaaaaaaaaaaaaagaaagtgaaactgcaggtcagggggactattgtaatgaagaaaataccaatccttcacaaactctgtcggaaaacagaagaggagggaacatttctcaacttattttatgaggccagcattacattaataccaaagccagacaaattattataagaaaaaaacaaagatcaatatccctcatgaacattgatgcaaaaatccttaactagatagttgcaaaaaaaatccagtaatatataaaaggaataatacatcataaccaaatggggtttgtcacaggttggtttcatatttgaaaatatcctt

SEQ ID NO: 41761 - DNA, 1076 bp, Homo sapiens
gtaaggacaaaattttttattttaaatgctactgaatgaaagagcttgtttgtattgatgcacgacccacagctcactattgaacaatccctgatgagtatatgtgatccaaaggcataggaggttattcctgagataacaaccagcctagtagactagataaatgccactgtaaggtctgttgtaaggtctatttgccctgaaaaggagacttcctaactcttcctgtaaaacaccaactggagcaccccagatgaagcagttgatacgcttcttatgcaagccatgtaggactacctttttgaggactgggatattctcccactgaatatgcctataacccaggtcatggcaaattttgggctgagaggggcaccttttacatgggtacccctcccacagaatcatatgactgtttgagaagctttatcaaatttgctgtccctcatgggtgtacagatggttaataatacataggggtaattgggctgtgtccccacccaaatctcaacttgaattgtatctccccgaattcacatgtgttgtgggagggacccaggaggaagtaactgaatcatggggtccagtctttcccatgctattctcgtgatagtgaataagtcacacgagatctgatgggtttatcaagggtttctgcttttgctccttccttattttctcttcccgccgacatgtaataattgcctttagcctcccatcatgattctgaggcctccccagccatgtggaactttagtccaattaaatttttttttcttcccagtctcgggtatgtctttatcagcagcacgaaaacagactaatacagtaaactggtactggtagagtggggcactgctgaaaatatacttgaaaatgtggaagcgactttggaactgggtaacaggcagaggttggaacagtttggaggactcagaagaagacaggaaaatgtgggaaagtttggaacttcctagagacttgttgaatggctttgcccaaaatactgataacgatatggacagtaaggtccaggctgaggtggtctcagattgagatgaggaacttgttgggaa

SEQ ID NO: 41762 - DNA, 1072 bp, Homo sapiens
tgtgtcccagctgctgcttcagctgtggctgaaaggggccaatgtacagctcaggttgtggcctcagagggtggaagccccaagctttggcagcgtccacatggtgttgagcctgcaggtgcacagaagtcaaagaattgaggtttgggaacctctacctagatttcagatgtatggaaatgtctagatgcccaggcaaaagtttgctatggggtggggccctcatagagaacctctgctagggcagtgtggaagggaaatgtggggttggagcccccacacagagtccctactggggcactgcctagtagagctgtgagaagagggccattgtcttctagaccccagaatggtagatccactgacagcttgcaccatgtgcctggaaaagctgcagacactcaacgccagcccatgaaagcatccgggagggaggctgtaccctgccaagccacaggggcagagctacccaagaccatgggaactcacctcttgcatcagtgtgacctggatttgagacctggaatcaaaggagatcattttggagctttaacatttgactgccccactgaattctggacttgcatgggacccgtaaccccattgttttggccaatttctctcatttggaatggctgtatttacccaatacctgcacacccattgtatctaggaagtaactagcttgcttttgattttacaggcccataggcggaagagacttgccttgtctcagatgaaactttggtctgtggacttttaggttaatgctgaaatgagttaagactttgggagactgttgggaaggcacgattggttttgaaatgggaggacatgaaatttggagggcgcaggggtgtgatatggtttgggtgtgtcctcacccaaatctcaactcgaattatatctcccagaattcacatgtgttgtgggagagacccagggggaggtaattgaatcatggcagccagtcttttccgtgctattctcgtgatagtgaataagtctcacaagctctgatgggtttatcaggagtttctgcttttgctgcttcctcattttctcttgccac

SEQ ID NO: 41763 - DNA, 1053 bp, Homo sapiens
catgctactgcactcctccctgggcggctgagcgagactccatcttgtgggagggagaaatacacacacacacacacacacacacacacagagagaaaagaaaatgggtattatatctaactgagggatgtttcccctatctagtgctataaaactgaaggcatgtaaatctgctctttgagaaatgttaattggacacactaaatgggaactagtaagattgcctgagcccacaaaatatgggttagaagctgcagtgctagttgggacaaatcctccacttcatagccttttgtggagcatttactggggcttatggcaaaagactgtgagtacttcccagtgataactactggactagagaatttccacttgaggggcatgtactgtcttgctatggaatgttaactgaagccacccctatgctaatggaaataatggtgcccaagagttccatggtaaaataaaagtggtttacatagatcttgctacctggatgttcaaggaggacaatactcatgagcagggagcttccttttaccctaggactgtttctaactgtatgacgggctgctagattccacagtgcctgatggttctcatgagctgtttggctcgtgaatggcagttcaaaggtaaacaaacaccttgtttggaaggctgctgctctggctaacgaagggtcaaaaaaatttatttttcctttatttccagtttagaacatttgggtgaagtatatttttgtaagcaaaattacatttctgagttctccaaaattcagattgtgattttatgacagtatagttgtttgcataagtttagtaagagtcttttagaacaaaacagttggagacactggttattttaccaagactttcactagaatagcatatttttaggtaaagttccaacaaagccaacttaagagcctatatagtcaatgaattcttgctgcactttatgtaaatcatcaggcaaagtataataagcttagaacttattttgcacacaaattggtcttactacaatttctctttaatagaaaaggagggc

SEQ ID NO: 41764 - DNA, 1018 bp, Homo sapiens
ggcttgagcttgggaggtagagattacagtgagctgagatcgtgccactacactccagcctgcaaacagagccactgtctcaaaaaataacaattaaaaaagcaataattatttccttcaatttgtttgggcctattacaggccacacacatggctactcctgtggccaaatacatgtttgccctgattggcttaaacttgggttcctgaccactccctaatacaaagggatgggtttgccatgattggcttagtcccaaggccaaatctgacctactacctattgttatacataaaattttattggaaatcagacccatttatttacttgctgtttatggctgctttcacactgtagtggcagagttgagtagttgtgacagaccatatggcccgcaaagcaaaaatatttatctgaccttttagagaaaaagttcaccagcctttggtttagactaatcaggagccatccttggatctgggccagttttatacaccgtattactgtgcctagtggagtcggggttgaaagaatgttggggagtcgaccatgcacaatatccactttagttcattaccttaaaaatattcctttgacccagtaattctcctgttagagatctattttccaaaattaatctgaattggacacaaagctctaagagagtctatcacagaataataaattataagtgagtaactattagtttatcttgtatgttgtatagaatttcagacaataaaaaagatactaagatgtttttattgttttaaagattttcatggcatgttaagtgagaaaagtttgtctacaacaagtcaagcctatgatcccattttataaatgaatatatattaattgaaaagggactggaagtaaagatatcaacctagtttggtgagaacataggttattttttttaaagggaatatttttctgtatcctatttttctataagaaatatatattccttcaggctgggcacagtggctcacgcctgtaatctcagcactttgg

SEQ ID NO: 41765 - DNA, 1264 bp, Homo sapiens
caagtagctattgttcataagagcataacatgagtggtcaaatagcctttaatgatgcagcaaggatggggtagatgaattgggctatagaaatataccaatacatggagattatttccagagacatcgtgtggacttctataatgtatctttgagtccggaagtgaaaatgtaaaatgacttaatctaagacaactagtggtgctgggttgcttttggcctcctgattttcttgagcttttttgggtgtggcttgctcatgagtatttcagtagtctgattgtaactcaggtgccttgttacttgtgcaacatgttttcttatattgaaggagtgtgggttatctcttaaaactgaatatgttgaataagacctgtatttctaggacgatttctcttaatttttaagcagatgtgaagttttatgctgttaggttgtcttcatcaattaaccattatggaattggtctcagttatctcttcttaccaatatcaagtgccaaaatgtttgaatttgggatactctaattaatctacttcctattcctgaatgttattttgtgccattgaaggcttttatggggagtggccaaagaggaatgtttgcctctttctaagaaaaatgagccttctaaccacaacccctgccactcctgaagtaataagaattttggtggttattgtttctcacttgtaatttcataccttcgtgttatatgttttgctgtgtgtaagtgtggcctgtgtcatggacgtttctgctttggggattttttggaactattcttgactgcaaggtggggaggattggtgagttgcacagggcatcacctgatctgagagcagcgtgacctaagaacctggtattttgatgctttgctggctggtgcagtgcctgagggagtaagagccctgttgttgtcagatagtgtcttactccctcaggcacatctccagcgagtctcttgctctcctccaatttgattgctttgcctggtgaccagtaagtaagttcttttgattaccaaatatcattaattagatatcaacttttaaactatttattattatttgggtttgtaaggagaattgccctaatattaaacttattacatgtactaagtattatgtacaattgggtatactggcaaatgtgttaaaagagagtgtaggaactgctttatgtagcagattacttcctaagttttaccttatgtgaatattcttaagaactattgtttatttgaaatgttagtctgtgtttt

SEQ ID NO: 41766 - DNA, 1102 bp, Homo sapiens
ggttggagtatagtcatgtgatcctagctcactgcagccttaaactcctgggctcaagtgatcctcctgcctcagcctcttgagtagttgggattacaggtgcatgccaccatgcccagatagggacttttaaaaatgtgatcttataactcttttgtcagtttttatttgtttctgtaattttaatttttaacttaatttttaatgttttttaaaatttctgaggtctttaaaaaaataatgtttttttcatatattccatttttgttttgtgggtacaatatctttttctaagaatattactgatgcgtatttacatgtgcatctgtttgtgtataagtctatatatgtatgtgtatgtatatatatgtatgtgtatgctttgttccctttcctgatgactcagtttcttcccacttgctttttctgtttgtttggcttcattcttttgttagatattttctttaaatgtttggtgatctttggcctactcctgatacttttaaagtggggggcactaaaaagcaaattggaagctctctgtgcatgtaatgtcctctgtctgggccattttcttaggaatattactgtcttttctcttgggctggtcatattttccagaaatggcttttcttgcctggaagacacaatcgtttctgctagtggtctaggagcagagtaagaataagattgagagtcttaatactcaaagtgatactttcatttaatctccatatttagtatcaatacaggacctctgccttcagctattcctgttgtctgcaagtctagaaacttttccctctcctaataacaaatttgtagtagagtgccagggttggggttgcttagctgctgcaagtcagggaggacaactgggagatctcacggcttccacacagactggcgatgaatctttctcttttaggcctgccttcacccctgcttccagagatatcttgtgcttgccaattcttgtgcctgctgtaaagcagtttgcttctctgctttcctagttctgcagtgaaaattattactcattaattttctttccagagtctaaaggtactgctttttatttcatcttcttgaattttttata

SEQ ID NO: 41767 - DNA, 1117 bp, Homo sapiens
aaaataatagagaaagctgtattagtcttttttacattgctataaagaaatacccgaggactgggtagtttagaaagaaaagaggtttatttttgctcatggttctgcagaccgtacaagaagcatgcatggtaccagcatctgcttctggtgaagaccttaggaagcttataatcatggtggaaggcgaagggggagcaaacaagagagagaaagtttccagtggggagggggcaggtcaagacagagggagcaagagagagacgagtgaggtcccagattctcttaacaatcagatctcacataaacttacagagggagaactcccttattactgtggggtgggaaccacgtcattcatgaggattccacccccatgacccaaacacctcccactagatcccagctgcaacactagagatcacttttcaacatgagatttggagggaacaaatatctaactatatgaaaagccaagggaaaaaaggagctggttcttcaaaaaggtcaataaagttgacaaacctctagcaagactgacaaaaaaagagaagacacgaattatccatatccatgtcaatgaaacaggggctatcactgcagactctgcatacatcaaaaagataataagggaatactgtaaacaactctacacacttaaatttatcaatttagatggaatataccaattccttgaaaaactcaaactattgccataaataaaatcaatataaaatagatcatttaaatatttctataactattaagaacttgaattcaaatgtagaaattcttcaaaaagaaatctctagacccaggtattttcactagagacttctgctagaggtttaagcaatcattaacatcaattctatacaatctcttctggaaaagagaagaggaaacacttcccaattctttacctcaaactattattaccttgatactaaaaccaacaaagtaccaacagtatcaaaacaaagtaaacttcagactaatatcccttgcgaatataaacacaaaattcctaaacaaaattgcaaaaatagatttcaataatatattaattatataccatgaccaaatgaggttttcttccagggatgcaaggctgttt

SEQ ID NO: 41768 - DNA, 1028 bp, Homo sapiens
aaaaaaaaaaaaaaaaagaaaatgcaaactaaaccataatgacaaaaagaatattagtggtttcctagggatgggatgtgggcaaagagagacaaaggaaggagggattaccaaggagcacagggaaacttcgggatgagggatatgctcattatcttgactggtgatggttttgcaggtgggccaaaactaatcaaactttacacttcatctatatgaccagctatcatatgtcaattatccctcaataaagctgttttaaaaacatttagggtatatctactggaaagtaaaactgcttttaattacagactatatcatcatgtacatagaaaaatccaaaggattctgcaaaaaagctactagaaccactgacttcatcaagatgcaggtacaaagttaatattcaaaatcaactatatttctatacgagagcaacaaaaaatggaaaaatgaaaaatttttaaataataccatttataatagactactggggcagactgtacattaaaaaaatacaaaacattgctgagactaattaaaaataatcaacaaaatggagatctataccatgatcgtggattagaaaattcaatattattaagatgtcaattcttcccaaatacatgtacaaatccaacataatcccaaccaaaatcccaggatttttttgagaaattaataagctgaccctaacatttagatagaaatgcaattttaaaaaggaaaaacaaagttggagaactacctactttcaagatttattgtaaagttacagtaatcaagacagtgtggtattgacataattatagatcaagagaataatagagtccagaaacagattcatatttaatgtgatcaatcaattttcagtgaatgtacggagacaattaattcaatgggggaaaagacagttaccacaatggagcatttctgaaaatgttttgtaactcaattgtggtgatggatatatagcttcatatatttgtcaaaactcagagaatggtacactcaaaattggcacattt

SEQ ID NO: 41769 - DNA, 1026 bp, Homo sapiens
gagatgtggggagcgcctctgcccggccgcaaccccgtctgggaactgaggagtgtctctgcccgaccgccaccccgtctgggaggtgaggaacgtttctgcccagccgcccgtctgagaagtgaggagcccctccgcctggcagccgccccatctgggaagtgaggagcccctccgcccggcagccgccccgtccgggaggtggggggcagcccccacccggccagccaccccgcacgggagggaggtggggccagcccctgcctggccagccgccccattcgggaggtggggggcagcccctgcccggcagccatcccgtccgggaggtggggggcgcctctgcccggctgccccatctgggaagtgaggagcccctctgcccggcagccaccccgtctgggaggtgtgcccaacagctcattgagaacgggccatgatgacgatggcggttttgtcgaatagaaaggggggaaatgtggggaaaagaaagagaaatcagattgttgcggcgtctgtgtagaaagaagtagatataggagactccattttgttctgtactaagaaaaattcttctgccttgggatgctgttaatctataaccttacccccaaccccgtgctctctgaaacatgtgctgtgtccactcagggttaaatggattaagggcggtgcaagatgtgctttgttaaacagatgcttgaaggcagcatgctcgttaagagtcatcaccactccctaatctcaagtacccagggacacaaacactgcggaaggctgcagggtcctctgcctaggaaaaccagagacccttgttcacatgtttatctgctgaccttccctccactattgtcctatgaccctgccaaatccccctctccaaaaaacacccaagaatgatcaataaatactaaaaaaaaaaaaaaaaaaaaacaaccatagtcttttaggctaagtgttggaagatagtaatagatttccggctgtgtgactaaataaatcttactttactaacgtaagtccaag

SEQ ID NO: 41770 - DNA, 1034 bp, Homo sapiens
ctatatagggaacactggagatattgctgctctaaccccaaagaactcatcaccaaagcttgggactttgggcccatggtaggcaactggaagagctatttgtggcaaacagtgtaactcaaacatcatcataactatctgacagactttaaggaggccaatccaatgttctcaagcctggctgcatcatgaatcactcaaggaatttattttttatccagatttctgaacccccaacctcgattctgacttactgggttctgagtagaacatggaaatctgtatttacagcaactcacccaggtgatttatccaggtggctctggtgcaactcttcaatgggatggtaattaggagcatcccagggggtcagagctcacgtacctcatggccaggaactgtgtaggcctcctttgcttacatctaaatgttttcccctggtccaactggaatacgaatgttacctcctaagagtccaactttatcacttcttctaaccatctagatatctgctggtaaactcaagacatctctaattcttcctctttccactagagattaaatgcatttttttcacataaagatagactttaatctaatgtggttatgtatgcatataaatgtccaaatgagagccaagttgggaaatatggccatgtgttgatgtgatgtcttggaacaaggaaggacacctctgcagaggtgttttgagggctataccaacatgctgatgtgatcccttatcaaagcactctagagcagccattcttaaatattttggcctcaaaaagaccaaacaagtcctttatgattgcttaagtgtattgtatgcattgatatttacatggatatttataatccattcatgttaaaactttaaaatgaaaaaatatttgtttataaatcatttacaaataacaataataaactcactatattaacagaaatatcttttatatgaaaataactattttcaacaaaaatttagtgagaaaagtgacattgttttaactttatgcaaatctctttaagtt

SEQ ID NO: 41771 - DNA, 1016 bp, Homo sapiens
cagcaataaaataccaattacaagatattccaaatttgaatatgaactccttctcatcatgaattttctgaaattaaaattaaaagattaagttcaatgattaatgtacaaagatattaaaccccaaaggagttaaagtccaaaatcatattctcttcaccttgtaattaaaagtttaaagaaaattaatgcccaaaatatatcccaatttcttattcaacctctttgttatatttctcaatgttcctaggctatgcgcaaaatgttggagttgagatgtccaaatataacttcttttttcctcatgagcatcttgaacaaattataaaattaaacaaagagaacagagaagagactaaaacaacacccttattactaacaaatgtggcttgtgcctacaggcaagaaagcctgctaacaatgaactctagaactggtcttccccactgtggcataaacagctactgttcacccatgtgtgtgtttggcccctcttccgggcacaactacactatatctttctcagcctcccttctggttaactctgttcatgtgattgaattttggccaatggaatgtggaaaaaattctgtgcaccctcctaacatggtcaataagaatttcccaaatgtgtttcatgctttcacaccctcccctcatttgcaagctgaataaagaggactctcagggcttaaaagagggcaaagccaccagatggaagaacactaggtctcagcatttgtgcatggaatagagcctgtttctttaccatcaatcctcattgaacactgacataagtgagaaacaaacatttatttttgttacgctacggaatgtttggaagttgtttgtttcactggctagcctatcctgcctgaaacaccccgaaaatccctggaagccctgatgcaggacaggttttcctgtggcaggaagtgaactgctcaggtgatccagagatgcagaagaaacttctgaccctatggacagctccccccatgaaaaagagagtaagg

SEQ ID NO: 41772 - DNA, 1030 bp, Homo sapiens
tgactttactccagttcctaataacttcatttccatctgagacctcatcagcctggacttcaatatctctatcagcattttggtcacaaccatttagccagtctacaagttgcaaacttttcttcatcttcctgtcttcttctgaaacttcgaaattcttccaatctctgcccattacccagttccaatgctggatccacatttttaggtatctttatagcaatgcccctctcctcagtacttattttgtattatgccattcttgcattgctataaaaaagtacctgaggctggctaatttatagagaaaaaaaggtttaattggctcatgattctgcaggctttacatgaagcatggtgctggcacccgcttctggggagccctcagggagcttacaccatggtgaaaggtgaagggggagccaatgtgtcacatggtcagagcaggagcaagagagagacagaggtatcacactcttttaaacaaccagatctcacatgaactaccagagcaagaactcactcttcaccaagtggatagggctaagccattcatgagggagccacctcctaccaggctgcccttccaacattgggggttacatttcaacatgagatttggaggggacaaacatccaaaccataacagagatgaatgccaagacagctggactaggtggggcaagccaggaacaggcttcagaaacagcctaggcaggaggcaggaagacaagacggcaggaagcagtgcagaacaaagcaggctcctcatcattcaacctcccctgagtgcagcaaaggggccttattgtcagcccctaactgatcattgataactaaagttacaacaactcatacctgtaagggccatggtgagttagagctggcaagagccctaatgatacacagtcttctcttgaaagaggagaagactgaggcccagagaagtgagtaaatttcccaacaagcagagagttgagactggaatctggcttcccaccccagcccagtgctcttggaaccagaggac

SEQ ID NO: 41773 - DNA, 1174 bp, Homo sapiens
agaaaatggcactttcgatttttccatcctacaagatctaaataatccttgtcgtaaaatgggcaaacagtctgagatgcctgacgtccaggcattcttttacacatcggtccctccctagtctctgttcccaatgcaacttgtcccaaatcttccttctttccctcccacctgtcccctcagtcccaaccccaagcgtcgctgagtctttcttctttccaatcttccttttctatagacccatctgacctctcccctcctccccaggctgctcctcgccaggctgagctaggtcccaattcttcctcagcctccgctcccctaccctataatccttttatcacctcccctcctcacacccggtcgggcttacagtttccttctgcaacaagccctcccgcacctgcccagcaatttcctcttaaaaaggtggctggagctaaaggcatagtcaaagttaatgctccttcttctttatcccaaatcagagagcgttaggctctttttcaccaaataaaaaacccagcccagttcatggctgcttggcagcaaccctgagacgctttacagccctagaccctaaaaggtcaaaaggctgtcttattctcaatatacattttattacccaatttgctcccgacattaaataaaactccaaaaattaaattccagctctcaaaccccataacaggacttaactaacctcgccttcaaggtgtacaataataaagtggaggcagccaagtagcaatgtatttctgagttgcaattccttgcctccactgtgagacaaatcccagccatatctccagcacacaagaacttccaaatgcctggaccacagctgccaggggttcctccagaatctcctccccaagccctggaaatctggccactgggccaaggaatgcccatggcccaggattcttcctaagctgtgtcccatctgttcaggaccccactgaaaatcggactgttcaactcccctggcagccacttccagagcccctggaactctggcccaaggctctctgacaccttcccagaccttcttggcttagcagctgaagactgacactgcccgatcgcctcagaagcctataggaccttcacagatgctctgggtaaccctcacagtggagggtaagtctgtccccttcttaatcaatacaga

SEQ ID NO: 41774 - DNA, 1027 bp, Homo sapiens
agctctttgctaacacataacaaaagtgacattttctccagttgccaatatattcttcatctctgtctgagacctgggcctcattgtccatatgagtattttggtcacaaccattcagtaagtctctaggaagttcaaactttccctcatctttgtcctcttctgagctctctgtactcctccaacctctgcttattacccgattccaaggttgattccacattttcaggtatctttatagcaatgcaccactccaagtaccaattttctgtattagtctgttcttgcattgctataaagaaatacccaagactgggtaatttataagaaggtttaacggctcatagttctgcaggctgtacaagcagcatagtggcttctacttctgggcaggcctcaggaaacttataatcatggcagaaggcaaaggaaaagcaggcatgtcttacatggcaagagcaggaggaagagagtcgggaggtgccacacactttaaaaaaaaaaaaacagatcatgaccactctcccactataaaaccagtactaatgaggcatggtgctaaaccactcatgagaactctgccaccatgatccaatcacctcccaccaggccctacctccaacactgggaattacaatccgacatgattttgggtggggacacagagccaaaccgtatcaatggccatgctcatgttccagtttctgtggttgtaggcaatgcttggtgttccctggtgtgcagctacataactctaatttctgcctccatcatcacacagcaacttttcaaaaaaaaaaaaagaaaaaaaaagaaagaaaaagaaaagaaaaaagtagtaaggaagatagagttgtactcatgtaaggctcaggttttgtcagttataagttaatgacaacagggcaaaaggagtttaagatattgccatgatagtggcagaagtattaagatgacagatctgagctggatggagaggtaagtgaaaaggttactaatggaactactaatgagaattaaaaaactg

SEQ ID NO: 41775 - DNA, 1084 bp, Homo sapiens
agcagcattccccacccagccacagaggtactatcccttgtgttttgctgtgttctgtacacacctttgcacacacccactttgttattactttaaaaaaaccatcaaatttaccattgtaactgttttgaactgtataatagtgttagctatattcacactgttgtgcaatatatctctagaatttttccatcttgcaaaattgaaactttgtgcccactgaacaacttctctgcatttttccttcttccttgtccgctgataacaacattccactttctgtttctatgagtttaactactttagatacctcatataattcgtggaatcatgcagtatttgtctttctgtgactggcttatttcattttacgtaatctcctcaaggttcatccatattgtagcatgtgataggatttccttcctttttaaggcggaataatatttcattgtgtgtgtataccacatattttttatccatttatttgtctatggacatttagattgcttctagcttttggctattgtaaatcgtgctgagttgaacatgtgtgtgcaaatatctgagttgttgttttgtttttgttttagtttagacagagtggtttttttgttttgttttgttttttgagacagagtttcgctcttattgcctgggctggagtacagtagtgcgatctcagctcatcgcaacctccgcctcccaggttcaagtgattctcctgcctcagcctcctgagtagctgggattacaggcacccagcactatgcccagctgatttttgtatttttagtagagacagggtttctccgtgttggtcaggctggtttctaactcccgacctcaggtgatccacccacctcagcctcccaaagtgttgggattacaggcgtgagccaccgcgcccagcttagacagagtcttttgttctgttgcccagggtcgagtgcagtggcatgatcacagcttactgcagccttgacctcctgagctcaagtgatcctctcacttcaacctcccgagtacctgggactacagtacctttgcaccaccacacatggctaatttttgtgtttttgtaaag

SEQ ID NO: 41776 - DNA, 1065 bp, Homo sapiens
aggggtcctgatctagacccccagacagggttcttggatctcaaacaagaaagaattcagggcaagttcatagagtaaagtgacagcaagtttattaacaaagtaaaggaataaaagaatggctactccattggcagagcagccctgagggctgctgattggctattttatgattatttattgattaaatgctaaacaagggatggattatttatgagttttccaggaaaagggtgggcaatttccccagaactgaggtttcctcccctctttagaccatacaatgtaattccctgatgttgccatggcatttgtaaattgacatggcactagtgggagtgtcttttagcatgctaatgcattataattagtgataatgagtagtgaggacaaccagaggtcactttggtcgccatcttggttttggtgggttttggctggcttctttactacatactgttttatcagtaaggtctttgtgactgtaccttgtgccaacctcctgtcttatcctgtgacttggaatgtctaaccttctgggaatgcagcccagtaggtctcagcctcattttacccagtccctattcacggtggagtcgctttggttccgatgcttctgacaaagctatgaatgaacatctttttacataaatctttatctacatttctgattatttccttaggatagagtggagaggttgagttattaagtcagacacttgtaaaatatttttttccaatatgaaagtagctttagtccttaaatactgtataaattgcaaaaagttcagaacttaggtagaagaaagtaagactccaagacttgtacatttcataagaaagcccactttctaagcctgatgtctttaatgtatatttagtgtgcacctttccagtagtgagtgggtgattcttttaattggaaagcttccctggagttgatgttatttaaaaaagaaacctaaaaatccttgttttctactttcctctatttcatatggcatcttatggaattattgtttggtattcatgtcatgtctcaataaaggaattaaacaaaactaa

SEQ ID NO: 41777 - DNA, 1625 bp, Homo sapiens
attctttaataatttttcttttggatacaggagaagaaaggaatgctaaagtacacgggttcttctgtatgatgttgtctgtcttgtctttcttagggagtcatcctgtaagaaaatatcaatattggggtgggggaagggagagagagaatacgaatgtgaatatgtgtgtgtgttggggtgagggtgtgcagacagagacagctcattccccattcccagattctgacacactcacaatattcttctttagagagttcaatagttagcatgttaaggaaattgctattttgaggaaagttaacttaaaatagtcagaaaatcatttgaacagccaacagttcccacagacctaagttccgagagacttctcatattttttaaagtcttaaaacccccccatttttggcaaaaaagatgaatttctgagtgtatatgtatgtgtgtgtgtgtgcatgcagtctttctcatgttaaattttatccatttttctctgaaagaattttttcccttgatttttaagtttttcaattttaagtttggtctataaggaatagaataacccagtaatatcaattacttaacatttagtgaatgcttgctaggtactaggcagtatgtattttaattatatttaatccttattgcagtatcatgtaatattctcttcttaccattactttacagttgaggaaactgatagagctcccaggggtctgggataaggatgcagcaaacttgtcctcaagttgtggctctgccatcagttctgatgaacatgtcatcttcatcaccagtgtctctctgcacccagtccctcccctcccaacaccttccacccacctctttttaaatccatgtctcgatgcatggtgttccatctgcttttgcttctctaattgcttgggaaactctttctcaacctgcaagacccagtgttctgaagcttttaatcatccttccatagccttttaaattactttaatatatctctgttcttacattgttgtactatttaattaactcccatgttcacccaactttctgagagtagcgactgtgtctctcctagcacatactaggtgtacaatgaatgtgcatggaatttgttgaatgaatatgagttatggaaaatgttatcaaaactttcatgatcgttccatctgacaaaataattcacccaatattttgtggatgcaagcaataatataatgtttagggccttcttttaaactctaaaattgcattcatattgaacctatcacatataatgctaatttaatcaatggttgtaattttcttatattatgttattaaccttgttcacagtttaggggaaaagattgtgataaatagcttgacagaacacctagtaatggtctttgtgaggcaattaaaatttgctattaaaattagacacattaaaatgtcaaaagacaagttcataggagaagttaatatgtagacttaaattttattttcttgtatcttaaagcaattagtctcatgaggctatttattggagtaacacttgaattatagttgagaatttgtgtaactttccctggtacatcatttaaaatattagctattcagctcaacatatgcattctatttattcattt

SEQ ID NO: 41778 - DNA, 1056 bp, Homo sapiens
tgaatgaatgcatgatgaagagattaatgaaagaatgatctgaaaacaagtgactcacttagaagagggttcaaagtcatgttacttcacagcctgaataccttgcctgtggaaaattaaaagaacatttagtttggctacttaaaaatgtttttttttttccccctgagacaaggcctccctctgttgctcaggctggagtgcagtggtgtgcccatagctcactgcaacctctgcctcccaggctcaagtgatcctcccacctcagccccccaggtagctgggaccataggtgtgtgccaccacacctggctacttttgaatttttggtggagatggggtttcaccatgttggccaggctggtcttgaactcctgagctcaagcaatctgcccaccttggcctcccaaagtgctgggattacaggcatgacccaccgcacaccatctatttgtggaacatttatttctttgtttaggtcaaactttttactgtttttattatgtcaggtgaatatcccatgaagagtcttagatccatatataattaaggtgataattgcaatttgaacttattgtatgcataaataatatttgctatgctgataagtatgcctatactgttactttaaattatagaaaaaagttggccgggcacaggggctcatacttgctctcccagcactttgggaagccaaggcaggtggatcacgagatcaggacttcgagaccagcctgaccaagatggtgaaaccctgtctctactaaaaatacaaaaattagccaggcgcggtggcaggtgcctgtaatcccaggtgctcgggagtctgaggcaggagaatcgcttgaacctgggcggcagaggttgcagtcagctgagatcatgccactgcactccagcctgggcaacagagtgagactccgtctcaaaaaaaaaaaaaaaattgtagaaaaagtttcaaaagaaattattagcgttgacctcattttataccaacagtcatgagttcaagtgtttttatgtacaaaatttctcataccactttcaaaaaagcag

SEQ ID NO: 41779 - DNA, 1022 bp, Homo sapiens
agttgccattgcaaatcttctgtgtctgttttttttaactgaaagaagcaaaattaatgagctttatagagaagaaataaaacaacttttactctacatgtcttcccatttgtttattccagttctctttctgtgaacaaatataggtatatttaaaatagctttaatttttcttattacaaaagaaatgtgaaatttagaaaatgtggataaccaaaaggaaaaaagtgaatgttactagtaattctactatccagcaatacctttttctgtttcattacatttttctaatctttaaataaatattttttctaagcatttatccccaaaaagaatttcacttgtcattctgttttgagacatctttttacaccattagatatttttgatatatgattttaatgattacatagtattctctcataaatccatactataaaatcatttgaccagcattatacttttagatatttacgttgtttttagtttattaatattgtaaatatacctgtgatgaacactgttgtaacaatacttcttcaaatttattatagtttatttgatgaatatttaaaagtggaattgctgggtgagacagagaatcagaatgtttttaaaacttctgaaatatagtgtgaaattgacttccttaaggaataccagttaaccctaacaacaatgtttgaataaaggcgtccagtaccccaaaccttgccaatagagaatcttataagaaaaaccttttaatatgcttaataattatatagaaaacatttatttacatatataaatagctatctggggtgcttctggcaccccagaaaagtgaattaagcaataaataccttttttttttttttgagacagggtctcattctgtcactgaggttggagtgcggtggcacaatcatggcttactgcagcctctacttcctgggctcaagcaatcctcccaccttagcctctagagtagctgagactacaggcatataccaccatgcctagctaattaaaaaaaaatt

SEQ ID NO: 41780 - DNA, 1121 bp, Homo sapiens
aatttcttaatggttcataaatttactgttacatctaagagatatttcctaatccaaggttgcaaagtttctctctctttttttttgatagaagttttctagttttaaactttacatttaagtctcttccccattttgtgctgatatttatgtgtgatgtgagggatggatgaaattcatgtttttgcatctgggtgtctaattgttacagcactatttttcagactatccttttccactgaattgccttttcaactttgttgaaaatcatctgaccacatttatgtgggtgtatttctgctttcttaattttgttccattgatatttttgtctattgctatataccaataacattgtgttttgatgactgtatatttataataagtcttgaagtcaggtagtataatttctccaactttattcttctcaattttgttttggatattttaggtcctttgcattttcatatgaatcttagaatcatcttgtaaattaaataaaactggctgttgggattttgattgggattgtgattgtattgattccatatatcaatttggagagaaccaatatcttaacaatattgaacatggtataattttctctctgtattctagtttttttaagatgaaaatgcagaccatcgttcatttatttagggtctattttgtttctctctgtgagggttggtagtttttcatgtacaggttttacagatcttttgtcagatatatccctatttcatatatttttatgctattgtgttttatttcaatttcagattgttctttgctaatacatagaaatacaatttattttattttcttttgatatggagtctcactctgttgtctaggctggagtgcagtggtacaatctcgtctcactgcacccttcgcctcccaggttcaagcaattctcctgtctcagcctcccaagtagttgggactacaggcacacgccaccatgcctggctaatttttgtatttttagtagagatggagtttcaccatattggtcagggtggtctcgaactcctgacctcaggtgatccacctgtcttggcctccccgagtgctgggattacaggcgtgagccaccccacttggcttacaattga

SEQ ID NO: 41781 - DNA, 1029 bp, Homo sapiens
aacttatatatgtacttaattaaacttctattgattcatcctaggaaatacattttatggtagttttgagtcttaaaagtgttattcagtctacaaatgttcaatgtaatatgtaagaatatttggggatactagggaaaaaacctcttagaatgaatattatttgatcattaaaatttagggattaagagattcaatttaaaggattgtgctatcaaatatttatcaagcagctactctgtgtaggggtctttatgattagaggaggtatataaagatgtttataatatggtgtatagcctcaaggagcacgatgttttatacagataataattataagcatggacaaatgttactccttatggtagtcatttaccattgaggatgattatttaaatatctgaaaaaataaaatggtgcttaagtgaaatatgagcagatgcatcatactttttttttaaactaaaatgtattatgtgaaaatcattttggttgaaatcactagtgactaataggaactgtatagctcaacaatagattattctaatgtatttttgtaatagaacccattttgttagaaaaaaattcatagccatgcttctatgtcattttttcttccaagacgtcaaactatttagcaggtaaatactgcacaatttagttgaattggattttcagtctgtttttagttcatctccagagtaggactaactgccagacctaacgttcactcctgtgccacagtgcttaacatagagcctggtgtgatgcattctaggtgctcagtacacatttgttgagctctctggtcctgtcccaagggcaactggcatttcttcagtgagtttctgaaggtatgccttctgtttctgccagtaatttccctgggaccaggaaattattttgctaatgagatatgcactttacaacttgcatgcctatgcttatcattcctattcctggagttcagcagtcattgcagctgctgtggaaagtactcctttgctttgactgtgttttaactatcaa

SEQ ID NO: 41782 - DNA, 1032 bp, Homo sapiens
tttcttatttatttgttaataattatgtttgttctcactagatataaattccatggactcagcagcttttttcttgttctctactgtatccctagcatctagaaaatagttggtatgttatagtatctcagtaagtgtttgttgtatagaggaaacttgggtactcttctgggagaatacaaagtcttgttttactttgtggcctagtcacttatgtggagggaactctagttccttgtttatcgaaagcagtggataaaagtccaaattctagaatttatccttcatgtttttccttatctctgcttctttcctctatcaatctcatgtggatttaaaatatgataaaatctgggacaatgtttttcttacccaccagtggccaatggacagtggaaattgaataaacatttaataaatgagtgtttcgatcataagaaatagggcatgtctgcctctcccttgttggctgtttgcacacttgggatttgcagtcttcaatgaatatgaaaagagttggccgtaggtgtttgtgagggagaagagaaagatttgacaatggtactggcctggcatggtggctcacgcctataatctcagcattttgggaggctgaggcgggtggatcgcttgaactcaggagtttcagactaacctgggcagcatggtgaaaccctgtctctgtgagaaaaaaaaaaaaaaaacttagacaggcatggtgctgtgtgcctgtaataccagctacttgggaggctgaggtggtaggataacttgagcctgggaggcagaggttgcgttgagccaagatcatgccactgcacattccaaccagcctgggagtgtggaataagagtaagaccctgtctcaaaaaaaaaaaaaaaatggtactggttacctaagaaagctgttcttgtccaataaagaagtgactaatagcattctgggtttgggttgatgtagatttttgactaggggaaggcagtggattttggtggaactcttttttgaacttccagccttctctgctaaat

SEQ ID NO: 41783 - DNA, 1061 bp, Homo sapiens
tactaaataagatggaaaatggtatagaaattgataaggagtaggggaagatattttttaactaagatgcagaatgaaatggttgacgaagtgggaaaatatctggagggttaaatgaactgcaacaatgcaatatctatttgaaatgctttttagttttgcaaaactaagcaaagccaaaaaagtaacttttttgcatcaagcacctcaccccacaactttcccagctgttaaaaaaagaggagaacaaagaaaagaaagaaaaagaaagctgcctggccctttttggttccagaaagcatgtaaacctggtttgtaactcaaagcgccctagggtgttttctttgcttccactttacctcatgatatgaccttgaacaaaccagctggctctgttgtcttgattttcttaaaataatatcttctttttctctagagtatatacttatgagcacatttaagttttctttattttaattactataactattaatagcagatgttgctgtgttaaattgaatttgttctgagaaagcctttgttgggcttggaactagaatgtaagctcttcgagggtagaggccatgtcttgctcatctttggaattgaggacttactacaatgcctggggtcatggcaggtcctcaagaagtgcttattgtactaaatccaactgtggtactactttgccttttcataacaatatagaattacaagaatattttttccagatttttacatttattttcatattagtttcctagatttttgtaaacattgaacaccagcattctttttttttctcagataaaatgatttgatacaggtcactcaattataggggaagctagaatctaggttttttattttttaaaaaaatcacttctggaccttctaaaatatatatttttttctattgctattcagcttctctccctaatcttctaacgtagattccatttctaccccttcacttttttaccacccctatttattgttctcttgtagattatcctccaattttccgtgaaaatagcaagctttgttcctctattgatatg

SEQ ID NO: 41784 - DNA, 1071 bp, Homo sapiens
gcagagaaatgatatttttatttcttcagaggcaataggcatatctaaagcactgtgaagatgtccaggtaagtttattaagttctgagggaaaagaagtagatgaggagcaaatgagaatcttggataaaggcctagaccttgatcatggaggattttatttgttttttgatattatagtggataatagcaaagcaaaattcataaggaggatcattttccagaaaaatatgtagcactgatttcttatgcaatacttgagaaaatatctctcagagaagattctgtatctaattctagtaaatgggccaaatgtaataagtaagcttgaagccgggtgactgctcagatctaattagatgagggcatgatggtagataacatggaggttaggtagtgtttatagacaggctgtccctagcaggcctggcattagttaactgcttgagagattctttagcaaagaggtaattgtagaatacatcgacaagcagagtttatagttgaaattaatggcatatttaattgtgtaagctatttgggccaaatggcttctttttatcttgtagttcttggatcctaacatacggtagcattacccccactctctcaaccacccttacttttttcctgtagtgaacacgtatactttattgtttgtggaacttgccacatgataaacattgtcaacagtgtcagtgaccataatcacagaacaaattgcttttccacttggtcaaatatgtaataaaatgattcatcccaagaactcttcttcatggtgacttggctgggtattgatctagttcctggatccaacctctaccttacctcaggccctaagttgaccaggtgggccctggatggccctgccgagctccagctctgggatggattcttctttgaacttgggaagattttgtcattcatgaaattggaaccatccttggaatgttagttttgaaagattatgtcttcccctaccagttagaaattaatgaagataaatctccaagtgcgatgaacttttaggaagaatagtattttgaaaaacaaaaatgttgcctacag

SEQ ID NO: 41785 - DNA, 1017 bp, Homo sapiens
tgatccaagtttgttttgatgaagaggctaatataggagagtagtataggttgacattggacaagataaacacttgcaagattgggaagacattgaatattgttattaaattactccatagcataggtaagacctataactttgacatgtatttctctataaaataagggtaggaaaaggtcagtgaagaaatacaactaaagaaaatgatatttcagaattaaattatgtaatatgatattatataatgttgcatgaacaaagcagtgtacaaatttacataaatatgcttatgtgatacaatgtgatgaatatgaaatacaatgtaaatttgtatacatgtccatatatgtgtaggtagttttagagagaattgtctgaaaaggtgtttcccaaaatattaatactgtaaaggctctctctaagtagtaaataattttaagtaatcttttatgccctttttaaatttagctgaagtctgtttctgtaacctaggggtgatttgtagaggatgctcttgtttggagtggagaggaagaaataaatatagggagatattttaagggcagaattgaaaggacatggggtcttaataaaggggataaaagtagaatttttaggtctgattttaaggtttcaagccaattggcataattaatagcaaattgggagggatgtcgtcctgtagtttgggacgtttttcatgggaaaattggcttattaatgtccacatcttgaactattatgtaaacacatatagcagcaactggactagtagttaacggtgtctctgatcgggtaaagattggagtaatcagagggtggtactaaagtgtgattttttttttctaccacagaactcaacattcatgaaaagtcagacagttactcaactctcacatattctttaggagaatgggaacatactgtttgttctcattttagagactgataaagcaagaattaggaaaatggagaaaaggacagttatgttcaggtgctcactgagtggcagag

SEQ ID NO: 41786 - DNA, 1034 bp, Homo sapiens
cctaagggctgtgtccgtatctaggatgtggaacattttaaaacctctgtgcaaagtttttaaatgtatggaagtaaaggacagagaaagaaggaaaagaaggaagggagaaagaaatgaaaagaagaaagatggacagtgtgtttgttcacagtccagggcgggccatcagtcagatttatgcctggcctggctgagttcgttctgttggagagattcaggctgtgtgcatgggcaatcagggtcacagtcgcaatgccttgcctttacttgccgacgacccgcttgccactctgtggttgagtggctctccctcccacttgtcttgatctaatcagaatagtgaggttttaaaaaattgttaaatcagcacttgttgtcattaacatgcttaattattgcctatactacttttcttccctataactcagatttttcccatgctttatctctgtattggcatacttttgaggtagaagagacatgtagaattattgctgtcttacaaatagaaaatggaggcaggaaaattgaaatctcttgccttggggtttcatggttactggaagggttagatctagaatccaaatctcccagcccactgtgcttccctctagaccacacagaccacagtggtacagatttgtttttaaccagagcctcctcctgtgtaagctgttctgtgattcggccttccccccgccccccgcctccccccaccccacttaaattggtctagcagtgtgaaaggaaaagggcagaaatagtttcacacagtctcttttcttttctttgctatgagaaatatattaaagatttatcttatatttgttttgtgcttaatttttattatgtccaaaggtgacatgataacattatcatgagtatttcttattaagaaatactgtgaggagttatttctgcttcaagcctgtaattgtgcagtttacaatgttggtttagctccagtagttgtatcagaatatacaaagtggcatattagaaaggactggattactgaataagcataaaag

SEQ ID NO: 41787 - DNA, 1032 bp, Homo sapiens
aaataggagcaacactctgcttctgacactactcagccacaacacgcaaagatgacgttctttagaactgtcatgctgaatgaagccagatctatgctgccaacctttaaaaaaaaaaatcttttcatactgaactttttctaaaaacaattttagtgtgtttattccaataaattgttggaatagtcaagtcctgatttatgtgtcatgtggatatttttaaacaattaaaaattaaaatgaaaaacaattatcttgttcctggtggttctcagaacatatgaatatccaattctaaaaagtaaacacctttagttgtatttctgtgtacaggatgtctcaactctgtatattatttaaaatttagccttttcttttagaaatgcttaattttttatttaaaaataattattttagttagctagggtttttgtattcctttcaagtctgctttctgagccatactccagtgtcatgtggaaaatgttaccaaaaaaataaaatgatgtcactttaactttcagaagttatgatttatgctaataccaataggatggtttttatttagtacaggtgtttgcttgttggttgctctaagatatttttagcatttgttaaaaataggcttgggagtgactgcagttgtaaaataagaagcaaatacattgtcctcgtaaggatcatagcaagggggtgccaggccccagttgactgccgctatagttatgagcaaatgtggtgatagatattaagggctgaggtgtaggagtctggctgggtttcaaagaaaaataaaattagttgcagcagtaaacggagcacctaatcagtatatgtgactatgtactgtgtaaataaattacctgatatttttacctgcttttgaaagagatgaatcttccctttcaaaataagataagacaccagattgtgatcttttttaaaacttaacctattaactcatggaaaatcacttagctgtggaaattgtacactttgtacattatttccattgaaaaacacaacatatac

SEQ ID NO: 41788 - DNA, 1052 bp, Homo sapiens
attgtcttgccagtgaatgtgaaagacaggcatgtcatcacttaagttttaacagtctatcttcaggtctgacttggaaacttgcataatagccagcatccaaatagggttgaaggcagagcccagatcaatacaaaacattaaggctatcagtagtatatatatatatatatatatatatatatatatatatatatatataccgctatatatactgcttatatatatatatatatatatatatagctataaataaattaggatacctcttagactgcagttgtagagtatttatacaggtacaaggtgagaagtggaagagatggtgtcccagtatcttatttgaatcacttatttactattggggaaaaaaaatgtaaggagtgtggtctgcggataacatctggaccagttttatctacaaatgtctatttaagtttccttccattagacagattctgttgacttctgccttatgggtaacagactccattctatactcacaccttcacatatttatagacacaatattgatatactgatggaaaagattggttctcattattgttaagatattggcataatgttaggtcagtgatcaagaaatgctgcagacaagaattaatgcttttttaaaaaaagatgtctgtacttttgccaagtttgaaagatatgcatgtaatatatatatatatattcacaatacataatacatgatgcataacataattactaatattatacatctatgatgtatatgtatacattatgtatatatattttgaaattctgatggtaggttatttcctgaaagacagagaattttgggagtaacatcacccttaaagttcccacttaatgaagaaaatcaaacacttataaggaccttataacttaaaatttaaagaggagttgctctgttgtttgttttgaagaagtatctatgatttgaaaggtagagataaaagatttagtgcttttcaaatttaaatgcctgttttctatttttatagctctggttattatcagaatgctacctttttattttttta

SEQ ID NO: 41789 - DNA, 1078 bp, Homo sapiens
ccagctctttgaggggccaaggcagagggatcacatgaggttaggagtttgagaccagcctggccaacatagtgaaacaccatctctactaaaaatacaaaatttagctgagtgtggtggcacgcacctgtaattgcagctactccagaggctgaggtaggagaatcgcttgagcccaggaggcagaggttgcagtgagctgagatagcgccattgcactccagcctcggtgctggagactcaatctcaaaaaataaaaacaaaaaaaataaataaaaaagaaaaatactgcatgacctcacttatttgtggaatgtaagaaagtcagactcatagaagcagaaagtagaatggtggctctcaggttctagtttgtggggttcagatgaagaaggggaggtgttggttgaagcataccaagtttcagttaaacattgtgactatagttagtaataatgtatacttgaaaattgttaagtgagtagatcctaaatactctcaccacacaaaaaatgaaaagtatgtgaaatactagatatgttaattagcatttcacagcgtatacacattcaatatcaaagcatcactttgtataccgtaaatatatacaatttttatttgtcatttatactttaataaagcttgagaaaatacatacataaaatacaatttacatggaagagcaaaggcctcaaaacagccattcttgaaaaatttgctccaccagatatcaagtctaattgtaaagctaaaacatagtatggaattaatgtagggatatactaatagaccaatgcatcataataatgtctccagaaacagaatgtccaaatatgacagagataatattgcagatcagtgggtaaaaatagttttcaataagtgttgctgaagcaattggataaccatattgagaaaaatgaaattagactcatacttcaaccatacagaaaagtcaattttggttggattaaatacttaaatgtgaaagacaaaacaacaaatattttaggaacacatgtaggagaatgtctttatgacctcagtgcagtgaaggattccttaatttcatcatagc

SEQ ID NO: 41790 - DNA, 1045 bp, Homo sapiens
aatgcagttataatggtcagatttccccaatcatttcaaaaattgtatagttttttaaaaactacatatgatataatgagtcatctcctataatttaattgcttgacttcatttagtctcctttaatctggaatagtctttctgctctctctttgttttttaataatggcatttttcatgtccaggctgtttgtgtaaaatagccttcaatttgaatttgtctggctgtttctgaatgactcaattcagattaaatattttggccaaaatacccctagtgatgccatgggttacatttcctgaggcagggtgttttttttctcccatacctccaagtttacttgttatttaattaagactggggtgttcacattttctcatgcttcattattgtttggggaggaagaatattcatcagctaaaaggttttttatgatctgctttcatcttctagtcactttgtatggatatgttgctatttacccttcattttgagatgttttctttcctggagcggccagcaatgactgtcacatgtagacagaggtgaggaggtgaggaccgggtgatacatgaggtttctgaattcaagagattcttctgtttgtttgtgaagtgcaatttccttaaaaattgccctccttttggggagtggcagtttgccttctggttttgtaattctcttgtttttccagtactttaatttccagttctttcttgtttttcttcaacatcaaatctctgaaggccgccctttccagttaatccttttcctacggaacccctggcttcccaagatacctacctctgttcctgcagactttcaatctccttccttgtgattctcagtagccagtgccctaatccgccacgtctcacaactgtgttcaatgttttcccatttgggatgagacattgtttccctggggggtgttttccatacctactcctctgctttcctttcttcttttctgcactttttcttctgaatttggtcatttatttacctgtttgggcataatttgaagtttggagtattctctgt

SEQ ID NO: 41791 - DNA, 1013 bp, Homo sapiens
gcactgaccaacttcctgacacatgagtacagtgaaccgtgatgtatgccataaatgggaggggtgtgtgcttgctcagaggaggaagcaattacccctccttgtagaaggtcagagaagcctaagcagtggcggttgagctgggtcttaaagagtgtataggagttcagtgaaggataagtggatgaggatgagggtatttcaggtagaggaaaaagacataaaacagctcagcatggtcgaggaactgcaggtgattctgcatgtgtgcatcccctcagtaactcaacagcccatgtaaattgggaggcaggagcactgtcccactgagtttcaaacaaaagccattccaaactgccagataaaattccagtttaaattagtgaaatttgttgtgagacagcctgtgcactgcagatgcctgtggtcctagaagataaagtctatttccttttgaaggacatacatgtagatcaacatggaaggagtagcccttgaccatcagtgtatgactccattgcatagtgcttgctgcagaattgccttgcctgtcagatgacacagccagtgctgaggtgagctggtatctaccccgaccctcctttgccagaagtaaagatgatgagggggagcccccttactgacccttgctggggatggatggatgggtgaaggcttctgacaacagccacctttcccaatgaggtcatgaggacctcagtgctgtatgatggggaaggatatggctatttttgtaccatggataataaaaggggaaaaccctgctaatttgacgtaaaaaagattcaaagtcataaatatcccaaactgaaagcaaaccccagaaaggctagttttgaaattggaggtaattaattcctcatgcgatgtgctgaaattcaacccagacatccctttttttttttaatttctttcagacagtttacagtccagtggaaagtaaaaccatgcaatcccttggtgtggtacagttttactatgtgtctcttttt

SEQ ID NO: 41792 - DNA, 1058 bp, Homo sapiens
tgaaactgaaacgtagagaataaagctaagtgcaaagttcccagccggaaaagggagaacttgctaggaaaattcaaaccagggtggtatgatgctgagaccaagctttaaacctctgcaccaggttgcctccctatagtagaaaaattatccaaaccaacactcccttctcactgtgtagaggatggcctatgggtagaattttttctttttattgaaagcgataaccagtggaaaggtttagatttattattactgcagcataaagaatgaaggaatctcagagatcactgctgtctttaatctcctcttggaagaaaaaccttggaaaaggataaatgaaagtgaactatgcccagccttgggcgagaaatggtttcccacatctgagatgactcacatcttaacccttttactccagtttctctcttcgtatgtatcctgtgatacgctctctggaagatggctctgtagtaaataccggaccaacgcacgcaggcattatccattttagaagagacatgcactctgcttttaagtggtcactttccccaagcttcccatatttcttttcccctgagaatacatcgtctaccatgaagttgttcaggaagcagacccatttcacacaataaaaacggcaggttgattttgtggatttttgctacaccggctacaatcattgatcctaggtattcgggactcctatgaaatccttttggtactatggcagtgtttaagtgacaccagttttgtaaagtggcatatgcagggttgatccctgcctgataattaggagcttgctctcttgattttgtcccatcaatattgttcattttgcctcagatacgtttttctccctaagatcatctccacaaaccccagtgctgagaagaatgaatcccagtaagacctaataaatctgacagaaaaatgtggggttagagatccacacagaccatgaggactgtcgcattaaaggctcctggggattttttttacgaccttttttttcgtccttctaatgcttggtctcttgcttccataaattgtgcagc

SEQ ID NO: 41793 - DNA, 1002 bp, Homo sapiens
accacacatggtaagacaaatattatatgatttcacttatcggtggcatctaaaacagtcaaactcatagaagcagacagtagaatagtagtttctgggagatgctgatcaaagagcagaaagtttctgtgaagttctggagaactaatgtacagtatggtggctatagtaaatggtactgtattatatacttgaaatttgctaagagaggagatgttctcactatacacatgcacacaaagctaactccatgaggtggtagatataccaattagcttgattgtgatcctaatttcacaacatctacatatatcaaagcatcatgttgaacactgtaagtacagaatattttttgtatatctcaatacagctgagggaataaagacagaaaacaaaatgcaagaggcttgaaaatggtcagtgtaatttggaaatgaagggaaggttttgaaacagactcttttcatcaagagtccccagtgtcctagtgatatggtttggctgtgtgaccatcttgaactgtagttcccataatccccacatgtcatgagagggacctaatgggaagtaattgaatcatgggggtggttacctccatgctgttcttgtcacagtggatgagttctcacaagatcagatggttttataagggatttttccgcttttgctcagcacttcttgttcttctctttcttgcctccatgtgaagaaggatgtgtttcttccccttccgccatgattgtaagtttccggaggcctacccagccatgcagaactttgagtcaattaaccctctttcctttataaattactcagtcttgggtatttcttcatagcagcatgagaatggactaatacacctagattcaatgtggttttagcttgcttatcttgaagatgatgatgaaacatcttcttgccactctaggcctatggcaaagtggttttcaggctgtattcccgggaatcctatggttccttggaggattccccatggagatc

SEQ ID NO: 41794 - DNA, 1048 bp, Homo sapiens
gcaagaggagaaccaggaaggtacatgccaaggcagaagacgtttgaagaagacaaagactagtggcattaaacattgcaaagacctggaagattctaggaggatgtcaaataaggaactttctcatcttcttggactatttgaaacaatgaacaatggtcccttccccccagaccctgcgtatttgcacatgggattgaattgatcatagatgagattcagtggatccccagttggcaggaatccaaaactaagattgctgtagggattttgaaaatttaatgcaaaaatcacaaattttccaaactttgactttaaaagatcttaacaaaagtgaataaataccacatgaaattttaaaaggtacccaaacaaaactaatttcacggataacagtaatatgctttttgcaaacgtcattggaatgtttctatagttaaatgtaaaatggaccaggccacattgagggattttttattaggaataaaagcaacaatataaaagagtctgactaatataaaaacttactattgtaaacttttaagtttgctctattaaactgttaatgatgctttaaaaatattacgatataatttaatgtcttaaattctaggtcttcaggtaagatattttcttttctcatgaaatgtttaaagcccattttgtcagtgaagtgcagctgtggtgtgggggcctgaatgtatgcctgaacgtatgtgtgtctgaatgtatgggtttgagtctcacctggttgcctggtagctgtgcaccactgagcagacaccttaccctctctgagccttcattgtgaagtctgggacaagtctcagtggtatatgcccttcatccgacttaaatggttggctgtgggcattaactggggtgatgggaatgggttaaaggccaagatgtgtgtgaaagctgtttgtgaacagtgtaaatgaaattgttattaagggcaagaacttgaatagaagaaagtgaagtgtatgccataaaccacttttcagcaactacttcagtgaatatattctttgggaatgatagc

SEQ ID NO: 41795 - DNA, 1045 bp, Homo sapiens
cccgggttcaagtgattctcctgcctcagactcctgagtagctgggattacaggtgcatgccaccatgcctggctaatttttgtatttttagtagagatgggatattgccatgttggtcaggctgatctcgaactcccgaccttgtcgtccaccctccgtggcctcccaaagtgctgggattacaggcgtgagccaccgcgcccggctgcaatacacttgtaagtcaccttgtaaaaacggttcctttaaatgactgaggcttaaaataattcacggagacttggattcctagaaatgtgtactcagagaacttggaacagtcaggtgtcctttaaggcagattcagttaggtctttcttgaaaggcactagagggtagacagtccttaaaatagcttcaaaaagtcaggaagggaaagaggcaggggagtcatcaaatatctcaactgtttctgtttttaacaaaaatctgctgcttggatctgcaagctcaggaaggaatccttgttttgttttcagcccaactctgttgtctgtgatcttttttacccacaagcaaggatgcacatccctgcctgtcctccagaggtacaagggctttttgtggtatttggcattcacagattatacctttcatgagtgaaagaaattcctcaaatagctctttctgtctgagcaaggatctagtctaggaaatgtgtcccaaaatgctgccctgcattttaagaggagaggactagataggcagggacaggatatccatggcacttggagtcttctctctgagctctgcattttcagtggcttgcccatcaagtgtctgtctgagcactgggagtcatttgaattagcctgtcttctatgcatgtcctgtatgggccagaaccatggcacatctggtaattaaccacctctggacatctcaattaactattggtgcttgggacagcttaaatattttagtcttatcaaacgggaaaattagatttctgtcattgtatcatgtatgaaaattcatgcttggttttcccccagggtggaacta

SEQ ID NO: 41796 - DNA, 1006 bp, Homo sapiens
acatgtttgaccatgttccccatttttttgtgggatatttttagagaccagtggtccatggcatgctttgacaagtactgttctgatactttttataaatttgaaaaaaaagtttacattctaatattaagtgcaaaagcaagctactaaatgtcataaactataaaatcatgattatggtaacatgtatttaagaaacaggcaggaaatctattaaaatattaacctatcaactaaaagagtaatcttggggagggagacttacagtttttatatttattttgcttcctatattttctagtttttctacaatgaacatgtattgcctttatagttcagcaaatttacttttcttttttcttttggttaagcagtctcagaaggaatcattttctttccacctacaatgttagatccacctgaatgaaatacgcctttcattgcgtcctgagaagacggaagaatcataaaaagccttcagaagcccttgaggaattttgagggcagtaaaagcaaagactgtaaaccgaagaaaaatacacaaagatgtaagagcagtaagagcaaagtggggacaagggatattgagtatctgaagggaaaaataagaagcatagcctatcctggaaaagaaaagaaacgtcatggtaaaaaaacaactgcggtttttgtgaacacctactacggtaaggaacaggccagccatagcccacacccaggtggctgacaagagctcgccagatcacagggccaccttcctgcctgagagctggatgccctctgcatcttcctgggctttacagcacatgggatctgtttacatgtggtctccgcagactcgtgtcaagatcctaagtcagtgaatcccgagggaagcaaaaggcaggggtggaagcatggtaaggaggtgtaaacacccttttgtaagccccatggaggggtataggcttcaacagggagcagtttaagatactttggagattgactgtttggggttaagtgttgg

SEQ ID NO: 41797 - DNA, 1047 bp, Homo sapiens
tttcaccaagatttgatactttatagctctgtcactgtaactatctgagcctcagtttccatttttgtaaaatgaataccaaatgcttattccacggggttgttttattggatgaatagccagtgctgagcaccaaacctgatgtataggctgtggtcagtgaacgtttccttcttctctcagctgttcaagcccgttcaggcctgggatcaagtgcacacagtgctctcgtagattgagaatgaccaagccagctgaggatttaagaaacagagggaagatggtgatgtacatgtgctctgtgtgcactcagcacttgtgaaatgcctattgagcaatcaaatgacagaatagtgaactagattaatgaaaaggcaataaaaagagaaactcagcactgttcatacatcaaaatatcattgtgtccctcagtcccacaacaccgggttgatatgaaagcccttatcacaagaatctcttgtactgaaaagacctgggtttgaatcctgcctccactacttacaactgtgaactttagtaagtacttacctctccaagtcagtttgctcacctgtgaaatgtagatagcatgccatgacattgtgggaagggtcagtgttatattctctcagtggagggcccacagtaggtgttcagtaaatgctacttactttcttttctcttcctcctcctcctcctccttgtcctcctcccctaccttcttttccttcttctcctttctctctagtaaaatggaaatagtcgtagcatccttacctgtggagttattgtcaggattaaatgtaaaacatttagactagtgcctcaaacacattaaatgctgcattggttgatgttaacttattttcatatggcacttctatgatggagacaaggcagggcaagtctatataaaaatcttttctgatttgtctctagacaagaaatctaaataaaaggaaataaatagctcatgtaacttagctgcttttttattttagggcatttgatttttggattgtctttctggtgcattttaaagttggt

SEQ ID NO: 41798 - DNA, 1032 bp, Homo sapiens
gtcttggtatacttttatttctcagcaaccatgcaataaactgccttcaccttcagctcctgctctctgtggctgggggtgtttggggagtcctactcatttcctgtccacacatgcttccctttgtgaaaggtggatcctgggttctccaatccctgtcacaaaacaatctttttcccactgtgtcttatattatatttgtggtattttgatgccatcattctcagtttcaaattgatgtagattttcttttcctttaatgtagcaaaaatctgtatggagtgcaaattgtttggatttgactatagtctgctttctcgtatccatttgcactggtgattgattggtttgcacagaaggtcaaagaggaaaatggtaaaaaatagaacttggattctgtgcatactttgtgtcctggtggatttgttgggtcagggaagatgtggtgacagaagtcaggttgcaaggagcgatggctgcttctgaaaaagaattcaccctgcctgagtgtaggtggcaagttgaaccaatcataggaacaggatgttggaggcatctgggagcagcaggacaggtaccatgtggccaatggtcctacatctgttgcagcccagtcattccagtaggatatgtgcaactcaggggaggaagtcataggtgtgagctggaagcgttctctccgtaaacttaacacttcatggtgggcaccaagcaactaaagcacagcaaaaggaaaaacagcattcttcttgttgaaagagagagtctcaagaggttgatgagcctccgtgactccatagaactgatgtcagccattccaccattgccaaatcccaaaagttactgtctactctctgctgagaagttttccatactttttttttcatattctatgtccccatctttcttctgagcagtccatctttcttagggaatctgactgaccaagaaaagttctctgtgcttttacacttgacccaggtcctggggaggagaggagagaccctgatgacagggcagcagatctctcaa

SEQ ID NO: 41799 - DNA, 1035 bp, Homo sapiens
tccatatcctaagtcttcttggcacgagacaacaaacccagggtatttaccccacacaacaacaccacttcactgactggatataactctaaatcaacctggaagagaggcaacagcacctaggcagcaaggcattgattattaagcaaccagcatggaaatcatttaatcatcagtttgcctctaatgttgcatattgactaggatcagcctgactgccaccagaatggtatagcgtttatatcaacaagttttttggtttattattgctgttgttgtagttgtgtgtgtatgtatacatgtgtaaacacacacagttatttgaacattttccaagttatatgtcatacacacgtattgaattgttatacaaattattttaatgatctctcagttgacaacttgattagatgttctttcaattttttatagtcaaaatatttgactgtaacaaaagaatttgttatccaatcattaaattcatttactttctcaagattttatgtaggcttaaaaatgacgggtgaatattcctatcactttttcaccctgaggcacttgtttaacccaaaggaatttggaacagtttggaaaatgaaaagaaatcattttagtgttgttgacaatgcaatattttatcttatcacaaaccttttaaacatgttttaaaactaaactttagaatgacgtatgcagctcattcacttaatgggatgttcctgtcatataaccaccctggtaaagtcagatcttgttgtgaaatactcagtcaaatcagaattattttgtgtcagaaaggaaatataatttaatttttcaattcaacttagtgtgttaatgtatgaccttataaaaaatcatctctatctctgagtttacttgaagatagaggaattaggcagacgagcttgccaaaatttgtcacctggctaaagtatttctttctgatgcactttttgccttttagtcacaaatctttccacagggcaaagaattctttactttcattacagaatcgaagaagcaggtcaatta

SEQ ID NO: 41800 - DNA, 1110 bp, Homo sapiens
ttcagacaccaaagcttagagtagctgagtggattgtcattgtaacaaaacgggtcttagcagaactggagccaaagctcaggtcttcagattcccggtgcagatctgtgtcctctctgatgcccagggatacactgagcattttcttgtttgtttgttttttttttttttttttgtctaagttctgtgaatttttatcttagagtgtgtcatttggatgtgcctcagactcataagaccttaactggtttaattcttctttttagggataggacatttgaatagacagggctgagacgtatagtcattcattcatctgagccacaaatggctcattttggtgacctggcccaagcactattcctcatgtatagaaagctctttataaatattgttgaagaaacgataaatgaaaaaatttccttgttttattcatatgttgtgaactgtaaggcagaaaaagaagaaaaaaagatttactgctatcagtgaaaatataatcttgaagctgaaagcacaggtggaaataacagtgtaagaaaccatatttaattgccagaatgaaagtgctataaaagttcagaaatgcaaaactagtagaaccagtgcctataaaaatataaggagtgtggctagagtaaacaccagaatatgttgtgtaaaatagggaatatgtctgaagtttggaaagcatgtgtacatgacagataaaataatgagaaataaagagaaacactactttcaacagagaaaattgagggaaatcattagagagagaaagaaagcagaaattaatttaagtacactcataaataatcgattcacagtatttaatgtttcttaaaaatgtaaatcactttattgtgtgggttttaagagtatctcacaaatgtacctcgaggcctttgactcagtgcttaaacctgctaggtagggagaataacttataactttcccaatgaactcttttactaaaatctagattcttattaattcttctaagtgaattggtaaagggagcaaatgcacttctttactattgattcaaaacataaggtgacgacttaataaataatttagattttttcattaattaggcatctcctgaga

SEQ ID NO: 41801 - DNA, 1081 bp, Homo sapiens
ctgaattaactaggacatgaaggctgaacaggtttataacttcagccttcatttgacaactttgttgtctaatttctccagtttaattatttaaggctcaaaacacttcagtgagatctgtgtgttaaccccaactctgagaataaattattaaaagaaatggatgctaaagaaatgattgacacgtgtgctaagtcagcacaaactgactttaagtcatcttctaccccttaccttgctgaaatgtggtgtctgggtggggaaaaggacagcatagttggatcctgcttcctagaaacagtagagactcaggtttatctgtgactcctcagccctgtgtgaccaccattttgcttggtccaccagcacttctttctgtaggtgaagcccggtccagtctagaccccataagcattctcatcattgtcttaactaccatcctaaaatcccttgtcctccagtctccagccgcctgcatactaatcacatatgtagccttcaatagacacctttctccattgctagaggaagacttgaaaatgtgcacctctttccactccaagcacacatcgtgcaagtttaagcacttaatggctcagcaatattttaaactatcttttctggtttaatgatcttgtcctccacccattcccagccactcatatccagagagaaacgttaaacattgtttctaataataattgcagaatctcaatctccatcgtcacaatttctgaccatctgtacttcccacatttctagccaactccctctactactcttactcagataatttttaaaacccccagtaacactcaagccgttaactttaatacattttctctgtccattaacctcctttcatccctgccccatagttatcccactaagatgccatgaattgtcatgtattgctcatatccactctcaagagtgcattacactcacgaggaaaatgccagccctagttatgtctccacctactcactgcttgcttcaattgactgagtgtggctggagaaaaacataaaatcagaacacctcatcttactttaaatttatgaccacaaacctcaggtag

SEQ ID NO: 41802 - DNA, 1043 bp, Homo sapiens
agagaataccaataaggcatggtgaggccctggagctgttcacactgaggagtcattgctaccctgagagctgtccaggcaagggggtggagtggttagaaagagctgtggctgtaggtgaggaaggaagacaatccccagagaggacccacagccttccggagaggcacataccactgtcaacatgcgacccaacagagacccaaggaaataaattcccaatccttcatgcctccctatttcctgctggtgtctcctactgtgcagatgtcttctcctaaaggacagggagacccatgatgtggtccttacagctcagcctcttggagcacagagcaaggcagagaaggatgaaaaatgactcgaggggagaacagagcaaagtcaccccacctggggaaggagaaggtcaaagctcttcttgctgatggaatcttgggaggtctaatttattcatctcatgataccttcaattatcatggcattgtctgggtgaatttatggatacctcattagagcttgaagaggcaaacttctcaattaaatatgcttgttatagtacagaattagctccaatctctagccaattgaatctccttcttctgaagcactcctatcccataaacagtcacagctattattattttctccagtatcagtgacctgcatatgcacaaaatcactatgtaggtggttaaagtaccagatatcatgtgtgcttcccaggacaggtgactcttgtcaagactgcaaatctatttgtctcctttattcaaaagcagcatttgcataccaacactcttaaatcccatacattcttccatgcttctaggagagaaagagtcacctagctttatttacaagtcaggctgtaaataaacttggagacatacattcagatgaatgctcctgaggtcagtatcatatgccggatgtgggaagggtattttacattataaaaatgttttgctaggagaacaaagggagtggaggaggattgttaagcctctgagaaagcgttactcatctcagagggctctagc

SEQ ID NO: 41803 - DNA, 1088 bp, Homo sapiens
catcaactacttagatttaactcctccccttctccatcatatccaatctccatcagggcactttgattctctgttctaaacttgctttacttttttcttctattctctactcctgcctttgttctgagagtgtctccgagacctgtgcaaaagcctttcctgggccccctacttctttctcaactccctccaatttattctctttgcactattgacttgttaaaagcaaaactttggacaaattgcacttaatagagtttgagcaaagaatgattcatgaattgggcagactccagaacaaaatcaggttcagagcaacttcaggactgccacctggttgcataacatttccagacagaaaaaagaaagtgatgtgcagaaaatggaagtgggttgcagaaacagctggatttgtccccttcttatgttaaaacatgacctccagtgttggagatgggcttagttggaggtatttgggtcatgggggcagatccctcatgaatggctcagtgctgttctcacagtaatgagtgagttctaactctatgagttcatatgagatctgcttgtttaaaacactgtggaaccttccctgtctttcttacattctccttctccacgtgatacactagctcccccttagctctctgcgatgattgtaagcttcctgagaccttcaccagaagcccagcagatgcaagcactgtgattcctgtacagcctgcagaaccatgagccaaaataaacctcttttatttataagttactcagccttaatgcaaatggactaaaacagaaaatgggtatttaggaggggtgcactgctataaagacacccgaagatgtggaagcagcttttgaactgggtaatgggcagaggttggaagagtttggaagtctcagtagaagacaaagatgaaagaaagcttggatcttcttaaagacttgttaagttgttgtaaccaaaatgctgatatagatgttaatagtgaagtccagattgactccagggaactggagccaaggtcacctgtgttataccttagcaaagaacttgattgcattgtgtctatgccctagggatctgt

SEQ ID NO: 41804 - DNA, 1026 bp, Homo sapiens
tacctaggaatccaacttacaagagatgtgaaggactttttcaagaagaactacaaaccactgctcaaggaaataagaggggacacaaacacatggaacaacattccatgcccatggataggaagactcaatatcatgaaaatgaccatactgcccaaagtcatttatagattcaatgctgtccccatcaagctaccactgactttcttcacagaattagaaaaagctacattaaatttcatatgaaaccaaaaaagagcccacatacccatgacaatcctaagcagaaagaaaaaagctggaggcctcatgctacctgacttcaaactacactacaaggctacagcaacaaaaaccgcatggtactggtaccaaaactgagatacagactaatggaacagaacagagccctcagaaataacaccacacatctacaaccatctgatctttgacaaacctgacaaaaacaagcaatgcgaaaaggattccctatttaataaatggtgttgggaaaactgggtagccatatgcagaaaactgaaactggatctcttccttacaccttatacaaaaattaactcaagatagataaagacttaaacataagatctaaaaccataaacatcctagaagtaaacctaggcaataccattcaggacataggcatgggcaaagacttcatgactaaaacaccaaaagcaatggcaacaaaagtcaaaattgacaaatgaatttgactaaagagcttctgcacagcaaaataaactatcatcagagtgaacaggtaacatacagaatgggagaaaattttttgcaacctatccatctgacaaagggctaatatccacaatctacaaagaacttaaacaaatttacaacaaaaaacaaacaaccccatcaaaaagtgggcaaaggaaaccaacagacagttctcaaaagaagacatttatgcagccatcaaacatatgaataaaagctcatcatcactggtcattagagaaatgcaaatcaaaaccacaatgagat

SEQ ID NO: 41805 - DNA, 1035 bp, Homo sapiens
cattttatttctctttggtaaattcttggggtaagtaatatggtagatgtatgtttaatttttaaattgcaaaattattttgcaatatattagtaacattttacattttcacccccagtgaataagaattcaggttgttccatgtgctcaccaacacctagaatggtcactgcttttaattttactcattcttatagatttgtagagataacttactgtaattttaatttgtattttcctaatgactaatgatgttgaggatctcctgtgcttatttgccatctgtttgtcacctttggtggtccattgaaatctttggtccatttttaaattaggttatttgtcttaatgaattgtaagggtttttttaatattttaggtactagttttttgttggactgtgcaaatacactatttctcattacacttttacccactaactttagtatcttgtcaatgattcttgcctatggcagttattactgtgctgtttgtgttactggtgattttctgttacatgattttctgtttacatgtacatgatgctacattttaaagctgggattctgaccgggtgtggtggctcatgcctgtaatcccagcactttgggtggccaacgtgggtggatcacgaggtcaggagatcaagaccatcctggctaacacggtgaaaccccgtctctactaaaaatacaaagaattagccgggcatggtagcaggcgcctgtagtcccagctactcgggaggctgaggcaggggaatggcctaaacctggaaggcagggcttgcggtgagccgagatctcgccactgcactccagcctaggcgacagagcgagactccttctcaaaaaaaaaaaaaaaaaaaaaaaaaagctgggattctgttgtaaggaagagctcttttatttattcatcagttcggttatatattaatttttttcattgttcagttgtccattgatagacctttcaggtggctcttgttcatcctttcactgtgtacccatcatttttaggggtacttctttactt

SEQ ID NO: 41806 - DNA, 1033 bp, Homo sapiens
cctttcttttaccctgttctcattctccttttttctaccactttcccacacatcgatagaggtaatggatctcatcagtttctgattgattttttgtgagtatttttttgcgcatatgagaagatatgtgtgagaaaggagatataacaatttatgaaaggtagtgtacagtacatgcttgtttttatcacagatttattgagataatttacatgccataaaatataccccttgaaagcgtgattttgtggtttttcgtgtattcagggttgtgcaaccattgtcactgtcaacttttaggacattttcatcagccccaaatgaaactttgcagccattaataatcagtccccatcccttctcttcccttgtcctggcaaccactaatttactttccgtttctatggatttgtctatcttggacattttatataaatgagatcatataatgtgactttttgtgatgggcatctttcacttagcagtgttttcaagttttgtctgtgttgtagcatgtctcagtagtacttcattccattttattgctggatattattctgttgtatatatactaccatatttcatttatccgttagttgatatttgggttgttttctactttttgactattatggataatgctgctgtgaatgttttgagtacaagcttttgtgtggacctatagttttcaattcccttggatatatacctaaggatagaattactgcatcatagtgtagtgtaactctagtttaactctatgaagaactgcctgactgccgaagcagctgccttattttacatttctaccagcagtgtatgagagttccagtttttccacattcttgtccatacttgttattgcctgtgttttaaaactatcctactgggtgtgagctggtatcattgtggttttaatttgcatttccctaatgatgttgaacatcttttcatgtgcttattggcaatttgtacaccttctctggaggaatgtctattaaaatgctttgctgagtttttaatgaagttgtct

SEQ ID NO: 41807 - DNA, 1046 bp, Homo sapiens
ttttttttacgttcttgatagtgttctgtgaagtacaagcatttttaattttgatgaagtccagtttatctacttattgcatgtgcttttgatgtcatagtcaagaaagcatttctaatccaaggtcatgaaaatatacccctatgttttctaagagttttatagttttagacctttatgtttaggtttttgatccattttgagttaatttttgtgtatggcgtgagataggagtcattcttttgtatgtggctatccagtagtttcatcactcattgttgaaaagactagtctttttccattgtgtggtcttgacaacttctgtgaaaacaactggccataaatgtaagggttttcttgtggattctcatttgtttcttattgatctatatgtccttaatggcagtaccacactgttttgatgactaactttgcagtaagttttgaaactggggagtgtgagtcttccaactttgttctgtttcaaaattgttttggttattctggttcccttgaatgtccgtctgaactataggcttagtttgctaatttctacaagtaggccaacaaggatgttgatagccatggtgttgaacttgtatatcaatttgaagagtattgtcgtcttaacagtattaagtcttccactccattaatgcaaagtatcttctgtttatttaggtcttcagtttttgtgaacaacatttttatagttctcatgtataagacttacatttctttttgttaaatttatttctaggtattttattcttgatgctatcacagatggaattttttcttaatttttttatagaaatgcaattgatttttgtatattgatcttatatcatgcaactttattagttcctgtagtgttttttttttagtggattcttttggattttttatttataagatcatatcgcctgcaaatactacttacattactttacaatctagatacattttatttctttattttaccaaatgccttttctggaacctccagaactgtgttgattaggagtagcaatgatagacatctt

SEQ ID NO: 41808 - DNA, 1016 bp, Homo sapiens
cctccatggtttctgataggatgtcagctattcttatttacagtctcttatacatatagttgcttctcataagctgctttcaagattctctgtttttggtttttaacagtttggttatgtgtgggtctctttgattttatcttattcagtttgttgagctttgatgttgatactaatgtttttcttcaaatttgggaagttttcagttctgtttcttcaaatatacattctgccccttccttcctaaacccaccccttttctccttccctcccttacttcatgtttgattttgttctgtaggtctctggctctgttcatttttctttctttacttaaattggttaatgttatttaacccattttcaggtttggtgattcttttttctgcaagctgcaatccttcgttgagcttctctagtgaatacttttatttattatattttttaactccagaatttttaaaaaattatcttttttgatattatctatttgatgaacattgttttcatacttgacagtttattagacttttctttagttctttgaacatatctaaaatagcaggtttaaagtatttgtttaatgtctgggctttctcagggactgttgcttttttcccctgtacatgggccatgcagttttgagttttttttgcaaggctcatacttttctcttgaatactagacattttaaatatttcaaataatacagtgtggcagctctggaaatcagattctcccttctctgcagggtttattgttgttgctttttgttatttgcttagttccttttcgaactaattctgtgaagttaatttttgccatatgttgtcactgaaatctctgcttggttatcttagtggtcacttgtgagtgggcctttagggactaccagacacatcaaataatgacagcagtttgagagtgaggctttgaaagcattccatgattgttctgtttttttccagttgccactaggctgctggtttttactgtgattgtgtgctgatggtttt

SEQ ID NO: 41809 - DNA, 1035 bp, Homo sapiens
ttcacactggcactgtgaacatttgtgcaggaaaagaatcagtgggtggttaagtcttttgaattacagactatggttgattttagaatttagggtatggaaaaattcttatgagatatgacaagtctatatgttttaatcgaccagtattaaattttttattttttttgagacagagtcttgctctgtcatccaggttggagtgcagtggcgcgatctccactcactgcaacctttgcctcccaggttcaagtgattctcctgcctcagcctccagagtagctgggactacaggtgtgcgccactatgcccagctaatttatgtatttttagtagagacagggtttcaccatgttggccaggcaggtctcgaactcctgacttcaagagacctgcctgcctcggtctcccaaaatgctaggattacaggctggagccattatgcctggccaaattattagtatattttctaaatagtatttgtgctaggtagcttcagagccatatttttgtatctgataggacacttctatacgaattttgggatgatatgtttttagccaaacccatgttttatctttgtacagagtttcttcctcagaagatgttttcctgaaagagtagtcattcagatttttaaaatatctactgtgtgtcagcactttgctaagaacatagagatgaatatgacatggttctctccctctgggaaatcagtcatatgggggaactgacaaaatgtttaaaataattttattttaaaaaatatttattataataattacatgcaaataattgtctactgtaaatcatcctagttactcttctttgtcaccatgttactgagactgctcttattttttaagttaccagtgaccttatttccaaattttatcagtatgtctgtttctgtaatggtatctttctctgtagcattcagcatagttaagtgaatcctccatccctgagatgatcttggttttcttcctgtctccactgactgatctttctctgctccagggctttgcctcgacc

SEQ ID NO: 41810 - DNA, 1043 bp, Homo sapiens
ttgctttatggttgctgaatattaatgctaccccttgcaaacctttcgagtatcttgttttccctggactgtgtcaggtatttaatgttagtgataggaagactcttaggaattgattttttttaaagttaataaactttaaaaaaagttttactttgagattttggacctgattttatatatgtggatgtttgcctttgttgttgaatcaacatgaattatatatttgtttgaaatgtggttggatatttagataactcctgttttttttttgatataacagatattcagatatatggcttgaaattttcttcctataaaaactaggacttgttacaaaatggtttttgattagaaaagtaatatgaaggaagtatatggcattttaagagagaggacatcaccattgttaaattttgttatttttctgcatcttaggcatagctgtaataccatatttattttgtatactttcttcatctaatgctgtggcaagcatttctctatgtcagatttttaaaagctaattttcaatggctgaataatatttttataggtgtatcataatacgcttagcctgcctcccattgttggacctggaaggtctccctctgccaccacacacacactttttttattgttaaaatattattgcagtgtttttctctgtgtgtttcattcctagaagtaaatggcatggtaaaggatgttaactgaaaatgtcgtaccaactaatacagtttctataggtgtgtgaatgctcatatgtgtctcatccttgccaatattgagtggaaatctcttttattttcctggagaagttggttctttagcacgagggaagcatttgagagtgtcttcaggatggctcaactttgcagtgtcttcaataaataacttcccataacttcccactctgtaatttgcccacctgtattaccccacccccaagcctcagactttaggaaatggcatcaggcctgtatctggagagttcagagttctgtgaggtagagcattccttccaatgggacctagaattc

SEQ ID NO: 41811 - DNA, 1075 bp, Homo sapiens
ttaaatcacattgaacaactacacgtccactgctctgtccctcttttatgttattgatgtcgtaaattacattattatacattatgtacctattaacacagattcatgattttttaatgcattcgcctttaaaaactcatagaaaatataaggtgaacttgcaaaccaaaattataataatactggtttttatatttgcccttgcatttacctttacgggatctttatatctttatattgctttgagttactgtctagagtccttctatttcaacctgaaggactaccttcagtatttcttgtagtacatgtgtagtgataatgaacctccctcaggttttgtttactggggaatgtctttatttctaccttgtttttaatggtcagttttgccagatacagaagttgcatttgacatttattttcttgtagcactttaaatgtatcattgcactgccttcaggcctccaaggtttctgccaaaaagttggcttatagtcttatttgaggattctgtctatgcagtgagttgcttctcttttgccactttcaagattctgtcttggcttttgacagtttgattgtaatcgtgttggtattggttgtgagtttttcttatttggagtttgttgagatccttggatttgtagattcatcagttacatcacctttgggaagttttttccttcatgtaatctctgttcatttctcttcctctgaaacatccattgagtatatattggtccaattgatttatttcataatctcttgggctctgtttaattttcttctttcttttttctttctgctcagatttgataatttctgttgtcttcagatttgctgagttttttcttttgcctactcagttctgctattgaacctatatagtgaaattttcaattattgtatttttcagctctacagtttgtttttataatttctctttattgatattctcattttgctcattattttcctgatttcccttcacttttttctttagctctttgggcatagttcagacagctgctttaaagtctgtctaataaatctaatatctgtatttcttcag

SEQ ID NO: 41812 - DNA, 1077 bp, Homo sapiens
ggaatgatagtaagtttatttgagtgagtggttggggccaaacttgatagagaatagtccaggaagacatttactgtaaatggtagattagatgttcttctctgattaattacatttgaactctgtgaattattaaatcactcaaactgcttatttgtattattagatgcacatttaagttatataagtattacatgtctttagtggtgatcactattttatcagttcctctgtctgtctttataccaagtatgagtcataaacccagtatgaatttgccaagagattggcagactatttgtatatatgcttttctttcaaataatctggatttccaatgcccgctatcatcaattctaaaggtaatgtggtagtaggtagatttagtttgctaacagtttcccagttggttttgataaactcgaacgtccctaccatcaccccttgtaggaaatcactgatgtaatgtatgatattaacatctgcaccaattactcttacaggtggaacaatccaaagttttaatcaaagaaggtggtgttcagttgctgctcacaatagttgataccccaggatttggagatgcagtggataatagtaattggtaagaagggtttgtcctcacaactttgcagtgcatttggggtactggggtggttaaactttttcttcttaacattttaaaacttctcatcttagcaaaggtcaccaaacttcaagcaacatgacttgggtttgtataccaactttgccacttatctgacaaagttgtttaacttctttgaacccatttacttttctataaaatggagataatacctatcataaaattgtttttaagacatattctaaaataacataggtaaatagaagaattctcattattgtaagaaatttaaaactgttcactttaattttattcatttgtataaattctatctcaatcctaatttaaacctgatatttagactttcagtttttctgtaagtcctaagtgaagaaaacaactatgaaattttagtctgaagtaattatcttagtattttataaataatacttttatttttgtttgaattc

SEQ ID NO: 41813 - DNA, 1022 bp, Homo sapiens
agttagcctgtactccctttttttgttttttgtacttctgctgtcattttgagtacatatatgtgttattgacaactgcagaattttccagttattcttcctcagtcttttcctttgggtaagtaactcagtatatataattcagccacctgatgattataactccaccatctctccaccaaaagaactgtagtagcatcaggctaaatagcattaagttatctaacactcacattacagtagtgtaaaccaattccttcaagtatacctttctcttctatttttggcttcttgctctcttttacttttttatagataggtcaatgcccattatcactctagatggataagggagccttaattatatacttatatgtttgcactgccagattgtagtggagtaaagatgtttcttcttttatgtctaatattcttttacagtactctcagtttacatgtttaaatcactaaactgactctgacttaaaaggctcaaaaaaagtaatctcaaaaatacaacatattatataaccttttatgagtatttgtgtagctacttgaatttgtatttttaagtcattctcgtttaacttgtcagggctttttcctttaagccagcagagtgaaatcttaacctgcatttaagtcaataaaacttgtcagcttataaccaattttattattttagatcttctggactctctccaagtttagtaattctcatgaagtcacattccttccatccccttggggaaaattttatttcctaaaattgcatgggaaatgagagcttttttaaaagaacaaatttttatattcaaatgatatgtagtggctttgtgccatttcttatttgtcacaaggggtaagatgtttaaaattgctatttcttatatataaaaatgtacctttgaacaatttctcagtttatttttagaaatggagcaaagttttgccctttggtacatgatattgtggattaagtgaaggaatatgacacagaattttatgtatagagttcc

SEQ ID NO: 41814 - DNA, 1047 bp, Homo sapiens
agatttttttcataaataatcaagttttatatatgaaatatggaaagaagttctaggttataaatatattaatagtgacatatagcatctgatttgttttcatcagctgtttcatagttctgtattataatttttattcacagacatttaatgattacccttaatattcgtgacaggagccctctggcacaaatggaagaagaaagaagggagcatgtagctaaaatgaagaagatggagatggagatggagcaggtgtttgagatgaaggtcaaagaaaaagttcaaaaactgaaggactctgaagctgaggtaatcagtctaatatcccatctcttagcagacattgtgttcctttttaagtagtatcttcagtaaaatttatagataatataacctttttatacatattttttcaaaattaataccctagtgtaacaaaacggataaatttctagaagcaagcaccgtgtttataataaaataatacatacttcaatatgcaagtgcttggacgtagtatattaggtaggacagtgtaatagaatacttataatgaattattagttataatgaacaagtttgagttgtgaaaaataaaattacaaaccattccatacaggtggcataagaacactaaagatgagagtttgggggtggatttatgcacacaaactgtgttaggataataataattgaccatatttatttgtgtatgagtgaaaaagagggaaataacctttattgaactaaagacatgcctggataaattccacacaattaaagaagagaaaattagggaatgtgatatttttgttaacaggttaggccttctttatttataatgtagtgtcaaggtagttcctggtgttacaacattgggcagggtaatgacaaaacatcccagaagacatacctactatcttgaaacccttctagatgttgagttatacatttagtttctattaatcaaaaagaccttggagacatttccttcaataggtggcaagaaagaaaagttggagaaaaagataaactgaacattaa

SEQ ID NO: 41815 - DNA, 1061 bp, Homo sapiens
atgtgaggccaagacaattcttcttccattgtggcccagggaagccaaaagattgtacacctctgctttataataagccaataaaccttaagtcagtgtttctgtgagttgcttcagcaaattaaccaaacccaaaaaaaaggatcatggaaacctcaacttgaagccagttggtcagaagttctggaggctcagacttacgactagtgtctgaaggctggggggtggggagggcagggggattgggggcagtcttggagactgagccccaagtgggtggggtctggtactacctccaggtagatagtatagaaacagaattggaggacacccagctagtgtctgatgcttggtttgtgtggaaaaaacactacacattcagttactgacatggtttagctctgtgtccccacccaaatctcttcttgaactgtaatctccacatgtcaagggagggacctggtgggaggggtttgaatcatagggacggtttcccccatgctgttctcatgatagtgagtgagttctgatgagatctgatggtttaaaagtgtttggctcccagcactttgggaggccaaggggggcggatcacgaggtcaggagattgagaccatcgtggccaacatggtgaaagcccgtttatacttaaaaaaaaaaaaaaaaaaaaaaacttagctgggtgtggtaatgtgcacctataatcccagctactcgggaggctgaggcaggagaatcacttgaacccaggaggtggaggttgcagtgagctgagattgcaccactgtacttcagcctggcgacagagtgagactccgtcttaaaaaaaaaaaaaagtgtttggcagttccccacccccagcttctcttctgctgccatgtaagacctgccttcctccccttccaccatgattgtaagtttcctgaggcctccccagccatgcagaactgtgagtcaattaaacctcttttgtttataaattacccagtctcaggtatatctttatagcagtgtgaaaatcaaccaatacagtcacagaactcttctgtgttgattgttgt

SEQ ID NO: 41816 - DNA, 1029 bp, Homo sapiens
ctggttgggctgcatgttctccatgaggatgagtggtggccagatctccggaccaggtggaaggctgtgcagggcatcccttctctgtcggtttcctgggtggggcttggtcactggagtggggatgcgcagcgaggggcagctcagggctggactcttcactgctgtcttctgatggtctcagctggaagctgctgggtgctagtctgcactgaagaacccccagcccagtgggggaggcaagccgggcacagagcagtgcgtcatgatgggggcacaggattccgtggacattggcagcaggcatgctcaccacatcttggggtgagtgggatggcagggaagggtcccagaagaactgatgaggaatgccaaggtggaagtgccaaccagcagaagttagatggagaagaggcccagagagcagagttcccgagagggagagtgtgcagaagcctggagcctggagaggggaggaatgaaggcgggatgaggtatggccagagagcagagggaatgccacacaggaggacaaaggagagatgcagctagatgaggagagaacagccacttcatgccagccttgggaggtcccccggggagtgcggtcccctgaaggcagaggcagagggaggccatgggaagcacccagggctgggctctgggtgtatcttctgtgttttgatggagtgctgcccagaggtgctgggtcccctgtcctaggagagtcctgtgtctagaaaagctccagggaccacggccttcagatggccctgcctgtggacactgcgagtattgtttggccttcagtgaggggcagtcttgatcaagaaaatgttcctagggctatgtttccaagaggaattcagaaacccaggccgtcaggtcccgtggtcagcaggtggccagcggcagagcggccacacccatcctggtgccctctctttatggctgccacctccctctgggagggcctgggggaccctgacaccattctgtgggagagatgacagtaaaattaggctgtgg

SEQ ID NO: 41817 - DNA, 1032 bp, Homo sapiens
tagcaatcatggatccttggtcacctgcacacagtagggcgctgtcaatgtttggaaaacaaatgagtggctgagcagggtccctttgcaagcgatggctttagctatttgggtgactgtttttctttatattcttctgaatgtattcaaattcctcacagtaagtagctatcagatacttttagaattttttatggcaaaatgtttataaataaaatttagcattttaactctttttaagtgtagagttcagtggcatggcataaagtacacttacgttgttgtataatcatcaccaacattgtctctagaactttttcctttttttttttttttgagacagagtctcgctctgtcacccaggctggagtgcagtggcgtgatctctgctcactgcagcctcgacctcccgggctcaagaaattctcctacctcatcctcctgagtagctggggtcacaggcatgcaccaccacaccaggctaactttttgtatttttagtagagatgaggtcttgttgagaggtgacaacatgctagcagccctcgctcactctcggctccgcctcggcgtccgctctggccgcgctcaaggagcccttcagccggcggctgcgctgtgagggcccctctctggggctggcgaggccggagccggctccctctgctcgcagggaagtgtgaagagagaggcgcgggcggaagcggcgctggcgggccacgggttccaggtgagcgcgggcttggcaagccccgcactaggcgccgccggccggcacttgctgggcttgatcggaggctgaatcccgtgcgtggaccgccgttccctcttcgcgggattgttggccacgacagccggtctccgtctctttctcgtttcccctcttttcctcttgattgtctgggacgagctccctctgggctgccttagtgcccaggctaggtgccacaaagtcccgctgccagtgccagtaagaggtgaagctggctgggcttctgagaggtggggacttggagaacttttctagctgtc

SEQ ID NO: 41818 - DNA, 1031 bp, Homo sapiens
ttgagacccagtaacttgcctaaggcaaatgaactaagtagaggagtgatgatttgaatcccaatagttccatttccaaaaccagtacttctctattcagtagtcaagttcatgcgtttttatctctttttaggctactactgaggattgagaaactgcctctctgcccccaaaccaacgtttcactgtgccctggaagagatccccagtgtgtctcggctttctatgttcaagtcaagcctgggattggggattttttgccagttgtgggttcaagttcggcatgcatggtggggtgggctccacaaaacaggctgggtgggcaccaaggaagccaggcccccctacttgcccatcaggggcctcccagctgataccaagctctcagaccctggggagttcaggactcttcctgcatgtgtagccgcaggtgataattagaatctgtgttgctaacatgaagcaacagcacccaaacgatattcatttgtttttggttagagagacaagcacttgaactatattcgtttatttttggaatttaaaatatttgagggggctaggtgaggtggctctgcctgtagtcccagcactttgggagactggagggttgcttgagcccaggagtttgagaccagcctgggcaacatagtgagacctcatctcttcagaaaatcaagaaattagccaggtgtggtggtgcacacctgcggtcccaattccgcaggaggctgaggcaggaggatcacgtgagcccaggaggctgaggctacagtgagccaagatcatgccactgcactccagcctggaagtcagagcaagagaccctgtctcacaaaataaaatatctgggttagtagtcagtctgctggttggcactaagacaaataaagtctttaaaatgaacaccaaccagtggtgtgagggaagaatgaggtctgagcactgctttggatttgatgtcccctcaacctcatttctatcttgggtaaaccaaggatagagctgctgcctgacctcagagaggcaaa

SEQ ID NO: 41819 - DNA, 1074 bp, Homo sapiens
gcagacaggacattgaggccaagggagttgaagtgccctctgccccaggtccacagcaggtgtgttggtaatccaggacccatcacagcagactgggctccatttcccagctcctttaagtgcaaccagctgcccatcttctgtgatctcatttaatctgaacatcagccttagcaggcatactggacgatcctatctccgcatttcccaggagtgggagcaggtccataggatcagtcctggcccaggtgatggggaaccaatgcccagatcttctcatagtgtgacttgtagcaaaacagacttgcacagttggtgttagcctcctccagcaggagaggcagagaatgtgggatgggggatagaggacgcagaaggaggttctgggttccagatgtggacaatgtcaaaggagcacctaaaagtgaaggaacacacagggtgtgagggctgcctagagaccatccacctagcaggttatgggagccatgaggacacgtgagaggttggaggacgtggactggacacacctttcatttgggcttggtgtccaaatgaattacttcaagaatcttaacttataaaaatatatatactttaagatactttttttttttttgagacagagtctcactctgtcccccaggctggagtgcagtggtgcaatctcagctcattgcaacctccacctcctgagctcaagcgattttacccccctcagcctcccgactagctggaattacaggcttgcaccaccacacccagctaattttttctatttttagtagagagttggtttcactgcatttcccaggctggtctcaaactcctggcctcaagtaatctgcccacctcggcctcccaaagtgctgggattacaggcatgagccaccaccctcggccagatactctttttttttttttttttttccaaaaaaacactgtgttatttcaaaaatatcagaatgagattcttcagatcccttatttattttcccccacccccgccacacttagcccttcatgtagtcagagctgaatttgaataccaccttgagtgatcaatattcatat

SEQ ID NO: 41820 - DNA, 1043 bp, Homo sapiens
gtgtctcgtctcccctgattcttctcttggagtggactgtcctcatgcccagtggtctgccagcatttgggaggggagcatgtacagtgtgtttagtgaagttgtacacatgctcacttgaggcatttcgcctgtaccagtcgagtgttcctggaggaaggtcatataccagttaaactctgccattgtgcctctaagtacacatgcttgagcccactcacccaactcctgagatcttatggggaagctgctgatcaccagcttcaggtgtttatctgttgggagactgccattccctgggggcagctgtaaacaaatattattttagagagacagttttacaaccgcctgaccatcacctgatggtcgcttgacagtcctggtgtatggggtaggggagggctctctcctgtcctgctcatgtctgactagctacatgctctaacaataggagactctgtctctacaagaaataaaatgataaaaaactttagctgttcatggtggtgcatgcctgtggtaccagctacttgggaggctgaggattgcttgagctcaggagtttcaaaaccagcctgggcaacatggtgaaactccatttatacaaaatatacaaaaattggccgggtgtggcgatgcacgtctgtagtcccagctactcgggaggctgaggcgtgagtattgcctgagcccagaaggttgaggctgcagtgggctgtgattgcaccactgcactctacccttggtggcagagaacaccctgtctcaagggaggggggggaaaaagcagagttaattaggtttgaagaagacagccaaagaaaacaaagcagcacctcacacaggaatgactctgaaattacctgctctcttggttcacctgttagtggcttcctccacaaggagacagtcaagaaatctatctaagaggctacatggaagcactgtggagtcacagagcagagcatcttcccaatgtgtatagctctggggatcttcaggggtcagaagtgtccaggattaaaacaagatccctagcatgt

SEQ ID NO: 41821 - DNA, 1320 bp, Homo sapiens
agaagaaggaaactgggttcatagaggctaataaacctgtccacagttagccagctcaaattcaaatcccaatggtttgactttagagctcttaactcctgtgacctgcctgatgatttttttgtttttgtttttttgagacagagtctcactgtgctgcccaggctggagtgcagtggcgcaatctcggctcactgcaacctccgcctcccaggttcaagcagttctcctgcctcagcctcccgagtggctgggattacaggcacatgccatcacacccagctaatttttgtatttttagtagagatgaggtttcaccatgttgtccaagctggtcttgaactcctgacctcaggtgatccgcctgccgcggcctcccaaagtgctgggattatagacgtgagccacctcggcaggccacctgatgttttttggcacatagcatagtctatggtgtcaattaatacctatttattttagcagtggtgaggtaagaggtaggactcgactccagatgcgggacttggacactggacaagatagagaaataacaacaacaacaaacaaataaattaaaaaaaaattgaggactagctaaaacagggcctgggggaagcagctttccagtgacatgcccaccagtgtgccatgtcaattcatcattgccatggcaacacccaggagttaccacccctttccatggcaatgacccaaaagttactatcccttccctagatatttctacataagctgccccttaatgtgcatgcaattaagagtaggtataaatatgattgtaaaactgccctgaactgctactctctgcctatggagtagccctgctctgcacagggaatcaacagagctgtaacattgcctcttcaataaagctatttttttttttttttttgaggtggagtcttgctgtgtttcccaggctggagtgcagtggcacaatcttggcccactgcaacttctgccttccaggttcaagcaattctcctgcctcagcctcctgagtagcagggattacaggcacacgccaccacacccagctaattttttgtatttttagtagagacaagatttcaccatgttggccaggctggtctcaaactcctgacctcaggtgatccacccgcctcggcctcccaaaatactgggattacaggtgtgagccaccgtgtcctgcctgcacctaggttataatactagccttctaactggtcttcctgcttcagacctctgccctgtccagtccctcctcaattttcacaccagcgcgatttttctaaaacacttgcctgcttctgctttaaa

SEQ ID NO: 41822 - DNA, 1024 bp, Homo sapiens
gtcctatcagcagatgacagttttattgtcatattttaggaatgggcttaataagacctctagctcttgtaactatactctgtggtgcatgcctgtaatcccagctacttgggaggctgaggcaggagaatgtcttgaacccgggaggcggaggttgcagtgagccgagatcgcgccattacattccagcctgggcaacaagagcgaaactctttctcaaaaaatataatataatataatataatctaggtgcaaagagtgaaggcctgtggaaatgaagaggagaagctggatttgagagatacaggagacaaactctaagacctaacgactggatggtggagggagaagggaggaagaggtcagattcctggcctcagtgactgggtagttagtgatgtcttttcctaagatgaggaggaatatgttcggggcaatttcaacttcacatatgttatttgggatatctgtgggagagccaaatggaggtatttggtagttgcaagactgtgaaggataagccaggaaggatagtagagaatgatgtcacaaatagaaagggagtgatatattttagagatgtcaagaaatacaaagcctgcaaagtgtgtactggcatctagtgacaatggcaaaaccaacttcagggcagtggtataggcagaaggtcagttgagtgagttaagtggtgcgtgaatattgtgcagggaaagaggggcggtagttaaagaggatgtatatcaatgaggggatgtttattttttttgagacagggccttgcctcattgctcaggctggagtgcagtggtaatgctctcagctcgctgcaacctcctccacctcccaggctctagcgatcctcccacctcagtgacccgagtagctgggactataggcgcatcaccaagcccagctaagttttgcattttttgtagatgttgcatttttcgtaggttttgccgtgttgcccaggttggtcttgaagtcctgagctcaagcaatccacccgccttggcctcccaaa

SEQ ID NO: 41823 - DNA, 1081 bp, Homo sapiens
tcctaattttccttctgaaggaaaaaaaggcaaaattcctttattttcacgttaggcttcctaaaagcagggtaaaataaattgactatagatatatgtaagttgttggaagttaccatggccagcacacttcgtgatgaaggtagatttattaatatacatacagtcaatttctaattatttaaattctggttgttcagtttgagagttttctaagccctactgccctctcctcattctaccttttcaaaatttttttttttttttaaataactaaattctatgagtaggttttagggcatgtacttaaatagaatagtaaactttttaaaattttgaagtatttttatagtctactttgtgaatgaatattcctgatagaatcaaagcattttgaagctgtaatgtagtttagaactttttccatagaaatcgtaataattttttattttgaatagcctccaaaaatgtgtgtgttttctgtaggaggaacaggaattaagcctttcctggaacgctttggagagcgttgtcaagaacatagcaaagaaagtccagctcgtagcacaccccacagaacccccattattactccaaatacaaaggccatccaagaaagattattcaagcaagacacatcttcatctactacccatttagcacaacagctcaagcaggtatggtgtactgcatttaacattattcatcacatggtctctgcatagaacctagaaatcaaaatgggttctgatgccagtctttttgactgagataagtagcatcttggttttctgtatcactaatttcagacaagattgggcacattcagggtggtatggccgtagacagtatcactcatctcaaattagaaatattgtcctgaattccatgtgtattatgaactttttaaactgaaaactgtttaaactttttaaacagtttaaaactgcaaacaaggaaaattttagtagtgtttggatgttaaacatgctaccggctcttgtgtaaaatacagcttttgatgggtttaggaacgtcaaaaagaactagcatgtcttcgtggccgatttgacaagggcaa

SEQ ID NO: 41824 - DNA, 1078 bp, Homo sapiens
aaatgtgggttaagccaaatctactgggttttgaagcaagaagtttgctgtaacgtggcaagagcagtgttagtgaagaggtgagggtggcgtgcaggtggtgctgtgtcgaggagggaacgggcaagaggagcagagccagtgagtgcaggcatttcttagtttggtcctaatggaggtgataaaggaggtagtggctagaagagatgaagaaaagtatgatttgtatgtgttttgtcctttctgagacctaagtcaatttgtgtgatgggataaggggtgataattgatgggatgaggtgagaatggatgaactccgcacagtgaagggaacagaactgatgaggacaatctcctgtgtgacgaaaaggaaggaggaaagtagcatgtaggggtgatggtagtcttagagttaggatagcaaaaactgatggactttcttctgaaagctcctgttttattcatccttaggaaagggaaggtgacaggggaaatactgtatggaggaaagaagagagagctgactcagacataggaagaatagggggtagtattgaggcttagatgagatatgagaccgtagattttatagtggaaccatttgatcgtttactttgctttttgtgtttttaaaaaatttttatgtattttttaatccactcatctgcatgctaattacattgtttttacacaaccaaagctgcttctaacttgagagacaataaagtctggaactagacctggaacaagagtacctgggtttgtatactggctctgccagtcactaactgtgtgcaagatacttaacttttttgtgtctcagttctctcatctgtaaaatggagatactagtacctaacatagagggttattgagaagattaggtgaggcaatagatataaggtgcttagaaaggtggctggcacatattgagctctgtataagtattagctgcctttattttactcttatttgattatttctactatgacttcattcataaagtcttcttttatttctttgctgaaataatctgtacaacaatataaagtctttaaacatacaaaatagtgaatgt

SEQ ID NO: 41825 - DNA, 1209 bp, Homo sapiens
gttccaacaaatttctaaccagggaaaactcattttgatatttagaaatctttaagtttagagaaagggcttttcctagtcatctgttccagtggatctattttttgttcttgtttttataaggtttaagaactctatgtaaaacaaattgtagtttgcatgaaaggtagaagcaaccgaaaggcatttgaagaaatgcagttgtgcagattgaatgaatgaatggatgaatgaatgaatctctatatatacacatgtacacatacattctctctctctctctctctctctcccttccttcccttatcaataaatagctaaaacaacttctgtgaattttgctgtgtgcgtatatgtggtgatgatggggcattttggggtggacagatgataccacacatgaaaactagccgaaagttgatgtattaaattataaggacttggtaaatgagcaaccaaggttttccccaaccacctaccatgttttataaagatagtgttactgatttcgtcttcgctgttacgtacagtttccatatcagtacacttttttgaatttgctctcattagaaacagttacgattttaatatttggaatattgcgttgttttacatagctgggaagagaacacttttgattgatgaattgaataaattgaagaacgaaggacctcagaggaagaataaggctagtccccaaagtgaatttatgccatccaaaggatcagttactttgtcagaaatccgcttgcctctaaaagcagattttgtctgcagtacggttcagaaaccaggtatggtggtgatttttctagattgtgtgttaaattatgaacctcacctagattgaattgtacagaatagaaacaagtaaatcatgcataacaatgcaaagtttgtatctttggcctttaggtccttttattgagatataataaaaataagaaaacttcagatatatatagggataccaatctacacaataatggacattgctcttactgaaagtttgaatataaagttttattaaatgttggatatggtttttaaagttccttttaaaattttatttgtgtggaacacaaatttttttgtgtgtgttctggaataccaaagaaataaaggaatactgaactgatttatacacaatttattttaaaaaatttctttttgaggggaaggagggctagacataggtgagaagcaaat

SEQ ID NO: 41826 - DNA, 1049 bp, Homo sapiens
ctcaagacagacatttagtagaggtaaagatgtggatatctgcagcatggggaagcccagggcaagtgagggaagcagagccaactcactggaggagtgccagcattgaaaggacggatggaaggagggaagcctcagaggagactgcagggagagaaacggagaatctagcatcatggttgtcaatagaagagaacattgaaaggagggagtggttgagttagatcagattctgttaggactgttggacttattattgggtgatcattctggcgcaggtgagggcagatgctagactgcaaatgggtccagagtgagtgggagatgaggaatgagcacaggagcttggaaactcttggaaacactttggcagtgaaggagtaaggagagaagagtgttgtgcttgcagaggtatgtagggtgaaaggaggattttgtcaacattttgttaagatgggagagacgtaagcggctttaaatgtagatgggtagcttctaatagggccaaagagattgaagatagaggccatggaggacctgatctagggcttatggggtaattcatagagcaaggtcatgagaatgggaagaattaagcccaagccacaattcacaggatttatttgatacagaatttacagttttctcattatcagaggaggaaagtatgtgtgtagaatgcatagaagattgtgagtatggtacaagaagtagagaaaatccacttgctttggtgttctctgtgaagcaagaacttgaatgatgcaagggatgttacaagtcagtttgtaactgctgtcaaaggttcagaaagaagagctagatattaaggaaagcccggtggtctaagtaactgtagccaacttcccaaggattgggaattgctacttattaacagtattttttccttccttattaggttttatcacatataaatccagcaggtggcactagatagtcttggaagagtgtaaatttctgacttgaaggcagtatttgcctaatgaccttttcttttcatgtaaacatttttatattttattgttgat

SEQ ID NO: 41827 - DNA, 1029 bp, Homo sapiens
tagctctgcctccactgaggagcagcaagaggcaggcgctctggattggcagccagaaggttcaatttttgtggtctgtgtgatgtcacttaatttccttggccctctgtttcctcagctatagaaatgaaaaggccgtccttttcttattcctctctgattatagtatgatgtcataatagctggtgttaatcttgtttatcaaaagttaccttgtctgtttattacctttatgatgtaaaaggtgaacgttaacacaggagggagctggtgagtgatttgtgttaactttcatgcttgagattgaaataacgacattcctttctttcttccttggggagctgtaagcagtgttgcctagaaaaaggctgctttgggaggaaaatggaaggattaggggaggaggaaaaaggtgaggcaggagagcatatggttggagcaagccaattaatctgaggtgtcaatctagcttggtaacatttgctcccacacgtcatggccagaaattagactcttgattcaagccaccttttgggaaatttacataaaacagtgaattgagaagagtgtatatcctattgtcatagggttggagtaaggactagttgagataatttaaaaatacttagaggagtagttgagataatttaaagatatgcttagaatggttcctcacagcaacaaccaagtaatactagtttattcttagcttctcaacaatcagagaagtaaagttggaatatgaaggtaatctaaaatcaaacgcaaagatgcctttggatcatctgtatcagagggcagcacagcagccctcactgactgtttttatagtctttgattggaacataggctgatctgcttacttagcatctgtgactgcttctgtgccacagcagctgagctgagtagctgtggcagggaccgtatggcccaaagtctaaaatatttactctctggcccttatagaaaaggtttccctgatctacagcattgttatgtttttaccttgctttgttctttaacacagaa

SEQ ID NO: 41828 - DNA, 1060 bp, Homo sapiens
aggagcgagcgagcgagcaagtgagcaaggggaggtgccaaacatttttaaacaatcagttcatgcgagaactcattcactattgtgaggacagcaccaaggggatttcttgagaaatccgcctgcatgatccagtcacctcccagtaggccccacctccaacactggggattacaattcaacatgagatctgggtgaagacaaatatcaaaactgtatcattcactgatccacaatgccatttctcatgtgtatcaagatgtcattatatgtgtaggtttatttttaggctcacggttctgtttcctttggtctgtttccctatcccaatctcaatgaccgtagctttaaaataaatcttaatgtctgctaaggccagtctcctaacttatggagtaatgtatagtagttcccccttatccttagtggacgcgttccaagaccgccagtgaatgcatgaaaccatagataagtaccagacccacttgccatcagtcataacacgtttctgttgatgtcttacacccacaaatttaatgccttttgtattttaattaagcacttaccatttactgtggtggtaacttttgcagttggagatgtgacaacgaaactagcatgaatttctttttctttcctcacaatttcatggatagaagatttattcttactgtagatcttgacaacctcagcatacgattttttttctctccttattaagttgaagactttcaccttttcacttaaaggaagcactttatggtttgtctttgcatatctactcttgcactttggggaccttattaagtcagataggggctacttgaacacaagcactgcatactacagcagttgatctttttttttttttttttttttttctgagacggagtctcgctctgtcgcccaggctggagtgcagtcgcgggatctcggctcactgcaagcaccgcctcccgggttcacgccattctcctgccttagcctcccgagtagctgggactacaggtgcccgccaccattcccggctaattttttgtatttttttagtagagacggg

SEQ ID NO: 41829 - DNA, 1082 bp, Homo sapiens
cctattggaaagccttaaaccgggaaatttccatgctatctagaggtttttgatgtcatcttaagaaacacacttaagagcatcagatttactgattgcattttatgctttaagtacgaaagggtttgtgccaatattcactacgtattatgcagtatttatatcttttgtatgtaaaactttaactgatttctgtcattcatcaatgagtagaagtaaatacattatagttgattttgctaaatcttaatttaaaagcctcattttcctagaaatctaattattcagttattcatgacaatatttttttaaaagtaagaaattctgagttgtcttcttggagctgtaggtcttgaagcagcaacgtctttcaggggttggagacagaaacccattctccaatctcagtagttttttcgaaaggctgtgatcatttattgatcgtgatatgacttgttactagggtactgaaaaaaatgtctaaggcctttacagaaacatttttagtaatgaggatgagaactttttcaaatagcaaatatatattggcttaaagcatgaggctgtcttcagaaaagtgatgtggacataggaggcaatgtgtgagacttgggggttcaatattttatatagaagagttaataagcacatggtttacatttactcagctactatatatgcagtgtggtgcacattttcacagaattctggcttcattaagatcattatttttgctgcgtagcttacagacttagcatattagttttttctactcctacaagtgtaaattgaaaaatctttatattaaaaaagtaaactgttatgaagctgctatgtactaataatactttgcttgccaaagtgtttgggttttgttgttgtttgtttgtttgtttgtttttggttcatgaacaacagtgtctagaaacccattttgaaagtggaaaattattaagtcacctatcacctttaaacgcctttttttaaaattataaaatattgtaaagcagggtctcaacttttaaatacactttgaacttcttctctgaattattaaagttctttatgacctcatttataaa

SEQ ID NO: 41830 - DNA, 1033 bp, Homo sapiens
aaagttaactatgacaataaaaataatacaaatcaaaaatatagagtgtaaccactatttatatagcatttacattgtataaagattataaataatctagaaataatttatagtatacaggagaatatgcataggttatatgcaaatactaaaccattttatctaagggacttgagcatctgtgaattttggtatctacagggctccaatcttccatggaggtagagggactaatcagtgtgattttctcaacctctatattgagagacagacaagggagaaggggtacaaatgcctgctgggtcttttagtaagggatccaccatagcactcagatgttctgtccttcatctctctatcccacctggatgaattagcccttctttgttacgtagtagagcaattcatatgtgtacatgtaaaatgatttgtttccctgttaaacgttaactgatgatgataaacacaaatatgagattttcctgccatggttatgataccttacatttatataacaattttatatctattatctcaaattctgttcataagaatgtcataagtttcaaatttttggtctctccatatgagaagtagagagatgacatttattatcatacagctcatcaatagcaaatgaggaagcttgattctttgacctaagctttttaaccttttacgttgtctgtaaaccttatgccaaattaagaaaactagaaagttttttttccctgcttctagtagggtaaacttttagtatcttttctaatgcagagaaattaatgaagctctacatctagttcaaaattccagtgtttttgttgggtaggggtggggaggtgggacagttagtagtatctcataaaatatgagatgggaatttcatttgatccaatgatcccattctataaatttttttgctgggatataaacacagaaaggtaaaaggttttatctccaattcatattcagcatcattaatattaacaaaactgtagaaataatctaaacggacatgatttgggaactagca

SEQ ID NO: 41831 - DNA, 1050 bp, Homo sapiens
tggcatctaaagccaactggtgtggatgagatcatttgtagatgagcactgagcaagtgctctgctgcattctgaggatgggaacagggcctgcttcatggccacatgatcttggcagtcgcacaaaacctcttgcttaggaggaaccggtgcttgattgaatgctctgctctcactctcttgaaactgttaataattttttaacaagggcgctgcattttcattctgcactgtaccttgcaaattatgtagcaggttctggttggaaacataaggatccaaccttacgaaaggaaagagccagtgaagtaacctgaaaaccaagcaagtgtgaggaggtgtcataaaagtcaagggaacaaattgtgtgatgatggacagcatgacccacagtctcaaaaagatgatgcaaggtcatattacctcaggactgaacactgatcattggatttagcaacttgcgtatacttgttgcccatggtgcagtaagttgaagagaaaagaaaagaacaaatgttgaatgtgaataactcttgcaagcacttttcttggaaatgagaagcttaaaattgggtaggagctgagaaagatacagggtcaagagagggtttttttaagatggagataagtgttataaatgggggagtaagcaccttttgtggaatctttaagcaacagtccagtacggctgtggagattacactggggagccatatgaattaaaggatttactgtatttacaggttctacaaagggaggcacaacataccttgcaggagtcacctggagggagcaccaagggagcaggctcaaccaagcagtggaggagccaagagaaagtagggacctgtggacaagcacccttattgggcatcaggatggggtttgccagcaaacgcaggagggaatattatgggtatgcttgaatgtcactaggccacagtcagggaagagcaagaagggggacttgtggcaagaccagccttgtcacattggtgcacctggtcatctgggaaaagtgcccacaagcctgtttctctggagatgttg

SEQ ID NO: 41832 - DNA, 1048 bp, Homo sapiens
ctatgtggataaatttacagaatgttacttagactgtaagacctagctaatggagagacatcatctgactagatgagaatattcagtattatttatatgttgattatctcagccttctccaaattaattatgtttaataaaattttaatcaaattattaagtttttttggaagttgagtgcttgactccaaatttcttctggaagaaaaatgtgtatgaataccttatatttgataagaatgtggaaaggtttgctctattatatataaaaaataaagctaatcaaaacaaaattaaaggacaaactatattataaatattcgttaaaataattataaagactgtctacaatgggcagggcatggtggctcacgcctgtaatcccagcactttggaagccagatcacgaggtcaggagatcaagaccatcctggctaacatggtgataccctgtctccactaaaactacaaaaaaattagcagggcatggtggcaggcgcctgtagtcccagctactcgggaggctgagacaggagaatgctgtgaacccaggaggcggagcttgcagtgagcacagatcacaccactgcactccagccttggcaacagagtgagattctgtctcaaaaaaaaaaaaaaaaaagtctacaatggaaaattagacaaagcatttgaacagacaagtcacaaaaaaaggaaagaaaaataggcccctcaaatgaaaatcttctaaattttcttccaacaacaaagacgtgaaacaggaaattagggtttgatcactgcttctttgttttgttatggttgtttctctttcacatataagaggtttagcaatttgacacccagtgtatttcagacagaaatgtcacttatgtctgtggtaatgtaattttgggggaacattgtactgtatctatagtttaaagtgctcttagtttttgacctagcaattccacctgtagaattttttttctacaaaatagacatataaaaatacaaagatacgccaggtgtggtggcgcacgcctgtaatcccagcactttg

SEQ ID NO: 41833 - DNA, 1033 bp, Homo sapiens
taataaaatacaaatccggcacaagttaggcagcaaagtattcagcatattatctgtcacctaaaatgtcccaaagagtatagaatattttcttgcaaattaataataaatatataacatctgttaacaataaaaagccctattcaccaatgtgctttgtctataatagtaattttccattttaaaaacaggtattggccatgacacccatagtgtcaactttccatgttgtaacaagaaagtcattgttttactcttcatatggggtatatgttttgatcaagatgtaaacataccagtagcataaatgtgcatatgcaaaagaaaactatgattcatggactaaaatagcattcacaaataagctggcattgcttttgaactttgctaagataagagttcaattgttttgccttagcaataggaaaacaaatgtaagccagagaccatggcttctaaggatttaagatcctcttgtagacccaagatatatacaggcaataggtcactgagcttagacaggctgtgcctttttttgtgatacgtatatgcaaatgctataaaaatgaaaaaaatgttgcttttcaaataaatatgatagataagacttggagaaggacagaggaaaaccagactctcaagactggggcaacaccaggaaaaacagagaacaaacttccaaaggagcatgagttgctcaaaggacagcaaaatccgtttgctttgagggaaagccagtttaaagagcatgcaatttctcctgagttcaatgggaagacagtgggagattgagcaaggaattaatgagctcttaggaagactaattttaagactatgtgtacagctcatgaccttttcccccactccctttcaaataccaagttctactattacaaaaattcaggccgggatctgaggctggcccaggagcctagagtctccaatcagggtaatgacagtatatatacctagaaagggcaagtagtttactttccccatctgaacgagcaatgcttttagcaaaactgtggtt

SEQ ID NO: 41834 - DNA, 1029 bp, Homo sapiens
ctactcttattacagcattcattatcttttatttatttgcttttttggctgttgttcctgctagtccatatgacatgacatcactcacagaggaggaatgcaattggtatttaaaagacaattgtcaaataaatgttaaaaaatgaatgaaggccgggcacggtggctcacgcctgtaatcccagcactttgggaggccgaggtggacagatcacctgaggtcgggagtttgagatcagcctgatccacacggagaaaccccatctctactaaaaatacaaaattagccgggcttggtggtgcatgcctataatcccagccacttgggaaggctgaggcaggagaatccgcttgaacctgggtggtggaggttgtggtgagccgagacatgccattgcatcccagcctgggcaagaagagcagaactctgtctcaaaaaaataaataaataaaaataaaaataaaaaataaatgaaaatctagatttgatgtttgatttgtcatttcagtctggcgtgtaaagaaagctgccttataggcagatccttataaaagagctagatgagataagggaataatattttgaaatcaaacagatgattaacttaaaatgagatagaatcagtaacaaaataaccaccactccatgaagtcaaatcagtgttatggaggacaatcttgaaaagttctccagaatgtactgagacaaaagtaaaaatatgagaaaattataggacggaaaatgcaatttgaaaaatagtatgatatcaatatattgcatatgaccaaagaaacagaaaaaaattaattcctttggggagaacagaatattaggtgagtttataaatgaataaatgattttttaaaaattttacatgcctctgttatacagaatccagaaagaacaaaaacaagcatgagtaaattaatgatatatgtaagaatatcacccagaacgtaatatggagatacaacaggatggaaaacagagagaaattcagaaatatggaagatataatgatgatataa

SEQ ID NO: 41835 - DNA, 1039 bp, Homo sapiens
catacaatgatagttgcaatttttaaactaattgaatacctaacacatgccaggcatatctttgggtgctaagaatatagaatgttctctaggagttttcagtatagtactgagaagaagacatgaacaatatgtgaaacatgtgaaagactggaggtgctcttaaaggtatatgggatatatattatacatacgtggtcagagaaagtttcatccaggaagtgatacctaagctaccttgaacaattaataggcttattcttgctgttaatatgatagtttggtggttcaaggaaaaggcattccaggcagagggagaactggggcaaaggcaggatggcgaaacttcctgtgtcagtccatatgtgtcgcttcctatagatactttaggctggataattttataaagaaaagaggtttaattggctcacagttctgcaggctgtacaggaagcatggctcggcttttggtgaggcctcaggaggcttacagtcatggcagaaaaaaaagctggagcagcatgtcacatggcaagagcgggagcaagagagagaagggagatgccacacatttttaaacaagcagatctcatgcaaactcagagtaagagctcactcatcaccaaggggatggtggcaaggggatggtgccaatatatagtatatgatatatactatatatagtatataaccgatatagtatataatatatactatatatataatatataacccatatagtatataatatatatataatatataacccatatagtatataacatataccattcttgaaaaacttgctctcaaataatgcaacaaaacaagcaataaagaaaattatgactatggaaatacatatatatataggcagcatatatactatatatatgtatttccatagtcataattttctttattgcttgttttgttgcattatttgagagcaagtttttcaagaatgctgctagtttcaaacttttattgagaactttatgaaattaaagagatcctactacttttgttgtattctctg

SEQ ID NO: 41836 - DNA, 1824 bp, Homo sapiens
tttgatggaaagaaattcctcctcaggaagtaaggatatttgtgtgatttttgtttttcgtttgaggcagtgtcttgctctgttacccaggctggagtccagtggcatgatcatagctcactataacctcaactcctgggctcaagcgatcctcctatgcagctcctgagtagttaggactataggcatgtgctgccatgcgcagctgatttttcttttttcttttttgtacagacaggaccttgctatattgcccaggcttggaaataagcttttttatagctaatttacacattctgcttacatgctccaggaaagcattcagtagatgattttctagcccatgcacagttatacttacaggactgtggaggttttctccctgtcacagcaaggtaactgagtcgttcaccaagaggtttggtccaggtcatcaggaacacctttcagttgtagctaacatcctgccttcaccctttcctacagtcagtttgcttcttctctcttgccattctttgctaaaacagctattttgtagtattgctctaaaacattatgtgttgcttctcatttctctttctctttatgtcttcatgaaaacataaatcagtcaaggtactctgttgttcagttagagaaatagttgcacagtggagagggttgcacagttatatttgatcagcttggatttaacatggtgtctcttttttatttcccaaaggtgtcttctctttagggatggtgaggttggaaaaaggctcctgtaaccctcctccaggatgaaccacctgccagaagacatggagaacgctctcaccgggagccagagctcccatgcttctctgcgcaatatccattccatcaaccccacacaactcatggccaggattgagtcctatgaaggaagggaaaagaaaggcatatctgatgtcaggaggactttctgtttgtttgtcacctttgacctcttattcgtaacattactgtggataatagagttaaatgtaagttggtggttctttcataactttttaagaagtgtttccagagacaacagggtttttttgttcgtttctcttatcatttgtttcatttagtaatttccatctttttccaaatgaagccattgcttttctcctcctgatttggacctttcttgttctttaatattattgtttaaggcaaatgtgatcagtttaaaactcatgttgtctggggttttgaaatttgaattcctggtattttgctctgtaacaggagttgacaaactataggctgtaagacaaattcagtaggcctgttttaataaagttttattggaacgtggccaggcctgtctgtttacatattgtttatggctggcttttgcactgagtagttgcagttgaatagttgtgacagagaccctctgacccacaaaggcaaaaatatttgttctctagtctttttcagaaaaagtttacccatccttcctccagaaaatgtagaatgcttttggaatatgttttagatgtttcatgtacttttctagttcctaggtttaagattttgcacatgtttgttctttactttcttgcaaagagattacttatttatatttcatcggaaaagttgtcctggaggcatttggaggtttatgcagttattctgtattaccaactaattgtttagaccagtactgtccaatagaaatataatgcaaactattaaatatgtaatttaaaattctctagttgccacattaataaaaatcaaacagatgaaactcattttaataatattttttatttaacccaatatatgtgttttcttcccaaagccttt

SEQ ID NO: 41837 - DNA, 1095 bp, Homo sapiens
tggagaaattggaccccttgtgcattacgggtgagaatgtaaaatggtatagccccagtagaaaacagtatggtgtttccgtaaaagattaaacatagagttaccatatgattcaacacttctacccctgggtatgtacccaaaggaaatgaaagcagagaccacagcagatatgtgtatacccatgctcatagcagcattattcacagtagctaaatggtggaaacaaatcaaacagctgtcagcagatgggtggataaacgacatgtatgtacatccaatggaatattattctccattaaaaaggaatggaaagctgggcacagtggctcatgcctataatcccagcactttgggaggccaaggtaggaggatcgcttgagcccaggagctcaagaccagcctgggcaacatagggagaccttgtctctattaaaaaagaaaagaaaagaaaagaaaagaaaagaatagaattctgacacatactataacatgtatgaactgtgaacacattatgctaagtgaaataagccagacacaaaaggactgtcgtatgatttcacttagatgagatacctagagaagtcaaattttcagaatggtgatgatggctgcacaacagcatagatgaactgaatgcactggatggcatgcttaaaaatggttaaagtggtaaattttatgttaaatatatttttctatggtaaaaaacccactatttttaaaattgctaacacttttttaagtgtcaggtgctgttctaagctttattaatattcactcatttactcctcccttgtctgcttatcttctgagatacagatcacaaaccatagtgtctaatcactcctccattacatccattttttataagtctgtgtcttaccactaatctcttgtaagattgtgtctaacctattttcatattcttaatgcctggcatattagatgtttgctaagtgcctccactctgtgatgtaaaactcgtattatccctaatgtagagatgagcaaatgtggcacagagaagtgaagcaatttacccaatatcacactaataataagtggtgtagctgggatttgaagctggggtcc

SEQ ID NO: 41838 - DNA, 1119 bp, Homo sapiens
tgcccagtacctcggctggtgatatcagccccacaaagcccttagtgatctgaaagtttcctctcccagtgcagaaatcattccagatttctctatagaggccaggtatttgccctaaagagattcaatcaattcatgagaatcaaggagtagatctaaattaaatttgatctttcttaagtctggttggtcttgctttgtttacaagtaggattctctacttggtttccaaaagaacatgtttcacagaaacaagctgattgtaggcaaaccagaaaaccttcccaatgttcagtaacacattgttttaattctaatatataaaaatgtttactttaaaaggattcaccggagaaaacagaaaacacacaatcacttattttttcacccacataccaacaatgaacattgttttatctttgtctgcagaaatacacagacacacatataaatgaatggcatgcctatttgtgttattactcagtagaaaaaatggccaaaggacatgaacaaatatggcacagaataatataaaatagaccttaaacataaaaagatgtttatcttcactcacagtaagaaaaaaagcaaattaaaaccacaatgcagtactatttttacctgtcaaattagcaaaacccaacattaagcagtaggctgtcagcactcacacacattgtgggagaaggggttagggccatttctatggagggcagtttggcagtacccatcaaaattaccagtgcatatgttcaaatgacataaaacactatcattcatttcagcattttttataatagcaaaagactggtactaaaccaaggcaccgattgaaagtatgttcaccagtgaaaaatatctgtatttagctgggcacagtggctcacacttgtaatcccagcactttgggaggctgaggtgggcgaatcacttgaggtcagaagttcgggaccagcctggccaacctggtgaaaccctgtctctactaaaaacacaaaaattagttgggcatggtggtgggagcctgtaatcccagctactcgggaagctgaggcaggagaatcgtttgaacccaggaggcagaggttgcagtgagccgagatcagccactgcactcca

SEQ ID NO: 41839 - DNA, 1029 bp, Homo sapiens
ctagttctcctctagttctgaattctgaaaagtgaaaatgacatatgattatctacctttcacttttacacctaggcattggggtctcttcattctgtttattatttagacccactgggaaaatattagctgagccattggcccaagaggttgtcttgatagcaatatctaccagttagaaagaaaatcttattttatgacttggttttttatcaactttttaccttcttcttagacttattaagaagaggctcctgtctgcgtcacatcattcagtttgttggaaagactattagttctacatgctggattaggactgaacactaatgcaagtctctttccatctaggaggaacttagtttttgcatgaaatcatgttatcatctgcagtaaaaccttagaggtctccagtatataatacatgggactgcacatagttccagctagattcaataggagcatcagtggggaaagaatcctgaaaaagtagaaagaagaccacgtaatttgaccaagaagatcatggttctgatgccttttgttgctgccctcaccactatttccaaccctttttccacaagcatagtgatggcagcaaagtccagatggcattttgagataagcactagatatatagatgagacactgaaatattattcatgatttagctactttgctttcctctcactgaccatttcagggagccatatatcaggaagtcttgggataaatgctcagagagaaagaaacaagacgttaaccaagttgaaagtgaacccaaggcttttctgtcacctgctactaccttttaaaattgtctcattggagaaatgttggtcaacctttaggaatataatctatgaaatcatgtttgacttccacaagcaaatatgttctgagcccctcctatgtgtcaggcatggtgatgggcactgggacgacaggaggagaccaaggaaggcctggtttctgaggggacattctgctgggagggctgacatttaactaaagatgtgcacagacagcaca

SEQ ID NO: 41840 - DNA, 1034 bp, Homo sapiens
ttcaacaggaaagaaagaacataccccaaacaggcaaaaggttttaatctaatgaagccctcactgtctatttgtaggtggtgatttccctgtattcaactgtgctcagccttgatttctcttataaatcaagattggctgcataaatgtagctgtgagctctgcaaagcggactccttgacccactgattaaagtatgaatgcattaatttaaagtagcttttaaaactcaggtattgtactcagcaagtatgctgtttttctcccaccacaaagcataattaaagataagttttcaggagaagaggcaaggctgtcatttttttaaccttcagaaacactagaagattcacttttcagtttctaaattagaatccgtcagtttgactgcctctgtttcttttggatgtaatgcctatgatatgtgatccagaaagctgaaagcatgcagacctactaaaatgcatttggggattttcagaaacagattattgagtgacaatatgatagccttcaggcttgctgctggaaattattatttaacttattttcctcctaatgtgttagtaacatgtacctattttctgaagactgccgaacacatcatcaaatgacagttcaaaaaacatttttaagtttattatttttctttttatgtaacatactttgagagccaggaaacaacattaaaagatgtgtttctctcaccatttctccttactcgtgctgtttgaagaggtcacaatgaaattgcaagttcttgagtctgaataaagaacacctacaaatgtttgagctcgggtgtttgagagagtccgaggttatttgcagaagtgagtgggttaggcaagggggaagaggctacagagagtgattctgtctcatggatgtagcatgtccctcacaagcggccagcagacagggcacccagccacataggacagtgccaggtcccctctggctgccattatctggtggtgatgtctgagagtatacagtggtattcagtttcctcagcctccaatgtcatggta

SEQ ID NO: 41841 - DNA, 1066 bp, Homo sapiens
gggaataaaagcaggctgcccaagggtctagttgcaggctgcccaagggtctagttccatgttgtggaagctttgttcttttgctgtttgcaataaatctttctgctgttcactgtttgggtttgtgttgtctttgtgagctgtaacactcactgcaacgggctgcagcttcgctcctgaggccagcgagaccacgaacccattggaagaatgaacaactccagacgcgctgccttatgagctgcaacactcaccgcgaaggtctgtagcttcactcctgaagccagtgagaccatgaacccgccagaagaaagaaactccgaacacgtctgaatatcagaaggaacaacctccggacacaccacctttaagaactgtaacactcaccgcgagggtctgcagcttcattcttgaagtcagtgagaccaagaatccaccaattccggagactacatcgtcatacaccaggctaaacagttacgttaatataatagcatttaccagtcattacaaattttacaatgaataagttaatattacaatatagcaaaactttaaaaaatacaaaattatgttttagtatagtttccgctactaagaaagtgcagaaagaaactacacaaaggcaaaaactaggtgaaaacaaaccaagatgttagtttctagcaggatccctggtgcatagttctaataacagtaaggagctggaggaaaaagagaggggaagtaatggttaacgcaggcagtgtttactatatgtaggcactatattctaaaagctttacatatattaatttctttaatcctcataatagccctctcctgcagagctgcttttatgcccatcttagagattaggaaatcgaggcaccaagaaggctaagtaatgtgtccagtttgtagctactaaatggcccacttgagatttaaaccaaggcaagcctggttccagagtgtgtactcagggtggatgcttactaaataataacatggtagcagtgactgtgtttagtagggggactgtgagctatgtgtttactttgctgttaatttctatttttctatg

SEQ ID NO: 41842 - DNA, 1050 bp, Homo sapiens
caagtagctgggactacaggcatgcaccaccacgcctggctaatttttttaatttttgtagagacagggtttcactaggctggtctcaaactcctgagctcaagcaatcctcctaccttggcctctcacagagctgggattacaggtgtgagccactgcacccagcctgagactgtatttttaaatgtgaaggtaggagttctgtatttaaatttgtatttctcataactattactaatagaaagataatccattaatccattttgatcactaattctgttctgagcttttgtgctttccgtaattaaaggtaatttgcttaagtatctgacatctccattacaaaatgctctccagttcccaggaggccccaggagacttatgaagggcaattccaggaatgcagctgcagcaagaccaaaggagctgcaggcagtcgcatttaggaaactgtggtcttatttcaagaaacaatgcttagaggcggtagacagatgataaggtcacacacttcaccacaagagacggagactatgactcaccgaaagtccctttccaaaaaccttgggacttagaggaagaaaacaactgacatgtgtcataataaaatatgtacgtgttatggtttacagtgtgtgattgcagaaatagcaaaatacagaacacaagggaatgtaatttgagtacagcccagccatatcaataggaaaatcataagagtgtatacataagtcattactgaatgcatgctatatattaagtatttagtacattaagtatttactaagccattgcactaaacataatacacaaaataataccgttaagattcccaacacaacttaaatggtaatctttttaattaatggagatattttaaaacagataatcatttaatcttagagttgtcatgaaattaaattatttttttaaagatgcttattgagtacttaagatatgtcagataattgctaagggttttatatggactatgttattttattctcataaagtggcaatatgatccctattttacagataaagagctaa

SEQ ID NO: 41843 - DNA, 1054 bp, Homo sapiens
tcctgcctcagcccccaagtagctgggactacagtcacgcaccaccatggccagctaattttttgtatctaaagagacagggttttgccacattgcccagtctggtctcaaacttctgagcttaagcaatctgcccaccccagccgcccaaaatactggaaattacaggcatgagccaccgcatccagcctggttatttctttacggtttgtttctctgctgagatttcctatatgttcattcatttaaattatgttttcttttacatccttaggtatagttacgataactgccttaaaatctttgctaattacaatatatgaagcattctgtggttggtctctagtgattgtcttttccttagagtgttggttgatcacattttcctgtttcttcttatgtctagtaatttggggttgtatcctggacatggtcagtgaatgataaattggagaaactctgaactctgttatgttcttctcaagagtattaatttttgttgtagtagacagataacttttcagaactcaaactccaaactctaccccctctatgttgggcagtagctgaaatctttgttccattcttttagccatgtatgggcttctcaggttctgccctgcacagggatagtgcaggaatcagccagatttccaagtagattttatattcacaaactggggctcctcatctgtggctttctcctttctagaatcttctccctcacattccagctgtggttgctccaaactctgactcttaatacataacctgtatgattatgagtctgtgagtattagctacccggtgcaagccttgctggagcccaccctcaggtaaagagtcataagaaatggaaaaactcacccaatgcctttcttttcctctaaatttgattcctttccattttctgcctactttggtcccttctcaatgccttcattttttttttattgctttgttcagagtttataagtattacttgtggaatggttggtctgatacatgctactctcccattaatggaagtagaacctcattttttttttttgag

SEQ ID NO: 41844 - DNA, 1054 bp, Homo sapiens
tgcttgtggtcccagctactagggagctgaggtgggaggatcacttgagcccaggaggggaggcttcaatgagctgagatcatgccactgcactccaggctgggtgacagagtgagaccccatctcaatttttaaaaaattaaattttaacaaaagatacttaaggagatggatgtggtaagaagcaggaaaggtcaactttcctagtgcatggtaggaaaatacggtgtttagcatggtaactgctccatggtttctcagtttatacaagcagccctgagttttcttgcttctctacacagttttctggatttcattttgttttttacccagctagttatagatgccacagggtgacctccttttcccttctaggctaaagctgtcataggtctatgaaaatctagggattcccttctaggcttcacagtcttaagtggtgtgtgtgctttgcagatgagcaaggcttgttttgtattgatatgttgctgccttgacttcttggatttctagatcatatagcaaggtaaatgttagtctgttctcgcactgctataaagacatacccgagaatgggtaatttataaagaaaagaggtttaattaactcacagttccacatggctggggaggcctcaggaaacttaaaatcatggcagaagatgaagcagacgtgtcttacatgtcagcagaaaagagagagaaggggagagagagaatgagaattcatgagagtgagcaggagcgagcatgtgcatgcaagagcaggaaaaactgccttataaaaccatcagatctcgtgagaactcactgtcacgagaacagcatggaggaaactgcttccatgatccagtcacctcccacctagtccctccctcaacaagtggggttatggcgattataattcaagatgagattttggtggggacacagccacaccctatcagcaggtttgtaattagatgagtttatccactggggggtaatcctagagtacatatctgtgggtggttcttgacaagtgtgtaaggcctgggacatctggctttgaggca

SEQ ID NO: 41845 - DNA, 1050 bp, Homo sapiens
gctgtgaacattcatgtacaagtctttgtgtggacatagttttcatttctcatgtatatatacttgggagagtaattattgggttgtatggtacatttatgtttaacctcttaagaaattgccacactgttttccagagtggctgcacattactttgcatcctcaccagcagtgtttgagggcttctctttctctgcatgtttatggacagttgttacacagtaagtcctcacttaatgtcataggtaggttcttggaaaatgtgactttaagtgaaatggtgtataacaaaaacaattttaccataggttaattgatacaagagttaagtttctgtagcatatttctggtcacaaaaacatcacaaacttctaaatcaagacccaaaacacttctaaacattgaaagaattgtgagctttacatacctttcagaaagattgatacaaacaagtaagactattacttaacccaattttactcacccaatcagtgagtgacagcagttgcattggtggttggtcaaatcaaagaagaaatctttacaaagtgaaaattgtaaggagaactttctgccaccacagttaaaaaagaaatggcggtgatgtgcgcacgtagtcccagctccatgagaggctgaaataggaggatctcttgagcccaagagtttgaggctgtagtgcattatggttaagactgcatagccattgcactcttaaccatggcaacatagtgagaccctgttcctttaaaaagtagagggagagaaataataacaaatatggcaggctttctgagcacttttatatcatatcctgtgttttcatgcatttgtcctatgatcatagactttacagatttttattttctgataatttgtattcatccattcattttccaacctgctttttccagttcaggctcttggatggtgagagcctattccagcaactcagggaaccaggctggaaccagccttgaacaggacaccgtcctgttgcaggatgccctcatgcacacacgcacactcactcagacatggacaatttag

SEQ ID NO: 41846 - DNA, 1050 bp, Homo sapiens
ttaagatcaaagtatcagcagattcagtctctggttccaagatggtcccttattgctgcatcctctagggaggaggaatgtggtgtcctcctatggcagcagagcaagagagggtgaaagggcaaggtgaaaagtgatgaacctgtccttttataagggcaccaatcccacccatgagggtggcctcttatggtttactcacttcttcaaggtcccacatcttaatactgtggcaatggcagttaaatttcaacatgagttgggacaaacattcaaactgtaatagccattccccaccccatatcaattcttactaataattcacatacaaattcaccaaaagtaataattgtaggtataagttttatgatatttgcattagtttttaaacaggaccatagtagggcttctagggatgaaggtccgttggttttattgggttctcaaggatgactaggatattcaaatcctcagttaatttgcaaaaattgttcagttgctgtaatcataggagtaacataaacctgttggagtggatataagaataaagcaattctaatattcctcagactcctaaacttcataatacctgtataaggtaagaagcaagaaaagttttacagaggtttgctactttctagagtgattttagtaaatgcctatcagaggatttgaatttctttgtagtcaaatcttgatgtagttgaattaattaattttattattattattattatttgagatggtctgttgcccaggctggagtgcagtggtgtgatcttgactcactgccacgtctgcctcccaggtgcgagcaattctcccacctcagcttctcaagtagctgggattacaggcatgcaccaccatacatggctaatttttgtatttttagtagagatgtggttttgccatgttagccaggcttgtctcaaactattattattgttagccaggctggtctcaaactattattattattattattattttttgagacggagtctcactctgttgcccaggctggagtgcagtggtgcgatctcggct

SEQ ID NO: 41847 - DNA, 1075 bp, Homo sapiens
cttaaatttattcccaagccttgtacattatagttgcatcctgtcaagtgaactgtaactagcaattcaaaattcagagttacttgaatgttcttgtttctgagtatttcttgggtttatgagattgacaactctatttaggccagagtatttagtctactggaattaagcaaatacaggtcccatctattcatgtttgctatttctcaatttaaaatcctatagcatgtaagagcattagcattttatttgtctttctttcaatcctttagagttaagactcactaatttgggattagttatgactctatgaggctactactgatttttgataggaacaagaacccaggaaaggaaaaaaaggtaatttatgagctgcagccaattatctggcaaccagaatgccttgttgttaagagtctattgtaacaagtttctttgtcttcatacagcacctgttactgtgcaacaagaccgtgtttttgaacacctggcataacatgaaactgttaggttatattgtggctaatcctgaaggaagttagttgaactctggctcatttatttaaactcagtcctccagcatgacagattggtgaatgtggaagtgggtaccagttactaagtaaaacaaacatgctcagcccatctcttgatctggaccctggattttgggataaagtgaagggatgagggtaagggatgttcacttcagaagtcattggggagtttccagtgatgtcacatctgactaccctggcatggatatatagaatctcttggatcataccatcctggctctgttccagttttgtttgtttgtttgtttttgtgtttttttgttttgttttgtttttgagacggagtcttgctcggtcacccaggctggagtgcagtggtgtgatctcggctcactacaacctccacctcccgggtttaagcgattctcccgttcagtctcccgggtagctgggattacaggcacctgccatcatgctcaggtagtttttgtatttttgtagtgacggggtttcaccacgttggccaggctggtcttgaactgctgacctcaggt

SEQ ID NO: 41848 - DNA, 1084 bp, Homo sapiens
ttagagtctatctcatggaaagtactttaaatgtagaaataggtggtcatccattataattttgaagaattcaaaacagctctaatgtcttatattatggtttatggtaagttaattgctttgtgtctacaggatgatatattacatagccattaaaaattacagctatgaagtcagtaaaacaacataaggctgggcgcagtgactcatgcctgtaatcccagcactttgggaggctgaggtgggtggatcacctgagatcgggagttgagaccagcttgaccaacgtggagaaaccccatctctactaaaaatacaaaaatcagctgggcatggtggcgcatgcctgtaatcccagctactcgggaagctgaggcaggagatcacttgaacccaggaggtagagattgtggtgagccgagatcgcaccattgcactccagcctgagcaacaagagcgaaattccatctcaaaaaaaaaaaaaaaagaaaagaaaagataaagtaaggccaggcgcagtggctcacgcctgtaattctagcactttaggaggccaaggcgggcggatcatgaggtcaagagatcgagaccatccaggccgacatggtgaaaccccatctctactaaaaatacaaaaattagctgggcatggtggcggttgcctgtagtcccagctactcaggaggctgaggcaggagaatcgcttgaacctgggaggcagaggttgcagtgaaccgagatcgcaccactgcactccggcctagcgacagagcaagattctgtctgaataaataaataaataaaataaaaatacaagtgggacgtaagtagtaaggaatgcaaaaggcaaaatgatgtataagaatttaatacatcctttccctccccctcttgctccatctctgtacttgattttaagatctttgaagtcaaggatcttgacttgctcacctatgaacctatcccccaccctctcccaatgcctagcatagtacctgactcaataaatacatgttggtgcagaatatagtcataggaaaaagaaaaaggaaatccagaagcataccaaaagatcagagaagca

SEQ ID NO: 41849 - DNA, 1050 bp, Homo sapiens
aagccatcaactactgtacccttaaaacagaatattacttttcttagttcagtctttgttattattttgtgttcttcttattcagtacaattagagtaacgtgaaaatactaagttgttatgtttcaaaagtagaaaaatgccgcagggattttctttgaatgttgttcctaccgagcttgatggcgtatttaaaatggagggtttaactatttaggatgtcagttataactaatgtcatttttttgacttccttccatctctttataataaattattaactaaataataaggctttatttgtaaatattcaaaacatagtagttaatttgccacttaaaatgtcaaacatttttgagacaccaaaagcataaagaaaaatactcatcaaaaaatatgtcaagaaaatgaaaagataagccacaaactggaagaaaatattttcaaaacacatctctggaaaggatttgattcagaatatataaagaactcttaaaactcacttaaaagacaaaacaaaagttttttaatggacaaaagatttgaacaccagagtcatatggatggcaagtaactacatgaaaagagctcaacatgattagttattaggaaaatgcaaattaaaaggaaataccactacacattcactagactgcctaaaattagaagcctgggacagtgccaggatgtgaaagcaactggaaatctcatacattgttagtggaaatgcaaaaaggtacagccactttgaaaaacatttaatcacacaccatacaacctaccagttctgcatctgttgtttacccaagaaaaatgaaaacatgtgtagacctgtacacaaaagtttatgacagctttacttataaaattttaaaaaatggaaataacataaatcatgatacatccagacaatggaatactattcagtcgtaaaaaaaaaaaaaaagatgcatgcactgatacatgcaacaatatttgtgtgtctcaaaagccttgtctaacagaaagaagccaggcataaaaagctacatacattatgatccaaaaggca

SEQ ID NO: 41850 - DNA, 1035 bp, Homo sapiens
tgaaatgcctgggatcagaagtgtttgggattttggattttcttcagcttttagaatatttgcattatacttaccggttcagcatccctaatccaaaaatcccaaatgctcctatgagcatttccttagagggtcatatcatcactaaaaaatgctggatttgggagcatttcacattttggatttttggattagctgtgcttatcctgtaatgagcttctctatcgaaaatctaaagaagataataatgaattctggacatacaaagatcattggggtttttgttttggcaggcatggggtatttgacaccttacttggtagagtattccttagtaagtattgaaaaaacgggttgattgttttttagaataatttttaaagtttaagatagagagtttagagtctggattggagatctgtggtccgaagctccttgacccactttcctgtgtatggtaagcagtaggctgagtaatggccccacaaaatatccatgtcctaactcctagaatctgtgaatgttgctctgtgtggcaaaaaggaattctgccagcataattaaggattttgaagtgaggagattattctggatcatctggttgggccaaatgaatcaccagtgtcataaaagggaagtagagggaggtttgagtttggctaaagtagaggagaaggtagtatggccacagaagcagagtggtgcttctgtgatgcggccaggggccaagggatgccccaggctctagaagcgaaagaggcaaggagcacattctcccctgaagccccctcaaggaaccaaccctgttggcatcttctttttagccctttaagattcattttgatctcattgttcaattcccacctatgagtgagaatatgcggtgtttggttttttgttcttgcgatagtttactgagaatgatggtttccaatttcatccatgtccctacaaaggacatgaactcatcattttttatggctgcatagtattccatggtgtatatgtgccacattttcttaatccagtctatca

SEQ ID NO: 41851 - DNA, 1034 bp, Homo sapiens
aataagaatagcactttctaaatcttcctcccaagaaccaataaccctactttaatcatgaggaaaacatctgacaaatcccaattgagagacattgtacaaactgccagccagcagtcctcaaaactattaaggtcatcaaaaacaaggaaagtctgagaattaccatggccaactcaaggctaaagagacatgacgaaactaaatgtcatgtggcaacctggatgggatcctggaacagaaaaaggatgtcaggcaaaaagcaagcacatttgaataaagtttggaccttagttgctaatactgtatcgatattggttcattaattgtgatttgtgtaccacagtagtagatgttaacaatagggaaaaataggtatggggcaaacaagaactttctgtgctatccttataatgttaatatttctttttcattttctcttatccagggagcagattttaagagtaaaagaagatgagaatgttccatttctactggttggtaacaaatcagatttagaagataaaagacaggtttctgtagaagaggcaaaaaacagagctgagcagtggaatgttaactacgtggaaacatctgctaaaacacgagctaatgttgacaaggtaacacgtgactctttactactgcatcatgttaaaataggttggtttgctttaacttggctccattttgtctggagagtctatgaaactttcaaatagaggtttaatccttgttgatttttatcatccctgaatactcagatacatgttaggaattttagttcaccttgtccttagcttcccaagagacattaaaacatgagacactacagctaaatgtactttttttctttttaaagcactgatggcattcctgacttttttccccccttatcctattgagtctttggataatttagaaggaatcgtgtgagtcccaagattccagcactaaaccgttcttacctctgacctgacatctacccaaccccacttaagttcttaaaaataagggtacctcccaagatgaag

SEQ ID NO: 41852 - DNA, 1045 bp, Homo sapiens
agggcttcaatcaagataattaagaaatcagtcacatcacatacctattttggtggtgaaaacatttttaaaataattttttttttaacacagctcgaaacagccattgaagaaaacattttaactctactctttggctgggcacagtggctcacgcctgtaatcccagcactttgggaggccaaggtggatggattacttgaggtcgggagttcaagaccagcctggccaacatggcgaaaccccgtctctactaaaaatacaaaacatagccaagcatggtggcgtgtgcctgtagaccccaactactcgggagactgaggcagcagaatagctcgaacttgggaggcagaggttgcagtgagccgagatctcgccacgacactccagcctgggcacaaagcaagactctgtctcaaacaaaaaaactactgttttgtcagtatcagaatatgcagtgcattattgtagtcaccattctgcccaatagatcgctaaaatttattacttctgtctatctgaaactttgtgtcttttgatcaacatctccctttccctatacactcctctcccctagaccctggtaaccaccattctactccctacttctatgagtttgaattttctagattccacatataagtgagatcatgcagtatttatcttcctgtcacaaatgacataatttacttctttttttttttttaattatactttaagttttagggtacatgtgcacaacgtgcaggttagttacatatgtatacatgtgccatgttggtgtgctgcacccattaactcatcatttaacattaggtatatctcctaatgctatccctcctccctccccctaccccacaacagtccccagagtgtgatgttccccttccagtgtccatgtgttctcattgttcaattcccacctatgagtgagaacatgcggtgtttggttttttgtccttgcaatagtttgctgagaatgatggtctccagcttcatccatatccctacaaaggacatgaactcatcattttttatggctgca

SEQ ID NO: 41853 - DNA, 1023 bp, Homo sapiens
cccaagtagctgggattcaagcactaatcaccaaatccaactgtattccctcttttgaggaatgtctatttaggtcctttgcccgtttttgaaattgggttattttctttctgttgatttgagttgctaatatattttgaatattaatgtgttatcagatatgtggtttgtaggtattttctccttatccacaggttgtcactttacttcattgtttcctttgctttgcagaggctttttaatttgattccatccctttgtttatttttgtttttgttccctgtacttttgggtttataaccacgaaacctttgcccaaactaatgtcatggagcttttcttctcctttctactgtataaggtgtgagatgagagtctattttcattattctccatgtggatatccagttttcccacccctgtttatttttaagacacagggtcttgctgtgttgccaaggctggtcttggaactcctaggttcaagcagtcctcccgcctagcctctgcagtagctgggactacagacatgcaccactgtgcctcactcccatcaccatttattgaagaggctgtccttttcttactgtatgctcttggctactttgccaaaaatcagttgactataaatgggtttatttctgggttctctattgtgttccttcagttaatgtctctgtttgtatgccagtaccatactctttggattaacatagctttggaataaactttgaagtcaggtagtgggatacctccagccttgttctttttgctcaggattgctttggccatttgggatcttttgagggtttgagtattccactgaatcagagtcttgaatggggcatttaagacccccaacacagactgaaccaaactactcttacttcttaccgtatatcctgatcacaatacaaactggactgtttactattttcttatatcttagtttgtatccttccttcagtttgccagtctggcttgctcattctttcaaccttagttcaggtgggtttttttgtt

SEQ ID NO: 41854 - DNA, 1024 bp, Homo sapiens
tagcctcaggtgttatttttatctatgaagtcttcattaatctcgttcagaagtgatttttaaaaatacctttagaactgagatcactttgtgagtacttattacatccagtttacccagttggtaggcatttgagttatttccagtttttggctgttatgagcaaagctactgaacatttgagtacaggtcttttgtttttgtttctcttgaataagttaggagagggtttgctgtgttgttgtatgggaagcgaatgcttgacttcctacagtcccatggtgtttttcaaaatgtctttgccatttgcattccagtcagtagagtatgggattccagatgcctcacctcctcaataagacttatttttttttttgtcagtctttgattttagccattctagtggatgtgtattggtatctcattgtggttttatttgcaattccctaatgataagtaatgttgagtatacttccatatgtttatttgcccttcctattttttgctaagtgtctcaaaatgttcattcttcatgaattgggttgttgtcttactaaagttgtaagaattctgtgtatatgctagatacaaataaatgttttgcaaacgttttttcctcagtctgtggctcactttccctaacagtaatttccaagagcaaacgttttaaattttaatgaaaaaccagtttagcatttgtgtgatttatgctttttttttttttttttgagacagcgtgtctcactctgtcgcccaggcatgttctcagctcactgcaacctccgcctcctgggttcaagcgattctcgtgtctcagcctcctgagtggctgggattataggcatgtgccatcacgcccagctaaattttgtatttttagtagagacagggtttcaccatgttggccaggctggtctcaaactcctgacctcaacctgcttctgcctcccaaagtgctgggattacaggcgtgagccagccactgtgttcggccagatttatgcattttatgtccaaaaaaatt

SEQ ID NO: 41855 - DNA, 1047 bp, Homo sapiens
tttttaaatatcttagagatttgagtaatttattccttcaggggaattaacaaatgaacagcaaaggttaacatcacaattaatagagtaagccagctattgtcatagagtagcctagcatagtgcatctcagactttaatggatatcttgttaaaatgcagattgtggttcagtaggtctgggctggagtctgagacacagcatttctgacaagctcacaattggtgctgatgctgcctgtctatggactacactctaagaagtaaggctctagagagtatgagattgatgcattataggggagttagccttagatagaaagaggaacacctcctttcttaattgaggtggagtgtacggtggatgaaggcacaggaaatacagattaaatttgcaggcaagagacatgcctggtagtctttgtttttttctgtgaaacaataagtaaagctatgctatgagaagactaggaatgggattgtgtgagcttgatgaaagttgtgaaagtttggaatagctactaagaggaggaaaatgagtgaatttgggacatgtaataatcgctgaacagtgaggattagtttggttatggtgtctgtagaaatggagcagacacagactagtaataaagtaaaaaagactagtaacgtagatttttttctttcttttttttcttttttttttttttttgagacagagttttcgctcttgttgcccaggctggagtgcaatggcatgatctcggttcaccgcaacctccgcctcccaggttcaagcgattctcctgcctcagcctcccaagtggctgggattacaggcatgcgccaccacacccgtctgattttgtatttttagtagagacagggtttctccatgttggtcaggttggtctcgaacttctgccctcaggtgatctgcccatctcggcttcccaaagtgctgtgattacaggtctgagccaccacacgtggccaagagattgcttatttttttaagatgatatggtactctagggaagtggtaatgaggtctaaagtagaacagtg

SEQ ID NO: 41856 - DNA, 1034 bp, Homo sapiens
ttcacgaaataaaaatttaaaaaaattttgtgggtgcatagtagatgtatatatttatgggttacatgagatattttgatacaggcatgcatgcatattagtcatgtcagggtaaatggggcatccttttatcctttgtgttacaagcatttatcctttgtgttacagacaatccaactatcctcttatggttttttgtaaatgtacacttaaattatttttgactgttggctgggtgtggtggttcacacctgtaatcccagcactttgggaggccgaggcaggcagatcacctgaggtcaggagttcgagaccagcctggctaacatggtgaaaccctgtctctactaaaaatacaaatactagccaggcatggtgcaggcatgcctgtagtatcagctatcaggaggctgaggcaggagaatcgcttgaacccaggaggcaggataatcgcttgaacccggtaggcaaaggctgcaatgagccgagattgcaccactgcactccagccagggctggagcgagactctgactaaaaacaaaaaaaaaaagaaaaaaaatgtgactatagtcagcctattgtgctagcaaatagtaggtcaccttcattctttgtattttttgtgcccattaaccctcccccgaccctccaccatgtcactacccctccagcctctggtaaccgtccttctactctctatctccatgagttgaattgttttaatttttagctcccacaaataagtgagaacatgcaaagtttgcctttctgtgcctcacttattttacgtaacatgatgacctctagttccatccatgctgttgcaagtgacgggatctcattttctttttatggctgaatagtactagattgtttatatgtaccacattttctttatccattcatctgttgatggacacttaggttacttccaaatcttggctaatgtgaatagtgctgcaataaacatgggagtgcaggtatctctttagtattattgatttcctttctttggggtatgtacctaggagtg

SEQ ID NO: 41857 - DNA, 1110 bp, Homo sapiens
gaaatttttatttttcaaaacttcaaaaatgtaactttgaaattaagtaaatttctattttatttcataaacttgaattagcactgtctttgtaaattccaaactgaacctttctcaattactgattaaatcttaattatttctcaccagacggtctggaaaatcccgaagcagaagcccgtattcatctaggcattcaagatctcgtagcaggcacagattgtctagatccagaagtcgtcattctagtatttctcctagcacactaactctgaagagtagcctggcagctgaattgaacaagaataaaaaagcacgagcagcagaggcagcaagagccgcagaagcagcgaaagctgcagaagcaactaaggctgctgaggctgctgccaaggctgcaaaagcttcaaacacttctacacctaccaaggggaacacggaaactagtgccagtgcatcacaaacaaaccatgtgaaggatgtgaagaaaattaaaattgaacatgcaccttctccctcaagtggtggaactttaaaaaatgacaaagcaaaaacaaagccacctcttcaggtaacgaaggtggaaaataatttgattgtagataaagccaccaagaaagcagtcatagttggaaaggagagtaaatctgctgctacaaaggaggaatcagtatctcttaaagagaaaaccaaaccacttacaccaagcataggagccaaggagaaggagcaacatgtagctttagtcacctctacattaccaccgttacctttgcctcccatgctgcctgaagataaagaagctgataggtaagtgcaaaaagtatttgtcaataactgttcaaagaaaaaatgtaagtctgaagtgagaaatgagttgacctcccctaaccccctcgaaacaactttagtgaaaaagactacaagtgaatgaattttcttgattatatgcatcttaaaatgaagcacattgcatacaagatggcaaaattaaagtttatactaagacattcagggaaaaattgccattgtcttgggatacaatgaatatttcaatatgattttgggtattagaaatgccagtattctctttggtttagttttccttga

SEQ ID NO: 41858 - DNA, 1027 bp, Homo sapiens
atagcttaatgtgtttgttgttaaatttccagtgccttacaaatacctagcacatggaagctcacaaccaatatttgctgaatggagggagaggcaaattgagaagtgggctgtgtaatatattactttaaaaataaaactgcaggcctggcatggtggctcacgcctgtaatcccagctctctgggaggccgaggcaggtggatcatctgaggtcgggagtacaagaccagcctggccaacatggtgaaaccccatctctactagaaatacaaaaaaattagccgggcatggtggcacgcacctgtagtcccagctactcaggaggctgaggcaggagaatcgcttgaactcgggagatggaggttgcactccgtctggatcatgccactgcactccagcctgggtgacaaagcaagactgtcttaaagaaacaaaacaaaactacaaaccaatttgttttaaagcatgttttttctctgttaaagaaccttccagtgagtaacacaggacataaatttactatgataattaagtcgtttttatcagatggtattattaagttgtttttatcaagtggtattaaaggattcatttgttttacagtattattcaacacgaataggaggataattacaattacattatttacattgataatatcttcagtaatttctgatcacagcagtgtagttgcaataaattttttcattatgggactcaactgctatgaaagtatgtgaagtccaaattttattatcattatgagattctctttcaacatgtcacattatattagatgacagactttgtcatatcagggaaatttaaaataaattgccaagttaagatatactttaaaactcagagctctttatgcattcataaaaagtacaaagctaatggagtttaaatttcagctgtaattctagaaagctggaatcttaaaaaaattagaagaataattgtccaatttagaaaaattaattaaccctgaaaagggtcaaagctgaattagctgttgcttg

SEQ ID NO: 41859 - DNA, 1047 bp, Homo sapiens
ttctgtaatagtactttcatataacttgtatttttgctttggtttgtttttgttttgagacggagtctcgctctgtcacccaggctggagtgcagtggtatgatcttggctcactgcgacctctgcctcccgggttcaagtgattctcctgtctcagcccctgaatagctgggattacagatgtccgccaccacacccagctaatttttttctatttttagtagagacggggtttcaccatgttggccagcctggttttgaactcttgacctcaagtgatccacccacctcggcctcccaaagtgcaaggattacaggcatgaaccaccgcgcccagccataacttgtattttcatataacttgtcatgttttcatatcttattcttactgtatttctgagagcagggactcaattttattctttgtgttcattgtgtgcagcacacagttgattatcattaaattttgagtaagtgaatgaatgaaatggagaggtaggaatgttctgtggaataggtggaatgttaaaggtgggtgcagtttggataggtatagtggagggcattctaattattagtgtcatgacttgtttttacaagacaatgaaagatcggcatatctcctaaagaatacctagcttccaaattatttaccttgtgtttttctaggtctgaatttatattcccgcagtttagaactgctgatatctcctgaggtttgagaagaaagcaacattgatttgttcattctttctttccacaaatgtttattgtgctagtttctagatagatctgggctggccagtgcagtagccactagccacatgtagctatttaagttaattagtattacataaaatcaaaagtttagttctttaactgcactattcatgttccaagtgctctgtagctacgtgtagctactggctacattttggacaatgaagttacagaacattttcatcatcttagcattgaataatgtccatctaaatactggggatattaaacaaacaaacatctggtccctgactcaacctagtttct

SEQ ID NO: 41860 - DNA, 1024 bp, Homo sapiens
aatacagatattaatgttttatgtgtttcatatgtcagataattttcccatttatattgcttgccctttgtttttctttgttattttaaatctttaaatatggtcacatctgtctgtttggtggcttttttttaattttggaagggtggtttctctcatgcttaggaaggctgaatccttggcagaataataggaatttttttatattaaaaaaaattctattatagtttgaaaaagtattcaggtatcttaatcttttatttttatcttacagtgttctgccatctttagcctgtatgaaattcccacgttcttttttttttttaaattcccacatgttctgaggattcctgtttcactgatgtttttgtatgtcctgccaccatattatatcgctttaattatcaccaccctatagcatattttagtttctggtggataaagatcgccttctctttcccctttaaaaaaaaagattttatttttgtgcattttagatggatatgaggtctgaaaacatactgatggaaatttggctggaattacattgatgttagtgtgggaggaagaatgctttttaaaaaattggtcagggtgtgggatcattgacaagcatattaatgtaatgctggagagtaaaaattgttagagagtaattagggatgtagtatagaacctggtgtgtgctaaatactagataaacattttatgttactattataataatcattatttcttaaaatataatgtgttctttaattctgcaattgtatttttggaaacataagggaagtagtcatacccaagagaaaacaagtcattatatcagaaagacacgtgcatgtgtgtgtttattgcagcacaattcacaattgcaaagatatggaaccaacctaagtgcccatcagctgaggagtggataaagaaaatgtggtttgtatacaccatggaatactactcagccataaaaaagaatgagagtgtcttttgctgcaacttggatggaactggaggccattattct

SEQ ID NO: 41861 - DNA, 1040 bp, Homo sapiens
ctcctttactcttcagttttgaagctcttcctttccctcctgctgttcccccaatgtatttcgttgcctaagaaaggctaaactggcatgctactcctaaaatgttaacagtgattgcatttgtcttagaatgttattgaggttacacatacttcttgcaacatttccaactcttataacagacactacattaaatgatggcagttcaatggaatattcataattaagctaaataaaagttgcttaaacataaatatgcttttaatggtaatattatagctataggtgaaatgctttgtaggtaaaatttttaaaaagcaaggtagcttttaaggaatagattgctttaaatatattaaaaagtaggggtgggcacggtggctcacgcccataatcccagcactttgggaggccaaggtgggtggatcacaaggtcaagagatggagaccatcctggccaacatggtgaaacaccatctctaccaaaaatacaaaaattagcagggcgtggtagtgggtgcctgtagtcccagctacttgggaggctgaggcaggagaatcacttgaacgcaggaggcagaggttgcagtgagctgagattgcgccactgcactccagcctggtgacagagcgagattccatctcagagcaaacaaacgtatatatatatatatatatacacacacacacacacacacacacacacataaagttttaagtctgaaattcccaaagatcagttcatacgctttcttagaaatagtaattttgactgggcgcggtggctcacgcctgtaatcccagcactttgggaggctgaggcgggtggatcacttgaggtcaggagtttgagaccagcctgaccaacatggtgaaaccccatctctactaaaaatacaaaaattagccggcttcgtgttgcatgcctgtagttccagctacttgggaggctgaggcaggagaatcgcttgaatccaagaggtgtaggttgcggtgagctgagatcctgccaccgcactccagcctgggtgatagagact

SEQ ID NO: 41862 - DNA, 1034 bp, Homo sapiens
tcctctgtaagaagtataaatgagtttactatgaccacagtaatgcaaatatatataaatatatataataatgcaaatatacataaagagaaaattaatttcccattttcttttgccactttttgccaaatccagtgttaacagcttagtatatatcattgatactatattacaaaaaaaggaaaacagaaatggaaaaatatattagatatatggttgacccttgaacatcatgggtttgagctgcatgggttcacttatatgcagatttttaaaataaatatattggaaaatttttttttttggagatttgcaacaatttgagaaaactcagatgaaccatgtagcctagaattttaaaaaattaagaaaaaggctgggcgtggtggctcacacctgtaatcccagcactttgggaggccgaggcaagtggatcacttgaggtcaggagttcaagaccagcctggccaacatggcgaaaccccatctctaccaaaaaatacaaaaatcattcgatcgtggtgatggacgcctgtagccccagctacttgggaggctgaggcaggagaatcacttgaaccgggaggcagaagttgcagtgagccgagatcgtgccactgcacaccagcctaggtgacagcaagactgtgtggaaaaaaaaaaaatttagtccgggtgcagtggctcacccccgtaatcccagcactttgggaggctgaggtgggcggatcacaaggtcaagagattgagatcatcctggccaacatggtgaaaccccgtctctactaaaaatacaaaaattagctgggcgtgatggcgcgcgcctgtagtttcagtttctcgggaggctgagagagagagagagagagagaaaagattctttttttttttcttttttttgagacagcgtctcgctctgttgcccaggctggagtacagtgctgtgatcttggctcaccacaacctctgcctcccgggttcaagcgattctcctgcctcagcctcccgcgtagctgggactacaggcttgcacc

SEQ ID NO: 41863 - DNA, 1218 bp, Homo sapiens
agacttggaagtcacatcattcactctccaatattctgttggtcacacagaccgtccttgaatcactgtggcgtggcatggatgccagatagtgaggatcatttaggaccattttggaggcttgctactgtagatgatttcagtttcaatttcagagtacaggatttatacatctttgaccttatctttcttgtaaactaaaagccctggttcctaaaatattaacatagcttgctttgttctaccatatacatgtaataatttcaaagtaacaatgctgatattaattactaaaaagactactgaatgcagtttaagatttcttagtgattctttttgtccttaaaatataccccccagctgtatatagtcagtatactctattgtagacagtttatgcaaccaatttgataaacataaatccacctaaatgtggatatgtttccagttttttagggattgctttttttccctttttgatttaataatgtattttaattatataaaacatttacttggtttcaaactctaaactataaaacaggtacattcagaatagtgtcacttccattcttctttttcttgttctctcccttacccatgggtaactattttaaatgtttgtttcatcctccaatgtttcttttgtacatattcacattcctttttttatatataaaaaaaggtagcaatgttgtaagtgctctgctgtacctttttcttttcatttaaccatatatgctgaagtttactccatgttagtagacaaaaatcattttgttagtagacaaaaatcacgcattgcttagaggcactgcactgtgtgggtatgctatagtttattcagctagtttcctaatgatagatattttcattgtgtaaataatgctgcattgaatagccctatgcatacatcattttgtattttggccagtgaatttttggtacaagttcctagaattgggattgttaagtcaaagggaaatactgaatgtgatttagctagatattgccaaatttctcttcagagggcttttttttgtgttatttctactaccaatgtatgaaagtgtttcttacagctttgtcagtagactctggagttctacttttagatttttgtcaatttagtatcttggtcaagttttagtttgggaaattaattaatttatatttattttgagacggagtttcgctcttgttgcccaggctggagtg

SEQ ID NO: 41864 - DNA, 1033 bp, Homo sapiens
aacagaattaaattacatgtttattgaggcatttagaagtcgcctaacatctttcttggcctgtactctttttttttttttttttaattaaaagcagttcttttaccaacttttaattttttgataaactatattgactttattcagcttctaagagacaatttgacgtctaaaacattaatcacacctagaaactatacaatatggagaacagcagggtgattttttttttttttaaaatcataactgtttttttgcggggagaagaaaatagattagatgttttccttgggatttatttattaatattattaagtccagagagaaagatgaatgttattaaagtaacaaagtaacacttcttttcaaggattaattcttcctctaccagccttttattgttaaaaattgtgaatttatggaaaggttgtaggaataagtttctaatgtattaattattctcattcttaggtgcattttatctggtgtttgaatatatggaccatgatctgatgggactactggaatcaggcttggttcattttaatgaaaatcacataaagtcatttatgagacagctcatggagggtctggattattgtcataagaagaactttttgcatagagatattaaatgttccaatatccttctaaataataggtatgggtatgaactttatatatatttaaaatgagttttaccatggacatgtacatggagagaatagactggaaaccgtagcggcggggaatgtcgggggtggtgagcgttgaaagttacctattaggtacagtgtccaacgtttgggtgatgggtaccccagaagcctaacccctactattacacttgtaatacccatgtcaccaacaaacacatatacccccgaatctaaaatttttaaaataaagatacggtgttacatgatgttgcaccttgattatgttaaaaaagatttaaaatttagtttactttatacaaactatgtaaaaataatcaggccagccacagtggctcacgcctgtaatcccagca

SEQ ID NO: 41865 - DNA, 1023 bp, Homo sapiens
ttgaactcctgacctcaggtgatccacccaccttggccttccaaagtgctgggattacaggggtcagccacggcacctggcctgactttaaattttaatacttggttaatcacttaaggtttaaggaaaaacaaaagaattgtttgattttgttttctaatgtgttactttcctggcagacaaagaaatagtgtctgccttcttttaaaaaatattaatgagatttacaaatgaaagtatttagcagaaggactggccttggtgtctcttgcctgtaatcctagcactttggaaggccaagatgtggagattacttgagcctagaagttcgagtccagcctgggcaacatagtgagatctctattttaaaaaaagtagaaattgaaatgcacaatagttaacgttgagaccattatttttgggtctttacaaagtttagtttcttgccatccaataacaacttattgaagttactaaattttgttttccaatttaatggcagaaggactgtgtgtgtgtgtgtgtgtgtgtgtgtgtgtgtgtgtgtgttttcctgggttattgagtttattgcttggaattgatctaattatgtaaagtggagtggttcatttcatttttagatttttcttttttgtatgtacacatttatttgataacatctaagaagtcgactatatgtttttcagtcctgtttctttttcattgtgagttaatttgctttttgtgcaaatactgggtatagacacaccacaagaatgtaatttgttttttaatccatgaaagaaaaaagcatcgtatatgtagtgtcacatcagtttgcttcttctttgtgtgatctaaacaagatcatctctacgatgttgacagttggtagccaaatctaatagcgcaagtttgaaattcatttttgaggattctggattttttttttttttttttttgagacagagtctttcttgctctgtcaaccaggctggggtgcagtggtgtcatctaggttcactgcaacctctgcctcct

SEQ ID NO: 41866 - DNA, 1044 bp, Homo sapiens
cattaataatgttagaaaaacctaatcttaatttactattaaaaatattcatcttattctgtcctcttttcacagtttttaccaaagtcaaatgtttttgctagctttggagcactgttaactatagtcctatctgtggtaatgctataatgcccaaattgatagttttataatgctagtgcttaagttatttggagaaatttggctggatgggggcagagcaggtcaggcagatcttacactgcctggaactgcaaatctataggtggcaagagggaattgctttctaaattgaatgctccatttccttaacaagactggtccaggaccaagccaagcttaggtaaatgggcttggaatacagcctttctggggaatttgctatggcttttgagtccttgtgatttggaaaacatctggatataaagagatgtttatagctgatctgaatatatatgtgatctccctgaagtaagtaactacagatcagccgaagaacctcctctgactacttaggattctcttcaagcgtgtcaatcagctagaacgtgaccattctctgagcgttgaacactttacattgccagataatttgtgctgttttcgtcaaacctgaccctaatataacttgactaaataatcttgtctgtggcaaataaagaggtagcagtatatttatgtcctcttttcggaaggtgataaaggaattatttgataaagtacgatatgtattgctactttgcagagtagacctcaagtagatacttgagtagacactctgcatttgtgtgcttttttctattcacacactacagtgggtatgtgaatcagtgaaaaattgccaaaaatatgatcaattgaaaacttttgttaggtggtctttatttgaactatatcttgtcatccattagtaatttagcaagatttgatcagaaccagtcaacgctctttaaatcagttaatcccattaaaggtttttatggaaaggaaaaacagtgctcaacaattgagttgatactaaagctttgctttgaccaaattgca

SEQ ID NO: 41867 - DNA, 1032 bp, Homo sapiens
ataccagtaaactactttttttttttgagacggagtcttgctctgtcacccagactggagtgcagtgacgctatcttggctcactgcaagctctgcctcccgggttcacatcattctcctgcctcagcttcctgagtagctggggctatgggcacccgtcaccacgcctggttaatttttttttagtacagatggggtttcaccgtgttagccaggatggtctcgatctcctgacctcgtgatctgccagcctcggcctcccagagtgctgggattacaggcgtgagccaccgtgcccagcctatcagtcaactactttttgtttttatcttcatatattaagggaatttttagttaaacaggttgccctcacatacattttatgatcttatattagatacctttggatgtctgtattttttagtaggcagatgaaagtgtttttagttaggattatagggattgctttagtaaaataatatttcctcagagaatctgtcttactccaacaaatactaactctaaagactgttttctgtgttttttagtcggccgtatactaacaaggtaattactttatggtaccgtccacctgaactgctactgggagaagaacgatacacaccagccattgatgtatggagctgtgggtaagatagccttatttactggtttattttacttgaaacttttggtagtgaattaaaatagatcatttggtaatgacgggtattttttccattagctgtatccttggcgaactcttcactaaaaaacctatatttcaagcaaatcaggaacttgcacaactagaattaataaggtaagctgctgattataatattggtgggaattgggagagtgtcatactccacaggaaatttaaactctcccaagtttgtcttttcaggaagagaacaacatggttctctggagggcttatgactgctaaatggaggacaaactgaaatgtaggcactttgatacttgttccagtgaaattaaggatatcaaagcccctgggtgggtgca

SEQ ID NO: 41868 - DNA, 1050 bp, Homo sapiens
cttgccaacatggtgaatccctgtctctactaaaaatacaaaaattacctgggcgcagtggtgtgtgcctgtaatcccagctacttggaaggctgaggcaggaacatcctgcctcaggtagcttgaacctgggaggcagaggttgcagtgagtcgagattgtgccactgcactccagcctgggtgacagagtgagactatgtctcagaaaaaaaaaaaaaaaaaaaaaaaaggaaacagttgatttggagataaagaaatggaaaagcagcatgaatagttacagaaggctatattgagattgatctcatttaggtaaaacaaaagactcaaattgttaatctgaacatggactttcaagaagactagggaggagaaattttcattttctagtttatatatttcagcatgtttttattttgttaagatacttataattttataaagagattgaccgggcacagtggctcacacctgtaatctcagcactttggaaggccaaggcaggtggatcactagagcccaggagtttgagaccagcctgggcaacgtggccaaaccccgtctctacaaaaaatacaaaaattaggtgggtgtggtagcacacacctatagcctgagctattgggaggctgcggtacaaggatcacccgaacccaagggaggtcgaggctacagtgaactgtgattgcaccactgccctttagtctgggcagcagagcgagaccttgtctcaaaaaaacagaaataaaacaacaaaacataaaaagatgcttcaattttgatttcatagcattaatttcttttcagacatgaagaaaatgaagtttctgataaacaaatctgactataatgaggcaacggagtataccgaaaagtgtgtggcctttagaatcttacagggttgggttctaatgccagctcagctacttcctgcgcttatggtttagggtcccatatgctcttaagtttttttcttcaaaagtaaaagaggactgataacatgcttagggttgtgagaattaaatgtaaataagttttcagtacatat

SEQ ID NO: 41869 - DNA, 1051 bp, Homo sapiens
aagccaaagaaaaatagattatctgtaaaggcaaagcaagccctgaaggaagtgggacaataaggatgatttttattggaagagttttacagagccattctatgaagtcttcaagaactatttggggtgggggcataactttgttgctatatagtaactgtagcattttttgttaagaaatgccatttacaatttaattcctttttttttttcagtctccctttatggcaagattgtcatgagttatggagtaaaaagcgaagaagacagaagcagatgggcatgactgatgatgtttccacaattaaagcccccaggaaggacttgtctctgggcttggatgacagcagaaccaacacaccccagggtgtgctgccatcttcacagctgaaatctcagggcagctcaaatgtggcacctggtcagtaatgcttccatgggttggttttcttcacattgttttgcagttaattctgatcatattgctctaatgttaaagcatcttgtggctaacaatgaaaattaacatttattcactgaactagacatttctttgtgccagtacagaagtttcattgctattggcaccacaattttaagtaatcttaaggtaacttataaagaagcatcaaattacctgactggcaagtcctcggatttctgtatttcctttttactcttagtgcaggagtgagtaggtcttttactgacactactctcagtgaggctcagcattcaatgtctatagatgcttaagcagtaggaagaaaggtataagaaaacagccaaaaatcataatgagagctctttcataccatttatagcgtcctcatgtcactcctaatgttataatttctctggttatattaaagaatcttaaagattggggccaggcatgctggctcacgcctgtaatcctagcactttgggagactgaggcggatggatcacctgagatcaggagttcgagactagcctggccaacatcgcgaaaccccgtctctactaaaaatacaaaaattagccgggcgtggtggcacacacctgtaat

SEQ ID NO: 41870 - DNA, 1077 bp, Homo sapiens
aaaatattgactcaaattctgtagctatttgattttggggtttaaattgatctggtattccctgtgggactccaattgcatttaaatagatgtgagagtcgaaagacccataagaggcttcccttgctttatgacgtctggtttttccttcctctgcttgatgaaaggccagagtaaaagggatagccgattggactagagcataaatactgctctaattatttggcagagtgtccagtaaaggtcctccataatcccaccatacatccgcttagggatgaataagggcagactgataggtcagctcttggaagtgccacacttcactgcatcctgttaagtctccaaggaatgccaaatttttcccttggtcgttggagacatgaggtaaaattgattttggaaaatggaggctggatggcccttgggggctgacccgcagcatgctggactttgggatatagcagagagagagtgtggcacaacttgttactctaggctgtagaatcctggaaaagagctaccatgcagcccatgcctggttgactggatgaccaccctagtggaaaggggacagtctgggcctctggcctgcggtgcgcacaagcataacaattgcttttgtttaacgtgcagacggaatatttgatccattccaaccaggcatttgcatcttggtatcttgtcttaattgccgaagtttgttttaagtctttaacttgtatgatagctatcttggtcttgtcgttagatggaggagtggcaattgttcagttgtgagaggttttggaagaaggcttagaggaaggtgcaggcactgggggatcaaataaacacatttcaaagaatccaatagggtctgtccctgaaacctcagcccccataccataaaactggcttaaagaagggaactggcttagaaaaggggaagaagtttgagggttcgagataataacctgtattggaatgcactggtttagctgacccccagttgggggttggctgtccctctagtaaaatgaatgtatggttttaggaaattacaaaaactggttggggcagtccatccttgctctt

SEQ ID NO: 41871 - DNA, 1084 bp, Homo sapiens
aatcctctggttgtgaatagagcagcaaacaacatcacatctttattgaccaagagccaaattaaagaaggctaaccatccttgcccatagatgctgttcaatgggataaatgcaatatgccattaagaactggctctgtggatattattgtggcagatttgccatttggaaaaaagatgggatccaagaagagaaactggaaccttcatccaccttgcctatgggagatgagttgcgtctgtgtacacctacaacaggccaagctgtacgatgtactcaggacgcgaaatgctttaccaaagcattatctggcatgtgatgtgtatggtgaaaagtggatacagttcgggtgaacattgggggtctttgtgctgcagtttatattttgaaatgtacacctcaagcttttgttcatccttcagaacaagatggagaaacaggagctctggtaatgcaaagattgaagctaactaatagtactcgtacttcccaacactggaaatgtcagcatgaagaacttgctttgagagcaaaatagtatttaaaaaagtgcagtgtgcactctttaaacctgttcagagctcttcactctagttggcaaaagatgtgaatgtaatgtaatgtaatgggattgaaaaagtcttatgagaaagcagagcttttccttggcactgttttgtgttttgggcaattagtattttgcttaaaatgcttttaaagatgcctagtgaaaagcctagtaaaacgctctgagatttgggtgtagaacgttttattttcaggcttaaaactttttttttaatattatagttttttgtagagataggggtctcaccatgttgcccaggctggtcttgaactcctgggctcaagcaatcctcccaaagttttgggattacaggtgtgagccacaacacctgacctattttcaggctttacggcctgttttctattttgccaagcggaaagctactctggcctaaaggaaaggcagagaacataattacatcttaggccacatttcattgcctgcgtatctgtgctattcagttgctcaaattctttaactctagaagtgaagta

SEQ ID NO: 41872 - DNA, 1034 bp, Homo sapiens
gggctgaagtgatcttcctgcatcggcctcccaaagtgttgggattatagacgtgagccaccatgcctggcagttatttcgtttaaagtattaaaatgttcagtccagtctaatatcaaaacctcagactcttgtccagtttatgacgtctccttttccccaacttcaggctactttcttgggaatgtgaagaggatgtgtgtgtgtttgtattacaggtgcacatatgttgcatgtgtgtgtgtttgtattatgtatgcacatgcatgcatgtgtctgcatgtctatgtgtttcggaagagcctagtcagtttcttcattatccatcttttcctattgttagctgctatttgtggtttttttcagaatcaggccctcccagggaagggaagcaagttaaagggtgcaataagggtatgacttgactggtgtagttgtaacctgcagtggagccttctgtgtgcctgaagttctgtaggtggctctctttatggggagttttgtagtctcctcagagacctcagattgtagttctcccacttcagtccctgttttttgtggttgtctatacacagagtctatctgttatgatcaccttgtcctataggcagccctcatgggtagaattccttttcagataaactccttctgctttcctcatggtgaacttggcccatggggaaaaatcctccctcctccttggccattggcaggtgtacagtttattccgaactcttagctctgttgcttttagccgatgtagccataaccccttgcctttggtattctttcagacacatgccacaggtgcttaggtaattccaaattcccagaattcccaaattcccttagcttgtatcaaggtctctgacgcttttttggaagtctctcttgtgtggcttaagttaaggggaaaacagcttgctcctctcttatgacagaatgagatgcctagcatacaataacaactctttccaaggaaattcagctgaaggttttatttagcttttcaccttttctcacatatcctcaaa

SEQ ID NO: 41873 - DNA, 1027 bp, Homo sapiens
ggccaggctggtttcaaactcctgacctcaagtgatccgcctgctttggcctctcaaagtgctaggattacaggtgtgagccaccgcacctggccatgaacttttttttttattttaaatttttataggtacgtagtagacatatatatatatatatatattttttttttttttttttttttttttttttttttgagatggagtctcgctctgtcacccaggctggagtgcagcggcatgatctcggctcactgcaagccctgcctcccgggttcatgccattctcctgtctcagcctcccgagtagctgggactacaggggcccaccaccacgcccggctaattttttgtatttttagtagagacagggtttcactgtgttagccagatggtctcgatctcctgacctcgtgatccacctgcctcggcctcccaaagtgctgggattacaggcgtgagccactgtgcccggcatagtagatatatatttatggggcatgtaagattttttgatagaggcatacagtatataataatcacatcaggataaatggggtatccatcacctcaagcatttatcatttctttgcattacaaacattacaagtcttgctctgttgcccaggctggagtgcagtggtgcgattatggctcactgcagtctgggctgaatcgatcctcccatgtcagcctcctgaatagctggaactacaagcacatgccatcacgctcagctaatttttgtagtttttgtagagatggggtctctccatgatgcccaggctgggttcgattattattatttttttaaatatagacaccttggatagacactactcagtttaagatacagcatatttccatcactccagaaagtttctttttctattcccaagcaatactacctcctccagagataaccactatttttgacttctgatactatatgctagcttaacttctttaagtagaaccatatagcatgttcttttttttttttctttgagatggagtcttgctttgtcat

SEQ ID NO: 41874 - DNA, 1081 bp, Homo sapiens
tttaagctgtaaggaacctgaggtagggtaagcaactgcataaaagttgcacatccaataagtttggaagccatgaaggtttcatgggtgtgtaatctgtgcagtcatgggtagccctgggcttagttaaatgttctgctgtcactgtcttgaatttgttaataacatccacaggaggccctatagtttttatttacaccagtactcacaaattatgtagcaggtcgtggagttgagactctacttaagtctcctgatttttacctaggctgctttactctaatgtataaagagtattgtattatttagatgagtatcatagagtttaattcacttctagcatctaactagtggttcaccatgtgaaggtgtgtatttccctgggagtaagggtggggaaggtggaatcaccatagggctgcttcaaagtgagggcacagtgacggcaaactcatgcatatacacacaggtatatagtcaatcatttttggggtgtgcatgtgtgtgtgtgtgtgtgtgtgtgtctgtctgtctgtctgtgtctgtgtctatttttattgtctctgtttctccctgagactaaattctatgactgctggcacaatgtttttgtgtaccatggtatcctcaattcccagcccagcctttgtcaaagattggcttttccaatcctttgaggtcaatgtgagaactactgttaccagtgggaatgtctcgtaacccttaggtttgccaaggaagatgtgaaaagatagtaaatcattagaattatgataagtactcgataaacagctaatgatgagattatttgcttttggcaaaaaaagtagcagtgatttggcctattgtactacagttaactcagattgctaaaattagtgtatttcagtctcattaactatctttctttttttctttttctgtcgcccaggctggagtgcagtgatgcgatctcagctcactgcaacttctgactcctaggttgagcaattcttgtgcctcagcctcccgagtaactgggactacaggcgtgtgtcaaaactcctggctaattttttttttttgtattttttggtagaga

SEQ ID NO: 41875 - DNA, 1123 bp, Homo sapiens
ccagctatttaaaaagttttttttagagacagggtctcatcatcttgcccaggctggtcttgaactcctggactcaagtgatcttcccaccttcacctcccaaagtgctaagattacagctgtgagccattgctcgcagacttagactgttattatcaatgactatagctttgcctttatactcaactggcaaaatcccagtgcggatagacttaatagttcatctattcctggcctgcagtcaagtggtggatatggccagaagaaaatatgctactttgctgatgatctccctcccaatccatggccatctctctcaagtggcccctcgggcttacccagaaatcctgccacctttacctaggtaatttattttctccccctctgagatgactacctcacatcttctcttctctaagatctttccatctctcctcatccttaaagactttgtctcttattccacttaaaattaatgcaatcaaaagagaactaccttatcttttctctactgtacctcccaaactcttgcatttgaacctatatatagatcactgcattccttcctgtcacaagagaggaagcgtccctttccatattttgcctaagggcattgcatctgcattttatgtcctctatcacctgtattatacttcataggataagcagatgatcatatatataaataaataaataaataaatatatatatatttattttttgagacagagtcttgctctgttgcccaggttggagtgcagtggcgcaatctcagctcacttcaacctccacctcccaagttcaagcaattcttgtgcttcagcctcccaagtagctgggattacagatatacgtcaccatgccaggctaatttttgtatttttaatagagatggggtttcaccatgtttgccagactggtcttgaactcccaacctcaggtgatccacctgcctcggcctcccaaagtgctgggattacaggcatgagccaccacgcccagccagatcatagttttgaccttaaaaagcccaccaacctttctttgattcccaagcaatgtctttttcaaatcctatcctatttctatatgtgctactatacaggactcttccaaaaaattt

SEQ ID NO: 41876 - DNA, 1049 bp, Homo sapiens
tgtattcttaatatatgtgcagaactaatgtgtttttatattttctatgcctaacatatttggctaaaattatctaaaagaatcaaaggccattttgaatattcagtcattagttctagtaatattatcttaatcactataataattatcagatgtaacatttatcaatgattactgtgttattaaatatcttacatatattaaatcaatatttaccacagcccttaaaatagttattgctattatctccactttcacatgtggaaactgaggcatagagagtttagataacttgtgcagggtcacaagtccatggtataactgggattctaactgaggcagggggacttgagctcattgtactgtataggcagatgatacaatgctgcatgtttagtttcattttctatctttatcctacttttgagaaataattatgtgaccttttcctctacataatttcccctttaggactgccaagagcaattcaagaggtataaacaattctgttgtttactcatcacagggatccttaattatgacttaaaagcaaatttccttcagaaatcaggttgtacatcttttgaataaatcctttggtcgcatatgctaaaatggtattaggttcataagtaagtgatggtatagtgaagcaactctacctattaacagttccatctatttaatgagaacagtccttgagcaatataggagttggggatggttttagctgttgtgagactcatcgtttctagttttcaacctgtatttctggagtttggtagtgtggggacagagctgggatgggaaggaatatttgggacatgaggaggagtattccagggcctaaggagggggatagcctgggtagaaaccaagtagacagttttctaagtattcacaccccatttcaaccagaacaattccaccttctggtagttttttgaaacagggattccactgcttaaaactcattacttgtcctagatcgatcatcttgtactgaaggactttattgaacaagaaagtgggttttgtacatgtgtatg

SEQ ID NO: 41877 - DNA, 1093 bp, Homo sapiens
gcagaatgctggaaggttctgaaaacaaaagtacagttgaagcaaaaccattgtgcctgtgcattcttttggttttgatgggcaaatattaaaaaaaaagaatggggtatgataaggacctggtttcagatcctgactcagtccttaaagggatgttctgaggaccaaattaaatacatgtgaatgtgcctgcacatgtggtgcagtggtacatgtcaagtcttgaatacagcatctcagaatggccatgatgaagtcatcctcctagttggaggaaattaatcaatctctcacctggcaggggaagcccctgagaaagtctatggcagatactgatccatcttctctccaactcagccaaagggagacaacttgatttttgaacctctctaattgtcattagtgacctagtagaaagctaactttctgtaattcatagaacaacagaatacagggacgaaaggggacttgagagattactcagaaacctctttcttatggataagtatgagcaatatataggaaaaatcaaagctcagaaaagcaaatgagagacaaattaccagtttgtgaactctgatctttcaatagagtaatcaaccataatatttcctccaggcaaagctacacacccctgtttagttcgtatgattaaatgttgattaatttagagtagggggctctgtggaaagtgcatagaatacttggtatttcatttttgagtctttaaggaaatatctgttatcaatgttgacattttccatttccagcatattagaagttaattgaaggctccaatatcctaaaattactctgtcaaatttctaaacgtgtactttttttttttttgaggcagagtcttgctctgttgcctaggctggagtgcagtggcgtgatcttgactcactgcaacctctgtctcccaggttcaagatattatcctgcctcagcctcccaagtagctgggattacaggcgcctgcccccatgcctggctaatttttgtatttttagtagagatggggtttcaccatgttggtcaggcaggtcttgaactcctgacctcaagtgatccgcttgccttggcctcccaa

SEQ ID NO: 41878 - DNA, 1038 bp, Homo sapiens
tagtatatgtgctgccaaggtgagcactacaatctattttttttaatgttttattttagattcagtggtacatgtgcaggtttgttatataggtaagttgtgtgtcactggagtttggagtacagagtatttcaccacccaggtacccaataggtattttttcaatcctctccctcctccttccctctactctcaagtaggccctggtgtctgttgttgcctttcttgtatccatatgtgctcagtgtttagctcccacatgtaagtaagaacatggcggtgtttggttttctctttctgtgttagtttgcttcagataatggtctgcagttccataaatacatgattcattcttttttatggctgtgaaatattccatgctttatccagtctaccattgatgggcatttaggttgatcccatgtttttgttattgtgagtaatgcgatgaacatacgcgtgcgtgtgtctttatggtagaatgacgtatgtattcctttgggtgtacacctaatagtgtgattgctgggtggaatggtatttctgttttgtgttctttgagaaattgccaaactgctttccaccctatctgaactaatttgcattctcatcaacagtataagtgttcccttttctctacaactttgtcaacatctgttattttttgactttttaataataggcattctgactggtgtgagatggtaactcattgtggttttgatttacatttctctaatgattagtgatgtttagcactttttcatatgcttgttggccacacgtgtcttcttttgaaaagtgtctgtgtcctttgcccactttttaatggggttgttttcagatgtctactatcactaaagtcaagatacaggatgcaacaacaatctgtgtttcaccaagttttcgggtgactggtactgctaaggtttgagaactatttaaaaaataagactagaagagcaggaacagactttttttccccaaaaggattagtctaaatacgcaaagggtactcatagaccagcagcatagatc

SEQ ID NO: 41879 - DNA, 1045 bp, Homo sapiens
attttttcatctataaattggggataatgagcttataatagtaattcctacctttaaaattgtcgagagaattaaatgtgtgaatacagtagagggcctggcacatggcaagcacttgataagtactgcatattgtaggggtctgccagggcagcagcatagtgtgatggtagttaacttgtcttgagtaacagagttcacttaatgaagtctaagttttcactctttttggaagctatgtgccacgttgacttgcattgggtgcccattactaaatcaccttttaaacaaaaccttagcagttcctaaaccgtatttctcctgtgccttcatggtaaagtacattttttattcactctgtttaaaataaaatcatccttgtttaaaccaacatgattgctgtctctgctagcttcttgtttttcacgaatctgaccaacatgacatcatccaagtccttgtttgggttcagcaatagacaccatcctcactacctgaggttgaaactgaaagctctggttgtattatttgactgccttcaaattcacacatttgtgtcattatgcaaactgcatttctccgtcttgttcacgaagatattttgaatgaccttgttagtaacttcggtgaaatccaggaatactttgtccatagtatatccctcatatacctgtttaaaaccaagcaaaatagaaaatgagattggcttggcattatttgctttaaggaaaccatattggtgactaattcttactatttccttttctaaacttcaaaagagtactttacaatctttcattcaatgagtatgtattgagcttgaactctgtgaagcatcatttcgaatcccaggatttttccaagaattaacatcaaatttacaaaatccagtttccacatctttaaaacgaggcaatatgaggcatattacaggattgttactatgattcagtaagaaatatgtgaaagcacctaacagtgtcagagcagagaggtgctcactactaagtcagtttcctttcccatgttcagagagagtgaaccc

SEQ ID NO: 41880 - DNA, 1010 bp, Homo sapiens
ggaattcttaaaaagtttcaaaaacttactagatgacctcagtatggtcctatttaacatacccttgggaacatgtgcatgaaatacattgtggtttgagggtttccaactgaaacacacttaaaagaaaatacagcttttaatagaaactattcaaattcctgcaaacataggtatatatctcaccactgagagggattaaaagcatcattgtctacgttgagaatgaaaagggaatgtgccattctgctttcaggctttgcttaagactttttacttggtgattccagcatatcaccatctttgattaaactgctcaattaaaaactatgagtgattgaagcctctgattagtgtttttctttgtcatggatgccatgacctgagggtagggaagagagggcacagggtgtcacaaacctggtgttatttaatagagtcttcacatttgtaccacacaagtcgaatatatcaggtgtaagacatcaccctgaagcatcacttctgagatctattgggaggaaaatatcagaactattgaaatatcacagctggccctgattttaactagtgccaaacacctgcaggctctaaaaggataccaaaacaaaaccccaccctgtggcagcaagccatcccttaacaaccctttcttaactttgcatcaccatcaaaattaatttaacattttctccagaaaccttattcttcctgtcccagaaggccattacaacccctttagcaaatcttttgtatgggatgaatatgtcatagaaacagagtgaagtcttgaaatatttgatggctgaaaattgtctgttttcatctcattatttgtataagcttttgaaattggagagtttattaatctctagactagctcatattatctgagtgattttgttttagcacattttggcaaaatatctgagcatcttattttttaaaaaaggccaatgttcatatagcaaacttcagaagcacccccaaaatacagttatttttcaaga

SEQ ID NO: 41881 - DNA, 1033 bp, Homo sapiens
attctccagctttcctcactttttagttattttaattttcatttgttagcctccaactaaatttaacatataattttagacttaatatcatcatagtatttgctttgaaggcataagaatttcgtattttaaaagtcctatatggagtacgtaattagcatgcattctactacccgtttctttttggcaacctcctaaatttgtattggaaggaaaagcttttactcaaacaaatgatttctatagtaacaaaatgaaaacaggtaataagttagcaactatcttttctcatacaaataatgtcagattttagggctttcaggcttggtttttttgagggagttgaaaagaaaaatccgaggcctagatacagaaaactatcaatattaaccttgattgagagacataaaaggtttgaatatatgtagagacgtagtcattcatggctgcaaacactgaatattgttaaggtatcaattattcccagattacttatcgctttaatataattgcaatcaaagtcctgttagaatatttttctgaaattttttagcaagtggtttttcaagtctaccataaaaaacatgtggacgagaatagcaaatattttgtatgtttaaatataagtaatgagaaggaagcaagcattatcatacataattaaatatattccaaaaccacaataatggggctagcaaaaaataaagagatagatcaatgaaacataaagaaaaactttaaaacatgcatagagatttggcatgtgataaaaatagcatgacaaataagaggagaaagggagacattttctgtttgaaataacggaaattaactgttacttttctcttaagattatatctatgctttatgcccagataatagaggtttcagagtttactgtagactatttttaattaaaagaaagtattcatgaaaatcagttagattttaagaaaaggaaaggttttctaagcatcaatgcaatagcagatgtcagaaagaaaagaaatcgataaatttggttagtaaaagt

SEQ ID NO: 41882 - DNA, 1050 bp, Homo sapiens
catatatatttttattcattcaaaaaatatgtttctgccacatgtataggcaagcctttcattttgtccttctgggtaaccatttgttcagaagcctgggaagtaagggaactagcctaaggggtgaggccaactgcaaggttggtctcatacagatgttcatctggggttggttaaaattgttttgaaatttcttcttcagaaataaggatccaatgctcatgaatgatttgatgtcttagagtgactcaaagtatcagaaacattttaagtatttagtttggaaccattaaaatgaaacaaatgaaaatttagccatgccttatactccttgagtgaccatcaggaagaaaatagtcattcttttaagtgaaaatttattaatgtggggttaattcccctaaggagaggcctaatgataagcattagataggtatctgtgtgtgtataatttttctggaatggagagaatctgtaggattcttaagacccagtaaattctgaaggattaagaatcacttcaagtctgacaccctgaactgagcaagtatgtctgtgtgtgtgtgtgtgtgtgtgtgtgtgtgtgtgtgtgtgtgtatttgctgtgtttgtggatcgccttggattacttttaatctgtagtgtgaggttctctagagttgattctaggtaagcaagcaaaaatttttagacattttaggttaacattaggcaaagaaggtttttcgtttgttttgttttttaatattaagaggggatgttcataaagtaacatactgattccattatgtcatccaaacaatagtatcaacactatgttccacaacagtaaagctttaggacctgtaaattaatgtttcgtatgtgaattatgaatacaatattttaattatgttgaaattaaaccaataccacatcatcagtctctcagctcacatgagtaaatagaaatgtgatctttaatttttattgagttgcttaacagtttctgctttgtaaaatctgtgataggctactaaatccctttataaacccttccttttaccccca

SEQ ID NO: 41883 - DNA, 1081 bp, Homo sapiens
gctaaattcacacctgtaaactagaaaaaacaaaatcctggagattcagagaagtcacaacttgaagagtttaggatatatttcatggagcgggtggcatttgaggtgtatcttgaagaatgggtaaaattttaaacagatactggggaggacagggagctgtcacaggtaggagatagtggaatatatgaagaaagccttccaccagggaggagggtcaggaccagcaagtgcttggcaatacagtggcaaggggcaaggatcatttaaaagagaggagttcactttggttggagcagagggtatgtgtgaagcaaagtaaagataatgaacagttatttagcactatgtgtcaggcattggcctgaatactttatgcatagtatctaattcatcctcacaaaggccatatgacatagacaatgtaatcataaccatcgtcatcatcatcatcatcatcatccacctcacagatgagtaaaccatgtctcaaagaggtaaataacttttcagccacaggtcctgcaaatcctagagtcatgaggaacagccgggtatagctctactccctttctccagggatacctcacacttttgaaaaacagggctgttctctgtatccctgtcaatgtagatgcagagggtcttggcgatgatgtggttaaagtagtgaaaactcagccttacactaggtatggatttaattatcccatagtactgattagtttgatagcaaaaaaggatatttgagaaggaagctgcccatattataaaggcctgcctatataataaaggcctttttgctcatgtgtgtctcattgaaatgatggagtggctgtgccaacatcaagctaaataaggagaaaacatttataagcacccttttaactctgttagagctatgtattctgaaatcccttcaagtaacaaatgggtaagaacaaaaggggcagaatgggcctttcgactgcaaagactgaggctcaagctttagggaaccctgtttatgacactgattcgatatagttaaactccgagcttctatgtagttaaacatgggggaaatggccatatctataag

SEQ ID NO: 41884 - DNA, 1043 bp, Homo sapiens
gctgtggctgtgattgcagaccttgtacctggctgagcttgcatctttcgttccctattcagagtttgagatgcttctggccattctcctaaagaatgggagtgaatgatctttgcatgtctgttgagcagaagatatttacttgcagaattaaaataatactgataaaaagtgttcaaaatggtaacaatagtttgtggaaatatttgggcaggtaataattacttttggacttgtgttccccattcaaaaacaaaataccttgcagtgtttctgagtttacttttgtcatgctgtatacgttctctcttcaaaatgaaaactgatgcattaaagaaagaatgagttgaatttgaggtatgggtgcaaattagggaactcctaggaattaactaagggttattctttcagaaaataacattcagatagtgcaaagggtctttagttaggaaaatgtatatgatctctggattgatgttgtctttaagagttgtatcatacagaatagacatggaaaattgaccgcgaatgatgtaacccttgatcaatgccattgcacttgcatgttttctctatcgagataatttttttattttttataataatatatgagaatttctccatggatttacagaaatcacagctaatccatgtgatttctttctaaatatagatatttatgtatttatctatatcgatatatgtccaccctctacacgtagactgataatcattaactgatagtaaaaagctaaaaatgtagacactttccacaccatctacctcgtttactaagctgccacattatgtgtgtgtgtgtgtgagtgtgtgtgtgcatgtgcacaagctgggctatgtttcaaatgttctgttttctttctcagaaactattgatgtgttttggaaatattgaggatgcctccaatgcgagtatcccctatatcagatagtggggcagccctgccctgggaacttagacaactcagatcagatcttcccagtgggctaacctggcacctaacttcttcgtgtttcatgttcct

SEQ ID NO: 41885 - DNA, 1468 bp, Homo sapiens
tttgtcatattcttaatttatgtcatatatgtcagtttctcatatattttcctcctatcaacagttgtacttttgagcctaacagatttttcctcttccagcatctctcctttctaatccattttgcaaaacttgacaatcatttacctaaagcatgacttctgtttatttcactcctctgcctaatggttcctcatcctgaccttaatgcctgtccccatcatcatacattcatgtcaccattctgcatatcctggcccatgaaactgctattccttctgcatatcctggcccatgaaactgctattccttcataaactatactttaatatattaatggtcactgctcaacagttttttctgtagtaaatatctggtgttctatatagtatttgacatatgatctcaaagtagtacggcctgccctcatcctcttttgaccagtcattttatgaggcagtgtgggtatttatgagcccccagagctggaccagttcccaaaggaaatggaagatcaagaactctgagaacttccaggaaatggatgggaggatggtcagctctcgatggtccaggatgcactctctgatcaatgaaacccttcctctttgtctttttttttttttctcactgattaggcctcatggaattctgagcctcaagcttgttcttcacaaaaggctgctctttggatgactgtcccttcatctagtctaaactcccttttcagtcctgggtgttattcattccagaccaggagtgtgtatgagtgtgatgctgggctggtgggtcccaggtggcctgatgtctagcgcttggttgagctttcacaggcccatgatcctgggtgtgatagaacagtatctctccaacttaagcaggcatcacagtctcctgcggagctggtttacacgtagcctgctggaccccacttctgagtgtctgattcagtaggtcttgtgtggagcctgacagtgtgtatttctaatactttttggggaactcatgacaaattccaatattccagtattctaacaatattgtaaggaagtacaatattgctgagtggtatgattatgaaagtgctcaataccttcatatctcggtgtggctgctcatgtttgaatggtcttgtaggctttccccaagtctttccatttacaacacctagatcaaatgctacatctttaatgatgtttttgtgactcctttaaccaggggataaaacatttgctgttactcttctctctaacttcttagcaatgtgtttgcccctcttataatatttatcaccatgtaccctacataaagtatgcctgtctttctgccaacacataatctctttgaaggggagtgtattggtctcattcatcttgcttcttctaatgcttggtacagtgccttagatgcaatacatattgtttgccctgtgcccagatcccttgagtccactttttgacctctgtta

SEQ ID NO: 41886 - DNA, 1032 bp, Homo sapiens
taacccagttaaaaaatggtgaaaggtcctggatagacatttttccaaagaagataaacagatgaaaacagatcaataagcagatgaaaagatgctccacattattagtcattaaggaaatgcaagttaaagcacaatgaaatactacttcacactcattgggatggctattccatacaaaaaaaaaaaaaccagaaaataaaaagttttgatgtgggtatggagaaattggaactcttgtgcagtgtaggaatgtaaaatggtgcagcctctgtgaaaaacagcttagtagtttctccagaagttaaacataaaattattgtaagatctattaattccactcctgggaattactcccagaagaattgacagcagggactcagatacttgtataccagtgatcatagcaacgttagtcacaatagccaaaaggtgaaaacaactgaagtgtctgtcaatggatgattggataaacaaaacatagtatacaatggaatattagttataaaaaaggaatggaattctgatatattttgcagtgtatggatgaactttgaaacattatgctaagtaaaataagtagggacaaaggacagatatcattaggattccacatacgtgaggttcatagaatgggcaaattcatggagattagaaataaactagatgttaccaggcttcggttggtggggtggggagcagagtgaggagttattgtttcatgagtaaagagtttctgttagggatgagtagaagttcaggacgtagtggtgataactgcacaacattgagaatgtacttagtgcaattgaattgtatactttaacatgttaaaagtggcagattttatgttatgtatactttaccacagttttaaaaaacattaattctagtcttgcattttgttattcttgctctgcctctgggacctggatatatgcatcactaatgctgcttttctctctcatgagggaaattcctgtgaattgtctataagcatttaaacaatatgcttggatagctgtgaatttt

SEQ ID NO: 41887 - DNA, 1023 bp, Homo sapiens
aaatttctctttataagagttaatttcaacttattctgttaacctgtcatgaaacagaatctcaatttcttttcctactggagatatgtctgtcctttacatcaccatttaatatcttgacaatgaagaaaattgtataacctagaaagggctgaatattactgagccctgggacctgggtcaatgatacttgtaatgtgactgtcttctaggaggggcttggcctaacttcttgtgcccactgatagaaggaatcagatctccctaatggcaactttccctttctgttagtgaactgggcactctaagagacgtatttattacttcagagcaggcttttgtatactgagaatgaagacaatttttctgtctccaaaatgcccaatatgatcctggtctaggtaaaaatcacttgctaactatgttctcatgtaagtagctcaagatccaatttcctgtaccccaggaagaatggtaatccaggactgataaccacatccttcaactagagaaactggattctgaagaagtactgtagatactaaaaatatgttgtggatgtgggcagttgttattaccagaattggctttaaggaacgttgaaaaataggcagaattcagcattattttattctccttttagtagcgttctctcaattttttaccattactcatgccttcttgagaatcaaatggaaaacttaccccctaggtctctttttgtccagacacttaggaaacctcctttctgttgatagttatattggccagatttgttagtcaactaatttgtggaatacactgatgacttgaagtggctaaattattatactgctcaggtatgttctgcaaagtaaagggaatatggctttgattaatggaataaaggtctaatggtagataagtttctgctggggcataggctatccccattatttcttatattaattcatcttttctttgattcaacaaatctttattgcacatcgtttatatactaggtattgttttcagcattgtgct

SEQ ID NO: 41888 - DNA, 1014 bp, Homo sapiens
ctctaggttcaaggtttaataccatcatatttaataatactgcaataatcctggttaatcttaaaatagtgtcactagggaacatgtaaattacaggatatgttattctttgaatgaatttcatctactattgtggaatttgaggtaatgaatctgaaaacagtttgaaggctataaagcacttaacaaatgttatttttttcttctttgtttttatctgtcatttgcttgccattttccttagaatctggagtaatatgcatacatttgcagagaaaactcatatctgatatttttgcttgctaggaaataattctgttttgtacaaataaatatataattatacatcaacatgtagcacattttcaaagtatgatctaattaaaataatctaaataaaattttttctaaactgatacaaaaccagtaattggtgtcatagcagcttgtcactctgtttagtaatcttgtagtattgtttaaatatgtacatatatgtgtgtgtgtgtgtgtgcttgtgtgtgtatccttaagactgtgagccaagacaatattttcttatgtacctcctttttcttcttataattccactttaaaatattatctttatctattttctgctactttaacaatgcatgagactgggtaatttataaagaacagaaatttattctctcagagtctggaggctgagaagtcaaagattaaggcaccagcatcttagggccagtttctctgcttccaagatgctgccttgatcagccttccaagatgctccctgccattctagagggtaggaatgccaagtcctcacatggtaaaggaccagaagagagcaaacggattccagaagccctttttatagtggctttaatccattaatgaaggcagagccctcaatatgtaaacacatcccattaggccccacctcccaatgttgttgcattggtgattaaattaaatttccagcacattaattttggggaacacattcaggccataacagatatatag

SEQ ID NO: 41889 - DNA, 1060 bp, Homo sapiens
ttcattttagaaacatctctcaggaaggtagtggatggatagagggtagaggaatgtcaaaaatagcaacaggaagctgtctaccttctgttggagcagaaaagacaaaagaagaaggacaaagagagtggggctcctggagaaaggattaacgggaaagctttctaagaggcagaaagttgattgaaggtggaggatgacaaagaaggaagcattgaagaagactgaaagtgtggatgacactgataacaggatgagctgagaaaggtttggtgctgcagtcgtgagtttcactttgggcatatggaaactgaagcgaccacgtgtgaggatacccactacacagatggaaacagggtcttcagctcagagagagaaaatgcaaaagggcgagatttgggatcctagagcatccaggaagcgtctttgtgtggaatacaggggaatagaggcaaatggagcctttccttgtttcctgcttcccttttacttaggagattaaagtgacagtttcattaactgcttttaccacattaaacattgttgaggatttggatttgggtaacattttgtcttaataagaaacctactaaaaagtaagtttttcaaaaaatgttttactcttacatgatcaagtctttatcatggaacctgtcagcgttaacatctaggatttaatgtcaaccaacgtaagcttttaaaaagccatattaaatcagaaatgacttaaaaataaactctagatgaacttgatctatttaagttaaaggattaagttatatacatgatggagcatcagagattgagtcctttttgggtgggccttggaaagggaaaatgcagaaagttctaatttgttttgctttcgaagaagaatcatcctttttatgtattcatatgcataatttgatcagaaaaatgcttgatattctaaccttttaattaggagggaggaatgtagagatcatgttgtaaaattgttttccaggtgaggaatctgtgcaataaatttgagaaacactgaaggctttattgtatgctttttctggatttttttttt

SEQ ID NO: 41890 - DNA, 1049 bp, Homo sapiens
gacctggttctgcactgtagactgtggtgtcagggctgaggcaattgtcaaactatccactacaggtaggcaagtttagaaagagataaaaacaatgaagcaaaacaaaatttcctaggcaagaagagcttacaagcccaagttttaaaacgcgagggaatttaaggcagatagccagtgcacccaacaaatgggaagcattaacacctaaggaaatagacattatcatgcattgctcaagttatttgaaaattattttataaatctttgaaaagataaaaaaggaatgagtatccaaattaagtagtaaaaagagattgtcaagagaaagcaaattttttgaaattaatatgaatgaatacagccaataactcatcacaaatcttgtaaataaaattttcatacagtttaaatgtttgaaaaagactctaattaggagaataaataatagatcgaacgcagttgaagtgacagttaatgaaaatgggactgaggctgggtgcggtggctcacccctgcaatcccagcactttgggaggccgaggcaggtggatcacttaaggccaagagttcaagatcagcctggccaacatggtaaaaccctgtccctactaaaaatacaaaaattagctgggcatggtggccagtgcctgtagtcccagctacttgggaggctaagtcatgagactcacttgaacccaggaggcaaaggttgcagtgagccaagatcgcaccactgcactccagcctgggtgacagagcaagactctgtctccaaaaaagaaaaaaacaaaaaacaaaacaaaaaaaaacacatagggattgagtcaattacataaaatattgcagaaagaaaaagttggatatactatgaaagagaagagcatcaggggatgaactgagacatgaaatacaggaatttcagaagagtgaagaaaagacaatatacaacagatgacaacagctaagaagtttctagaactaaagaaagtcatgagttatcagccagaaaaaacattgaatgctaatcaaattaaattaacacaaaa

SEQ ID NO: 41891 - DNA, 1071 bp, Homo sapiens
catatttgttcactgcgataatattgttgcagaactttctccttagttcagctaaaagcaggctcttgtcacacgaccaggaaagattaggctcgcggacacatagaagggtgaggaaaatggaatttattgggcgaaggggaaaaaggaaaacgaaccaaagcaagagagagccctgctagcagcttttctgactcacagattgaatcccaggtcaccacaggagctgaagacagcaagctcctcccgtgcacaaggcgtgaactccccgtggccccacccatttcccccagggcacatgtcgggctccagtccactgtgggcatgcccagacaagccctgggcaggttccctcatttgcacaaaagcttctgatgtaaacacttgtggggaaggttggagattctctggggacccctttttatctgtgtaggcatttggctgtctcaatatttataaaactgaaatattgggaacaatttaaacgcacagaaatcagtgattagttgaataaattatagcatatctatgtcagggcactgcccttgatatttacaaataacgctgtagatgaatagtaattggcatgggaagatcttcactgcatcgtttggttccaggattttttctaagaaaatatccatagacatagttatagatatatagatataaatacatagaaaaaaatatttggaactaaatttatattagaggtagttactgaaaatggtacataatgagaagtatattctcctcttcttctttattcacatattttagtttttaaaaattatctataatagcacaataatgaaaagttattttctattttaaatgaaagatatgtctttaataaactgataagattgacacagtaaagggagaatacaaatgaaagtgcttttggaataaaaatagaaactgtgctcttgattttggtcatttgtatcaaatcatatttcatgcaaagcaataagcattctgatataaaaactagcatctcccattttattgctgtgttgattaataacaaatcagttttctatttgtgtctcatatgtgtattaagac

SEQ ID NO: 41892 - DNA, 1032 bp, Homo sapiens
agacccatggggagaaggcacttcctcccctgcccggtggtaacaggcatgcctccccttctttgctggcgaggtgttagagaccaggggggaaagcctggactgttatcttccagcagtaataagccactcactctaccacctgctgtatccatgaaagccacatgggtaggagcaagaaggtccctgataccaccagagacccagggggaccctgaagttccacccctgcccagtagtattgaggagtcattctccctgcagcagggtatcgtggagaccaaatgggggcctgggcttccacctgcagcttgccataatgaggcaggaccccttccccggccagcatgcagtcaaaggaggcttcctaagacagaagattgaaatgagatccagagtctcataacactcaaaatgtccaggaatacaattgtaaatcagtcttcatatcaagaaaatctcagcttgaatgggagaagaaaaatcaatggatgccaacgatgagactgcacagacgttggaattacctggcaaaagttttaaggcagccatcatataaaagcttcaaaagcagttacaaacacacataaaacaaaggtgaaagtaggaagttttaacaagaaaatagaacatctctgcaaagaaacagaagatataaagaaggaccaaatggaaatgatagaacatgttgagcctataaagttactgttctcttcagatggatctctgtgtgggttggggtctgcattcaaagtccagacatttctcaagtctgtctcagcctttgctttccacatgaccctgtcatggctcctactcatggtagttcaggcaggcctgctacagcctcccctgggcaatgagggaacatgaatctactgcatcctcctggccagagatttcagtccagggctaggcacataaccaagtacagaacctgagaaaattcttggattctatctgtaattattgggaaaactatctctttttcagtttgtcacttaattgtttgaataattattagaattatta

SEQ ID NO: 41893 - DNA, 1058 bp, Homo sapiens
tactcttctgcagtttcacaaagcccagttggtttaaattctttgtccttccattgtccaaacctaataaggaagtcagtcagctgtgggttgggataaggaactggttggtggtaaggaagaacattcctccaagggccttttgatctttaagaggcaataagttgccccattccctgcttttatacaaaaatatctcttgtgtgtgtcattcagacagattgttttccttcccatgaatgtaattgttgtctcttggagattttatgagaaacagaattcaggccattccagagttaggcagaagaggaaagcatatgactttatcttgctcacttcccagacttgtccttttacttgttaatatttgtctccaggagtcatatatttcaatgacaaggcaaaatacccccagacaattcatgcctgttcctgactctgtacctaacgaactgtggaccttggtcaaacattttatactgttgggcctcggttttctcatctggaaacttgggaagttggactggacaagataaatttggcaggtagtgggttattgctatcaaaaacatggattttgcaaattaacatacctgattttcaaccctagttctgttacttgcaaagatgactcaaatgcagcagagcctcagttttctcttataaacaaggttgttatgaagattacataaaataatgcttgtgaagtgcttaatactacctgaatattgtaagtgctaagtcagctttagctcatatttggtgtttccatctatgatttttccttctgaagtaaactttacaatatctgttattttttaccatatatgccaatgatattttctattagtgtgggcaaatcaaaatgggcaatggtaacactatattttattctatatatacaagtgtgtgtgtgtgctctctctttcacacacacgtacacacacccaaaaaagtaacttatttttctaccatcagcagaatctagaattaacttaaagaggttactttaacctagtatggttaaagaagtaccatactaggttttggttcctcaa

SEQ ID NO: 41894 - DNA, 1040 bp, Homo sapiens
tgagaactaacagttcattacctctgggccagactttttctccttgggtcaaacaatcaagtgtttagagccgagtctgagccttaagaaaacaaggctgaccatggagcatttggacccatgaacacaatcttgctggggctggaggggtcagagctgctcacatctagacccacagaagcgagctgatgagactaattgggacttcttgtgcaccaggctgagggtaattgggtccctagacatgttgaccttttcatttattcaccatttaacatgagctcttagctactgtgtttggagcttaaactggtacatttaaagcagcagccacattcttcttctgcgtgtccattcatccttcttagcttcttttctttcttccttccttcagtctgcccttctttctggtcttttgaggaagatggagtggcctctgagtggaggtatttgccaacagaaggcaaaccttacttcttgtctaggcctctttctaggggtgatgggggtatcacttaataaggcccccagcctcagaaatggagttgagaatttgaatagcgtggttctgctccagctgccccttccagaccgtctcagcatgggctggctggactccctatttctctgccccacaggctggccaatggtctgagaagcacttgggcactggggcactgatctggcctttgtccccagcggtgttcttctttgccaccagctgcctgctaactcagtctattcctgtagtcagtagaggggcaaagtacccagtgcacacaggccaaggcccatggcattgcctgggcctcttatagctacagtattcgtatcgctgagaaaagaaggttcttgaaactttttcttggctattgaatgcaaccaggtggtctccaggaatccaaataagatgaatagcaggtgggtgcacttttgctcttttgtgctgtaacacaaccacttacaatagggccctcttactcctacagcagggtgacttcacctctcatccaggaacccctgggcccttccatcctgaa

SEQ ID NO: 41895 - DNA, 1032 bp, Homo sapiens
tgaatagttttttttttttttttaattatgtttgtgtatccccttcattataaaaccaaaacaggttttggatagaaaaattaaaacatgtaggccacaaagaggcaaaaaattataaaacttatattttactatggaaatgttaacactttgatgtatagcttcagaactctttctggggctgtgtataggtatgtttctatttataagatatttgaaactttttccaattttttttcctgaaatttacctaaagctccaatgttgaaattaaaaaaaaaaaaaaaaaaaaaaaaaaagcactaagatcccctaatgagacaaatagtcaatccctgagactagactccttatcccaagacttagtgagaggtgacagaatcctcacccccatggccaggcaccatcccaatgctccttccttcagagcctgtgtaagcagaggaagggagaagtattgagattgttggctttgtaagttatttagatttacagtaagaataattttgtgtgtgtctttttggctggtgaggtggtcatgcactttcctcttcaaagtcaagtgaggcagctcccaagagaattactgaagcagcttgggagtatttgcaacaaggaatgactggcctgtgctccaattggatgtctattcaggtggaggactggcttgcctgactctgcctaattggaaaaggaaatgaacataaaagagagagcagggtaccaagaggggatgtcagtggggccacttgcatctgcacagtggcactggcatgtcctgaaggcctgtgcctcctgtgtgctcacagggaaaccgccaaagggacctgagtagagctcatcttgccccacttagaaggggatccaggaggaaagcccatgtgattgagcatggtgggaattgacagggagtggaagggtggatctaccacatcagagaagtgtgcagttggcaggcgtagtgagcctctgctaggggctctggaagggtctgcatttggatacccaccccgtagagggcagtgctgtcag

SEQ ID NO: 41896 - DNA, 1037 bp, Homo sapiens
cttgttttccctaagatagattgaaagacaaagggaattcacttttccttggtgtcttatttaagatgctgattgtttgggtcacttcattatgttgacaaattccttatttgatatttagtatttggagttaggggaaatgagtatttcttttttcttttttacataactacaactgctgtgtttaagtaaagataccagattcaggttggctgaattctagttctagtttttctctaattcaaactcagtgttgcttgtcttcagtcttcctgttaaagtgaggtggaactagatggtgtatgatgacctcatgtagcctgaacatcctaagaaagttaaaatgtaagcattgctcctgtcagtggttatttgttcgttatattgcctcatgttaaaatacgtttttgtttattgttttaaagaacaacatagacgtttgtcctgaatgtggtcacctgaaacagaaacatgtcctttgtgcctactgctatgaaaaggtgtgcaaggagactgcagaaatcagacgacagatagggaagcaagaagggggcccttttaaggctcccaccatagagactgtggtgctgtacacgggagagacaccgtctgaacaagatcagggcaagaggatcattgaacgagacagaaagcgaccatcctggttcacccagaattgacaccaaagatgttaaaagggtaacttcacagtaaatcatttctcctgaaatagaggaagattctttatgttgttgtgcttgtttttaaatcatcagtatagtttaacacattctttctaagcagttttgtgtgggataatttgaagaatatattatgagtaaactccgaaaattttgtttatccaaaggctcaatggattatgtttctattatatacaaggttttaagtaaacataaaatttccagaacaaaaataaaaaatttaaaattcatagcaaaaattctgtgttttggctttggttttgtttgccagtgccttttcttagacaagaatacttaacacagataactccattt

SEQ ID NO: 41897 - DNA, 1056 bp, Homo sapiens
acttaattttctgtggtattggatttagggtttctccaccttggcactattgacattctgggtccaataattcttttttgttggaggctgccctttgctttgtaggatatttggcagcatctctggcttctgcttgctagtagcagctgcacccaccctaccctctccagttgtaacaatcaaaaatatctccagagttttccaaatgtcccatggggagcaaaattgcctctggttgggaaccactagattatatgtatcaatgccatcactgaaatattttggttataaggcagtatataatattttgaattaataataaggaaatgaataagccttaactggtgaaaaggggagaaagggaatggaacatttacagttggacctggaaattcgagtcttaataagttgcccaagcattactgtaacaattctgaaccactgcttgtctattcacctggtggttcttagatggaatttcactgaagtatcatgtctttaaagagagaagcttctgaaggggagaaatagaggatgtatgatggacaaggcttctttggggatgcccactccatgcagacaaggaagatgtgccaggctaatcaggagccagtggcagcagggcactggccaagccccatgtctgtgcacagacagctcatggcccattagtgtatggtgcttatcccagaatatgtggacatgaagaaatgaagatggaggacttgagtaggtggtgaagatcatcaaactgggatacaggaactaggttatttgccactttgggggtgccatattgcttctaaagactattttatggctgctttatgtggcagtgtatttgcataccccttgaggaacttgcctctggccagcagtgggtaatggaaattttgtacttttaacttttgttgtgaaagactattaaagttgtctgttatccaaggaaacctttactaggctttcaaagccagagctaaagaataataggtagttcccaggtaaatattttaatgtgcctattctgatttctctaatggtaatatgcatttaatc

SEQ ID NO: 41898 - DNA, 1028 bp, Homo sapiens
caacatggtgaaaccctatctctacgaaaaatacaaaaattagctgggtgtggtggcaggcacctgtaatcccagctacttgggaggctgaggcaggagaatcgcttgaacctgggaggtgacggttgcagtgagccgagattgcgccactgcactccagcctggctgacagaatgagactccgtctcaaaacaaaaaaaagaggatacagtgtgtataatctggaggttgacttctacagcaaacttgataatgtcccatttgaatttaggtggaaaggtagtttctttttaaatactagtttcctacagaaaaatttactcgtttcctacagaaaaatacagggaaaagaaaacaatgtggaagttttcttgttctcttttgaaagatgccaatgtaaattcattttatacacatttatcttttctcaaagatattaattttttaataccatggctaaaatggacactcaggacccagtagccacatggtacacagtggcgttttttgaaagcaagtatggacatgtgcacacccacacgctgaggtggcctgatgttaatgctgaaggttacctagttaaaacctttcatagcttgggtgggggcattgcttttccccttcagtgtgtcatatgcataagaagttcaaagatccttgctgcaagaaatttccaccttgcttccctcgggaacatttacaaggaagatatggcctccgcagtacggactttcactgggctaatactttaagtattagccatgcagaggaattcccaaaataaatgtttatgctgtagcttctttcatgtttggttttacactcttaactttgcaaaatcgtgtatctgttttattttttaatgatgttttactagtcttatgatggacttccaggaagagaaccccaatttaaatagcattgcacctataggaaatgagctttcagcttatgacagttgaacctgtgactattcaagaactaattaagtagcaagtcaaacaggttgtcagcaccatgtgtcatgg

SEQ ID NO: 41899 - DNA, 1033 bp, Homo sapiens
agtagttcctttttttttttttttttttttttaagatggagtcttgctctgtcacccaggctggagtgcagtgggacggtctcggctcattgcaacctccgcctcccaggttcgagcaattctcctgcctcagcctcccgagtagctgggactacaggtgcacgccaccatacccaggtaatttttgtatttttagtagacatggggtttcaccatgttggccaggatggtctcgatctcttgacctcatgatcagccccatgcccgcctcggcctcccaaagtgctgggattacaggcatgagccaccgtgcccggcccttaacccagtagttgttactgacatttctgattgtcgtgctggggggaaaacggtatgtgccactggcatctagtggggaaaggccagggatgctgcaaactgatatactgccaagtttatcagttgggaatcccaacagtgaaaagcataaaaatgaaaggaattttaaggagactttttatagaagagtgggcaggattggaggagccaacaagtgatggtgaggcacacagggaagagcttcagtgggcaccatcccctctctggtttgaaggggtagggaggggaccagagctgggaggagggggctggaatactgctggaggagccactcccttccagacctgctgtggccatcacagaatgcagccactgccagagcagcagcctgaggaaccaggcagggggagcacaagtaccctagcctctctctttctgtttcttgcctgccgatctcctccactggctaaacccagctggatgctaagagtacagtcagcctgcctgctgaggagggaccaccagggaccaccatcagcaagggatccaatgtctttctgcctctgcagaatgaaggttggggcacggggggcgctctacttcttagggatattgtgggaataaaaggaaataggcaaaaaatgtttttgaaaaacaaagcacatactgcgcacccgtgggccactactgcttttgacccctggctctgttt

SEQ ID NO: 41900 - DNA, 1056 bp, Homo sapiens
gccaggctttggtatcaggatgacgctggcctcataaaatgagttagggaggattccctctttttctgttgattgtaatagtttcagaaggaatggtaccagctcctccttgtacctctggtagaatttggctgtgaatccatctcgtcctggactctttttggttgataagctattgattattgccacaatttcagagcctgttattggtctattcagagattcaacttcttcctggtttagtcttgggagggtgtatgtgttgaggaatttatccatttcttctagattttctagtttatttgcgtagaggtgtttgtagtattctctgatggtagtttgtatttctgtgggattggtagtgatatcccctttatcattttttattgcgtctatttgattcttctctcttttcttatttattagtcttgctagcggtctatcaattttgttgatcttttcaaaaaaccagctcctggattcattaatttttttgaagggttttttgtgtctctgtttccttcaattctgctctgattttagttatttcttgccttctgctagcttttgaatgtgtttgctcttgcttttctagttcttttaattgtgatgttagggtgtcaattttagatctttcctgctttctcttgtgggcatttagtgctataaatttccctctacacactgctttgaatgtgtcccagagattctggtatgttgtgtctttattctcattggtttcaaagaacatctttatttctgccttcatttcattatgtacccagtagtcattcaggagctggttgttcagtttccatgtagttgagcagttttgagtgagtttcttaatcctgagttctagtttgattgcactgtggtctgagagacagtttgttataatttctgttcttttacatcttctgaggagtgctttacttccaactgtgtggtcagttttggaataggtctggtgtggtgccgaaaaaaatgtatattctgttgatttggggtggagagttctgtagatgtctattaggtctgcttggtgcagagctg

SEQ ID NO: 41901 - DNA, 1072 bp, Homo sapiens
tcttccagttgatcgcattggctcctgaggcttctgcattcttcacgtagttctcgagccttggctttcagctccatcagctcctttaagcatttctctgtattggttattctagttatacattcatctaattttttttcaaagtttttaacttctttgccattggtttgaatttcctcctgtagctcagagtagtttgatcatctgaagccttcttctctcaactcatcaaagccattctccgtccagctttgttccgttgctggtgaggaactgcattcctttggaggaggagaggcgctctgctttttagagtttccagtttttctgctctgttttttccccatctttgtggttttatctacctttggtctttgatgatggtgatgtacagatgggtttttggtgtggatgtcctttctgtttgttagttttccttctaacagacaggaccctcagttgcaggtctgttggagtttgctagaggtccactccagaccgtttgcctgggtatcagcagcggtggctgcagtacagcggtggctgtagaacagcggattttcgtgaaccgcaaatgctgctgcctgatcggtcctctggaagttttgtctcagaggagtacctggctgtgtgaggtgtcagtctgcccctacttgggggtgcctcccagttaggctgctcgggggtcagggacccacttgaggaggcagtctgcctgttctcagatctccagctgcgtgctgggagaaccactactctcttcaaagctgtcagacaggaacgtttaagtctgcagaggttactgctgtctttttgtttgtctgtgccctgcccccagaggtggagcctacagaggcaggcaggcctccttgagctgtggtgggccccacccagttcgagcttcccggctgctttgtttacctaagcaagcctgggcaatggcaggcgcccctcccccagccttgctgccaccttgcagtttgatctcagactgctgtgctagcaatcagcgagactccgtgggcataggacccgccgagccatgtgcagaatataatctcctgttgtgctg

SEQ ID NO: 41902 - DNA, 2212 bp, Homo sapiens
tgggcctttcacccatatcttgtccctgtgtgtcagttttgcaaggcagtaatatcgaaaccaaatcctaaagcagtttataatttagcctgacacactgtgcaagccaggttttgtatgcaagtttgtgtgtatcattaactaatgaaatcttaaaaagcagtttggcttatttatagataatggagctgtttcttaaccttgtgccttttttttaagctggtagaagcatatcctggttattatctggaatgtagtaatacggtaaccttaagaatgccataaatatttaacctaataaggggattgctagtcttcttttcttgattgaaagggaaacaaatattaatatttgatcattaatatgtgttttggctgtacagatttctccagaggctgtcttactgctttttggtaattagaaattaccaaaaaaaaaaaaaaagaaaagaaaacaagactagtaacccaaaaaggacttacttggtgaaattgtcaattgtcagttgggcactgtggccactccttcctatactcttccctgacttccagaagagaagccaggaactaggtctcccagagtccccttttatatgtgaagtccactcccaggactcccaggaaacttgcaaggctgaagaaagagaggcagttagtcataggagacagttcagtcagatgtgtgagccaaggccagtgtatggtttagcagcagtggacagtcaggctctgtgaatcactcttcccaagctgcaggctgacagaggctgagatcctttccagacgtcttggcttctgggcaagttctggagaatctctcgcttcaatattgaattgtataacaacagtacaaggtctaggagaaaagaaatggaagtgtactgttgtcaggttctttatagtatatgtggaatagtgcataatattactttaaagtagactgtggtaagtaaaatatataatataaaatccttaacttctgaaaaagagttatagctaatagccaacaaatgggataaaatggaatcataataaatattctaattaatccaaaataaggcaggaaaagaggggaaaaagaacagattgaacaaatagcaggatttctatagaatttgaatggaaacccaaccatatcaataatcacaatgtaaattgtctaaacgtttcaactaaaaggcagagattgttagactgagtaaaaaaaagcaagacctaactatatgctgcctataagaaactaactatagctatgaaaacacatatagattaaatgtgaaaggttggggaaaaaatgtattatgcaacactgatcaacagaaattgggaatggattgttaatatcagacaaaataaattatagggcaaaaaatattaccaggaataaaaatggtcattttagaaagataaaggggtcaattaaaaaaaaggacataaccatcctaaacttgtatgtatctaataacagagttttgaaatatgtgggtcaaaactgatagaactgaaaggagaaatacacagttatatacaattatattcagagatttctctaccctcaataattgctagagcaaggagacagaaaatcaggaaggatacgaagacctgaacaacacaatcaaccaacttgatctaacagacttatagaacactccacccaacaatagcagaatacacattcttttcaagtgtgcccagaacattaaccaaggtagaccacatcccgtatcataaaatatctcaataaatctaaaaggattcaaatcatttaaagaatgttctctgaccacagtgggattaaatgagaaatcaataatagaaaaacatttggcaaatccccaaacatttggaagaaatcctggaaggagaagacaagagcagtgggcacaggaagaggggcagagtcagtgggaagtggtgacaactgggtacagaggtgaagaaaaggggcaaatctgagatgacattcatgtttctatgctcagaggcatccaagaagtgagtttaagggatgcatggagataatttttttttttttgagatagagtctcactctgtcacccaggctggagtgcagtggcgctatcttgggtcactgcaatctccgcctcccaggttcaagcaattctcctgcctcggcctcctaagtagctgggattacaggcgcctgccaacaggcccagctaatttttgtatttttagtagagacgag

SEQ ID NO: 41903 - DNA, 1027 bp, Homo sapiens
tcaaaaagatagtgtgatttagcactgaaaagaaaagcttttgtgaacacaggcacagaaacaggacaacgacgagtaaatttcataataagggagcaaatatttgttgttggaggaaggactggaatttcctaattccatgtcaagcaaccaaattcttcatagccacagaaaggaaggtaccacctaccctcaagttggtgagactgggtcatttttttttttctggaatacgtgcaaatagattgtgtatcatgggcctttgcagaataagtattcatggcttgaaagaaaactccaggaagagtagtagaggactctaagaattgccacattaccattgttttggaagacacagaggatgatattgtgtagacatcaatgactcagtgttgggctctgaatgggaagaaactttaggaatacctgaacaaaccagtttatttatttcacttgtttttccttttttttttttttgtattcatgaatgatacttaacaagaaacacacaaagctatgtttaagcctaaaataattcttttgataaaagtaattttaattttttaattttttgaaacagaatctcactctgtcacacaggcgcagtcttggctcactgcaacctccacctcccgggctaaagcaattcttttttttttttcccacaagaagaaaaagtacattttatttaatgaccaagtacacacacacattcacacacatgcatatgtacatataactaaaaaaaatattttttctcatcacatgggatgcattgtgaaatattctacattctttcatttaaagaaaaatgctggtcacgttttagtaaaaatctttcacaaatcactaatatgttacaatgcataactgctctagagcattaacaatgctaagctataattttagggaaatatatagtggtgctccttcttagaattagcccatgtggtattttaggtactcaactcagggaaaaaaaaaatgtaacatagccttgttaccatgtattcagcctggacatggt

SEQ ID NO: 41904 - DNA, 1099 bp, Homo sapiens
ggaacttgagcagacacaggtgcaggcagtggtgactctacaggccctgctattccgggcccttttgcaacgttgtggcaacaataaaattttgacgtagccatcctccatttggaagtctggtggctggtttgccgtggaaatgaccctgtttttatttccagaattacctctgggtttagagaagtggtttttaaacgagtgtgggtaaaaaaaattacctgaggtacttgtcagaatcgcagacttctaggtcccacccagctctcatcaatcagtttagtgagggtggtgcccaggactctgattttaaacatacccctagaaagattctgatacaggtagaggtgagaagccctggtttagaagcagctcggcctcccttcatggtgggaccagggccagcagggaatgtcagggccacccctgaccttcactgtgactctgctgcagagggtggcctggaggagatggtggaggagctcaacagcgggaaggtgatgtacgccttctgcagagtgaaggaccccaactctggactgcccaaatttgtcctcatcaactgggtatgtggagcctgtttcatctaggtgtgacccaggaaaccccattgtcttctttcctgttttgacttgacttcaggaacaaagtgttttactggcatgacttagtagatcaatagaacagctctgagctggtgaatgagcagaatagttgacagattcattgtggcccaaagaataactgtggctttgctatgcagaattcaccttccaagcctagagttcttcctgcaaaatggattaaaagcagtcacagggagtccttgctccgtgctcttgagggtggttgttctgatggagtagagagcctgagggagtgtttaggagcctgggagtacagggacagggcctccttgatcccttggtggggatcaagaaaactcttgaaggctgggtggggtggctcacacctgtcatcctagaactttgggaggccgaggtgggtggactgcctgagctcaggagtttgagaccagcctgggcaacatggtgaaaccccatctctactaaaatacaaaaaattagctgggcatggc

SEQ ID NO: 41905 - DNA, 1046 bp, Homo sapiens
tcagattattatttttttgctactgagttgtttgagttccttatatattctggtcactaattccttgtcagatggatagtttgaagatattttctcccattctgtaggttgtctgtttactttgttgattgtttcatttgctgtgcagaagccttttagcttgatgtagtccaattggttgatttttgcttttgttgcctgggcttttgaggtcttaacccaaaaaaaatctttgcccagatcaatgtccaggggcatctacccagtgttttctttgagtagtttcatagtttcaggtcttacatttaagtctttttaacccattttgagtttttttttaatatggtaaaagatgaagatttagtttcattcttctgcatatggatatccaattttcctagccctgtttatgaaggagaccgtcctttccccagtgtatgttcctgtcacctttgttaaaaatgagttggctgtgtgtgtgagtgctctgttagtttccattgttgtgtctgtgtttatgcctgtaccatgctgttttgcttactgtagttttgtagtttaatttgaaatcaggtagcatgaagcctccagctttgtactttttgcttcagattgctttagctattcagggtcttttgtggcttccagatggcatttaaaattagttttcattgattagaaggaaggcctttgatgcaaattatgcctgggctgtctattgatacacagcagggaacagctacagaaggaaccactggatagcacagtggaggtcaagggtctcacgtgaactgggacaagaatgaggggtttgctccaagttggtttgtttgagcccttgaggggaactcgtgcctcagttttcagcagccagacaggtgccttctagtttcctgattccagtcctgtgtggtatagtagtggcccgtgctgtatggactgacaggagtttggcccatctcctgggcttgcaaagcccttctttcaagtgctgctcctgctgcagggggcccatgtgaccatcaacgcacgggccgaggaggatg

SEQ ID NO: 41906 - DNA, 2008 bp, Homo sapiens
tcattagctatttgctggccgctgatgtgaatcccagttgccacccttgtcacagaacatggactctgagcagggaggtgggccaggcctggatgctggttcaccaggcgtccctgggtggaggccttggagaatggggtggaggccccctacggagcaggctggtgtctactctagccttttttgggaatgctctgtaggagggtatgccctgggggtgtggtcactggagccgcattgggacagggtgcagtgttggccaaggcttagcagggtggcagggatatttctgaggaggaaccagagctgcagcgaggtgtgctgcagcagtgtggggctgccgtgggctgcccgagcaggtgggatgtgggagggagcccctgatatgcatctgggctcatcctctttgcagccgacgacacagagatctcctttgaccccgagaacctcatcacgggcatcgaggtgatcgacgaaggctggtggcgtggctatgggccggatggccattttggcatgttccctgccaactacgtggagctcattgagtgaggctgagggcacatcttgcccttcccctctcagacatggcttccttattgctggaagaggaggcctgggagttgacattcagcactcttccaggaataggacccccagtgaggatgaggcctcagggctccctccggcttggcagactcagcctgtcaccccaaatgcagcaatggcctggtgattcccacacatccttcctgcatcccccgaccctcccagacagcttggctcttgcccctgacaggatactgagccaagccctgcctgtggccaagccctgagtggccactgccaagctgcggggaagggtcctgagcaggggcatctgggaggctctggctgccttctgcatttatttgccttttttctttttctcttgcttctaaggggtggtggccaccactgtttagaatgacccttgggaacagtgaacgtagagaattgtttttagcagagtttgtgaccaaagtcagagtggatcatggtggtttggcagcagggaatttgtcttgttggagcctgctctgtgctccccactccatttctctgtccctctgcctgggctatgggaagtggggatgcagatggccaagctcccaccctgggtattcaaaaacggcagacacaacatgttcctccacgcggctcactcgatgcctgcaggccccagtgtgtgcctcaactgattctgacttcaggaaaagtaacacagagtggccttggcctgttgtcttcccctattttctgtcccagctcatccgtgtctctgaagaacaaatatgcttttggaccacgaattcccagtttggtctacacaggctcgcagctctcacctgtcctgctgtagcctgaatgctcccatgtgggaatagcaccccaccacctgcccagtgtctgcctctgctccgtgtctggggtgagcaccctcaccctgagactgtggctgatgatgatcagccaccaggaagaggctaaatgttaagatgggactgaagttggagccttcctgcgttccagttcctctaggagaggccaagggctgccctgctcccagcttcagggagcctctgcctacatgggatggcccactgtgtggcgtcaggtacctggcacccactgagcatccggggaattaggtccctcctgtgccccagagctgctaggcagactgctaggcggttgactcaaggtgttacctgctagtgcctggggtgaaggctgcatggagcccaaccttgctcctggccttcctgtgctcaggcctctccccttttcgccagggcttcctggtgcctctcccatgaagagggaacttcccctccactcccatggaagacccaggtttgggctgttgccagctttgaggccccctgtgggcttgcctgtcccaacccaagaggcagggctcaaagtgccacccgggggttgcaaggacagcagaggaccacctgcc

SEQ ID NO: 41907 - DNA, 1022 bp, Homo sapiens
cccatgactgaaatatgaggggctcatgtcagggcacgtactgaacagagctggattctcttttcttttttgtccagcacaacaccatggagtctctgttagagcgaggtgagaagctagatgacttggtgtccaaatccgaggtgctgggaacacagtctaaagccttctataaaactgtgagtacccagcacctgctgcctcctgggtgttctctctagagagcagtcgcagcttgctgcttctggcactctccactatgaacgggtctttcttagactgttgaatcatggtggatgattccttgtgcggcaagagcctaaggtgagcgcctcaggcccaggtggttggaggcagttcacttgggcgccgttggagtcgatgcgggccgaggccttgttccactcctgcctctgctctgccctctgctgctctggctgatttctgaactcctactcccagtccaggaaggctggttcaagttctgatcaccagagatttactgttgaatcttattcctctttctgctgagtagacataagtctttaagatgcaagcaattcagccttcctgaagaggttcttaagcttttaatttccctttgacagaaaatatttaattgacaaggatgggtgctgctgactgccgctttctctcaggtcagtgctcatgtcttcctatgtggagatggcactgttggcccatggttggatagtcatagggacaaatttacttggtctgtccacacacatttgctttcatgtgcacattggagggagatggctaggtgggattaggaagatagtctgtgaccagaaagcaagagagaaggtggcaacagtggtccccacaaaccacatcccaagtgggaaccacatctgttgtcctcaggaccatcttctaggaagaaacaccaccgtggtggtcagatagcattgtgtgaagacaggagtggggcaaagttaagatattctgccaatcccatttgtattattggtcctttgtttgtacctggcctaact

SEQ ID NO: 41908 - DNA, 1041 bp, Homo sapiens
aagcccctaaaaaaaaaaagtattccataaatacttgctgaatccaagaaccaaacctagtacttagcttatactgaaagctttaattatactatctcatttaatccttacaacagccctttaattgttatcaccctattgtatataagaaaaaaactaagacctcagtaaaaaaaaaaaaaagaaaagaaaaggctctcttcctcggcgctgcctacggaggtggcagccatctcctcctcggcatcatggccgccctcagaccccttgtgaagcccaagatcgtcaaaaagagaaccaagaagttcatccagcaccagtcagaccaatatgtcaaaattaagcgtaactggcggaaacccagaggcactgacaacagggttcgtagaagattcaagggccagatcttgatgcccaacattggttatgggagcaacaaaaaaacaaagcacatgctgcccagtggcttccggaagttcctggtccacaacatcaaggagctggaagtgctgctgatgtgcaacaaatcttactgtgccgagatcgctcacaatgtttcctccaagaaccgcaaagccatcgtggaaacagctgcccaactggccatcagagtcaccaaccccaatgccaggctgcgcagcgaagaaaatgagtagacagctcgtgtgcacgttttctgtttaaataaatgtaaaaactgcaaaaaaaaaaaaaaaaaaaaagaaaagaaaactaaggcccagggagacgaaagaatttgtttgttcaatgccagacagcttatcagtgtcagagctagcaactgaatgcccggtctctagactccaagattcatactcttattccataacataatttttttaaaagggggaaaaagactagaatcaggaagtaaaaagataaatgtaacagtttcagagattaaaggagcaaaccacaaggcaagagacaggtatcctccttgctcatccactgggagagtctagaagcctgacaccacagcaccaactaacacagcaggcccagctcttggcttgtaat

SEQ ID NO: 41909 - DNA, 1034 bp, Homo sapiens
ttctccatgttggtcaggctggtctgaaactcccaaactcgggccatccgctcgcctcggcctcccaaagtgctgggattacaggcatgagccacggcacctggcctagctgtctttttaaaatttttattttttgtagatatagggtcttgctctgttgccaaggctggtctcaaacccctaggcaagctatcctttcacctcagcctcccaaagtgctgggattacaggcctttttttttttttttcttgtgtataatgcaccatttctctctggctgccttcaaggttttggttttttttgttttttttgtttgtttgttttttgtattgagttttctgaatttgtttatgatgtgtcttggtgtgcatttatttgggtttattcttcacggggttctttatgccttttgccagatttgggagatttgtagccattatttctttgaatgcttttccagcccctccttctgccttcatcagggactccaatgacattaatattagatcttttgttatttccctgaggccttgttctgtcttcaagttcactgatttcctctgtctttattctgccctttaacccatgctaaagcttttttcttttgcttagtgcatttttcagttctgaaatgtctgttttgttctctacatcttctctttgctgaaactttatttttcatttgtttcaagcatgttcatagttgctcgtggaagcattttgaggatgcctcttttagaatctttgtcagataattgtaagtctacgtcatcttggtattggtgtctatagattgtctttttttgtttgaaattatcccggttcttttggttcttttttttttttttttttttgagatgaagtctcgctctgtcgcccaggctggagtgcagtggcgcgatctcagctcactgcaacctcctgggttcaagcgattctcctgcctcagcctcccaagtagctgggattacaggcatgtgccaccatgccaggctaatttttgtatttttgtaaagatagggcttcaccatgt

SEQ ID NO: 41910 - DNA, 1030 bp, Homo sapiens
attctgagagctgataaaatgtgccattgtgtgcagatctgggtagtttgaagcgttctcatttcctgaggtgtgtcagaaagactgcgtgagaaaggggtcacagtatcttggatgtcatcttttcatgcagtaaaaagtctggtttccatgaatgtttgtataacaaaccacctcaaaacttggcaccagtgtagcatgtctcatgactctgtgggttggctaggtttccccactcctcccactgccagctcccttggagctgaggctcacaccaggctagaagccatgaaggcctctgatgtgtctggcagtttgtgctggctgttcactgggccctgccatcctccagtaggccggagcgattcctgcacaaagtcccagagtagctccagacagggaaaagaaaggctgtggggcctttgaggcctaggtccagaccgtacactgctactccccacgccattaccttggttagagcaagtcacagacaacccttagggacatccgtttggggagaggaaaaggcatggccactggacagccctccacagctcttttcataatgacctgatagagcagccacctttagtctagtgcagaatcccagcaaatatcattctgatatcagtagattccatagggcagagctgaagcagctgttctttgctaatcttggaagtttattgatgttttatttacacacctgtacagacagaagataatagagattgtttagaaatattctgtcacctataatgactaagcattgctataatggagcatgtggtttccttaattgaagaatacctaaatagaagcccattcttaactggcctcagtataaacagcttgtagtggcaggtcaccaggcctggatcacagtgccctaccttgtttttgcttcataggcagaatggtggtaagtggtactctggcctgggcaaggtctgagcaaggcctgcattgatggagggtccagagtccagctctaccatctgcacattttctttggagacttgtgcttagc

SEQ ID NO: 41911 - DNA, 1032 bp, Homo sapiens
tcagtgagccatcagccaccaggtgccacctttcagtgagtgggcttctatcccttccaggtgtctcttcatgctccatgggaattagatgggacatgctttgactctctcttccagaagctttctcttctttttgaaggggcttctgtttgcgctgggtggtcaatgactcagcctagtcttgatttatcccccaggatggggacagacagcaggggagagatctcaggttgagatgagtgtacagtaagggctgggagtatcagaaggggaaacgctctcccagatagtgacaaagctaagcgaccatgtgaagggagaggacaaacatcccatggaaagaagggtagctgccaggcctgcgggaaggaaggagcatgatgctggggcatgggagcaagtggacagggagggctctgcaggtcccctggaacctaaagccaggggttatggaaggcagatccagattcaggtgttcagaggatgaggcaggggtgggtagtttaaggagctggagaagaggtatctccttggggagtggaagatgttagagagatacagggttgcaggacaacagggaggtggaaagagagtgggggatggactgtggcatctgggccccaccaggaaggaagtggccccattggtgactcatacagggaggggtggggccagtgggtgcctgggagctctggtacttgggcaggtctggcttcctgctgccacatctgttgggaggtgaagcctgcaggccaaataatgaccttcattttcaaagcctttttgaataaataaacttttttgaggtttaacttacatatattaaaattcacttgttttaagtgtttagtgcagtaggttttgccaaatgtgtgcagtcactacactcgatacaaaacattctatcactcaattcaaaaaccttttagtatacctccaggtcttggcgcaaagagggcttgctgttgttgggtgtgggggctcacccagtcctggagacagaatgggctctttgtctgaaggtggggcagg

SEQ ID NO: 41912 - DNA, 1049 bp, Homo sapiens
gctaacatacacctcacttatggcatcttgacatggtctcatgtcttggttttgaagattgaaggagaaaatttaagattcttcatccttgccttaagcaaaatatcgacatttagatattctgttgtcttaagagccacttggctctgagttcttcagtggttgttgttccctgggggaaggagacagtgtggcttgcccaggactggagactagcccctgtcacagccctaggaagcaggcctgtttcttggggtctgagtctgacttcaaaggaagcacttgctggcctttctctgcactcccagtacagggagcatacccagtgacagcactctgagtgctcaaccatcagcttctctgtgtgcctgtgttactgcctaccttcctgaccccatcccccaggcccacaagcccagacagtaagggtcaggagcatgttttgtgtatccaaataaatgccttgatttcaccagtggctcagaaagctgttatgtatagtagaaatccgatgaaaagtttacaggtagaaggaagtgtacagctgtggagatgcagctgtggctcttgggttgttttcagctagcaagcacttctttcctagtttgccttcttgaaatgggagatcaaggaatccttccattctttagaattcttcaaaatcttacggtttagagtagtctgccacctgaatctagtgctgagaaatatctgctctaaaaattaggctttttcattttcttttcctcaattttcatctcaaagtagtgacttcccaggaaagtgctgttatccgccacttcttgaagctaaggagatgaggagctctcaaatgacgctgcctgatggctttccatcgtcagggtgctaacctcccctccttctgattcaccttattccagctgttctatgaatcatttccatgtttaataaaattgaccccctgaccatgtaacccacccacttctcccttgatgtgtgtgtgtgtccctgtgatggtgtctgtgctacctgttactgtggtaatggtgtagggttttggtgtttgg

SEQ ID NO: 41913 - DNA, 1045 bp, Homo sapiens
ttccattctttggctaataggatcttttgcagagcagaagtttttaatcttttttccccctcgtttcctacctcagcttctatgccctaagtttttaagcttgatgacatccagtttattaattttccttttatggattgtgcttttggtatgaagtctaagaactctttccttagccctagatccccaaaatgttctcctatacatttttctaaaggttttatagttttgtgttttacatataaatctatcatccattttgtgtaaatttctgtataagacgtttagatcaagattcttttattgttcattttatatttttgtgtgtagatgtccagttgttctggtgccattagctgaaaactctgtctttccttcattgaattgcttttgtacttttgccaaaaatcagttggacttattggtgtgggtctatatctggattttcagttattttcctttgtgtgtctgtttttccatcgataccacagtgtcttgattactgtagctactaaactttatttttcatttacaaaattgttttaactattcaagggccttttccttctccatataaatttgaggataagcatatctatgtctacatataccttactgccattttgataggaattggcttaaacctatagatccatttagggagaaaatacatttttaccatgttgtcttccaatccatgcacatagtatgtctcctcatttatttggatcactgatttttttaatcagctttttgtagttttcagcatatacattgtgtatatgttttgttatatttacacttaactattattttcttttttaaccttggtgtccacatattcattggtagtatatagaaatataattgattttagtgtttatgttgcattctgagatcccgatgaactcattctagggctttttttttttttttgtagattccttaggattttctatatagacagtcatgtcatctgaaaataggaagttatttcatccttcccaatctgtgtgccttttatttccttttcttgccttattac

SEQ ID NO: 41914 - DNA, 1022 bp, Homo sapiens
gctgagtggtggccactcttctttcctctctccctctgttcctctcatccttgtgttttgtttcatttttttccttctctctggactctgttagtactaagcctgccaggaaattctttcattcacacacattatagacagtggctaagagttgtggctctgctgttaggctacctgtgtctagttcttccatcctgggcaagtcatagcctccctcagtataagggtgacttctatgcccattgcagaggggagaatggatttgatgagaggtgcatgccaagagttggctattactgttacttaatgctgttcctggtattcagagctaaaggatcgaggttaaaataaactgaggaaataccctggaatggggaccctcagaattgagtatatatatcagctggggtcctgcctatcatgcagagtctgaatcctgacgtccctaactaacccaggttgaaccacactggccatcagggctctctgaggctgttcctctcatggctggacattagaaccacctggagagcttacagaactgatatccaggccacagcccaggtcccctaaatcagaagccctctagcaccccagggattaatgcttgctgccgcaagtgaattttaatttaaaactctcttgtcagtgtttccagttggctgcacagtggcttaaaaagatctgagtgtccaggccaggcacagtgtctcacgcctatagtcccagcactttgggaggccgagacaggtggatcataaggtcgggagttcaagaccagcctggccaagatcgtgaaacgccatctctattaaaaatacaaaaattagcggggtgtgatggtgggctcctgtaatcccagctacatgggaggctgacgcagataattgcttgaacctgggagcgggaggttgcagtgagcgaagatcgcgccactgcactccagcctgggcaacagagcaagactccatctcaaaaacaaacaaaaaaaaactgagtgtccagtgctggcattttctgta

SEQ ID NO: 41915 - DNA, 1040 bp, Homo sapiens
gaactcctgagctcaagggatcctcctgcctcagcctcccaaagtgctggccaacccactgttctctatctgaatattttctctgattgtgttgaaagtttttatatttgtaaaattctgagcagcagaaacagagtaaacatgggattttttttatataatttttttttttttttgagatggagttttgctcttgttgcccaggctggagtgcaatggcgcattcttggctcaccacaacctccgcctcccgggttcaagcaattctcctgcctcggccccccgagtagctgagattacaggcatgcgccaccatgcctggcttattttgtatttctagtaaagacagggtttcaccatgttggtcagtctggtctcgaactcctgacctcaggtgatccgcctgcctcagcctcccaaagtgctgggatttacaggcgtgagccatgcgcccggctggtatttttttttttttttgtctggagatggagtcttgctctgttgcccagactgtagtgcatgatctcagctcactgcaacctctgcctcccgggcccaaccgattcttccacctcagcctcccgagtagctgggaccacaggcgcacaccaccatgcctggctcattttttgtatttttttagtagagacggggtttcaccatgttgcccaggctggtctcgaactcctgaactcaggcaatccgcccgcctcagcttcccaaagtgctaggattgcaggcgtgagccaccgcacccggccgggatgttttaataatactcttgtccccgaagtctgagccaagctgttttgaaggctagcctggtgttacttgatacccagagctggccatgtctgctgtgtatttgttacacgtaacgtgcttttcaaagtgtgcctggtctgagcaaatacagggcatcagaggctggtgaaggggaagcatctctaacccttgaaagctgcgtctcctggcagcagtccctggcacagccctgggcccaggagagctctcagccacatacctgagagaaccagcct

SEQ ID NO: 41916 - DNA, 1025 bp, Homo sapiens
atggtgaaaccccacctctattaaaaatacaaaaattagctgggcgtggtggcgcttgcctgtaatctcagctactctagaggctgaggcaggagaatcgcttgaaccccggaggcggaggctgcagtgagccgagatcgtgccactgcactccagcctggtgacagtgagactcttgtctcaaaaaaaaaaaagtacattgctataagagaagtgcacacggatactagtagttaattcagtcacatctgtgaaatagcttataaaatgctacttttaaacaagctgtttttatgaaagggcttgtaaatgtttatggtatttaagctacctctctagccataacgtattatacattcaagaaaggttcaaaaccagatatactagaaaccaatctttattttttaccccactactaggtaaggggcctggataccaagaagtgactgctcatctaatccataaagctatgttaacagattggaggtagtagcattttcattacaagtgactaaaagaacagctgtttacccctgatcgtgcagcagtgcttgctgttccttagaattttgccttgtaagttctagctcaagttggggggtggtgatagacatttaagaagccatatatcttttcagaagtaggtgtgatgtactaaaagtttgagacactttctagaagtctcactatttaagttatgactagtattggatttttggcatgtctttgggtttcatgtttcttaacccaactgcctgcagggccttatggctgtcaggagcagttcttgggaattaaagtaattactgaagaagtattctagtgagaaaatgaatttatgactcagaagcccctaaagacatgggtactaagcaacaaaataagcagatgttaattaactgtaattttctcttacagctgtttgcagacaaggtcccaaagacagcaggttggtccattttctaagtttaacaaagatgttccaattgtgacagtttgtgtgtgtgtgtgtatatatatatttt

SEQ ID NO: 41917 - DNA, 1231 bp, Homo sapiens
aaaagttgccctggggggaacggaacaaacactacttttcttcaacctttgcttccacagactttttcatccctaagatactagaagaagagcatacataaacgacaaatatagccaatgtgatacagaatgtcagatactatgatagaaacttggcccttagctgggtggttgaattaggtgctacttttttgagatggagttttgctctgttgccaggttggagtgcagtggcacaatctgggctcactgcaacctctgcctcctgggttcaagcgattctcctgccttggcctcctgagtagctgagaatacagatgtgtgccagcatgcctggctaattttttgtatttttgtggagacggggtttcatcatgttggccaagctggtcttgaactcgtgacttaaggtgaaccacctgccttggccccccaaagtgctgggatttcaggcatgagccactgcgcccaaccaattaagtgctttttttttttttttcttttctcagactggatctcgctcttatctcccaggttggagtgcagtggtgccatctcagctcactgcaacctcctcccgggttcaagcaattcttctgcctcagcctctcaagtagctggaactacaggcatgcaccaccactcccagctaaattgtgtattattagtagagcgggatttaccatgttgtccaggctggtctcgaactcctgggctcaagtgatctgcctgccttgacccccccaaagtgctgggattacaggcatgagccactgtgcccacccaattaagtgctgcttttatgttactattaataacatgcggttggttgggttttttgtttctttggggtttttgttttgttttgtttgtttttgggggaggggggcgcaattcattctatatgtgtaactcttttttgagatggagtttcgctctgtcgcccaggctggagtgcagtggcgcgatctcggctcactgcaagctccgcctcccaggttcacgccattctcctgcctcagcctcccgagtagctgggactataggcacacgccaccatgcccggctaattttttgtatttttagtagagacagggtttcaccgtgttagccaggatggtctcgatctcctgacctcgtgatccgcccgccttggcctcccaaagtgctgggattacaggcgtgagccaccgcacccggcctatatgtgtaactctttaatggtaattgg

SEQ ID NO: 41918 - DNA, 1032 bp, Homo sapiens
ttgaacctgggaggcagaggttgcagtgagccaagatcgtgccactgcactccagcctgggcaacaaaagcaagactccatctcaaaaaaaataaataaataaaaaataaaaaataaaaatgtgttctcctttgacaaatatgcttttattgtagaaaattttgaaatttcagaaaagaaacaaaataagaacatgtaaatgattcagaatgctgcgtgctacacagagatattagtgtctagccttctgagtttttcctatgcaaaattttaaatgcaaatttacacatatatgggtgtataaatatatatatgtatatatatttgtattacataactaagatccaaccatgcatactgatgtgtaacatgaaatttttattttatgcacaggattagactgatcaaaatctttggttcatgatacactctcattgttaatccatttattcattcattcatttgctaataatgttttcataaaacttcttgaattaccagccaactcaagaactagaacactgacaataattcaaatctactatatgtcttccttccatattttattcttcccccacctctcaggtggccaaaatcctaaattatttttaaaaaatcatttagttttattttttaaacattataaaaagagaatcatattatacattgtattagtcagcgttctcaagagaagcagaaccaataggatatctatccatctgccttttttttttttttttgagatggagtctcactctgtcacccaggctggagtgcaatggtgcaatcttggctcactgcaacgtccacctcccaggctcaagagattctcctgccttagcctcctgggtagctgggattacaggcgcacaccaccacgcctggctagtttttgtatttttagtagagacagggtttcatcatgttggccaggctggtctcgaacttctgacgtcaggtgatccaccagccttggcctcccagagtgctgggattacaagtgtgaaccaccgagctgggtgtccatctgcc

SEQ ID NO: 41919 - DNA, 1056 bp, Homo sapiens
ccgccaccacacctggctaatttttttgtatttttggtagagatggggtttcaccgtattagccaggatggtctcaatctcctgactccgtgatccacccacctcggcctcccaaagtgctgggattataggcttgagccaccatgcctggcctgaagatggagtctttaaggaggtgattgaggtaaaatgaggtaattgtgtgggccctaatccaatctgatggatgtccttataggaagttattaggacacagagaggaatgatcattggaggactcatggagaaggcagccatctgcaagccaaggagagacctcaggagaaaccaccctgctaaatttaccttgatcttggactttcagcatctagactctaagagaataagtttctattattgaagccactcaagtctataatacttagtcctggcagcccaagaaggctaatgcaccaggtgattttgaagcaaaccctagagttcagtttgtagatagaagtgcagtagtaactcatcaagacagaagagtaacaagccttatgttgctggtcattctggcctcatctgctggctgccttagggtctctggggtgagttctgaggaccaagtctacactgtcaacatggccacggacgagctgctcagagtgacaggacaaccctcactgtgctgtatgtaaaccataaatcacagcacactctttgtggttgggagaacatgtatggtgttttgggagctggcacagtcagggatgtcattcatttcatctgggacaggctttgtgctctgggatctgtggcgggagcagtgagcccagccatgtcctctgcatgcatcgctgtgtccttgtgaacagtggatctttgttagcgcgcttcgcactccttggcttttttatctttcaatcaagaacagcaactgctcttcaaatgattctacaggtatgagggagtttacatttggatttgtcaatggaaccattaggattttttgtttgtttgttttgtaaaaataagaacttttttccttagccttgtgtctgtgccaaaaatgtg

SEQ ID NO: 41920 - DNA, 1139 bp, Homo sapiens
taaagagcattttgttacagcttgcttttttatctagtctgatagtttctgccttttaattgtgaagtttacataattgatgtcattatgtttaagtctatcattttgatatttgttttctctttccctttgtgctttcttcctttgtttctcctttttgattatttttaactctgttctattgctactggcttttttgctgtaactcctctatatattgctatatatatccatgtcttgtcacagattaccatccattaatatcatttctttcttgtacactgtaagaacctatcagcagtatcattccatttgtactccctcctgttttttgcaaactttttggcatatattttctttctatacgtgttataaatcttacattagattttttttttgctttaaacaatcgacttttcacctttttatattgaaatgatttaattatatatacgtagtagacttaaagcacacagagtatatacagagtacacagagccctcatacgccttccacccagatccctcaagtgttaacatttctgaaccattaagaataagctgtagacataatgccccatgaccctttaacacttcaactgtaccttccttggtacaaggacactctaaccacaccattctgacatcattaaaatcaggaaattgacatccatttgatcttgctacgtaattcatgaccccacccagacttgctgattgttatgatactttctttatatagctctaggatccatagattttatagattcaggatcatgtgttgcatttggtttgcatgtctctttaggctctttgaacttgaaatggttcctagtcttttcttgtctctgatgattgatatttttgaagattacagatcagttagtaggatgtctctcagttgggtctgttttttcctcatgagtttatgtgtttttgataggactgccacacagatgatgtattcttctcattgcatcatatcagggaaaataatgtcgatttgtcccatgttggtgatgttaactgtggttacttggttaagatagtcttgccaagtttcttcattttaaagttcttatttattcttattttacttacaagactgtagttctctagtatccttatttattttgaagc

SEQ ID NO: 41921 - DNA, 1024 bp, Homo sapiens
tactgtatttaaacagcagccctcctatggacttttaggttgtcattttgcttaaaaaataatgaagcaattaattttctaacctgtcatgtatgtaatgcatctgtaggattaattcccgaaaatgcacttgctgggaaacataagtgcatttgtaattttagtagatgttaacaaattgttttgtatggtagaaccaaggtttattctttttttctttacccacctctcaagagaacagtttttattaggtgaaagtggtatttgctaaaaattttgagtattttccaaaatgaacttgttaagttttcttactaaaaaatacatttgtatctcagaagaaagtagcaaaatatattatatgaaaaaaatcacacccactagaaacaactgttattagtctttcacgttgctttcctgtttgtgtatgcttttctgtgttagcagtaataatacagtcttattaccttggtatttatttcaaacacttgcttagtgcccactgtgtaaagagctttctggggagctgtcactgcctgcctgaatctccctcactgtctgagggtggtcttagtgctcatgaggtcgagaatatcgagtgctgtgtcagaagggcagaggtcaggtggatttaaagctgttgcaccaaagccaggtgtggcgacatgcctgtagtcccagcctactcatgaggctgaggtgggaggatggcttgagcctaggagttagagaatgcagtgagccatgattgtgccactgcactgcagcctgggtaatagagcaagaccctgtctctaaaaaataaaaaaaataataaataggctggcacggtggctcacgcctgtaatctcagcactttgggaggccgaggcgggcggatcacctgaggtcaggagttcaagaccagcctggccaacatggtaaaacccccgactctactaaaaatacaaaaattagccaggcatggtgacacatgcctgtaatcccagctactcgggaggctgagacagggagaattgcttga

SEQ ID NO: 41922 - DNA, 1054 bp, Homo sapiens
tcatacttatcatttagacctctccagcaccgaggaaaggtcctttttccattggtaggcaccaaagcacttaaaaaaaaaaaaagctaatctgtcaactgacactgcagggagtgctggaagtttgtggaaattcacataggcaggggtgcaatgtgggtgtccacagaggagttctttgtcatggagcttgtaggaggggatttgtcgtagtgcctcggatgtgcaccttaggcagtgtgatttatgaggatggcaggtgtctctctgggactatagcctatcactgtccagctggacagaatcatcgctccaggttccactgtcttctcagacccaggcactgagtttggtgcctcttccagtcattttccctcattcctgctgggccctcatgtggctgtgcagttgcggtttgtctgtctccctctttagactgggggttccctgggggcagggacggtggcttctacagccccagtgtctggcgcatagtgaatactcatgagatgtactgaatgttggccttaaggatacctaggcctttttataatactttaaacatctttgttcagaggcggttttgttttattagataaaacccaccttgtagtttattcataagggttaaataatttgcgcaaatgaaaatgcctgaaccctgtagcagagacatgctgggtactgctcagtgtgactaagtgttcttctctttcttccttcatagactttttagcactttctccagagtaatactgagctcaatgttttgcatggagaatgcagctagaaggtatagccatactatttactttggtccccaagtagaggccactgtttcatgagtctgcttttgctggttcttttagtggattcatttctccttgtaaattaataaacaggtgccctgacttataagttagtttctgagaatttgttgagcagatccagttactccagatcctgttcacccaagtgagctgataatgttgagcttcagatttaacaaaactcaagacccgcagttggcatctgagggccagccttgcccaga

SEQ ID NO: 41923 - DNA, 1054 bp, Homo sapiens
agccccatcatcctcagcgagaacagcagctaccctgcattccgtgctgaatgggtaggagtggcagagggaggctgcagcagatgtgcaaagatgcatttctttacttaatagtgttaatattccactttctaggaaggcttacccatcaattaaaattatttgagacattaaaaaaagaaacttagggtagctgctattgaagactaaggactagggccagagagacgcctgcctccaagtagtccacagaatctgcttgttaaaatgttcgtgatttggaggcccaggtagaaggggcaggttcctctgaagcgccttggcatgccctatctttggcgttccggggtcgccctcctctgctagtctgtgagcagtcagaaggttgtatctcctgttcattcctctccttgtctcttgctgctcagaacagcagctttaagaacagggtggctgagccctaagtgtacctttggagcatcctgtgtgtcttcagcattgattgactgtttttactgtggatttaatttcagttactttactctggtcttactacttcggcttgactgtgacatcgttgagggcaggggctgtgtcacctctaaccaaagggcctccccagatgcctagcctggtccaagcgttccatcaagagtcagtaccagcgtttattgctgtccagtctgtgcaagctccatgctggctgctgggtaagagccaagggcagccaggcctaatggctcatgcctgtaattccagcactttgggaggctgaggctggtggatcacctgaggctgggagtttgagaccagcctggccaacatgttgaaaccccatctctactaaaaatactaaaattagccaggcatggtggtgggtgcctgtaatcccagctactccagaggctgaggcaggagaattgcttgaaccggggaggcagaagttaagtgaaccaagattatgccattgcactccatccagccttggtgacaagagcaaaactccgtctcaaaaaaaaaaaaaaaaaaaaaaaaaaagagcaaaggccagagg

SEQ ID NO: 41924 - DNA, 1093 bp, Homo sapiens
aaaatgtaatccatcatattaacaagctaaagaagaaaaatcacataattatatcaatcagtggcagaaagtttatttgacaaaattcagcacccattcttgattaaaaactcagacaaatggggctgggtgcggtggctcacgcctgtaatcccagcactttgggaggccgaggcaggtggatcacaaggtcaggagatcaagaccatcctggctaacatggtgaaacactgtctctactaaaaatacaaaaaattagccggacgtggtggcgggtgcctgtagtcccagctactcgggaggctgaggcaggagaacagcatgaacccgggaggcggagcttgcagtgagcccagatcatgccgctgcactccagcctgggtgacagagtgagactttgcctcaaaaaaacaaaacaaaacaaaacaaactcagacaaacaagatatgtttttgaacaatgaatatgtggatatcaaaattaaatcaataccattcacaatcacttaaaaaatgaaacacgggtataaatcttacaaaacatgaataagatttgtatgctgaaaactatagaacactgatgaaagaaatcaaagatctgaataagtggagagacacactgaattcatggattggaagactcaacctaattagtatgttacttgtccctaagttgatataaatggaccaactccttgaaaagcacaaactactactacaagtcatccaatatgaaataatttgaatagcttgtaactattaaaagtgaattctacaattcctatcaaaatttcagcaagaattttttgtagatataaacaagactattcttaaagtgcagtggcacgatcttaaatttcaagctattcttgaaatttaaatggagaggcaaaataagtagaatagctaataataattttgaaaaagaagaaaatgagaagagtcagcctgtctgatttcaagatagatcatactgctatcacaatcaagactgtggtatctgcagagggactgacacagagatcaggggagcaaaatgaactagaaacagatccacacatatatgcccagctgattcttgacaaaggttcata

SEQ ID NO: 41925 - DNA, 1798 bp, Homo sapiens
taatattcaaaacagttgtattcatagtagcccaaaactggaaacaactccatgtcctttggtggataaatggttaaacaaaatgaggtccatccatgccacagaagactattcaataatacaaagggctgggcatggtggcacctgcctgtagtcccacctactggggaggctgaggctggaggattgcttgagcccaggaagtccaggctgcagtgagccatgatcatgccactgtgctccatcctggatgacagtgagaccctgtcttaaagcaacaacaaaggaacaaactacacagcaacctggatgggcctccagagaattatgttgagtgaaaaaagccgttcctaaaggtttcacactgtatgttcctttctgtaacatctttgaaatgacacagttgctgaggtggagaacagattagggtttgctaggggtggagagaagtaggtgtgcctataaagggcaacaggaggggtcctcacagtgatgggtgctctggctgtgtttacatccatgtcctggtgtgatgtgctgtagttctgcaagatgtcactgctgggggcaatagggtaaagggagcgatggatctccctgtatcatttcttataataagagaatttacaattaccttaaaataaaagtttaattataaagaaattgcaatttgactactacttggcatgtcagtgagagaatgtagataataaaatgatgtaaaaactaagtaatgattaagaaaaattatctaagttgtaagaaaagagagggaaagtgggaatggtgatacaattggaagtcaatatcttaaattgataagcaataggaatataagcccattatttagaaaaatggctctagatcctagaagaatcagaagacttcagtgtggctgcctcttggaagtggtttgtggatggggttgtcccagttagtaaaggagattgttgttgttttgttttacaattttttgaactttatttgcctttttaaactgtatacatttcataaaataaaaacaatcacaataataaaatccaccagtgataggagacatttaatcccacatactccagtgtggtgtttatgggaagtattttgtttttagaatgaacattaatgaacaagttgagagggatttaatagtagcttctgttttggaatgcttactgtgtgcagcaacactatttaacattttaaatatatttttctcatttaatcttcacaaaaccttcataaagtagaaacattcctctgggaggccgaggcaggcggatcacgaggtcaagagatctagactatcctggccaacatggtgaaaccccatctctactaaaaatacaaagattagctggatgtggtggtgtgcacctgtagtcccaggtgcttgggaggctgaggcaggagattcgcttgaacccaggaggtgaaggttgcagtgagccgagattgtgccactgcactccaggctggtgacagagcaagactgtctaaaaaaaaaaaaaaattctttctgtagtttccatcacaagctgacattttccccagtaggatttggtgcagtgcaaggctcacgtgggctcacctagtgactatgaatggactcatagcaggcttgctgtgtggttttaataatgggacagggtaattaatcacatttgtgataacaaacccaagaagctcttctcagatttgttattattttttgagacagggtctcactctgtcacccaggctggaatgtagtgacacagtcatgactcactgcagcttcaacttccctgggctcaggtga

SEQ ID NO: 41926 - DNA, 1032 bp, Homo sapiens
tgagtttgtgtaattacactctgtgatgttcactcaatgatgaaattgcctaatgacatatttctcagaatgtatctctgttgtcgagtgatgcatgactgttacacaggaggagtgtaggttatgtgcaactaatactgccatattgtatgaggaacttgaacatctgcagattttggtatcccaagaggctcctggaaccaagccccagcagatactgagggacaactgtacctgtttctccaccctctgaggaacgcagtgtttattcaaactttttggtctttgccagtctgatattcttaaaatgttttctcattatagtttgtacttataagtgaggttgagtgtctttcaaatggtcaaaagtcaggtctctttcagactacctttctagatccattgcccattttttctgttgggttattgcttcttttcttatatctttgcagtagctctcagtgtgtcgggtaagttagtcctctgctgtaaagttagttttaaatgttttcccctagtttgtcatttgtctttgttcatcattgtcttcaattggttctcttgcagcagagcctgaaactggggatcatgttccactgatctgtaaagggcatgctcaagagaaagagtgaagggggtagggtagggcagaggggaaagatgcctgaaaatcatagactcgggttaatttcaacctgatcatgctctaaagcctagaatgccacagctcggtgaagacagaagtagctcagggtgttacccatccaccctcagagcagtggggggatcctgggtgagacaccactgcctgtactacactccaccctgcacttcctcatccacatatttctcacgttaagttcattctatccagactcagcttctccagaggcatttggtcatgatttctggaaacctttccagatgaactacagccctgactacttcagtgggtcccaaggcctcattccacccactggggacatagcaccatgtagcaactattggtttagatgtatactgcatcctaaa

SEQ ID NO: 41927 - DNA, 1066 bp, Homo sapiens
ctacactccagcctgagtgacagagtgagactctgcctaaaataataataataacaaagaaatagtcaatcattgtaagtcagtaatacgacaggagaaattggaaatccttcagggtgaagattttattttagtaacatgctttattttagcacaaatgcataccatggacttgctggggatgggttggggagggatgatacagtcgttatagaaaatcatatcatattttattcattatgcttattcattcatcacatggtcactttgaattcttaccattccttatatttccaagatcaaatttgtttcttattatgctaatatccctataaattcccagtctccaggaggtctgagttggttctattatgacttattccacctgccaggggagaaactgttcctgagaaatgaagggactttcccagggcttcagggttagagagtggctggttttagacaaaccggtgctacccatactgttaacccaacacaggcatgcttataaggaaaggttaaaaaaagtaaaaggaactcggcaaatcttaccccgcctgtttaccaaaaacatcacctctagcattaccagtattagaggcaccgcctgcccagtgacatatgttgaatggccgcggctttctacgtctctaggggctgtggagaatacgtgagaagaccgcatcccctgctcacatgcagggcataccctacagtggagctgtatggggctgcctggaagccccctcaccccaggtagagaagtaactgactccatgactcctccagtagcagcctccaatgtgcagggaggagaggcactgagcacctgtgccatccctggcctctcatccagaacccagccccagggatgggagtgctccaggcaataagtggagaaaagcagttaagttaaactccctgggagaggctggggcaccgtctcagccagctggggctcatatgatggaatacaatagctgacgtggcttataaacggtagaaatttatttctcacagttctggaggctgaaagccccaggtcagggtgccagcactgtggggt

SEQ ID NO: 41928 - DNA, 1053 bp, Homo sapiens
aggagcctgtgaaatctgtccataatgagctctgcagtttggtgcttgagatggtgaagaagacagcacacgcatttacacagcattgatgtttctgctgctcttcactgctttaccatccactttctattcagacctgtgccactgtgcagtgcagtcactcgttgacagcaccttgtcctccatactgagttttgggcaggtagtagccatgctgggtgtggagtggatgtcccaaagaggatgaaaaatggagtgaatgaacgaaggaatctttgcaggggatttccctcactgcatacatagcaggatgctgcttcagagtctgagatctccacagtgatctcctggtgctgagcccagtgagttccagagtcgggttaactccatggggcaaaggagctccctcccttgaatcccacccctttctctgagacccaaatgccttcttatcaaggatagccctaaggaggcctggaaaaagcctgcgctttctgaggcctgggttcaagtccctgctctgagctatggagaaagttcttgtgttttctttccagagcctttgcccctccaaagcaaggctctcagggttccctgcagcattcattgttccagttctggtgcacagggctctgggaatgcagcctgggtgctttggggcatctggttcctctcctgtaaagcccaagctgccccaggactctggggggcagaggagagaacgctgaaagctagtgtgcatgactattagcacaggtggaattgagtagctagggcttagctcctcccccggagaagtgcttgatgctgatgtccctgagcagagaggtctttaggggaaacagccttgttcctacctgggccggcactgagggggaggtatccataaatatgtgctaagtggccagaactgagttcctttcctctcccagccccttgcttttgggtcactaattgtacctatatgacatacaatccatttttatttagccgagcacctgtcagaactgaaagcatcctattcaagacatccttggctgctcacagtcagta

SEQ ID NO: 41929 - DNA, 1459 bp, Homo sapiens
gcctggttactcctcatcccctgacatgctgtctcacagccgcccggacagggtgaggacgagctcctgcccggctgactccctgtgtccctggccctgcgctgtgggtttggcccgggcggcgtggcttttggagagctcttgctatgctctccgggcggcctaggccctctttgtgtgtgtgggatgtcaggctccacatgttgcctccttctctccctgcagctcggtgccaatgccttgctcttcgtcggtgtgaacatgtatggggtctttgtgcggattctgactgagcgttcacagaggaaggcgttcctgcaggcccggagctgcattgaggaccgactgaggctggaggatgagaacgagaagcaggtcagtggcttgggccagtcagcctagaggggttggctgtggggctggggaggtggaagaagctggcttcctgagcctcagtttaccccgtggtgacatgggccacaattcccattggtacatgttggtatttgaggctgtggaggagatgccctgaggttttatagttagcaaatggacaggcaggctgagtttgctgcccatgggatagtgttgggatggggctgctttggggacagcatttgggcgcacggacttccggttgcagctggaataggtcagctgcccagggaggacgaggcaggtcctggctgggcctcggatgaatgtgaccgtgcaggtggccctgatccactggcctgaggcttccaccagctctgcccttggctcagtgtggccgaccccagagcacgctggcacttctggaaggcagagatgcccttttgctgggagttgtagaggggtcacagtggtcatgatacagcacccacagcccttggggttcctccagtggccggcatcaccccattttcaggatgaaacagccgcgagggaaagagcagtggcttggaaggagccatgcctaggttcccaccgccctctatgacccatcttctgtgctctctgtctgctgcgcggggcctgtgcccagcatgtgggcttaggaaggaccatctgggagcccttgggataagcctggcacattccaggtgccttcactggaaggatctagattcttcccctagccttggggcttacaggcctctgtgacaccaaactgctcatgtctcaggcctgtagctgacatataggatctctttctcaacgatgtgaatataaggtattataccaaatataaatgtaaaaactcacaaacacatttcatgtgtcgacattatgatccctaatagttacaataaaagtaggatatacaataaaagtaggaaatagatcacatatgtatgtttaggtggtgtgtgcattgccgtctatgtgaacacgtaggagggcgtgtccatgtggatgttatgtgggcagtggtatgtgtctgtgtatatgtacatgtgcatccctgtggagatgc

SEQ ID NO: 41930 - DNA, 1032 bp, Homo sapiens
acagatgttttaggcttacaaataactgagctaaaatgctccaaaggggtgtgaaggttcttttaacagagctttttctgtttctgaacaaaaatgtcaaaagttggttctttgaaatagaaaagcattaaagagactgatcaagaagaaaaagagcagacacaaataaggagcatgagggatgagaaaggctgcagataaagcagggattaaaaatagataatagggaaatgctgagaataattttatgccagtatatttgaagagagacaaaatggccaaatttccagaaaaagtgtgagttaccaaagatgatccgcaaagaaaaagaaagcctgaaaaatcctataattattaaaaagattgattcagtaatttacaagctcatcaaaaagtaaacagcaagcccagatggttttacagatgagttagacagaacttcaaggaaaacgcgattgcaatttgatcagtcacagcatagaaagctcgctctctgagcctaggtcgagctggctggtgattatggaggacggagctcggattcccacatctcacaaaggcctgtcacgtggacggcaggaaaagcctctttctcagtcttgttttcattagtggtttggcttcttggtgccgaagtggattgggtgggcgtcaggtggatgcttggtccctgccctgctgctgtttcatgcaccaggttctaggagcgaggggcagggcatgctgcctggtcggggtgacatgactcctgtgtgctgtcagccccctgccattgccaggacacctgtgcaagtggaactgaggtccagggtgtttgtggtcagcatcagaggctctagaatgctcccagctcccaacttgttggtcatatggcctcctggagcagcccctgcccagcctccttcctgccttgaatgccagcatctcttctgaggaccgtcaaaagtggtgtcgggggcatccccctcctgcgtggatgtcacacatctggctccatgctgaggcgtcttgttcccctgtggctggcacagc

SEQ ID NO: 41931 - DNA, 1104 bp, Homo sapiens
ccacagactgggtccctgcaaaccaacactcattcattggaaatgagttgaggtttgtgggtccatcagagtcagtcatccttgtgtgccaagccagtatggctaattgctgtctggttgagagctcagcagtcactgttctgagcacacgtgttcactgcccattgtcatgctattaagtaaggaccagtgttgtcctccttctgcagaggaggatgcttaagcaatgtggggtgaaggcccaagtgggtggaaagtagctgaagagccagcatttgagcccagcatgactgcagaatttatgctgagaacctctctgctagatacttggttctgtttaatatcatcatgcttctgtgaactgctggcattgtcacctccattttatagatgaggaaatttaggttcaacaaagtgaaaggtatgcaggactccctggccagtgagtggcaggctgggacaggaactgggattagctgacactaatatctgccttgacttttgtcatttcactcactgcctcttgttacaaaataaggacatgacacactgacccagtcccctgatgagaagaacagaccaccagaataatccctggaatacctcgaggggagccagagcctctccatactgcaggaaaggcatcaaaagtcaagagccttttgacagctagagctggcagacatcactgaccctttcccctgctcagcatagagtgaactgatgaagaatctcagctctaagcttctctctggggagagaaagagtcagtgtgaccactgccccaacttttatggggctgcctgaagaacaagcctctatctctcccctggatctcttgataggtcttgtacagtctggccaggagagaacagaggtggtagtctggggtgatagataccataacttccccctactcacccccttcccagcacagaatgaacagacaaaaataacagctgcctgcttttccctcaggagagaaagggttggtaaagcaccagaatctgtggctgattggtgagagtctcctcctgtacaggaccggtccatgaagattgggagaggtacctgctttgtctaaatctcagacaccaacacaga

SEQ ID NO: 41932 - DNA, 1066 bp, Homo sapiens
ggctgtaccttccctgggacaggacacggtcctttctgtgagcactgactgtggttccaggccatgtcattgctgcagtgacagtaaccatggtgccagccactgcacagagacccttgcccagatcatcactggtcctccaagcaggcatatcctgacccctttgaaacatttggacacctgggaaacagcactgtggggccaagcagcctgcccttgggtggagtggacctacctacccagctctgaactcatgctcccgggcccctgccacaggctcatgtcagctgcagctcagcctgctgggggatgagggcaggtgggaaggcccccttctgcagatgaggaggccagggttctaagggctaagtagttgtcacagtcatgcagagatggaagggaccctaagtggccagaccctggatgtctttgtactgtcaccagcctctctgtgaccagctccctgtcagcaggaggagcctgccgggccctcacagagcagacttggaccctgggctttacaaggctggcctcagtgtccatctcacagactgaaatctctgatcacctcctccccttttctcccgtccatggtcttggagtgctgagggaggctcagtggtggaaggagctgggcagagagccaactgtatgcccaacagcgccccctcctctgatgctgggcggtggccagggccatctctcaaggtccctgcaacgccaggcctgagggcagctcaggacaacagcagggtcatcagctgtctgctcagctctgggaagatacttccatggacaggccattcagctgctaggccaatccctgctcagcctgggaactggggctcccagcggtcggtgtggcctgtccctgtcctgactcactctgtgctggccatggttccttttctctaagaatgtggggcacagatgagcacaggggtcatgagagctgatgattctcattccaaatgcacttgtgttaactcagcattcgacaggacctgcagggccccagtcatttgtaagaaaccaaaggatcacattaaatataagccaccgatgt

SEQ ID NO: 41933 - DNA, 1049 bp, Homo sapiens
acccagatgggtgagaggtccacccttcctggggagaagcagctgctggggggaatctagcacattccagagggctgtccgtgatggtctgcatggcggttaagggaggtgccgtgggaataaagggagttggggaagatgccccatggagatggcattccagccggaccttgaatgatcatcctgtagggttggctcagtgaagcagacaggagggatggacccccgaaggggaaagaggccatgagcgaggtatggggaaagggagaaggagatcaatgtgagcctggtcccagccctcaagactgtgctgaccacgcaagggtgtggcctgggcgggaaggtggtggcccaggtgcagcatgtcttgccagcgctctgtggccaccagtgtctagaggtggtggagccagcagtggcgctcacagcctctgtagcgctgtctcttaccatgtgccttgcccttccctgaaggagaaccactgtcgccgcatcaagattctcggggactgctactactgcgtgtcgggcctcacccagcccaagactgaccatgcccactgctgtgtggagatgggactcgacatgattgataccatcacgtaagtaccccgtggggctgagaggagtggcctggggcatctacacattgaaatcctagaagctgagccaccttctgccccatgtgggctcccctctcagggtctcgctttgtcctgatgggtctgtctgaggctgcagagaatgatgccagcattaggaggatgctgggttcaggaaagcatgaaaggatgcttccgtgattccctgcctttacatttcgtgtgtggctgtatttctttgtccacaggaatcctgcatattgtcaggtatgcatgagtcatacaaaaataaattagtctttagcttagccagataagacatacagaaaggtttggccccaatctagctgaattctctattaaaaggaagtaaatatgtgtgtttctcttcactcagcaaggtaactgggtctcagatgctctctgtgtggggagacaggcttggga

SEQ ID NO: 41934 - DNA, 1001 bp, Homo sapiens
caggcccagcggcaggccaagaggctttctcaaaaggagaatagttacctgcaaaagatggcaggatcttgctctaaaatcctgttcccaggcctgtggtatggctcccgcatgggggcctgccagtggctctggtggcctcccttagcacaccgagctcacgccaggtggaagcgggggaagcagatgatgggaggctgcagtggggatcaaggacttgcacctgcgtcttgcccagaggccaggttgggactgggagggaagtgcagtgattcacggtcagtaaagtgtttgagcctcacaccgctgcagagcagcggttcttctgagatcagcagagaccactgggttggtgaaatacccaatggtatcttgggacttgggaaacctagaactggatcctagatccataacccaccagctgggtaagctgggacacactgccttgtccttgtccatagaagaagtgatgctggactgggtggatttgtgccacctttttctcaactgtagagcggagttagtaatgatctgacctcatgtgggggttaaaggaataaccgtgtagccggcgaagggcaccccgactagtcggggactctagcagggtgagttgttttctgtaaggtccctgcgtattaattttagtttatatttatactttcagaagtgttaagtgtaaaaaggacttcttttatccgtgaaatcactttttgaagatttcaaaatgtctgtataatacatagatttaaaataaaatttctaataactctataaaacctacgtgaacaaaataataaaatttatttagagcatatcaaagaagacacaaatgaatggaaatttgtaccatttctgaaatggaagaattcaatataatgaaaataccaagttaatctatccagttaacttcagtgccaatcaaagttacaatgcaagtggaaggaagggaagtattattctttgtaatttaaagacttcaggtttctttttttaacttt

SEQ ID NO: 41935 - DNA, 1251 bp, Homo sapiens
gtcctatggtttgagaagaacacagagtaggagctggcaccagagtgacccctggtaggctcaggttctgtgctcactgcagccgctgaattgatagaaaaaaactggacaaaataaaactgaactgtcattctgtgtttaaaatacagtcttttgagcatacagccagctgagtaccaactcatggtgtgaggcctggggaggtggctgggagccctgcatttggctaaagccctgcctccagccagtgccctgcctgggagaagccttagccagcttgctgggctcagcctggacatccaggcagagagggaccttcaaaccagtcaccagtaagaggagtgaccaaaggaactgaaagtaggatgtagggtgagggcatttcagtccttccatcctggtacagctggcctctggagcacactgagggcagaaccaaggcctctggacaaaagatccagggagggagattttcattcaacgtatgttgtccagcggcttgagggtttgaggttgggtgaagctgacatgtatagtagtgagtcccccatctctgtgaggtgttcaaggaaacgcagataactgctcaaggagattaggtagactggattcattaattactttaggggtaagattacctctaaaaatgcttcttggaatactgatatttgagggacatatcaaagcagcctcccgagcagccagggtgagagctgcggacaaggtggagaacgtgtggtggttgtgcacctctgctgggggacgggagggtgggaggctggtagttggtaggggcacatcagggacctaactacatgggagggaaggagagtggaaagtgggaaatactccagagttcagccctgtagagttgctgcctactcctggtactctgaggtcgggctaggttgcgcagcagtcgcaggccttctgagggtgccagtagtgttcctcagataggacgagttctcttctcactacatgtctgatgcagtacagcaagaggatcatgtcatccttgtcctccaagatccaggccagtggacaccggagcttcctcagtcctgcagcacagaaggggggctgtgaagtccaggctggccactgagggtccagccagaagccccccttggtctctctggttatcaagggctgggactgcacaatcctctttgtccctgaaagtcagtggtgagcattagggacttctaccccagagccctgcagggaggagagaagccactggcatcc

SEQ ID NO: 41936 - DNA, 1024 bp, Homo sapiens
gcctctctgggaaggtcacaaggcctggggttgttcacaccacaggcacaatacagagctgtccactcttgaactggaccgtctggggagaattgagaagctgcctctcactgcatggatagtggtggctgctggctttcaagcgtggttttttgctaagagccagaggcaggtcttctggagttctcaggggggccctgtgaccccctctccacaaccatggccagcatcggcttcttgctgcacctgtgcattctccacccctccgccaatggcttccagctcctaaaacacctggacattccccatcctgcaccggcactgtgtttgttcagagaaaacgaagggtgtcatttcttcttttccctgtggcatcgtggatcctttacatttagcaacaacagtgtgaggctccacttctgttgaatatgagcggctgtcacacccatgagcaagtttccttgatggaagatgctgtttctccggcagaaccaaccctccaggacgaagtttcagaattggctgatggtcgtgagtgcaggtgtccctgttgtaatttgcagggaaattgactgcaggtgatagtgttgacgtctgacgtctgacaacctcctatgtgcatgtctaaatagtcacaatgaagatgaaaataaggatgatggggacggggtccaggagggccactgggaaggcactatccagaaatagtggacagaggtctggcatgtggaaaccttggatctcggtcacagggaggaaggcagctagaaatgggagggaagcttctgggtaggcaccatagtaggggaatgtctaaagacccactgctctgagatgtggtcagagaggtttctgtggactgcagatgaggcctgagccctgcctatgctcaaagccagcagggttgggggtccgcctcctcactgctcctcaacagctgtaaccctttcctgagggccccgacttttcagaataggagcagagagaagcccagacttccttccctggagtgtagacctgtgtg

SEQ ID NO: 41937 - DNA, 1910 bp, Homo sapiens
cgaaacctgtcattgcgtctaatttcaaatatacagaatctccttaagagctgttgccttatttttttgtaaagcctctctgacatcaaatggggagaaatggtggcacctccagacaccctgaaactacacaccatttcttccctgctcagcttctgctcaggagttctgtgagctatgggaaggccattggttgtatttgctacttttactttcatcttcctctgctgtagagccatttaatgttattgtcatatgctgctggtgaggtaaaggtgggtccgggtgccttcccaggggttagaggatgttcaaagggccgatttcagcaggagttcagagggcttatgatggatggtgagagatttgacaaccaccagagcacatgtgctctgaccctctcctgggcattggttcctgctggtaccgggcggttcagaccttcaaataggttgctttcaaaagagctttcaggcacttattgagaattaatgtttaaacagacataatagcctagatgaactcccaagagatctattaaatcttgtgggctgaataaatatctcgtgcaggactgtgcaacagtagcccagagcatcctgcctgtgggcatccacctcccaggtgagggcagtgggaagctggcccgacggcagccagaacttgtttctcacctcccaccagcaaccccccacccaactctgggccccaggcacacgaagcacaagtctcaggggaccattcccacattgggggatcctgagggagcccatcaccgcctcttgcatacaactgtccactaggaggcacgcccagtgtgggagagatgtatggtcttgccttccacctgtaaaaactgcacatatgcaagccatttgcactctggaactgcatgccgtgaaaactcctaatggtgtggaacttagtttgaatttgaaatcacgccgcatgcacaaagggacaggcccaggcccgacctcaggtcatccgcccgctggctgcagagcatccctgggagccaaggcgaggcccgtggagcctgagctttgtgtagctcgagctttgtgtagctcgtgcacttattatgcaccacctcccttcagtcaccactcctcttcctccgccatcctcatttatactgattgcacaccccccgctcaaacaacaatgtccttattatgatgaccatctcgtagtggtacattccattcctatttaaggtaagcccaaagcccacttttggattttctcgactgtccgagaaaagttgtgtaagcgcctgcgttcttctgggtttggctagatagggttgtgtccctctatggaatggagagtgatgtgggcaagggtgtcattttctcgcacaatacaactcactgaggatgcttctgtagaagtgagaaacacgatgagtacattcagaattacaataactcactctcactgggtaacttctcatgatagatttgtatgatcaatacgggtctatttttatgtcaactgaacactgtagggtaccttccagtctttttcaagattgttaaattgagacaagtaattgaataatttgtcctatttttattttaaaaaaagtgaatggactgaaatgttaaatgtgaatgtacatttcttaattgcaacttttctactgagtgtttgcactatactttctggaatcttatttaacaaaaataaagggaaaaaattgcttgactaaactctgtggccatttcagttgaaaaataaatggttatgtggatgttttgaagacattcctgcctgtttcacataacttctgggggaagttttattattcaaagtattaaatactacgtgaccccatttagactaaaccacacatgaactgttatccccccattacatactattcttcttcttcttctttcttt

SEQ ID NO: 41938 - DNA, 1033 bp, Homo sapiens
attgctcagtccttcaattcacccactctttttaccttctctcccccaaacttttgctacagcattgctcctttgtggtacgctctttggaagatttctgttgaaactagaatgaaatctcgactctcatgtggtcaacaggcctggctcctgcctgcctccctccctgctccctgggtgtcctagacccatcttgcagcatgttcctccctcagggtcccttcccagccctcttcagagaggccttccctggtatgtccctgagggaagtcaccctcctcactctgaatcatcaggtcccagagatttctttttaaagtacttacatcattttatatctgtacctgcctttgaaatttacttgctttgttccctctttgtctgttccacaaagagttcagcaccacggggagcccatctgtccaggacactgtatccctagcgtttggcatgggtgggctccagaaactgcttgttgagtgcacgaatgagagtgagaatactggagaacatccccctgtggccaggggcttgtcccctaagccagccagctctggctttcccaaggttacgctatgtgcaccaatagcgtctgggtgccatcctttcctgtctcactgtggtgaaatgtgggttaagaagaatgaatttcactgggtgtggtggtttatgcctgtaatctcagcactttgggaagctgagacaggtggatcacttgaggtcaggagttcgagaccagcctggccaacatggtgaaaccccatttctaccaaaaatacaaaaattagccaggtgtggtggtgtgcacctgtaatctcagctacttgggaggctgaggcaggagaataactagaacccgggaggcagaggttgcagtaagctgagatcgcacgactgcactccagcctgggtgatagagggagactccgtctcaaaaaaaagaaataaataaataaagaaaaaagaacaatgaatttgaggggtgtagtctttgggctgggccctgaagggcacatgggatttgggcccaaga

SEQ ID NO: 41939 - DNA, 1062 bp, Homo sapiens
catttctattggacagcagcgctctagacagtactatgggtagtatctgtggggaggttctcagaaacatgtcgcatgctcttttagaaccttaaagtattcctagtctcctctacttccagcccttggctcttgggcctcagtctttttacttttgcggctgtgtttctctgaaggcttggcattagtagattgaaaagaataaccatctagggaaatgtgaattcagtttctttctgacattctgctctctacaaggggatattatgtacacataaacctacttccaaaataatgaagtgaggcctaattccttactcttcagagagcccactgtggaagtgtcactgaccttgtgtatgggctgcccttcatggctctgggagtcattataaagggcagcatttggcgtggtgcgtcctaagccagtgtttctcggctctgttccttagacatgtgttagtgttaatagatgttcttggaaaaaaaaaaaaaaaacagcattctgaggtcaaacatgctcagaaagcttggaatctgcactacgcttctcgtacacatttcatattaaagattttggaaagtcctgcaatacagagccctgtctaatattgccacaacccacaattgctcaaatgtaaatagatttgagtttattcacattcagatcacctcttaaggccccacctcccaatgctgtcacaatggcaattagatttccacatgagttttggaagggacattcagaccacagcaggggaaagcagggtacttgctgctttgcaagtgtgtccacatctaattaatagtacagttcttactcttggtgtgtccggtgatattaaaaattaatgtgccttatttagataagtaacataaaaatcacaaaatgtatgccttagatttatatgtatttataactagtctatttcctgaaaacagttgagacaccttgtaaaagttaccggtacgatagggccattccaacaaagctgtaaagtggtgataacacagtcataaagaagaggagatagctctgggagaaaaggtggcccagaaacc

SEQ ID NO: 41940 - DNA, 1052 bp, Homo sapiens
acattaaataactaatcatttattaggaggatgtgcttgttttttgctaataaagatgataataaaaaaatccttagaccccccctcggtttgttttcagttaggaattagggatatttataagaatatctttaaatgacacatgccttgctctgggacgaggcatctgcatgggtgacacatatgtgttgtgtgtacaggctcccagcatttccagggccctgctcagaatgtaggccttactgattcttacagagttacaagcgctggtgaggttggcgaagtttaggtaaacacagctgggaatgccccatggcctctgggtgactttggacatcactgaactttacccttagagatgcatacctgcatcttttttaccctgatagggccttccatgatgctttcaaagtgtttttgtctgcttttcggttaatagactttcacagtagccaattgaatatattggttaaatgcatctctttatacacagactggattcaaactgaggttgtgtctctccctggctgtgtgacgttgggtatgatccaagtgtcagattactcaacttcaaaatgaggacagagcctttcccttctagggctgccaggaacattgaatgagagagtgctggcagcttagtacaggtgttcattgctcttgtatggtactgtctgtggcacggctagataaaatacagtagccactgattcaaatttcaactgaggagtaaaataaactgaataacttagaaaagttttcttcttttgaatgactctaagaatttaaggagcatgtgagtgttgatggctctaaaagggtaacagagcccaactagctcagttctcagcatgaaaatagtcatatggcacagactcagtggagtgggtgcacttcaataactggaagcacagatgccctacagcagcatcaaagatggcactctaaactactttcaatcctttaaaataaatggaaacgcacatttagtatgcatatgacaacacgaaggacttcgattttgctgatgcaatacagttttacaggatttt

SEQ ID NO: 41941 - DNA, 1029 bp, Homo sapiens
acagcccagagcggtgccaggaagccgcctcgacgcagccgtatcttgaggctccagccccatccccagggtaccacgccacgtagagacactatttttcacttcgtgtttgtcactcctaaagcatgtgtgctagctgcaccaaccctgggatgcctcggtgcatagggtttatgtgcgtcctcctccttccctctgagctggtcccccgtggggaactgctgcccagactgacctgcgtccttccgcacgtgcaggaaaatgtccacgtgcacttgtcagggtgggggccacacgggcaccaccactgatcatctgtgggatcgagttactgcccatgcagatcccacgtgcagggcccagtcgctttggtgagagagtggacgctgtggtgactccacggtctgtggctgtgctcaggaggacagagaggggacatcctgagatggtttgggcagcccgcggatcctgtgcatgtccccagagcgtccactttctccatggagcagtggagtggcgttgctgagacagaaagttcaggttctccactccccatgcagcccccactcccctgtctccggccaggcacgcgtctggggtggagactcccggtgcccggggccctccagacctctttccccaccccagggagcaggcgggtacttctattccgtttggcttcagaagggaaaagagaacgtaagttcagggagttctcgtccattcctctcccgtgggccgggcaggcagcagggacagccttcaggagccaggaggggctcgagctgcgaggccctggaatgaggcaggcatgggctgaggctggagggaaagccccgctaaggctgggcgggggcgggaaaacttaccaccaggggactcgagatggggaaggaaaggtcagaagaggagaggccaggcacggggtgtgggcggcctgcagagctggagcaggtgctccgcccagagccaggcatgcacactcagagtaggtggcctgtgcagcggggaagaggggcgggtcggcgt

SEQ ID NO: 41942 - DNA, 1047 bp, Homo sapiens
actgctcacaactgccctgtgaaattcgccgagctggccccatgtcaatcagagtacactgagcactgagacccagcatgttgagataactggctagagatcatcccataatggtaccatcacaatcttcacactgtagaagtttgatgatgtcactggaagcatattccacagtcccttgtgaactggccttcctgtgatcagaagcatcagtgaactcccaagagggtgggaactcccaagaggtattctcactctacttagtgtatattttacaaatcacaagcttggctttggattcttttaatggctagaaggagaatcatggggttggaagtccaccagtttgggtattctgttccctaactcaaaataaagagatgttattttcaagtcttctgcttgttaacttaattagagatacatgagtttgcagctgtgctgggcatgccgcagcttggcatgtttagtccagaaggcatattataatgtacatggaagattgtcagaaattcaaaaggactttttgagtatcacatgtgtattttcaagttccaatatagattcacattcagtttgacaggtatctttggatgcctatcagttaagaactatttattagttgtggaataaaatagggtaaaataaggaacaactgaggaaaaaacataaaatttgctttgtgaataaaagttgtcttcaaaattatgactttttccatcccacaaaagttttgattaaacccacaatgaaaatttaaataagtgtatttactttggtttaaccacttatttcattatgactcacaactataggttttctagtttccattattacaaactattgtgtggtttaaatcaatttcatagactagtctagttctatagtcacaatttataaaatttttttatgtggtaaattgagtgtcttcatagatgtacatgattatttctcaatttttaaggaatgtattttttaagatagccttctttagccttctttaacactgatttttgtaaattttttacagatttttttaaatttttg

SEQ ID NO: 41943 - DNA, 1048 bp, Homo sapiens
gtttttcttttacctttcctttttaaataagaaataatgcaagacagatacaaagtaattctttttaatttccattttcactggagagtgttgaaccccgtgaggcatgagagcacagtgttccagaacaatgcttactgctcattatcacaggggtcaaaggctaacgtgcagggattgttgcagatcgtggacatgctgcctcctgtgtccatgactgcaatcgtctacctattttacagttgttgagcactcgtgtgcattagggttcaactgggcgtcctagggctccctggacccattttagaccttgagttcttgagttcctcaaaagagaaatcacgcatttatgttttctcttcttagaccatccaggaggtggctggttatgtcctcattgccctcaacacagtggagcgaattcctttggaaaacctgcagatcatcagaggaaatatgtactacgaaaattcctatgccttagcagtcttatctaactatgatgcaaataaaaccggactgaaggagctgcccatgagaaatttacagggtgagaggctgggatgccaaggctgggggttcataaatgcagacagcagttccgatggctcccagcgagcttgtcactcaattccacctcggagaaggcttttatttttacccagtacacgtgcactgagtgccggctgtgtgtaagatactgcaggggaagttactgagaagatggcagatactggaatgggaagatttaagcggggtaccagtgtttacatggacatgaaaaaatactgagagatagtaagaaatcgtaaagattctgagtaaaagagagtatgaccaaacaagctgagcaggaatcgtgaatctatgtgtgtaggcagtgaataaactgccagtcttattacctggacctcaaggataaaagacatacagtaaaaatcaacccacattgaggacagtttcgagagtcgcgctgctacacagaaagccctgtgtaagttaaggatagagaatgaggtgttctagaactttgaatttttgtgagcag

SEQ ID NO: 41944 - DNA, 1033 bp, Homo sapiens
acttttctgggttttttttgtttgtttgttgttttttttttttttttttttgagacagagtctcactctgtcgcccaggctggagtgcagtggtgtgatctcggctcactgcaacctccacctcccaggttccggtgattctcctgcctcagccacccgagcagctgggactacaggcgcgcactaccacctccagctaatttttgtatttttagtagagacggggtttcaccatatcggccaggctggtctcaaactcctgacctcatgatccgcccacgtcagcctcccaaaatgctaggattataggcatgagccaccgtgcctggcttgcccacccttttcttctgtgcttgtcttcctgttaattgcagtaggaactcttaatggggaaaaatcttcagggagcaacagggcctgcagaacccaactgaggcagagactttgtcatgtcctgataactttgcttgctgtcagttgtcttctgtgcttttgatgagtttattgctgtggttatgatcttgtctctcaaacatccctgacaacgatagagtactgactcttctatcaggccagtagagaccccataactaaacattgcttcaggctgtgcttggcttgagcataagcctagggcttcagcctagcctgtggcctaagttctcttccctgccaagcgcacagccgcctctgccaccgcctcctcctccttcttctcctcctcctccctcctctacctttcttcctgcccactgttctcctcctcctccttctttcttcttcttttaaatttaagctttctttattctgcaaaactacaaaactagtaagtcaaaggatatggattagaatttagatatcttagactggaaaacctatatattactttttaaaattttacttcagattctttttatgtctaacctactgcctcatgttctcactcactaaaggaaaccaggaaattcatacctacacaggattaaaactttttctagttattgtctttgtttattgttgttgaaagtaaaac

SEQ ID NO: 41945 - DNA, 1021 bp, Homo sapiens
cttcactccagactgggcgaaagaactaaacttcatctaaagaaaaatacatatggccgggcgcggtggctcacgcctgtaatcctagcactctgggaggccgaggcgggcggatcacgaggtcaggagatcaagaccatcctggctaacacggtgaaactccatctctactaaaaatacaaaaaaattagccgggcgttgtggcgggcgcctgtagtcccagctgctcgggaggctgaggcaggagaatggcgtgaacccaggaggcggcgtttgcagtgagccaagatcgcaccaccgcactccagcctgggcgacagagagagactacatctaaaaaaaaacaaaacaaaactgtttctgggtggaggggggaacgaaaaagaaaaaaactgtttctggactaacctggacagttcttgtgacaaaattcatgtggcatcataaccaccagaatatgagactttggaatttgcttttcaggtgaccaaagccacgtaatgtccgtagttcgctcatccgtccatgccagatggattgtggggaaggtgattgggacaaaaatgcaaaagactgctaaagtgagagtgaccaggcttgttctggatccctatttattaaaggtgagaaacattcttgtttccgggtggctttggtaaatcaccaccatgtcctgggtcctaagcaaaaaaacatttatctctcagtaaagatgtcttgtctctcatctgctttgagccaggcattttgctggtctgtaggtataacacggtttacacattccaagaaaacagttaatgtcaatccactctaactgctgtagtcattctgtatgcaaagtactggccggatgaggtggctcacacctgtaatcccagcactttgggaggccgatgcggttggatcacctgagatcaggagttcgagaccagtctggccaacgtggtgaaaccccgtctctactaaaaatacaaaaattagctgggcatagtggtgcgcacctgtaatcctagctactctg

SEQ ID NO: 41946 - DNA, 1016 bp, Homo sapiens
ctagcatctttccaccccagccttctgagtagctgggaacacaggagcgtaccactacacttggctgattttttgtaaattttgtagagacagggtctccctgtgttgcccaggttggtctcggactcctgggagcaatctgcccatcttggcctaacagtgctgggattacaggcctgagccactgtgcccagccggtttcctttatttcattcaaaggaattttgaatttatcttagaacctttattttgaaggaagaaagtcttttttttttttgagctggagtttcactcttgttgcccaggctggagtgcaatggcatgatctcagcccaccacgacctccgcctcccaggttcaagtgattctgcttcagcctcctgagtagctaggattacaggcatgtgccaccacgcccagctaattttgtatttttagtagggatggggtttctccatgtttgtcaggctagtcttgaactccggacctcaggtgatccgcccgcctgggcctctcaaagtgcttggattacaggcatgagccactgcatgtaatgaccagccactggtcagaattctttcaatcaagctgtgttaataagaatattgatgtgtggaaaataaaattttacaattctgtgccacttttcttacatcctaggctagattaaataggtgtaagttcctaaaatctgacacattaagttgtaggacttctcccacatgcatttgggatggagagtgagttttgttgctattcattaatataccacgataatttagattttgacttaaggaagcattgagcagtatatttccgttttctggcccctagaaagagaataggggactttttttttgagatcgaatctccctctgttgcccaggttggagtgcagtggcacaatcttggctcactgcagcctccgcctcctgggttcaagcaattctgcctcagcctcctcgagtagctggggctacaggagtgtaccaccacgcccagctaatttttttttg

SEQ ID NO: 41947 - DNA, 1045 bp, Homo sapiens
cgcggcgctggcccggcctgcagggccctgaccggcgcgacccgtggccagggacagggacagcgcgcgcctgaggccgcaggccccggacgccgtctgctgggtcctcgccggaggctgttccaagcctgagtggctgcgtctgccgaggacgttggtgaccctggtctctgaggtgccgggagtagggaataaaagagtaaagcattgtcccgggccagctctccgcggagcgtaggggaagttagagcttggaggaggtcaaatcacttaacgtcttggagttgaaatttaaagccggccgtggatctaaaagtacttagagttatcagcactaagttcaggcgtggggctcttgtttaaacttttttttttttctaacttcagtggattggacgtttggttgtccaaattcatcaccttgatatttgcatgtgctgttttccacattcaaacagcaaagcctatcctgacttacccagagttgctttctcgtattcattgctttgggtagtttaaattacctaaggaactgtgtgttaaactcgccatgggccagggaggtttcagtaacatggtttattattattattattgttgttgtttatttatttatatttttgagacggagttttgctctcgttgccccggctgaagtgcaacggcacgatcttgtctcactgcaacctccgcctcccgggttcaagtaattctcctgcctcatcctcccaagtagctgggattacaggcatgcaccaccacacccggctaatttttgtatttttagtagagacggggtttcaccatgttggtcaggctgatctcgaactcctgacctcaggtgatccacctgccgcggcctcccaaagtgcagggattacagtcgtgaatcaccaggcgcggcctgatctttttaaaaagatgagtctgacttgggagagggggcagaattaagggtagtggccagctgagtggaccctggcactgagagttgagagtttgcagagagctgttctgccaaaatgtgagtgcctaccacgtgcca

SEQ ID NO: 41948 - DNA, 1070 bp, Homo sapiens
aggggttgaagaccagcctggctaacatggcaaaaccctgtttctactaaaaatacaaaaattagccgtgcacggtggcacaccatgtagtcccagctactcaggaggctgaggcgggagaatcgcttgaacctgggaggtggaggttgcagtcagctgaaatggtgccactgcactccagcctggcaacagagcgagattctctcaaaaaagtgtgtgtgtgtgtgtgtgtgtgtgtgtgtgtagaaattgttcagatagttcagaaggttatacaatgaaaagaaaaaacctttactcccaccccaggcccagtcatgttccccagatgtcatcaccctttaacagctcactctgtatgtgtatatatagtgctgttctgtgccggcttttttacagaatttatcttggagatgtcagcacatcagtgcacataaatctacctcattctttttatcgagtgcatattttctgacggggagtatttcctaatttacgtgaccagtctgcattaatggctattcaaatggcctatgccaggagataactggaaacaagacagcaatgaatatttgtatgcattcaactttgtgcacctgtctaaatatagctggccgtaggacataaccgcaagtgtcattattgggctgaagtcatacacagtttccattttgatatggatgatgccacactgccctcttgggaggtcaacaaatttgtattcctattagctggcatatgggagttcaacatgcacatagatatttgtgaagtagggccaattgcagtggcttacacctataatcccagcactttgagaggctgaagtgggagcattgcttgaggccaggagtttgagaacaacttgggcaacatagcaagaccccatctctacaaaaaatttaaaaaaattaaccatgcaagatgacgtatgcctctagtcccagcttctcaggaggctgaggtgggacgatcacttgagcccaggaatttgaggctacagtgaactacagtgagctatcgcaccaccacacaccagcctgggtgacagggcaagacccagtctcaaa

SEQ ID NO: 41949 - DNA, 1037 bp, Homo sapiens
tggtactgcttgtgttgtctgcctctgtcttgaacattactttcctccctttccatcttccttatttcttctgtgttcttttctactattccccgtctctcattcttctgtctttggaaccaacagaatgttttttggtgatgtcgttttttttcccctcaaatggaaaatagtagacccatagctcccaaaatcctgggacctttggtttttctttatcatcattatactgattgaacaactcttctagatagttggggtatcagaaacctaagcttctgatcagcagggtgttggaatacaacataattcagctaaaaggttaactccacatgccgttttatcatgatgttctaaggtcagttgttagaacacagagtaggtggtctttttcctgttactgatcaggtgctgtccacctggtcaaattttgctggttgtttaattagtgttgctgtttcttctctttaagtcaagaggtgttgccaaagattcacgaagataaacactacccttgtactttggtggggacttggaacacgtggtatggcgagcaggaccaagctggtaggaagcgaagtctttggaataaacacttcttccttaagccttatgtaacacttaagtaattttctaatttaatgcttgttcttatcatcaaagctttccaagtctcagtctaattttatgattaaagtagtttcttcaacaattcattgcgaaaatggttttaaaattgtttttaatgtttgaatctattattgaaccattatgatgtaactcataggccaaaacatggggcattacagtttttttgttttttgagacagagtcttgctctgttgcccaggctggagtgcagtgatgagtatctaggctcactgcgacctctgcctcccgggtttaagcgattcttctgctttagcctcccaagtagctggaaatacaggtgcccaccaccacacccaggtaatttttgtatttttagtagagacagggtttcaccatgttggccaggctggtctggaactcctgac

SEQ ID NO: 41950 - DNA, 1057 bp, Homo sapiens
ggtggctcatgcctgtaatcccagctttttgggaagtcaaggcaggtgggtgacctgaggtcaggagtttgagaccagcttggccaacatggtgaaaccccatctcttactaaaaatataaaaaattagccaggcatggtggcgggcgccggtaatcccagctactcaggaggctgaggcaggagaattgcttgaacccaggaggcggaggtttcaggagctgagattgagccactgcactccagcctgggtgacggagcaagattctgtctcaaaaaaaaaaaaaaaaaaggttttttgaagttagttttgtcacttaatgttttttctactgctgtttgctatttctgtattttttttttcacagaagaactaacaaaccaaatctaaatctgttttcagccaggaaccatgattgaatggggcaattactggtgagtatattactgaatggtgattttttaagtcttgtgaatagattagtttaggccatagtgttaattctagggaaaaaaatctgaggatagtactgtgacttaacactgcactaatgtttcgtttgatgtttttattatgagatttttcaaacatacaaaactagagagaataatggggctccccttccacatccatctcttagcttcaataattaacacatggccaatcttgtttaggcctaactccttcaacccagattgtttggaattaaatcccagacagcattctatttcattcataaatatttcagtactatatatatttctaaaagataagcaccttttttttaaaagcaaaaccaatattgcataaggttagtttacatacttcttggatatcatcttttctgaaacgttacttttgtcatatatacacaccatgtcaataatggtttcttctttttttccttgctagtttgagtagaaaaataacaatttttccacaagttgatatgtagattcagcagaatccctatcaaactcccagcaggctttagaagtgcaaaagactagccaggtgcactgtggctcatgcctgtaatcccagcactttgggaagc

SEQ ID NO: 41951 - DNA, 1117 bp, Homo sapiens
ttttcagacccttggatgttgtaaattttacatcattacctgtttttgtagatttctatattctctgaaaacttattacacaaataaaatttttttctaagctttccttttccatcagaattgttagtatcccaaatcagaacttaatacatcaattaaagagtgattttgaaattagataaattaaacttcctgtatgtacagtatgtatctgggtacataatacatgcatgtgcacatacataagtatattatgaaaccctgtttgcttgatttttaaaagaaaacagttggctgaatgtaacccagtggcattggtagaggtaatcagtaccagccatgttgcatggcaagtatatttcaggccgggcgcagtggctcacgcctgtaatcccagcactttgggaggctgaggtgggcagatcacctgaggtcgggagttcgagaccagcctgacgaacatgatgaaacctgtctccatttgagagactgaggcaggagaatcgcttgaacctgggaggtggagattgtgccactgcactccagcctgggtgacagagcaagaatccgtctcaaaaaaaaaaaagtgtatctcagcccctatactaccaagaaaataaaagagtaatttgtcctagaaagtaggtgttaccttgtctttcagttcaagagattatataacatataattacatgttataattatataattgtatttgattttgctgcttacgcgaacgtttgagaaatcaccatttctcctcacagtatggacttttcctacctcccacaaataaaacaaatatccaggtaggatctgttttttttttttttttttttttttttgagacggagtcttgttctgtcgccaggctggagtgcagtgacgcgatctcggctcactgcaacctccgcctcccggtttcaagcgattctcccgcctcagcctcctgagtagctgggattacaggcaggcgccaccacacccagctaagttttgtatttttactagagacagggtttcaccctgttggccaggatggtctcgatttcctgacctcgtgatccacctgcctcagcctcccaaagtgctgggattacaggtgatctgcgcccag

SEQ ID NO: 41952 - DNA, 1093 bp, Homo sapiens
tacccaataactgaaaatgttttaactcactctcatttgtaagcagtccacatagtagacaatgggttttccaagctgggcaaggtacatttaatcagtaaatcagtttcacatcatgtattgtgatgtttcaatgtgagacacaaaaacaatggcttgaaacttgtgtatcatatgtgattttgaaatgaacaccttgaatagcactaatttttatttgtggtatttttctataacaaaacaagtagctctaggaaaagaggttttattttgtaaacgatcatttgtgacctcagacactctctggctaatattttaataagctcacagcagataattctgagatcatgggtgaggggtggtgcatgttgagatttaaattggcataaagctgcatactttttgtctagctgtttgatttcattttttaatatagtatgccaattttgtgactgttaccatgtgaaagtcctgttgaaatgaacaattgtctgccccacaatcaagaatgtatgtgtaaagtgtgaataaatctcatatcaaatgtcaaacttttacatgtgaatgattttctcaaagaacatagaaaagtcaataaaatcctcttaatttccacatatcacgtttggattttcttttttaatttgttctgagattgacaaacattgctgtgaatgaccttgtcactcttgcaaaatagcttgtcacaaaagattgaaggaagtgaggaagtcagctggcttctggggaaaatccctccataggaacaaattacgaggccctgggcaaggtcatgcctggtatgtgctgagggcagcagaagccagtggcagaagcagacatgagggagagtgtggtgggacacgagctcagaggtcacagggctggatcccttgagtgttggaggccattagaaagaccctagtggccgggcccagtggctcacaccagtaattccaacactttgggaggccgaggccagaggatcccttgaacgcaggagtttgagaccagcctgggcaacatgaatgaaacctcatctctacaaaaaatcgaaaaattagttgggcatggtagcatgtgcctgtagtcc

SEQ ID NO: 41953 - DNA, 1039 bp, Homo sapiens
atgattccgggggagggtgcttatcagactcgcgtgtggccccacggcacctagggcaccgtcgagcacacggtccgggaagctccaatgaaacggaacaaaccgcgagatcaggggaggtaggaggcccaccctacgccctgcccccgcggagcacaagccccgcctgcgtcccgagctcccgggtccgcaaagctgggccccaaagagctccaacgccggaaccaaggagcacggaatgccgggaacaagctcctcccgtgcgcgatgacgacaaggccgaggcgcgaagggtgggaccgcaggagccgtgcagccgcggaccaatgagcgggcgccggacgacctgtggcccaatggcggcggcgcgcgggcacgctgggggccggccagacgggccgacttttccagaagacccggatagttcctcccggccacgccgcgccggctctgggcactcagcatcgtttccttttcctccgctggagcagctatggcggcggtgaagaccctgaaccccaaggccgaggtggcccgagcgcaggcggcgctggcggtcaacatcagcgcagcgcggggtctgcaggacgtgctaaggaccaacctggggcccaagggcaccatgaagatgtaaggcggggctgaaccggagggccgggcgggcaccgcgcgccgccgcgctcctggcgggcccgggaccgcggactggagcccgccgcctcggggctgcgcagccgtccttctcggcgtcctccggggtcggtcctgtgtccctcctaagccccaccgtcccggccatttcttcccgcatcgatgcagtctccgcggagaacaaagcggctctagagcgcggcgttccccgccctctggggcttccaggcaccctgaggactcggcacaatctctgcggggacggggtgggcactacacctgtcctccatcctgctggacataactagccccacatccctggctccctaaaatctgggaaaagcccgttttctaatgggacttttagttatcgttgaaaaagtcatag

SEQ ID NO: 41954 - DNA, 1047 bp, Homo sapiens
gtgatcctcccgcctcaggcttctgagcaggtgggaccacagacgtgtgtgctaccatgactggctaatttttttttttcttggtaatttttgtagaaacaggttcataattgtgttgcccaggctggtcttaaactcccgggctcaggctgtccttcaccctcagcctcccaaagtgctgagattacaggcatgagccaccgtgcctggttcatgaagtctttagcagaaaaattaattgaaattcaggatcagatttttgtttatatacattttgaaggtttatgtgtagtaatgggaagccattgatggggaaaatcacatttcttttatgtgatttttcaaaaggagataatttgctttaatgtgatcaagtttgttccttattaatatgctacttgtcattctctgtaagtccctcttctctcttcactctgcacaaatcctgtttttgaaaatcatattttttctacacatagggagaagagaagtttacctttattgagaaatgtaacaaccctcgttctgtcacattattgatcaaaggaccaaataagcacacactcactcagatcaaagatgcagtgagggacggcttgagggctgtcaaaaatgctattgatgatggtaagatcctcactgtatttcaattcttttatattgttttgctggtctgaaaggcatggccgaatactgtgtttttatcagtagtttacacagccagacaccatgcaaaagcagtcttccctttagaatgactgatggtatgctaaggtttttcatagcatatcattattaaaggtgaatacaaataaatgaactaatactgatctgttgaaagctgccagtggctagtgaagccattctggttgaaccattctcctatttggtatgttagtcacttgtattttgtcatagtaaatttgtaagaaattaatggctttcatatgtatattttgttattcataattagttctgcagttttcttagcatttttccttttcccccatccaacaggctgtgtggttccaggtgctggtgccgtgg

SEQ ID NO: 41955 - DNA, 1601 bp, Homo sapiens
caggagttcgagaccagcctggccaacatggtgaaaccctgtcactactaaaaatacaaaaattacctgggcgtggtggcagacgcctgtaatcccagctacttgggaggctgaggcaggagaatggcgtgaaaccgggaggcggagcttgcagtgagccgagatcacaccattgcactccagcctgggcgacagagtgagactccatctctaaataaatacacaaataaacaaacaaataaaataaaaaattaattaacctcacagaactaaacactgaagagagtgaattttactgtatgtgaattcgttgtattctaatttaaaagaaaatcactcaggcttcaggttaattccttggcaatcatgaacactctgtggtgtataacttacaggacagggatatctgaagtttcctggagcaggagaagatggggtgggcacagaacctcaccagctgaaccagctgaactatgtctttatagggattttgtcagggagaaaaagtatcggacagaagctgagatgtttggatggagctttgtctttgaggactttgtctctgatgagctgagaaacaaagccacccagccaatgaaggtgagagaacctggtcttgcagctgaggggataggagtgggacctggacagggaatcctgtgggacatgggttacctgggacacagtggagaatcagacctgagaggtggaggcagaggggaagcaagagaaactcaccatggagcgtcagatcagtacacactcccaggaagttaaccctgaacccaagttagctcttgcctaaatgtccaagtcaggataggatccaaggaacttgaatcaagagatcaccttggtgggccgagcgtggtgtctcatgcctataatctcagcactttgagaggctgaggtgagtggatcacctgaggtcaggagttcaagaccaacatggcgaaaccccgtctatactaaaaatacaaaaattagacaggcatggtggcacgctcctgtaatctgagctactcaggaggctgaggcatgagaatcgcttgaacctggaaggcagaggttgcagtgagccgagatggcgccactgcactccagcctgggtgacagagtgagactgtgtctcaaaagaaaaaaaaaaagagagatcaccttggcaagccaacctctaataagggtggtaagatgggctctataaagattccagtctcagctgggcgcagcagctcacgcctgtaaccccagcactttgggaggccgaggtgggacaattgcttgagcccaagaattcaagaccagcctgggcaacatagatcccatatctacaaaaaaaagaaaaaaaagaaaattagctgggcatggtcatgcacacctgtagtcccagctactcaggaggttgaggtgggaggattacctgagtccaggaggttgagactgcagtgagctctgatggtgccactgcactctagcctgagtgacagagcaagatcttgtctcaaaaaaaaaaaaaaaaaaaaaaaaaaaaaatcagccacaacctcacttagaccacctgagtctcagcctgacgtctctgttctgcgtcctgtggctca

SEQ ID NO: 41956 - DNA, 1033 bp, Homo sapiens
ttctagtccatctcagactgatataaaataccataaaaattaataactggaaaattgaaagaacagacataaaatattttattggaaattccacagacatgttacatttcaataaatataactagagcaacatagcataaggaaaaagaattaccaagactacacacttctgcctctggggtacagagattaatgttaagagtcactgtttgcggccgggcgcagtggctcacgcctgtaatcaaagcactttgggaggccgaggtgggtggatcacgaggtcaggaggttgagaccatcctggctaacacagtgaaaccccgtctctactaaaaatacaaaaaaaaattagctgggcttggtggcgggcgcctgtagtcccagctacttgggaggctgaggcaggggaatggcgtgaacctggcaggtggaggttgcagtgagccgagatcacgccactgcactccagcctgggcgacagagtaagactccgtctcaaaaaaaaaaaaaaagaatcactgtttgctcctaactcggtcatttgtcattctgcaatcctaattacacaaaaagttaggacagcaaaaagcaactccgcacattaaacccctctacacaatctttcagtgaacaccaggtacatcagtgatcaaagttttttgttttttgttttttgttttgagacagtctagctctgtcgcccaaggctggagtacagtggcacgatctcagctccctgcaacctccgcctcccgggttcaagggattctcctgcctcagcctccctagtacctgggattacaggcacctgccaccatgcccggctattttttttttttttttgagacagagtgtcgctgtgtcgcccaggctggagtatggtggcgcgatcgcggctcactgcaagctccgcctcccgggttcacgccattctcctgcctcagcctcccaagtagctgggactacaggcgcccgccacctcgcccggctaattttttgtatttttagtagagacggggtttcaccgtgttag

SEQ ID NO: 41957 - DNA, 1029 bp, Homo sapiens
ctggcctatagtgaatgttccaaataaatgtttgtgaattgaggccgttcgtggtggctcacacctataatcccagactttgggaggctgaggcagatagatcacttgaggccaggatttcgagaccagcctggccaacatggtgaaacctcatctctactatacaaaaattagccggatgtggtggcacacgcttgtagtctcagctacttgggaggctgaggcaggagaatcgcttgaacccaggaggcagaggttgcagtgagccgagatcgcatcactgccctccagcctgggcgacacagccagactccggctcaaaaaaaaaaaaatctttgtagagatggggtcatgctctgttacccatctctgtaccagagtgcagtggtacgattatagctcactgccggctcaaccacctgggctcaagcgatcctcacaccctagcctcctgagtagctaggactaaagtatcccccaggctggagtgcagtggcacaatcttggctctcagctcactgcaccctccacctcccaggttcaagcgattctcctgcctcagcctcccaagaagctggaattacaagcacctaccaccacgcctggctaattgttgtatttttattagagacagggtttcgccatgttggccaggctggtctcgaactcctgacctcaggtgatcctcccaccttggtctcccaaagtgctgggattaaaggcgtgaaacaccatgccaggccctaatatttaagttttttgtagagacggggtctccctatgttgcccaagctagtctcaaactcctggcctcaagcaatcttcccgcctcagcctcccaaagagatgggattataggcatgaaccaccactggacctggccacaatttccttttaaataggccactcctgtagcctctccttatctccccttgttgtgactgtgttctctgaaaacacacccccttctaggacaggcttcctgcactccatcccactgctccttcctcatgtttttttgtttgtttg

SEQ ID NO: 41958 - DNA, 1029 bp, Homo sapiens
agaattaccagacaggatataaacacaggaggtacacacaaggctttagttcagagaggcttttctctctttggcttgccccaaaatctgcaggcagaatatttatctgcctatttttaatacacagtcccttccagagcacttcagccagatttgtagaaaaatagcttcacagcagagcaatcagccattccagccccatctttcaatgcacttggcaccttcagacctgaaagtaattcaaacaccatgggaccctgaatcccaaatctttagccaatgggctaatgttttgtaaattttatcttttcaaaaaactaacttttcattatgtttcttctgaatttttgtttttatattcatttatttctgctatagtttttattttttccttctaattttgggtttggtttgctcttttctagttctgtatgatatatcaatagtttatttggagattttttttttaactttttttgatgtaggcacttactgctataaaccttcttagtacttctttcattgtattcatagttttgttatgttttcattttcatttgtttcaagaacattttaaatttttttcttaaattccttattggcctactagtcattcaggagcatattttaatttctctgtgtttgtatagtttcgaaagttttttctgttagtgattactagttttattctattatcatcagagaaattacttgatataatcttatttggggggagattattttaagagttattttgtgacctagcttatggtccatccttgagaataatccaagggctgaagtgtagcatttgtattctgtagctttttgatgaaatgctttgtaaatttctattaggtctatttggttcatagtgcagattaagttcaatgtttatttgttgattttactatctggatgatctgtctactgtttaaagtctctgttgcactggagttgatctctctctctttagctctaatatttgcttcatatatctgagttctccaatgttaggtgcatataaat

SEQ ID NO: 41959 - DNA, 1034 bp, Homo sapiens
ccattattatattgctgtctatttttgcttcagttccgtcaatgtttgctttatgtgtttgggaaaactgtcttgtatttataggttctcagtgaatgaaccctcttattataattgaatgtcctactttgtctcttgtgaattttgacttaaagtaaattatatgaaatatgaccattttcaacttaataaattgttgcctcttctctcatttggttaacacttgcataaaatgtatttttcatcctgccattttgtcttttttttttattagatctaaagtgaatctcttgaagacatgatatagttagatcttgatgtagatcttgatatatgtcatgatatagttagattttttttttcattttggaagatacttttgctggatatagtattcttgcttagactttttttttttccagtgctttaactatgtcatcctgttcccttcttgcctgaaagatttatgttcttaaatttactcgtaatcttgcagaagcatgcatataaataacacgtctctttcttcttcctgaattccagattctcttcttgtctgcgacttttaaaacattgcttgtgttatgtcttgttagaaatctctttgtgttatcttagttgaagtttgctgagcttcttgattttcttatattttttactaatgttgaagtgcatattagtctttttttgtagttctactacacaatttttatttctttctgtgctttttatctttttgttggtttcatttttgttatttcattttgtttttttaatttccattttactcattgagcatcattgagatgtaattttgattttctagggtaatttatttttttcttttaaaaaatagatcaagactttaattcaaattgtctcacataatttttacatctcctttttttaataattgatttctggatattcttttttttctttgagccatattatcttgatgttttgtttatgttgtaatgttgcaatttgtataataaaaagccacatgtcaaaatctgtattaagtgactttt

SEQ ID NO: 41960 - DNA, 1034 bp, Homo sapiens
gccctgctaatttttgtatttttagttgagacaaggtttcaccatgttggcctgtctggtcttgaacatctgacctcaggtggtccgcctgcctcagcctcccaaagtgctgggattacaggtgtgagccaccactcctggccattccctatgtttcttattgagatcccttagtcacttgctatacccattgtctgtctatgatactgaagtctttcttctcttgtaacagtcatttacctttggtctcagctgtccgaaactgtcagtgcataccacctttcctttcaacactgtcatggaatatagaaattagtctttggtaaggtctcaataagccagaagcatggacacatgtgccactattttatttatttttggagggggtagacaggagtttggagtctatagttagagtcatcataggatgaagaatggctgtggtgggtaaatatgaaatacttttattacacttctatgtggttcttggcgttttgctcacttggtgtgccgcaaatgcttaactggttcttagacttctcacaaaggcattttggtcagtatatttctgttaggtttatatgtctataagaatatagagcctgtggtattttattatcgttttattaattgctttgtataattatatatttgtgaagtatattcacctgagtctaatgagggagaattttattttttttctccagctggttcttttcattttactgcagagatattgccggatcatgacataaaagattcatttcaaaaagtgattctgagaaaatatggaagctgtgaccttaataatttacatttaaagaaagactaccaaagtgtgggtaattgcaaggggcagaaaagcagttataatggccttcatcaatgtttgtcagctacccatagcaaaacctgtcaatgtaataaatgtggcagaggttttcagttgtgctcaatcttcactgaacataaagacatttttagcagagagaaatgccacaaatgtgaagaatgtggcaaagactgtaggttgt

SEQ ID NO: 41961 - DNA, 1722 bp, Homo sapiens
aggattgcaacccctgcttcttttcctgttttctatttgcttggtaggcttttctttttccctttattttgagcttatttgagatgggtgtcttgattaaagcataccattagatcttgattcttttttcagcttgccatctgtgctttaatttgggtatttagcccatttacatttaaggttagtattcatatgtgtggattggattctgttattaggatcttagctggctattttgcacatttgtttctgtggttgctttatagtgtccacagtttgtatactttagtgtgcttttgtagtgactggtaatagtctttttcttatttaatgctttcttcagaagctcttttaagacagatcctgtggtaacattttctcagcatttgcttgtctgaataggatcatatatattttttacttctgaagcttaccttggtcagatatgaaattctgtgttggaattctttttttaagaatgttgaatattggcccctataatctcttttgacttgtaggatttcagctgaaagatttgttgttttcctgatgagcttctttttagaggtgacctggcctttctctctagctgcctttaacatattttttctttcattttgaccctggagaatctcatgattatgtgtcttgaggatgaccttctcctggggtatcttactggggttctccacatttcctgcatttgaatgttggcctctctaggttggggaagttctcatggatgttatcctgaaatacgtatttcaagttgttttcattctccccatcactttcaggcaatctcttgcatcatagatttggtttctttacataatcccatatttcttagaggttttgttcattcctctttattcttttttcactgttcttgtctgtctgatttcagaaagccagtcttgaggccctgagattctttcctctgcttggcctattctgctgttaatatatgtgattacattataaaggttttgtattgtgtttttcagttctatcaggttggccacattttttctccagactggctgttttttccgtcagttcctgcaattttttttcctcccttgcattgggttgcaaattacttttgtaactcagtgaagtttgtttctacccatattctgaattctacttctgtcatcttaggccttgctggaaatgtaatttggtcatttggatgaaagaagtcactctggctttttgtgtttttatctttgcactgattgtgtcttatctttgtgggcatatctttgaggttgctgacctttgggcttttttttttttaatcctatttgatggtcttgagtatttgattgtggtataagatggatgcagccaacaggctttgttcctgggaggttttttttgttttgttttgttttgttttgttttgtttggtggtggtggtgggtgggcaatgctcagctcacaactcagaggctgcatactctaactccgggggacttgttttgagccccaactgtgttctctggctccttgagatttggagtttgcgagtttgtgggatgaaggtgccatagctggagcagagtgctagtggatatgggatttctgcctgtctttgggtactcacctcagtggcaggagcaaagcagctgggaagggagtgggggatacctgctggaggctgtgtgctgttgcactaaaggtggtgttggcttggggcaggatactggccagtaa

SEQ ID NO: 41962 - DNA, 1100 bp, Homo sapiens
agtaaactgaaacctaagacacacgaagaaattctaagtggaaaggccacttattagtttacagcagtatcgtaagtgacaggatgataggagtgtggtaagtgatcaggataataatctgcttagtaagagaaacaatttgaattttagaaggaaattgccttaccatttgcaaattaaggtaattaaaatacagtgaatttcaaaatgcctttttaatgacaatgtgtgaacttaatttgttttaataaaccaaaattattgttattgtgttaaggctattttacattgaatgtgtatcttgccactgatgttaacttatcccatcttacccaaggttgtaggtaacaatatactattgggtgacagtggactaacatctctagtgatccctttgtcagtggtctttaacttaaaataatttagagaatatggtttctacaacttacatttttgtttacttgtaactacagattattatgatggttgtaatgaagattatgagtataattggagctatatgtttctgaattctgaacaactatttataaaattttatcctacttttttctgttgaacatatgacttctctggtctgctaaacacatacagacctttagttttggtttacatggatttaaatatatagatatatcactgtaaaataaacttcaggtgtaacagatttatagagaaagtaatcatatttgtttatggttgtgtacctactttgagaagaaaagaaaaatattagaatgaacagataattttacaagtgttgatcacttaccagcaaaccagaaacttcagagattttgaaagcaaatctattttctctgctgtgtattaaattcatttatctaaaatgttattgctcctggcttagaatcatcttgtgcaaattctttttttgttgtttgtctgtttgcctgttgctcaccatagacataattttcttttcataaaacattctttgtataatcacctcagagattatgaaagtgactttgataaaatttaatggtgttcacaaaataattttcacgtgagtaatttcacagtgcgtgtattgtatgttatttagtgtattttatattttg

SEQ ID NO: 41963 - DNA, 1037 bp, Homo sapiens
tgatgttaacattctgcctagattttttgcccacagatgggattatgacatataccttgcttgagttcaaaagcatgattatcaagcttatattgggattcagccaataggagatactttgccccctaccactaggtttatgtcaataggtaaggtccttcattgcatatttgtacaaagctcacagaaatttacaacattaactcatatcataaaaactttttgggtggtacagagagtttcataacagggcccagcaaaaagttaagattgtgactctcaactacacactcaggtgaaagtaaaagttgttaccatcctacatttacaaagcccattgttgaggtcctgaatctaacaagtgaagacagcacaaagttggaattgtgactttcttaagtgattctggtcacagttgggatggtgactcatttctggacccagctcataggcataataatgttctcatccctgaagccaacccaaaggagagatgttgactgtcatacctgggtttagggtatgtgtccacctcataggttatgtaactctcctctctggaatgggccctgcacaaaggaaggatagtgacatattgcaaggccaggcacagagatgagagtactcttttgccagagccatgcccaaagcagggcattgtgacatatttctgggcatatcacctaggttatacgactctcctgcttgggccctgccaatctggagagtgacatatttctaggccaggcacacaggtgatggtactcttttaccagggctatgcttcatggaggacactgtgacatatctctgggcctatcacctaggtgaagtgattccctccttggaccctacccacatggagcattgtagcatgagcagagaacctgtacccaggtgatgtaactctcttggctgggtgctgtcctaagagagccttgtgacctgtctcaggacccagcacccaaatgatgtggctcttctgcctggtctctgcccacatgttacattgtgacatattcctagggaagcaccta

SEQ ID NO: 41964 - DNA, 1004 bp, Homo sapiens
gaaattaaagcttatgcccagtgattccaagctaaggctaatattgagcctgcaaagggaagggaggttattaaaggcccagttagttctttcttggaagcctcccctgctcaccccagccatggaagaagcctttattctgagagaagctacagagccctggacgtcgggggacccacaggcagatgcagttaacgttaagatggaaggggaatgagagagtcttactaaagatgaagttgttatcgttttgaggcagtattttactttttgtaaaaacagaataaggtttctgtaaaaaaaattctgaattttaaaggagtattgcaacagaaggaaataccaactaaaagatctttaagaattgcaaagtttaggcagacaaagacttttttttttagggaggagcaaagaaggttagaaagaaggtcacaggggaatggcaaatggagggtgaaaaaaatcaaatactagattagaacacttttatcctgaagtcatcaagtctttaggagggacaaaaaatggggttgtatgttggctcagactgagggtacctcaaagttcaggagcctgtggaaaggagataaacttaagtgaagtttgattaagaagaactttcttttgaccactgaagaaaaattcagctaattttttaatatgaaaaagaaaatatgcagagtgagtgtttggttattaaacagttaagaaaaagagtaccatctaagtcataatgggaagggtgtttcttttcataaactgttcctggagaacacaaaggatggggacttttattaatcgcagctatttaccaggattatctatgtgcttcatctttccccatctcttttctttgtcctatacattttttccatttgaattttcctgggttgtatcttgtatagtaaactggtcgacataaccacagtgttttgcagagttctgtgagtagctttatcaaattattgaacttgagggagttatgggaattctaaattttcaaa

SEQ ID NO: 41965 - DNA, 1071 bp, Homo sapiens
tccatgtaggatacaagcctttggctcgcctcctagagccccttatttctttctcatcatggaagtccgtccttaaacaatcacttcttaatgttctgtctgccactccaaggttttcttaggccccctccttccccagcacatcaggcctgagggtttactactacacaagattggcaaattgacttcactcatatgcctcgtgtcaaaaaatataagtacctcctagtttgggttgataccttcaccagatgggtcgaggccttccctactggatctgaaaaggctgcagcagtttttacctctcttctaacagatattgttacctgtttcggcctccctacttccatccaatctgacagtggtccagccttcattagccaaatcacccaggcagtttcccaggcccttggcatccagtggaatctccacaccccataccatcctcattcctcaggaaaggttgaaagagccaacggcctcttaaaaactcaccctccaactccgaaaggactggactgttctcctaccacttgtgcttctcaggatctgagccaccgcccatgaacctaccaggtatagcccattcgaactcttatatggtagtacttttctactggggcccaacctcatcccagacaccagtcctccaacaggctaggaatgaaatctgtcaggctgctaaccttcttttacccacctcagatacccagccatatgaggacactctggccagacagcccatcctgataaagagcttaaccccctgatctctacaacctcagtggacaggacccttcctggtcgtttatggtaccccaatggctgtctgcttacaagatcctcctcagtggattcacccttccagagtaaagctgtgtccatctgacactcagcctgacccttcttcctcctcttggaagtcgcaagtactctccccgacctcgttaaaactcaccgaaatccctgaagaaacttaaatgtcctgctcctgtccgccctgcttcttcaccctcttcctccactctatttgccaagacatctcctggtttcatccccaaactcccacct

SEQ ID NO: 41966 - DNA, 1017 bp, Homo sapiens
aaagagaatggttcaaagaaatgatccaactttatttcatcagtgttgatatccagttctcaacattattttttgaaaagattatcttttccctcttttgtactcgtggcaactttgtagaagatcatttgattatatacagatgggttcatttctggtctcttctgttctttcatctgtttatctgtctgtgtcagtaccacattgtttttgttattatagcttttaattgttttgaaatcaggaagtataatgcctctttgtttttttccatgggtgttatagtttataataaaaatttaaaattttaaataatatttctgtaaaaaattgtgctattaagatttttataaaaattatattgaatttgttcaccactgtatgttatattgacatcttttaaaaattaaatttttttacccttgagcaagaatatgttgaacagtgtgttttattttaatatatttttgagttttccagctttacttttgcttttaattagtaggtttattcagttttgtcagaaaacatggaatgtatgattttggtcttcttaaatttatttgttgttgtcattgttttgagacaggatcttactctcacccaggctaaagtgcagtggtatgatggcatgactggctcactgcagcctcagcttgctgggctcaagtgattcttccacctcagtttcctgagtagctaggactacagacatactatgggaccaccatgtctggataatatttttattatttgtaggaacagggcctcactaagttgtccatgctggtctcaaacttctggccccagtaatcttcccacgttggtctcatgagctcctgcagttcactggtatttttaaatttcataagacttggtttgattcctaacagaatacgccaggtgcaaataagaatattgtacattctcggccgggcgtggtggctcacgcctgtaatcccagcactttgggaggccgaggcgggcggaccactaggtcaggagatcgagatcatc

SEQ ID NO: 41967 - DNA, 1055 bp, Homo sapiens
tcccgacctcaggtgatttgtctgcctcagcctcccagagtgctgggattataggcgtgagccaccgcacccagcctacctctttttttgggaagtctttatttatattttgtgtttgaagtaaaataattttgaattaagtcttactggttaaaatttttttattacatcaaaatttgggaagttatccgccttttatgtcttcaagtaacctttctattactttttttctatattcttcttctaatatttctttcttgaatatattgacatacttgatggcattcgataagttttgcattccatgctttaattttgttttgcaatttaatatttttatgttatatattttaggatgtgccacctcacaccagttaattgtattttgatagtttatattttaattgtgtatgacaatatttaactctgcaatttaagacagtgtggagcaaaatcaactatgaattaaccatattcattgtctactgccaatgtaattatctgtttgtataaatattatccctgtatttttttatgatttgtatttttctggcacaggtttgttgtgaatggttgttcaattttgtctaggtgagcagtcataaaaattctcctaatttcaacatttagttatatttgaatccatatttttgtgtgggagcaaaacgtttagattgaaagataatttgaaggctaaagtgcagtggtatgatctcagctcactgtaacctccacctctcaggttcaagcaattctcctatcttagccttctgagtagctgggattacaggcacccaccaccatgcccagctaatttttgtattttcaattgaatggggtttcaccatgttggccaggctggtcttgaactcctgacctcaggtgatccacctgcctcagcctcgcaaagtgctgggattaaaggtctgagccaccgtgcctggccaaaagtttgtctcttgattttatagatatttaaataaagtgaattatatatatatttaaataatcttctgaaacagaaagacttgctaacgttattgtttaatttgatt

SEQ ID NO: 41968 - DNA, 1029 bp, Homo sapiens
tataaatgtgaagaatgtggcaaagcttttaaccaatcctcaaaccttactacacataagaaaattcatacttcagagaaaccctacaaatgtgaagaatgtggcaaatcctttaaccagttctcatctcttaatatacataagataattcatactggagagaaaccctacaaatgtggagattatggcagagctttcaacctatcctcaaatcttactacacataagaaaattcatactggagagaaaccctacaaatgtgagtatggcaaaacttaattgatcctacaagcttactacacataggaaaattcatactggagagaaactacaaatgtgaagaatgtgttaaagcctttaacaagtcttcaactttttctgcacacacgaggtattttatactggtgagaaaccttacaatgtaaagaatgtggcacagcttttaactaatcttcaaaccttactgaaagttgagaaaattcgtactggagagaatcctacaaatgtgaaaaatgtggcaaatcctttaactgatcctcaacttttactaaacataaggtaattcatactggagaaaagccatacaaatgagaagaatgtggcaatgcctttaatcagtcctcacacctttctacacataagataatttatactggagaggaactctatagttgtgaagaatgtggcaaagcttttaaccaatcctcataccttactatacagaaattcatactggagagaaagcctacaattgtgaagaatgtggcaaagcttttaaccttccttaacccttaactgtagataagaaaattcatactggaaagaaaccctacaaatgtgaagtctgtggcaaagcttttaactgattctcaactcttactacatgtaagagtatttatactggaaagaaaccctacaaatgtaaaaaacgtggcaatgcctttaactggtcctcacaccttgctacatataagacagtttatactttgagagaaaccctgcaaatgtgaataatgtggcaatacttta

SEQ ID NO: 41969 - DNA, 1028 bp, Homo sapiens
acttcagaaagattgtacaaatacaaggaatgtggaaaagccattattatctgctcagattttactcaacattagagagttagtacgtaataaaagcattataaatgcaatttttgtcaagagatctttcagaaaatataagcctttaaagtgaagaagaggagccagttgtgctggctcacatctgtaatgccagcactttgggaggccaaggtgggtggatcacctgagggcaggagtctgagaccagcctggccaacatagcaaaaccccatctctattaaaaattttacaaaaattagctgcgtgtggtggcaggcccctgtaatcccagctaattgggaggctgaagcaggagaattgctcaaacctgggaggcgaagattgcagtgagctgaaatcacaccactacactccagccaaagcaacaagagcaaaaacttcgtctcaaaaacaaaacaaaaaaagagtattcattgtgaggacaaacaatacaaatacgaagagggttgtagtacctttacttgtatcacagatacttttgtacccattttgcactagaggaaaaccatgaagcagttgctcaaatgttgttcaacaccagaaaatttatattggagaaaagcactgtaaatgtaatgcatttgtgaaaacattttttaaaaaactacagcttagaaaataccagaggcctcatactaaaatatatttttgcaagtgaagtaaatataaaaataatttaatccaaaattaagtctatataaatatcagagaattcacagtagaaatatctaaggtactgacacttcagacattgctgagtatagaatcagaatgctgagtatagaaaataatttaaaactaaagttggtaggtaaataatgtgtatataactttaaaagaagtagaatttttttgtagatgtataattacattcaaattatattttttcttgaaaaattagtttttgaaaagcaaatgatgtaattcaactcaaattcatgctcttcattcctattgtattcaca

SEQ ID NO: 41970 - DNA, 1054 bp, Homo sapiens
atgaaaatttacttcaattatttgttcatttctaaatcaagttattcaactttatattctttttgtttgtttgttttcgagacacagtctcactttgttgcccaggctagagtgcagtggcatgatctcagctcactgcaacctccacctcccgggttcaagtgattctcatgcctcagcctcctgagtagctgggattacaggcaggtgccaccacgcctggctaatttttgtatttttagtggagacagggtttcaccatgttggccaggctggtctccaactactgacctcgtgatcctcctgccttggcctcccaaagtgttgggattacaggcatgagccatcatgctgctctttatttggttttaagagttgtttatgtattctgaatataactcctatcacatgtgatttgcaaatattgtctttttttttttttttttttttgagacagagtctggctccgtcacccaggctggagtgcagtggcgcgatctcagctcactgcaagctctgcctcctgggttcacgccattcttctgtctctgcctcccgagtagctgggaccacaggtgaccaccaccacgcctggctaatttttttgtatttttagtagagatggggtttcaccgtgttagccaagatggtctcgatctcctgacctcaagatccacccaccttggcctcccaaagtgctgggattacaggcgtgagccaccgtgcctggccaatttgcaaatattttcacccattttctaggagaccttatcactctattgaatgctgtatttaatgtgcagagatattgaagtctagtgtagttcaatttttctgttcttttctttgtttcacatgcatttaatgttgtgtctaagaaagtaatgccaagatcaatgtcatgtttttttcttacattcatttctaagagattaacagtgattttttaggtctaaacattttttttaaaaaaatattttttgtatgtggttcgagaaaatgatccaacttaatttatcagtgttatccaattttcaacattacttttccaaga

SEQ ID NO: 41971 - DNA, 1054 bp, Homo sapiens
cctatttttggttatagaaaaggggcgacgaaatcatctggctacttcctgctgttaaggggtgtcactggggagagggcctaaatcagaggttggcagttggacgtaggggtgaagtaacatctggttgaaagtgaccctggtgatttcttgtatccgctggcggagaaactgtactaggattggggcaaaacacattattatacagagaattataattgggataaggaaagggagcatctgttgaaccacaggtgaaaaccaccaagaaggaccagggtggagagggtcctaggaatgttttaactcctcttggatcttttttttttaaagtttgtaaattggtctcaactacccctgacacgttgagataatagcagcattcttcctgtaagaataaacatgtccctcctttttctgctgtaagcaagtctaaggcccgcctgttctgtgctgcgacctgtgctaccgaagtgatctgtcgctgtagggaggccagggactcggccgatgcctcaatggccaactgcaggcgagtagacagatcttgagatgtttggattgagtgggtgagggctccttttcctagccctgatgccactaaggaggaggctaaggagatgcctagtactaagggtaggaaaatagcccgtttgcttttattttgcagccttggctcggtccaggctagcagatggctaagttcgtcctgactatatagggtcaggctagggatgagagagacgagtaagcacaaggtgtgattaccagttgagttaagaactttagttagtgtggagttacaccagaagtagcctccgggtggtgccagggcgctggtaagcatcctggtctggttacaccaagaggcatttggggtagagtaacagaacgggaacttgtgtcttgtagggtctgagaatagtgggacctgtccttttgggaccggtggtataggggtggatgaatttcttgtataattaaagggggtagggagaggaactgctactaagggaggtcttccgagggctgcacagaggaagcagtgggagag

SEQ ID NO: 41972 - DNA, 1087 bp, Homo sapiens
tacaggatcttttgtggggtatcatataaattttagatatatttaatttttattaagtatgtcactggtattttgataaaggttgtgttatatctgcagattattttctgtaatatggatatttaacaatattaatgccaattcatgaattagtactatttaattggtttagtatttaatttcttcctttaatgttctttagattataatgtaaggtgttttaactttttggttaaactgatttcaaagtgtagttattacatttattgtagatgagattgcttttaatttcattttgagatagttaattgttcttgtgtagaaatgctactgactcgtgtgttgattttgtattttgcaagtttaataaatttgtttattagttctaagtgaagtcttaggcttttctatacctaagagtatgtcatctgtaaacagggataatttaactttttttccaagctggatgcctttgattttattctctaaattttctgacttggacatttaatactatgtttaataagactgatcgaagtgggccttcttgtcttgttctagcttttagagtaaaagcttacaacatttccttgcttaatatgttgttagctgtgcattttttttggtatatctggtgtatattggcttgaggtgcatttgtcctatacctgttttattcagagatttatcatgtatttatcatgtatgttgaattttgccagcgcttattctccacctattatttatttatttatttattgaaacagagtctcactctgtcacctatgctggagtgcagtggtgtgatctcagctcactgcaacttctgcctcccgggtgcaagctattctcctgcctcagcctcccaagtaactgggattacaggtgcacgccactatgcccagctaatttttacattttagtagaaatggggtttcgccatattgacgaggctggtctggaactcctgacctccagtaatccactcacctcagcctcccaaagtgttgggattacaggggtgaatgcataaacagttatgtagatagtttctcttagtttaacaagataaaagtaacagttaaaa

SEQ ID NO: 41973 - DNA, 1027 bp, Homo sapiens
cagctcactgcaacctctgccttccagcttcaagtgattctcctgcctcaggctcccgagtagctgggattacaggcacctgccaccaaaccctgctaatttttgtatttttagtagagatggggtttcaccatgttggccaggctggtgtcgacctcctgacctcgtaatctgccctcctcagcctcccaaagtgctgggattacaggtgcaagccaccacacccagcctaatctgtttcttatgttatagatgcacataaaatttcatttagaaaaatgttcttgtactacaatatttaaagctattgaattatgattcataagttttattttgtagttagcatctctaggggaatttcagggacactgttggctgtcttgtgattaccgatccttttaaaaactcgttgtatttgagaagtaaaatagtagaatatatatgacaaaatcgggaattaaagtagacagtatactcaattccactgtgtttaaagagtttgattaatttctatacattgtgccagtggttaagatctgggactctagagtcaacctgagttgaaatcttggctctgtcacttgatctcttgtctcagcttcttcctccataaaatgagggtagtaatagcgttaactcataggattattgtgaatatgaagtgtaccagtacatgtaaatagtcctggtgtctggcataaaggtactcataaaacatagttactattattttagaacatggtttagatcttcctgtatgtttaatttgtcttttcctcacttaacatatcacggcagggcacggtggccataatcccagcactttgggaggctgaggcaggtggatcatctgaggtcaggagtttgagaccagcctggccaacgtggtgaaaccccatctctacagcctggccaacgtggtgaaaccccatctctactaaaaatacaaaaattagctgggcatggtaatgcacactgatggtcccagctacttgggaggctgaggcaggagaattgcttgaactgg

SEQ ID NO: 41974 - DNA, 1265 bp, Homo sapiens
tatatgcttcttgcctatggaaatatctgttttctttcagggtttttatagttttgggttttacatttaagtctttaattcatcttgagttaatttttgtatatgatgtaaggaaggaattgagtttcagttttctgcctatggctagccagttctcccagcattatctactgaacagaaaattctttccccatttcttgtttttgtcagctttgtcaaaggtcagatggatgtagatgtgcagcttgatttctggccctctattctgtttcattgagacaaagaagggcattacataatggtaaagggttcaattcaacaagaagatgtaactattctaaatataaatgcacccaatccaggagcaccaagattcataaagcaagttcttagatacctacaaagagacctagactcgtatatgataacagtaggagagtttaacacaccactgacaatattagacagatcatcgagacagaaaattagcaaagatattcaggacctgaacttagctctggatgaagtggacctgatagatatctacagaactctccacccaaaacaacagaatatacagtcttctcatcaccacacaacacttactcaaaaattgatcatgtattgtaagtaaaataatcgtcagcaaatgcaaaagaactgaaatcataacagtctctcagaccacagcataatcaaattagaactcaagatgaagaaatccactcaaaaccacacaagtacatgaaaattgaatagtccgttcctgaatgacttttgggtaaataatgaaattaaggcagatatcaagaagttctttgaggctgggcgtggtggctcacgcttgtaatctcagcactttgggaggccgaggcgggtggatcacgaggtcatgagatcgagaccatcctggctaacacggtgaaaccctgtctctactaaaaatacaaaaaattagccggtcgtggtggcgggcgccagtagtcccacctactcgggaggctgaggcaggagaatggcgtgaaccctggaggtggagcttgcaatgagcggagattgcgccactgcactccatcctgggtgacagagcaagacttgtctcaaaaaaaaaaaaaaaaaaaaaaaaagaagttctttgaaactgagaacaaagacacaatgttccagaatctctgggatacagttaagaagtgttaagaggaaaatttatagcactaaatggcctcatcaacaaactagaaagatctcaagtcaacaacgctaac

SEQ ID NO: 41975 - DNA, 1050 bp, Homo sapiens
ttctgacattttattttccacagactttatttcaagtgcatacagtgtggccgaggctacccctcaggtgcctgagtccagacttactggaattcaaatacccatgagtttaagaccaacttccctggacttggctgttgaaagcataagtacaaattagaaatataagacttaattttccaacttgaaagtaagagtagaaaatttgctctccttccttaaagcatttaattcagaaaacttttatatttaattttttctctgcctctttgacatatgtgttaatatttttaatggctgaacagtccttttgttatttttttctaggaaaagtctttctctaggacctggaaatgattgctcggaagtgtaaacagcaaaaaagttagagccctatcgcacagcttgctccaagtttcaaaattaccttctgtccctcctggacttgggaccattatttttccttcagatatgccagtcagcaaccacagatggcctccccaattaccaggtgaatttaggataaactgtatatgacacatggtgctgtgaagtgtcctacttgaggactaattatgtctttcagtctgttatgaggttacctgtaatttaaatcagattctggtctaactgtgtaataataatttgctttctattctactttggcgagtgtttgggggagttggagacaattaagttttcagttacattttatgaacactgtccagaattgccagacacactataaacatatgaggtgcccaccaggcttcacactagaggggtcctttccactcagtaactcacagttgtgcagcaacatgcatgctgcccccaaaatctgcaggtagagtggtgtctctgcctatttgggatccacagtcatgtcagagcagttagagcaggtttccacataaataacttcagaggacagcagtcagccagtctacctctttttatgcccttggcattctttatacctgaaactggttcagagaccatggggcctcgaaacccatccaggctcacacatgtgcaataagtagcttt

SEQ ID NO: 41976 - DNA, 1331 bp, Homo sapiens
tatagatactatgcaaatagttttcccatactgtgggtggtctcttcactttgttgattgtttttttttgcagtgcagaagctttttaacttgctgtaatcctgtttgttcctttttttttttttttgagacagaattttgctcttgtttcccaggctggagtgcaatggcacaatctcagctcaccacaacctctgcctcccgggttcaagtgattctccttcctcagcctcccatgtagctgggattacaggcatgtgccaccatgcccagttaatttttttatttttagcagagatggggttttaccatgttggccaggctggtcttgaactcctgacctcaggtgatccacccacctcagcctcccaaagtactaggattaaaggcatgaaccagcacgcccagccctgtttgttcatttttgcttagttgcctgtacttgtgaggtactactcaagaaatttttgctcagtccagtgtcctggagaggttccccagttttctgggattttttagtagcttcatagtttcacatcttagatgtaagtctttagcccattttgcttttatttttgtatatgctaagaaatagagatctagttttatttttctgcatatggatatttagtttcctcagcataatttattgacaagactgtccctttttgccaatgtatgttcttggcacctttgttgaaaataggttcactgtagatatacaaatttttttctgagttctctattctgttctattggtctatgtgtctgattttataccagaaccatgctgtttgggttactatagttctgtagtataatttgaagtcaggtaatgtaatttctgattttgtccttttgctcatgatggctttagctgttctgggtctattgttgttcaatataaattttggaatctttttttctatttctgtgaaaaatgtcatggtattttgatacgaattgcatcaaatctctagactgctttgggtaatgggaacattttaacagtattgcttcttccagtccataaaaatagaatatctttccattcttctgttttatagttttcattatagagatcttcttgtttctttggtttagtttattcttgggcatttctttctatttgttgctattgtaaatgggatgacatgcttgatttctttttcagattgttcactgttggcatttagaaatgctactcattgtttttgagatggagttttttttattattattattgttattttgagatggagttttgctctgtcacacaggctggagtgcagtggtgcgatctcagctcactgcagcctctgcctcttgtg

SEQ ID NO: 41977 - DNA, 1030 bp, Homo sapiens
actttctgtagctctttctttttcttcaatctgttcattataaatttagcttagtgtttctgtttgatcatctctttaactcactttattgcatcaatagttgtattccatagctctcgctggtatttgataggttcatttctacgtttttcaaattcaaattaactatccactgtaagctctttaccagctgctttctgagtggaatgctttggtccacctaattttgcgaggattgcacttctttttaaagtttttatgacatttagatttacgaaatctgaacaccttgcaatcattgcggatgaacatcatgccatggccagggtaggtgggccccaaacagaaataacatatctcgacatgcatgtcgaacccgcgggtccctaccgaccgaatgccaagcttgagaggaagttgaatgatgtttttaatgtgttgttgaatttggttttctagtattctcttaaggatttttacaatgatgtttatcagagatattggcctcagagatatgtcagttttccctgctcttgcacagcctttctcacctgtcactatgtaagatgtgcctgcttccttttctgctgtgattgtaagtttcatgaggccttcccggccatgctgaactacgagtcaattaaacctcctttgtttataaatttcccagtcttggccgggcgcggtgcctcacacctgtaatcctagcacttttaggaggctgaggtggatgtattacctgaagtcagaagtttgagtccagcctggccgacatggcgaaatcccatctctactaaaaatacaaaaattagtcagtcatggtagcgggtgcctgtaatcccagctactcaggaggctgagacaggagaatcacttgaacctgggcggtggaggttgcagtaagccaagattacaccacttcaccccagcgtgggctaaagagtgaaactccgtctcaagaaaaaaaaaaattacccagtctcgggtagtatgttttttgtttgtttgctttgtttttgagatagggcct

SEQ ID NO: 41978 - DNA, 1045 bp, Homo sapiens
gttaatgctggaataaattaagactttggggaactgttgtgaaggcatgatttgttttaaaatgtcaaagagatatgagatttgggagaggccaggagtggaaggatatagttaggctttgcatccccactcatatctcatcttgaattgtaatccccaggtgtttacgaagagaccttgtgggaagtgatttgattatggggtggtttcccccatgctgttcctgtgatagtgagtgaatgctcatgagacctgatggtcttataaggcagttttccctgttcttccatgctctagctcacctgctgctgtgtaagacatgcctacttctgctttcaccatgattacaagtttcctgagacctccccagccatgcagaaccgtaagtcaattaaacctcctttgtttacaaattacccagtcttggttagtatttttataacattgtgggaatggactaatactgtctgttttgttaaaagactaagtttcaattgggagccaagatgactgactagacacagccaggggaaacaactgacaagacactgagacattgaaatttccatcccattctgagcctatcttcagatgaaatgcattgcaagtgggcagagggaggacacagatgctggaaacccttcatggtgtaccaagtactaggaacttaagtccactttttctgagccctgcaaaacatcagaacttgctcagggattgccatcattgtgatctagactgccggggttttttgtgattttttttttttttttttgagacggagtcttactctgtcacccaggctggagtgcagtggcgtgatctcagctcactgcaacctccgcctcctgggttcaagtaattctcctgcctcaacctcctgagtagctggaattacaggcatgtgccagcacgtccggctcacttttgtatttttagtagagatggggtttcaccatgttggtcaggctggtctcgaactcctgaactcgtgatccacccgccttggcctcctaaactgctgggattacaggcttgagccacc

SEQ ID NO: 41979 - DNA, 1055 bp, Homo sapiens
ggaagtcatattggagagaaacattgcaaatgtaatgaatgtagccaagtggttaaatcttgctctaccctttctattattaagagaatttatgctgaaaagaaacccaacgaatgtgaaagatgtggcagagtctttaagtggtcctcatcccttactcaacataagagaattcatcctggagagaaatctataaatgtgacaaatgtgacatagtcacagtcttcaaattttactaaacgtgtaatactttgtagtggagagaaaccctacaaatgtgaagagtgtggcctttaaattgttgctatactttactcaacgtaaggacattcatactgcagtgaaaccatataaatgggtaatatgtggcagagcttttatatggttttcataccttactagacatcagataactcatcctggagagaaattctacaaatgtgaagaatgtggcaaagcctttaatcagagctcacaccttaatgaacataagaacattcatactggagggaaaccctgaaaatgtagagtgggacaaagcctttaacactcaaatcttgctaatcataaggcaactcacaccaaatagaaaccatacaaatgtaaagaatgtgccaaagccttttaccagttcttacaccttactgtacatgaggaaatttaaacctgagaaaaattttacagatgtgaagaatgtggcaatgtctgtaatacctgttatcttacttgatatggaagagttcataccgactagtagtgttataaatgtaattactgtctaaagacattttacaaaatacaagccttagattgcaaaaagttttagtgaagaacaacattgcaaatacaaagacgagttcaatgccttcacttatatcattgatcttcttgtacacaggagaaattatactggagagaaatcctcaaacagttgctcacactttattcaactttagagaatttgtattggagacagacactacaaatacaataaatgaagaaaagctgttctaaaaatatcagaagacatcagagtgttcacattaaatgatgtt

SEQ ID NO: 41980 - DNA, 1120 bp, Homo sapiens
gcgcgatctagactcactgcaacggcgcgatctagactcactgcaacctccgcctcccgggttcaagtgattctcctgcctcagcctcctgagtagctgggactacaggctcgtgccaccacacccagctaatttttgtatttttagtagagacggggtttcaccatgttggtcaggatggtgtccatctcttgacctcatgatccacccacctcggcctcccaaagtgttgggattacaggcgtgagccactgcgcccagcctggcagttactttctaaaataaaacaaagttagaattatgtaaaaacatttgaattccaaaggagtattgcaacaggaggaagtaccaactacaagatctttaaggattgcaaagtttaggcagacaagggctttctttcataggagcaaacaagattagaaagaaggtaggcggggaactgcaaatggagggaatcaaactttaggcctggcatggtggctcatgcctgtaattccagcactttgggagactgaggtgggcggatctactaaaagtacaaaaatcagctgggtgtggtggcgggcgactgtaatcccagttactcaggaggctgaggcaggagaatcccttgaacctgggagatggaggttgcagtgaactgagcgttactgcactccagcctgggcaacagagccagactctgtctcaaaaaaaaaaaaatcagattttagatgagagaatgttttaccttgaagtcagtatattcttagaagggacataaagtgaggttgtatgttggctcagactgaaggtagctcaaagcgcaggagttggtgggaaggagataagtaaagtctgattaagaagtatttttggccgggcgtggtggctcacacctgtaatcccagcactttgggaggccgaggtgggcggatcacgaggtcagaagaccgagaccatcctggctaacatggtgatactccatctctactaaaaatacaaaaaagtagctgggcgtggtggcgggcgcctgtagtcccagctattcgggaggctgaggcaggagaatggtgtgaacccgggaggcagagcttgcggtgagccgagatcgtgccactgcactccagcctgggcg

SEQ ID NO: 41981 - DNA, 1023 bp, Homo sapiens
tttaaatgttacatacagaggtacaagggagatctatatataaatagcacgatataaattgcttgaatctttctttttagagttttgtttggatgtggcttcagagcagggattagtcaattcatttttacttttttttttggtggattctcattctgtcgcccaggctggagtgcagtgtcacgatcttggctcactgcagcctctgcctcccaggttcaagcaattctcttgcctcagccttctgagtagctgggactacaggtgcctgccacaacacccggctgatttttttttttggtagagacaggctttcaccatgttggccaggctggtcttgaactcctgacccaagtgatccacctgcctcagcctcccaaagtgttgggattacaggcatgagccatcgctcctggcccttgttttacatttttaaattacagtttttatacctattcaaaagtagagaaaatagtacagtgaacgctaaaatacccattcctcaatttctgtgatcattaagattgtcccacattttgttcttctattcctttacctccctttgcaggaatattgtaaagcaaatcagtcatcaccatcattttatctgttcagtgtgcatccccgaacagcattaacattttcttacacagctactatctcatcacatctgacaaaattacaatgattttttggtgtcagctcatctgtaacccttagttgagtttcctcactcttttttttttttggagacaaagtcttgctgtgtcaccctaggctggagtgcaatctcagctcacagcagcctctgccccctgggctccaacaattctcctgcctcagcctcctgggtagctgggattacaggcgcacgccaccatgcccagctaatttttgtatttttagtagagacagggtttcaccatgttggccaggctgatctcgaactcctgacctcaggtaatctgcccacctcgtcctccccaagtgctgcgattacaggtgtgagccaccatgcctggc

SEQ ID NO: 41982 - DNA, 1047 bp, Homo sapiens
actttgggagactgaggcgggtggatcacctgaggtcgggagttggagaccagcctgaccaacatggtgaaaccccatctctactaaaaatacaaaattagtcgggcatggtggtgcatgcctgtaatctcagctactcgggaggctgagacaggagagttgcttgaacccaggaggcagaggttgcagtgagccaagatcacgccattgcactccagcctgggcaacaagagtgaaactccgtctgaaaaataaaataaaataaaataaaaagtaaaaaagcaaaaaaaaaaaaaaagtgcatttagaatatttgagagaaaataagcaaaaggaagaaaatgtaaattatctataatgcttacacccaggacaataatccttggaatagagtgtctcactttgtgtatagaaatgaaacttttaaaatgccattttattttttaattaaaattttttctttccttttttttcctcctcagagttagaaaggataaaaatgttattgattagtaagactgtagctttatgttgatattttgaaattttaggctagtgcttgtttgttcatgtaacatataagcacattcagtactattagaactgttgcattatgcaataacatgactgcctaatgcatatatcaggattagtacatattgtaaagtttttattttttaccaaaatgtttacgactaccaagtattcattccttaacactattacataattaatttagaaatgttttacttttaaaacttctggacaggtgtaattaaatccttagatagcgttaatgtactatttaaaaaacacacacaaaacattatcattggcaaaacatgctttatcatctattcatctttgtgaatccggtttttcttgataccatgccatcaaaacaaaacaaatttgacataagactgcccaatcatccataatttaaagttggtgttcgtcagaagaattttattgttctcattatacatgttatacatttgagcttttttttttttttttttttttggagatggagtctcactctgt

SEQ ID NO: 41983 - DNA, 1102 bp, Homo sapiens
actttggccactatacatgcgtttggcctgtttttgaacttcatataaatgggctcagacagtaaggactctgctgtgtctggcttcttttgcccagcataattttttttttttttttttgcaatttatccaacttggtggtggtatgagttactctttttttcttgctgagttctgttgtatgattatattaccctttgtttattcattttcttattgattgtttctaggttttggctattgtgaattaagctgctatgaacattctcatatatactaatttctcttgtgtatatatctaggagtggatttctgggtcatgggataggtgagtgtttaactttattagaaacaacagaacagtttcccaaagtggttgtactaattaacactccactttggttttaatttgcatttccctgattactaatgaggttgaccagccttttatatgtttttcggccatttggatatcttctctgtgaagagctcattgaagtcttttggctaattttctggttggtttgtataagggataaatgtattgatcccctcccctccctgccccatacctgtgttgcatgtatctattactagctagtggctggcctttcctttttattctcttaaaggtgtctcttcactaacagaattttttttatttttgtttttaattattatggatacataatagccatacatatttatagggtagatgtggtattttgatgcaagcatagaatgcatggttatcaaattagggtagagtaccccatcacctgaatcatttatcatttcttcatgttaggaatattccaattctagtcttttagtcattttgaaatataaaataaatcattgttaactgtagttgccctattgtggtactgaacactagacttactcattctttttaactgtatttttgtgcccagtcaccaatccctctttatttcccacttcccttcctgtcctttactctgtctacatgggttcaattttttttctttaactcccacatatgggtgagaacatgcaatgttcatctttctgtgcctggcttatttctcttaacataatgtcctccagttttatccatatt

SEQ ID NO: 41984 - DNA, 1033 bp, Homo sapiens
tgccaaagtgccatttgaagcctggtttatgacatgtttctccttttgtcatctttgggtgccacccaaaatgcaggctcaaggccgcagcctcttgactctgttcaacagtttccccccttggcttattgtccaacattggcctactcttccaaatccacctctttatcccaggaacaagctgcttctatgccaagggcatggcttcctctttgcagattgtctcatatctctgacctggaaaaaagggggtttttcattctgctagctttttagtgctgctttgagatcattattctagagccctctgcagtaatgttttttctcatggattgaaattcattgtttccagtaggatttttgactagacgtggaaacagaaggacaaattgaaatgactctgaagcttatgggaggactgagtatcattaactggcacagagggagaaaggcaggctctaggtggaaggtatgtgacttgcttttgaaaacagtggtgtgagattctggcctgtgaaaacagctggagttacgagatagaaatggggacttaaaaaatagcttcataccagacgtggtggctcacgcctgtaatcccagcactttgggaggctgagacaggcggatcatcttaggtcaggagtttgagaccagcctgaccaacatggagaaaccccgtctctactaaaaatacaaaaattagccaggcgtggtggtacatgcctgtaatcccagctactcgggaggctgaggcaggagaatcgcttgaactcaggcggcagaggttgcagtgacccaagatcacgccattgcactccagccaggacaacaagagtgaaactgtcacacacacacaaaaatagctttgtgcgtgtgtgcatgtgcacgcacgtgtgtgtgtgtgtgtgtgtgtgtgtgtgtgtgtgtgtgtgtgtgtattgaaaatacagaaaaatagccaggtgtggtggctcatgcctgtaatcccagcattttgggaggctgaggtgggcagatcacaaggtcaggagat

SEQ ID NO: 41985 - DNA, 1061 bp, Homo sapiens
cacattccgtatctcccatattctctgttgtatcatggccatagtatactagatgctcaataaatttgtcaaaaaggccaggcacggtggctcatgcctgtaatcccagcactttgggaggccaaggtgggcggatcacctgaggtcaggagttcgagaccagcctggtgccagtggtctcaactactcgggaggctgaggtgggaggattgcttgagctcaggaggatgaggctgcagtgagctgtagtaccactccactccagcttgggtgacagagcaagacattgtctcaaaaagaaaaaaaaaaggagtatggtgaaatttttagtagtataaagttaggtctaagagttttatttgcaaagattaccatgtgggagtaatctctagacatttttgacttactggcctattttgtaagacccccaaaggtggagaactggatcagggaaacaagcagatcttgaatacacactgcctatttttgagaggaccacaaattcagaatttgaaagaattggagttattcctttccttaattacactttggccctagggacccagaaatgaatgtgagttcctcttctctaggagtccagtttaatgctagacatacatggtaataagcagagtccgtgcaacagaaatcagtggcgtgaaagtaaaggggaagagatccataattcatggttgacttgacgttttccactgaggggccagcatgggttttatgcagaatgaaggacatttgagatttcattttggggccataggaggctataacctgggatgggtaaaaaaattataaagcagtgcttacgctcaggttggggaccttgaacttgtactggtgctaattatgggttttttcctagtagtatttacagcccctatacaagggtggaaagtgaaactagtgtatttactcaaaataggtgacttgaaggaaaatgggatggagcaaagtagtgctttataatcagccccagttttaaggataagactgctagagactcattacttttcacattataatgtgaaattaatcattaaaactta

SEQ ID NO: 41986 - DNA, 1511 bp, Homo sapiens
ttgtgttcttccttagattctcctgtaccttcctgttaccgttctctctcctggttctcccccgcttccagctgttttccatcaccttcatgggtgctttccctcctggttggtcctttgcttaacttgtggtgttccctagtactccatccgtaatcttccctttccctcatattctccctgaacactcttcttcatggctatcatgtttagaaccatacttctaaatctgcatttcagatccatctagaaaccttcaggtttttattttgggctgcttattggatggagttatctgtgtgacttggaggtatgtgaaaagtcaacatgtcaaaactcaactcagtcatctgttcttcctcctgtgttctttgtcccttgaatggcctcactatctattcagtcatcctggaaacccgggagtcagtcattcttcctcaattcagccagttgtcagatcctgtcagtcttacttcttcaatcttcggatccatcttcagtgctctaaactgttacagtctccgagttggtctcactctttccagttctgaccccttcaatctgtgttgtataccaatgccacagtgactgttaacccctcaggcagaattcagcctcttcatttgagtccataggtacttggtgtatttagtacattatattatgtttcagagtatgatgtttttccctgttctttaagcttcttgagggtaggggctgtcattcagtcacaagaaataggtgttggaagcagtaagggctttgaggttctctatatgttaggttggtgcaaaacttcaaagcctttactgcttgtaacacctattgcttattatataggatttgataaaatttgagtaagtgcattttagattccaagataaacataatagatttaatgcacgtgcttatttctatacccttaggaaaccccaaggaaatgagagtaaaggaatacaagaaattgtataaaaccacaggacaaaaagaatgagaaaataggcagagtccaagaacactggcagccaagcgtcttcattccaatctgtaccctagaagtaggaggctggtggaaatgatttttctgagagaaatatttttttctagaaaaaaatatgtacagatattgacctttggggaccactaatgatataattaactctgcttaattattcacctatggtaacatctgtaattattcacctatggtaacatatgttgggtgttgacaaagccacactcaataagaattctattctgcctttaaattttaatgaattattattattattattattattattatttgagacagagtctcactctgttgcccaggctggagtgaagtggcaccatcttggctcactgcaacctccgcctcctgggttcaggcgattctcctgcctctgcctccagggtagctgggactacaggcacccgccaccacgcccagctaatttttgtagttttagtagagacggggtttcaccatattggccaggctggtcttg

SEQ ID NO: 41987 - DNA, 1044 bp, Homo sapiens
agtctgatcatgacgctaaagaaatgtgtctttaaaacattctgagggaaaattgtctttttttttttagtttttatgtttttgtgacagggtctcactctgtcacccaggccggaatggagcgatgtgatccttgttcactgtggcctcgaactgctggactcaagcagtcaacctaccccagctgcccgagtagctggggctacaggtgtgtgccaccacacctagctaatttttttatgttttctagagatggggtctcaccatgttgcccaggctggtctggaattcctgtcctcaagcaatcctgaacctcccaaagttctgcaataacaggcataagccatcacacctagccagaaacttatttttaatgtataattacatacccaaacaatcaatcaattatgatagcagaagaaagatatttttagatgtccagcatctcagaaatttgacctccagtgtgtattttctcaaggaaagaaactattagaggattgtgccaccaagtaaagtaaaccaaggagaaatggaagacaccaaatataagaaatggaagattcagtgtggggaagagattggaagtcttaggacgacagctgcagcaggaccagagagtagccagcctgacatgtcatccagagtgctccaggaaggcaagggctccaagagagatgtcttcagagaaagatgcaaatcatagattccttcacatggttgatcttgtttaaagtattgctcagaaggggttcagaagaccaataatagtgacatagaaaactaagcaaacaaaatataaattcataactccatgaaaagcaatttgtgctcaaaaggaaatatgatgacagctaattatagatatttttgtgatggacagtataacatgtccctggaaaaatttattttctacggaattgagccctaaaaataccagagcaaggaacctatagcttaagagagtcctaaacaacatatcaagtaaaatagaatgagagtggggattaaactatatagtgtctaggaatgctcacttgtcaa

SEQ ID NO: 41988 - DNA, 1020 bp, Homo sapiens
ttttttgagagttttgctctatcatccaggctggggtgcagtggcgtgatctcggctcactataacctctccctctcgggttcaagcgattatctgcctcagcctcccaagtagctgggactataaggcgagtgctaccacgtatttgagtagagatgggatttcaccatgctggccaggctagtcttgaaatcttggcctcaattgctccacctgctttggcctcccaaagtgttggaattacaggcgtgagccactgcgcctagccgtattgctgtttcttcatccggctactgattcacgcatgtgttcagctcatagaaattaactgaacttcatacacctgtactttatgatgtataatgatgctccaataaaaagtatttttaaaaagtaccagaggttatgggacaggaatggagcagaccactcaaaaccaatgtaatcttgggaccagaggatgaaagcaatgatatttctagtaaaactactgacagagtttaaagacttgttggccggatgcagtgactcacacctgtaatcccagcactttgggaggctgagacgagcggatcatgaggtcaggagattgagaccaccctggctaacacggtgaaaccccatctctactaaaaatgccaaaaaaaaaactagcctgacatggtggcgggcacctatagtcccagctacttgggaggctgaggcaggaaaatggcatgaacccgggaggcggagcttgcagtgagccaagaccacgccactgcacaccggcctgggtgacagagcgagactccatctcaaaaaaaaaaaaaaaaaaagacttgttgaatttttttcttttcttttctttttttcttttaatcgagatggagtcgtgctctttcacctaggctggagtgcagtggcgcaatctcggcttgcgtcctgggttcaagcgatttttctgcctcagtctcccaagtagctgggattacaggcgcccgccagcacatctgcataatttttgtatttttagtagag

SEQ ID NO: 41989 - DNA, 1663 bp, Homo sapiens
gtggggtagtggcaggcacctttaatcccagctactcaggaggctaaggcaggagaatcccttgaacctgggaggtagaggttgcagtgagtcgagattgtgccattgcactccagcctgggcaacaatagtgaaactctgtctgaaaaataaataaataaaaataaagataattttaagattattgttttaaagaataaatgttgatattcttaaggtggtaaaagcaagataatggcatatttattagtaacaaaaatttaaacaacaaagaaaaagcaaatgatttccaaaatatcaataacaaatcagtaaataaaggtaatcagaagtttaacttccttgtggctgggcacaatggcttgtgcctgtaatcccagcactttgggaggcttcagtgggcggatcacttgaggtctaaaaactacaaaaaattagccaggtgtggtggaacatgcctgtggtccagctacttgggaggctgaggcaggagaatcacttgaatctagaagatgagaccagcctgggcaacatgatgaaaccctggctctaccaaaaataaaaaaaattagccctgcgtggtggtgggagcctgtaatcccagctactttaggaggctgacacaggagtctcacttgaacccgggaggcagaggttgcagtgagccgagatagcaccactacactctggcctgggtgacagaatgagactctgtctcaaaaaataaaaataaaagaactaaaagtaattctcaagtgatgagtatgtagaggtggagatgaaacaagaaaggcgtaattattgaagctgggtgatgggtacctgggttttttttgtttttttgtatgcgttttgtttttatagtaccctttctctttaccatagcaaaataatacatgggtgtttattacactcttgtgctcactttgtgtatatgcatttgaagttttctataatttttttttttaagaaaaagcaatatttggctggccacagtaactcacacctgtaatcccagcatttgcagaggccaaaataggtggaatgcctgagctcaggagttcgagaccagcctgggcaacatgatgaaacctcatctctaccaaaaatacaaaaattagccaggcacggtggtggatgcctgtggtgccagctattcgggaggctgaggagggaaaattgcttgagactgggaggtggaggttgcaatgagtgcagattgcaccactgcactctaacattattgacagagtgagaccccgtctcaaaaaaaaaaaaaaagcaacattctggcttaccatattagcgagtcaaaagataatatttagggctgggtgcggtggctgatgcctgtaatcctagcactttgggaggccaaggcgtacggatgacctgaggtcaggtgttcaagaccagtctggccaacatggtgaaaccccatctctactgaaaatacaaaaattagctgggcgtggtggcgggtgctagtaatcccaactactcaaaaggctgaggcaggagaatcacttgaatccaagtggtgaaggttgcattgagctgagattgcgctgctacactccagcctgggcgacagagccagactgtctcaaaaagaaaaaaaaaaatagcaatgtaaacatattatttagaaatgtggaagtaa

SEQ ID NO: 41990 - DNA, 1015 bp, Homo sapiens
ctcattatcaactacaaacgactagtttacttgaacgaggcctggaagcggcagctgcaacccaagcaggactgacgcccgacagactccaccctaacagtctcaagcccctttccattcagtttattttgcagcaggtttttattattattattattattattattcacaacagacactttccctaagaatctcaaactgatttttaaaaatccggtaaattagaaggggccctcgctattttctgtgtcagtcttcattttaaatatggatacaaaaaggatacgccgagccaatcaaagacaagctttaactttactttgaagtgtttctgaaatgataaaatgtagccctagccccctgccctcaattgtaaagtgagcaaccattgctagtaattctttaatgtgtataaattcaatttcaggtataacaaatgtgatcatgacatgaaaatattctagaatagatactgtattaaatattgccatgtttacaatatgtaatatgtttttagccgatggatttaaacatgtagattcaactagaatccatttgtgatatttgtaaataaaggtagaaatattagatccatttctgcagaacttactgtacagtttagttggagtgtagcactgaagaactgtcagctcagcgttgactgaggagatagtgaaaatagcctatacacagcatcttgtgaaaagtactggcagccgtggttgcagcaaataatagggcaaaaaaaataataatagggtggtcggttccctttcatctccctcttctgaaaggaaaaaattgaattggaacgttcaagtccagtttgtgttcagtcataaaactgggccagttgttaaccttacagaatgagtcatgtggccagaccttcaagtccaaggccttcagacactaaggatgggaaaatgggtatttttctttggagaaaagctggaaatataaacatggcatttttaggtaaagtttcttccactagttgaattttcatgcagat

SEQ ID NO: 41991 - DNA, 1045 bp, Homo sapiens
cacccaaatgaaattgtgacaggatgtttgtatggttaacatctgatatcagaatgttaaaagtgccttctgtcttaaatctcaaaccaaatattttgtgtgttgaccttgggcagaagaagtgtccttccctcctttcttcaccgtcaggtagaaaacctgcactctgcagaagggtcctgtgtgatcacttaatcctctggttgagaagcagcagtaatgtttttgcttccaacctgattaatcattttatgttgaaaatagtcaatgagaccagtatctcttgagtgctttatttgccttctctttgaagggaggggacgggctctgctctgtaaactcaaatgtgtagagtcagcaacaattccgtagcttccaactgactcagaattgatgcaacgtaggtcttctggcccgaggcaggtatcaagtccaaatcataatgaacttttcaccagtttcaaccagtttcttaaaagagagcttaagtcaagatttcatcaagacttgtgttttcccatgaatgtgaatctttcaatggctgttggagtatgtatgtactgttcttgcattctgaagtagttaaagaactctagaaagtactgattggccatctggtgtctatggagaaagaagtcctcacgtttgagggctgtacagtgaggccatcttgtagcagcgcatccagctctaccaaggcagtcctctggttcttttttctaagctacagtggaaatggcctaatggttaaaactgtggtatacatgacatcggttgtgctaaacaagttcctcgtgtcccaatatccaatggtttttcatcctattttgtatcaatcaacagagtatagttaaagcttgtcttgatgttgcattcttgcaaatgtcttcaactcttacctgagaaaacatggcaaaatggtcagccagacccttccagtttttcctttgcttttctaagcctcggggaaaccactgtttcagttgtataaaaacttttgccacattcctatggcccagtcgaattaataccctttttctcactg

SEQ ID NO: 41992 - DNA, 1028 bp, Homo sapiens
gtaatcccagcgcttttggatcacctgaggtcaggagtttgagaccagccaggcgaacatggtgaaaccccacctttactaaaaatacaaaaattatccaggtgtggtggtgtgcgcctgtaatcccagctactcagaaggctgaggcaggagagtcacttgaacccaggtggcagaggttgcagtgagttgagattacgcaactacactccagccctagtgacaaagcgaaactgtgtctcaaaataattaaaatttaaaaataagaataactaaaagtatagattttgtttgtttgtttgtttgtttttgtttttgagaccaagtctcactctgttgcccaggctggactatagtggcacgatctcggctcactgcaacctctgcccctgggttctaagcaactctccctcctcagctccagagtagctgggattataggcaagcgccaccgtacctggctaatttttttttttttttttttaagtagagatgggggtttcaccatgttggccaggctgatcttgaactcctgacctaaggtgattcacctgcctcggcctcccaaagtgctgggattacaggtatgagccactgcacccatcctagattgcttataacacaaagggtaagtgcttgaagggatggataccccattttctatgatgtgattattacacattgcatgactatcaaaacatctcatgtaatccataaataatacacctactatgtacccacaaaaattaaaaaacaacaacaaaaaaccccacaccactacctcactgatgccataatgtttaaccatgcctttcacttaaagaattccaggaaataagccaggtgtgtggctcgtgcctgtaatcccagcactttgggaggccaaggtgggtggatcacctgtcacctgagctcaggagttcgagaccagcctgggcaacatggcaaaatcccgtctctactaaaaatacaaaaaattagctgagtgtggtggcatgcgtttgtagtcccacctactctggaggctg

SEQ ID NO: 41993 - DNA, 1621 bp, Homo sapiens
aacactcgctcttggaggaaatagcgagtcgatttttaaaaaagagtaaaatacgtttgactttttaaaatgataaaagcattgtcattggccctgtactattcttgccacctttgctctgatggtctcaagcctggacgaatcagtcagctttttctgctcctgggctcccaaggcagactggcaaaaatcatataactaaactgctgggtgctgtttctgcacttctggatcctggagatcctttgacttaacctctagattcctcttatgtcctaaaatctaaatggctgtttatggatctttaccatttttctctgactctttgtcctactcttgccttctcttcattgcttattttgccacttaacttcacagaataaattggtgggcatcagccctgaactcttaaggagaggtcatttttgtctgtgcctgtctgtacctgatttctaatatcctttcctctgatctcagaagaagaggggtcttactttcgaaagctaacgtctttgatctcttcccatattattattttttctgttggatggtatacatcctcaggtttccaccattcagaccaaaacaaagcttttcttgatgcttcccttttctttttttattcttctcagattaacgtggcattccttagggtttcatttttgttcttttctctaatttccttgtgtgattacacttcctttcatggcttcaaatagcacctatatatttatggttttcaaagacgtctatttagtccccgtttctcttgaacctcaggttctaattttcatctgcctactgcatagctgtatgtggatgcttgattacttcaaatgtggttaccttttccttccctttctctccacccatagccccctttaagcacatatacaaacattactattttaagatctttactctagaaaccttaaaatcatcttcttttctcctcacattaagtctagcatagatcctattgttgttgctacctcagatctttttttttcctctcttcataacatcttttttttttctctctcttcattgccagaagactggttcagaccttggttatgctttttctgaacctctgggtcctgtagtctacttaatcctccacgttgctgctggaattggttccatttctgaactatcaatctgatcatgctgcttgttttctttaaaaattctcatcagctcccaaacccttagcatgttgagccagtccttccaagccttctgtagcatgggcgcatccccttcctgggccctttgtgatccagagaaaaaagcagtaaagaaacagaccattcactaccgtaaaatcaagactgtgacagagatgactacagggtgctctgggagcatcaccctggtgagagtgaggacaagtttctgtctacaggcacctaggactttttctgactacccctcctccttagtttgggttaggtgacttttctttgtgtttccacagcaccctgtacatacttccatctccatttttaccacttataccatttttagttttttttttgtgacacagtcttggtctgttgcccaggctggagtgcagtggtaacatcttagttcgctgcaacctctgcctccagggttt

SEQ ID NO: 41994 - DNA, 1031 bp, Homo sapiens
tctgtttggaagcctgcagaatttttcgtgcttggaattgccaagatgtgtccagattgggtctgttaccatttgttttgctctatggatgtatagatccttacatctatagtgtctgtttacattcagggaagttttgtttgtttgtttgtttgtttgttttttggagacggagtctcgttctgtctcccaggtcggagtgcggtggcaggatctcagctcactgcaagctccacctcccgggttcatgccattctcctgcctcagcctccccagtagctgggactacaggtgcccgccaacacgcctggctaattttttgtatttttagtagagatggggtttcaccgtagcaaggatggtctcgatctcctgacctcatgatctgcccaccttggcctcccaaagtgctaggattacaggtgtgagcctccgcgcccagccggaagctttctttttttgaatctgtaatatggttttactttctttaaccaaaatgttattgtataataggatcgactcttctctgttttctacattattctcttttcttgccattgtttccttttctttctacctggctccttttgaattgaacattaggatatcatcttaagtgtgtcttttaacataatggatgcaatgttctgcatagatttttttttttttttttttgagacagagtcttgctctgtcgcccagactggagtacaatggcgcgaactcggctcgctgcaagctccgcctcccgggttcacgtcacgccattctcctgcatagacattttaatgctatattgccaccaattatcttaatacttttttctttgcagttttttcttattaagctgatattttaatctcaacctagtctttgtgattctttgttgaagctttatatagtgcctggcacaaaactatgtgctcaaacatatattgaatgaatgattaaaagagtatacacatgaataaataagaaccagttcttagttggtgtattctactgagactgtcaaagtacttctctagtaa

SEQ ID NO: 41995 - DNA, 1052 bp, Homo sapiens
tttctaaattaactgatacctgtcttaggttttggaagttcacatactatatataaattacacttcaataaagcttttttaaaaacaagtgtgcacacactttataattgttttcatttttaagcatggctttctaggagttgccttcctgtctgcatagcttagtgatcagtggtcacccagtgcttggacagtggttgcctcagacatcttgagccagtaaggcatttgtcctctgccagtagatctctgtgggtagggagcacatacaaagtttaggctttttcagatctgctgtcttttactttccacccagtcctttcatgtctcctctgtgcctgcatgccacttctgggttggccaacaaatgtgccccacccagactgcaacctccaccttctagagctgttcaccctctcactcgcctcccacctgctccatcacttactctgacagtgcaggtggtcatgtgcgttcttccccactccaaactcagtgaactgtcagtcctaatggtttgccttgccctgctctgccttgcagaacctctgtacctactgaatgagtagatgaggtgggagtaaccttacacagaccctcattgttcttacccaccttttagcagtttttcaagcataaatgcttctcaggttgttgtattcttctggtggatttccagagcactgaaagggttgttttgcccatttcacccagctttatcattggtttttggggagaggaattaactaccttctcactaggctgtagctggaagtcttccctctcagaatgtattttttagtgtagttagtcatttccccaggtatatttactgtatccttagggttctccagaaaaacaaaaccaaacccctgtgttagggttttacagaaaaacaaccagtagtcagggtaaggcaaaccattaggactggctgctttgctagtgggttggaagggatctcactgaatttagagtggtgggtaacgcgcatgcccactctgtatatggggaggggtcgggggtagggagagaaagagactgattttaag

SEQ ID NO: 41996 - DNA, 1029 bp, Homo sapiens
tttcctagagcccctgttgttgagtcgcgaggacctattaggcacacccttaatttctttaaagagccctttgtatgacagaattactgggaaccattttccaagtagcccaccacaaaggttgtattttgtcaaattgaaggagtcatctgactttccttaatcataagctacaaatataataagctacattaatagattttctaatatttatttaactttgaatttctggaaaaaacccaacttggtaatgatttatcatctgagctttgtttttggctttggtatgctaatttttggcttaggatttttatatctatttcatgagtgacactgacctgtaattttcccttttcttactctctatgtctgtttttttttaatatagttatgcttcccttacaaattacttttgattgtcttttccctcaattttggatcacattttcctgatgctctcatttgagtaattttggagttatattttgtgtttctaagtcctgttaaaatccttggaagaatgctgattttatttttgttttggtagactgtcaggctggttaggttctaaaccacaagttttctcacctgtgaatagtatttccagtatcagttcaaagactgtgctatgctactttgggtctttcctatccacagaccatttattagttagtttggagctttggcaacagtttatattttaatttattctcagagcctttgctgtgcttccctgaatctctcttatgtgtgagctagaagttgtgctggttcatgtgcaaaattacgggaaaccctttctctggctcatcttttcctggattccccacatctctctggctcacagaggctcctttcattgttattctagtcagacgtttggatttctttcagagctttagctgcctgcgatgcgtttctgtatggctggtgccacccttagggtgaagagctcagaaaaagtgttaaaaataatgagaatgattcttacgctccttagaccactgtggtctttcccaattatttttg

SEQ ID NO: 41997 - DNA, 1163 bp, Homo sapiens
agtgtaaaattttacccttccataagagcgacagaagaactggcaacacctgtcagaatcaactttttcagaactctagaaattaaccaaagacttgaaaaaaagtgtgaagagtgctcattcacaaaaaatggctgaatcttagtaagaatagtgagcttacccaagccccattccctgttccatgtgtcagctggggctgaaataacagcctgtgtttctgtactggagggagcagaacagacctcattgtaagtatttgttttgccttcttaggtggatccctggatgaatgacttcaaaaccttgtctctatttctcctgactcagaactgccctacttctgagatcggggaggacagtagttatcaagaaacatttacagacaaataatttagtcattgcttcctgaatcaagaaataacaatgggggcaaacagtagactaactaaagagcctaggagcagagattgggaatgagatgtctatgagagctttgaaaagcttcacatattcccaagaatgtagaaggccacatgcttggcaaggactgtatgcatgcccagggaagacttctacctctcgctgatcttgaggctctgtgaaagcaggaagtgaagcctaaggcagagttagaagctacctggctaagtagtgaaggtgtatcccaaacctacccagagcccttctgcaaagacagacaggttttttggttccaagcatttaaggcagtctgttcagttgttagctggccattaagctaacagaatagagactccagtgactgcacataacaaggaatacagattttacagaattagttttgataagtcttgaaacaaacaactacaacaataagcagcaacaaaaaattctggagaggggagagaatctgattcccagagttgccacattataagatttaaaatgtctagtgtttaacaaaaaagtgtaagatatgaaacacaacaagaaaaaaagccatgaatagaaattgtccctgaggaagcccagacgttagaatttctagacaaacactttatattagctatttaaaataattcttcaagagctaaagaaaaccatatcttaaacaaaacaaaacaaaacaaaaaacccaaaaacctaactgaaagtttgagaacagtgtctcaccaattgag

SEQ ID NO: 41998 - DNA, 1026 bp, Homo sapiens
tagaacacattttcacaaagttgaatttctattgtatatacattttaaaatcttctttcacaagacatgacctgagcattttctaatagtgaaagtctttgaaaacatggtttttaatggtatttcattacatgttttactgtaataaacctaaccacttggattatgtactctttcactcattcctttttgcatatctgttccatcccctatgctttaatatggaggatttggtttcttgtagtagttgctgggtatcataattcagacctgtggtttggcagtcagcctggctgtagtgtttaactgagtctcgtggaagatccatgcttaaaatgaatgtcgtggagaattgtattcacctcagtcattcaagactttggcatagaccccattccttgaggaggagttgccgccactgtgactgccacagacggaaggaagcctgggcagttgggactggggagaacttgctgagtcacagatatcttgtctcagtgtgcatgggccgtgtgtattgaaatgtaccagtctgtgaggcactatgttttgaggtctcagtaagctaaaggggtgtagaatggtatctagttcataccgtagtatgctttagatctaagtgttggttaattctgtaaggactgaaggaataggggagatttaatgagctccttgcagtctgcaggttattatcgagaaaagaaaattaggctctcagttccaggcccatttccctctaatcactgtgtccttttgaacaaaagttggcaaactttttctgtaaagggccagatatttttagctttgcaggccatatgatttctgttgtaagcattgagctcttctgttatagagcaaaagcagccataggcagtacaggaacaaatggccatggttatgttctagtaaaactttatttacataacaggcagcaggccagattggagcaatagttgtcaactcctgctttgaaaatgttttggaaactgtgtctccgtctgttagtggtcattatcctcagtctct

SEQ ID NO: 41999 - DNA, 1053 bp, Homo sapiens
caaacagccagttggtgtagcagtcagaacatacacaacattgattaagttaattatgttatatgggcttaggatcgtggcaccccaaaacaattacatggtaacatcaaagatctctgatcgcacatcaccgtaacagatacaataatgaagaagcttcaaatattgcaagaattaccacagtgtcataaagagacatgaagggagtgcatgttgttggaaaaatgtcaccaacagacttgctcaccacaggattaccacacaccttcaatttgtaaaaaacacaacatctgcaaagcacaatgaaatgaggtatgcctgtactcatttgcttcttcacatgtcttagaagttttaactgcatactggaccttttgtataacagaggggtagagaatgaactaggtaatactttttgttttatttttgttaaagagagcagttctttcctccagcaggtagctaaggtgatcactcaaatttgacagtgaatcaagctgagctggggctgagcagtagctttaattgatttcagtttgcctctggattcaaatgagattaaggaaatttgacttttagcccaaccttagctttctatatcatttagacgaggggttcatttctttgattttagcaagattgcagctgggaggcagttgggttgaagattaaattaatttactttacctctggattgcaactatagcagggccctggaacccaagcaccacacagcattgggagatctctttctgtctctcactgtgctcccaccagcacttactaagattctcttgtagtattacatgtaattgtcaggtcaagagatttgtttttacacttgggactctttcagattctaattaatcataccagtccacagtctcactaaaagtttggcttgtttcagcaaaatctttccacctatgggagacctccttttctgcccacttgtacccagacaggcaattgattcaaggtagctagaaacaggcttttgtttctctgtgaagaactcatccttctccagaaattggctcagttagacttctt

SEQ ID NO: 42000 - DNA, 1031 bp, Homo sapiens
ggaagagaagggattacttcccaactcattctacaagggcaacattaccctgataccaaaaccagacaggatgcaacaagaaaatgacaggccaacatccctgatgaacacagatgcaaaaatcctcaacaaaatactaacaaaccaagtgcaacaatacattaaaaagatcatcctgggatacgaagaggggaagaacagacttacttgagggtggggggttggaggaaggagaggatcagaaaaaatacctattcggtactatgcttattacctgagtgatgaaataatctgtacaccaagcctctgtgacacacagtttacccacataacaaaccagcacatgtacccctcaacctaaaaaaaaaaaaaaaaaaaatcatcatgataaagtggaaatccgagggatgcaaggatgattcagcatacccaaatcaataaacatagtacattacattaatacaatcaagaccaaaaaccatatgatgatttcaatagatgctcaaaaagcattcagtagaattcagcatcccttcttgataaaaattctcaacaaacggtatagaaggaacatacttcggtgaggtgtagtggctcatgcctgtaatcccagcaatttgggaggctgaggtgagtggatcccttgaagtcaggagtttgagaccagcctggcccacatggtgaaaccccatctctactaaaaatacaaagcctgggtgatagagcgagactttatctcaaaaaagaaaaaaaaaagaaggaacatatctcaaaccatatatgacaaacccacagctaacgtcatgttcaacagtgaaaagctgaataatgaataatttttctctaagattaggaacagacaaggatgcccactctaaccacttctgttcaacttagtacttgaggtcctagcccaagcaattaggcaagagaaagaaataaagggtacccaaattggaaaggaagaaaccacattatctttatttgcagataacatgatcctgtatttagaaaaacctgaagactcctcc

SEQ ID NO: 42001 - DNA, 1086 bp, Homo sapiens
tccctgatatacggtgcctttctcctcccttgtttcattctcttcactttcttcttccagatgctcgtacacccagtccccctacctgggaaatcacaacctcattaagagctcagctatcttaagtcctatttcctcatgaagtctaactcaactgctgcaacttccgagtagcaattaaatcagctccagcataacctcttttttcccttgtctcctgtgttagtattatgtcactaactttgtggggacaaggtcatataacactctagagcatatcagaatgacagaacatcttcagctataacctacctagataccaatatttgcccccaaggcaatgtttgatttttattccccattatgagaaacaaactcacccctccaaacccaaagaatggactcagagacctggagaacagcgaaagtgagacttttaatgatgctcttgtaatattgggtgtctggcagcaggcacacccagcacagtttcaacaagcaatttatcccctagtgcacaggtgcctcccccagttcctcatgggctgtgtattatggggtcacaatcttcccggacattgcctattggtcgttgggtaggggcttcgggtgttttctttagggttgtcctgctgcgttttgttgcagcccacaatgcattgcaatcctagttagctcaggggctcttcaggtatttgacttatgacttaagtagctggggcaggctgataagaacaggcaacacgagctattttgcagctagtaaactttcatcttagactaaacttctttggttcaggtgagggtaactaagggggttgggggggggtgacaagcaggcattggctgtccaagcaggagcctactgtatcctgttttcttctgtagtctactgacctaagttgatttaaggcactttgtcttggaaatggaccactgtatacatttccttcacccagctaagttttaaattttttttgtagaggtggggtctcactctgttgcccaagctgctcttgaactcttggcctcaagtggtcctcctgcctcagcctcccagagtgcttggattacaggcatgagcca

SEQ ID NO: 42002 - DNA, 1058 bp, Homo sapiens
gtgttgggcctgtagacggaaccaggaggaggagcttgacctgcagaggccatcatgaggcagaggcttggcctctataggccaacgggagacaggaattgggccaggagtggctcacttgaagataatattggagaaagtgacagagcatcaggcattagattctcatagggacagcgcaacgtagatccctcacatgcatggttcacaatggggtgcatgctcctatgagaatctaatgctgctgctgatctgagagaaggcagagctcaggcaggaatgtgagcaatggggagtggctgtaaacacagatgaagcttccctcattcaacaccattcacctccggctgtgtggctccttacagttccatggctctggcgttggggaccctgcccaagtacatccagaaggacccttccacaccagtcttcatagtggtcaagtgcagcagccacttagctcccaaggcatatgccacagctggcatttcatcacaatcaacactaagtggtagcttgagtcattgtgaggtcacttcctggaaatcaacagcatcccatttcccattgcaaggagctcagcacggcccctaagataaccaaactgatccccaaatcccatctgtgtgggtctgtctcctgggacccttcccagcatcaactctgtattagtcagggtccaatcaggagacataaaccactcaaaagcccaaagtgctaaaatttaatatagataattattcattataacaggggaacagcatgagagattggctagcacaaagtaaagagaattctagagaatataggactagccaaagtaaggcatggtggctcatgccagtaatttaagaagccaatgcaggaggattgcttgaggccaggaggtagagaccagcctgggcaacaccctgtctctatccaaaaaaagaaaaaaattagctgcgtgtggtggtgcatactcataatcccagctactcgggaagctgaagtaggagggtagtttgagcctgtgaggtcaaggctacagtgagtcatgattatggcactatagtcaa

SEQ ID NO: 42003 - DNA, 1083 bp, Homo sapiens
ggctaatttttgtatttttagtagagacggggttttaccatgttgcccgggctactcttgaactcctggcctcaagtgatccacccacctcagcctcccaaagtgctgggattacaggtatgagccaccgggcccagccgacatcccctgccttgatacggatattcacagcttcctgcttgaggaaatggtaatggaccaagaacacagtccccctgttccttggagagttcagagattgaaaacaatctcaaacaccaaacacgacttaccaaaagctgccttgagggagatggataggtgaggtcaccacattccttgtctttctgacaccacagagcagcttccactctaaggaagcagaaacatgagctgttgctttctcttaaggtttgaaactcagatgccttattttcccccaatatgttcttccatcagtaggtagtaagcataaagcaaaacaaaataagcaactacctgatcctcttttgaatggcaagatctttcatctcatcatcagtagtttctggacagaacacatatttatagagatgagtcatgatgtacttttcaatctgatccatttatcttctcaactcattctggaggcactgaaatagccaaacagaaaagctcaagagagtatatatactccttgtactgatagtaagtaagccactccttgtactggcagtaagcataaaagtactcacagattatattaatccttcaggagagtaaaacccatccattaacattatttccagtatccactgttgcaggatttttccttagttcagctaaggacggggtccttgtccgtctcaaggccacaaaaatttaggcttacagacggtttgaatggtgagtaaggcagggttttattgggactctcacaaggccagagtccctgctagagtgctttctgccagcagctagaataatgggttttacacagtaagaagaggtgccaggctcctccccgctatcaacggtgcaaacttcaagttccaccccagtgcacaggccagctggagtttttctggggaccccttcctacctagtggtgtctcaccatgacca

SEQ ID NO: 42004 - DNA, 1038 bp, Homo sapiens
ctgcgctccagcctgggcaacagagtgagactccatctcaaaaaaaaaaaaagaaaaaagaaaaaaaagaaaacactgcccaactggctggccgcagtggctcaggcgggtaatcccagcactttgggaggccaaggcaggtggatcacttgagttcaagagttcaagaccagcctggggaacgtagtgaaaccccacctctacctaaaatacaaaaatcagctggttgtggtgttaccctcctgtggttccagctacttgggaggctgaggtgggaggatcactggaaccaggaagttgaggctgcagtgagccgagattgcaccactgcataccagcctgcacgacagagtgagactccatctcaaaaaaaataaataaataaaaataaaaaataaaagaaagatctcaaatcagtcacctaactatacactttaaaggacctacaaaaagaagaactaaacccaagctagcagaataggggaaacaaagattagagtggaaataaataaagaaaaggaaaagaagagaatagataaaattaaaagtttttttacaggtcagcaaaattgacaaatttttagctagattgactaagaaaaaaaaaaagaagactcaaatatccaaaatcagaaatgaaaatgagggcattaagctgggcacagtggctcacgcctgtaatcccagcactttgggaggccaaggccggcggatcacgaggtcaggagatcgagaccatcctggctaacacggtgaaaccccatctctactaaaaatagaaaaaaatcagccgggtgtggtggcgggcgcctgtagtcctagctactcaggaggctgaggcaggagaatggtgtaaacccgtgaggctgagcttgcagtcagccaagattgtgccactacactccagcctgggtgacaaagcgagactccatctcaaaaaaaaaaaaaagaaagaaaaaagaaaatgagcacattactgtgattttacagcaattaaagtgattataagataataccacaaacataggtacaccagca

SEQ ID NO: 42005 - DNA, 1046 bp, Homo sapiens
ctttgggaggccgaggcgggcggatcacaaggtcaggagatcgagaccatcctggctaacatggtgaaaccctgtctctactaaaaatacaaaaaattagctgggcttggtggcgggtgcctgtagtcccagctactcgggaggctgaggcaggagaatggcgtgaacccgggagggggagaatgcagtgagctgagatcacgccactgcactccagcctgggtgacaaagcaagactccgtctcaaaaaaaaaaaaaaaaaaagaaatctacaaaggaatgccgggtttggtggctcaagcactttgggaggctgaagctggtggattgtttgagtccaggagtttgagaccagcctggcaacatggcaaaaccttgtctctatgaaaaatacaaaaattagccaggcgtggtggcgtgcacctgtagtcccagctacttggggggctgaggcaagacatctcttgaacctgggaggttgaagctgtagtgagccaagattgtgacactgcactccagtctgggtgacaaagaccctgtctcgaaaaaaaaaagaaacctacaaaggaaaatccatgctactaagcaagttcataaaatttagtctcaacatctaatagcccacagaaaaaggtatggcccttgcattctccatctacccatgagatgccttcttcctcaaggcaattctctttcccctgcccctcccatcctgctggtatttttagaccaaaatatttggggagaagagaaaaggtaatccagtaggccgggcgcggtggctcacgcctgtaattccagcactttgggaggccgaggtgggcggatcacgaggtcaggagattgagaccatcctggctaacacggtgaaaccctgtttctactaaaaatacaaaaaattagccgggcgtggtggcaggcgcctgtagtcccagctactctggaggctgaggcaggagaatggcgagaacccaggaagcggagcttgcagtgagccgagatggcgccactgcactctagcctgggtgacagagtgagagtccgtc

SEQ ID NO: 42006 - DNA, 1052 bp, Homo sapiens
gcaatgtcgtgatctcggctcactgcaacctgtttcctgggttcaagtgattctcctgcctcaacctcccaagtagctgggattacaggcatgtgccaccacgcccagctaattttgtatttttagtagagacagggtttctctctgttggttctgctggtctctaactactgacctcaggtgatccgcccgcctctgcctcccaaagtgctgggattacaggcgtgagccaccgcacccagccatacttttgttttatactctgttgtaccctcagcctagcacacattaggcacctaggaagaatttgagaaacgaatcaattaatctccactttaccaataatgagcaagaacagaaattagggccgggcgcggtggctcacgcctgtaatcccagcattttgggagaccaaggcaggtggatgatttgaggtcaggagtactagactagactggccaatatgatgaaaccctgtctctagtaaaaatacaaaaattagccgggtgcggaggctcacacctgtaatcctagcactttggaaggccaaggcgggcggatcacttgaggtcacgattccaaaccagcctggccaacatggtgaaaccccgtctcgactaaaaatacgaaaaaattagctgggcatggtggcgggcgcctataattccggctactcgagaggctgaggtgggagaatcgcttgaacctaggaggcggagtttgcagtgagccgagatcacaccactgcactccactctgggtgacagagcgcgactgtctcaaaaaagaaaaaaagaagactgaaaaattgggcaacctgtccaagaacaccacagcgacaattagcaaagctgggattccaacccaggtctatctaagagccacagcattgtattttcttttctttctttctgtgactgcacctttcaccatagatggcatccaggactcagagcaatcagcatgtagctactgtttttaatattccttacatgggaatcacataaagaaagtaaacagtatccaatttgtgactcaaccattcatacttt

SEQ ID NO: 42007 - DNA, 1030 bp, Homo sapiens
ctggagtgcagtggcgagatctcggctcaccgtaacctccgcctctggggctcaagcgattctcctgcctcatccaccagagtagttgggattacaagaacgttccactacgtttggttaattttttgtatttttagtagagacggggtttcaccatgttggccaggctggtctcgaactcctggcctcaagtgatccacccatctgggcctcccacagtgctgggattacaggcgtgagccactgcacccagccttgttcggtaaattcttgctctccctctgctccaagcctgcagagagagcagaaggatcaggcacatccttgctctcaaagaggtcccaatgcagcgggggacaccgtggggcagcggtggcatctggcatggtaagtaaagggtgccacgggaatgggaaagatcctggggagcttcaccaaggaggagtcttttgacttggcaaggtggtttgtggaatagtgaaggaaggttcattacaggcagcagtgatggtcgggagaagatggagcgaggatcagtgaggcaccgttaggagtgatgaacccggggagttggacggaacataaggtctggctggaaaggtgggaaaggaccaggccacagagggcccggcggggcctggagggcagtgggaagccagcaaagggcattgagctaaagaggggcacggtcaggtttgcatgagaaggagttcatgcaagcctttggctccctatggagaaccagctggaggggcagggcccaggagctagtgacgtggatgtcacgataccccggccaaatagtgtgagtttagggtgaagccagtggcagtagggagagaatgaagtcggaatctcgtggattggccttggtctaccaatgggacagagggtggaggggagggggagggcggagcctccgatgatgccagcatcactctctgggtgctttggtaggcgtcagggcccttctctcaatgaggggaacaacggggctgggggatcagttagccctggacttaggggtgtg

SEQ ID NO: 42008 - DNA, 1050 bp, Homo sapiens
gaggcaggaagagagaccgtcatgggcaggggctttgacgcaagaggttccacagtggcttggcccacatgtcagggaggaggagcgaccattcagtgacaagagttgctgcagcccctgtctgtccatccatctggggaggactggggacaaaagccaggctggagagagttttggagagagtgggtcgtgagaaagtgagggattagaagtgtagatgactggctgggcacggtggctcacgcctataatcccagcactttgtagacaactggccaggcgcagtggctcacatctgtaatcctagcactttgggaggctgaggcaggaggatcacctgaggtcaggagtttgagaccagcctgggcaacatggtgaaaccctgtctttactaaaaatacaaaaattacaggggtgtggtagcgaacgcctgtaatttcagctactcaggaggctgacgcaggagtatcacttacatctgggagtcggaggttgcagtgagctgagatcgcaccaccgtacttcagcgtgggtaacaaagcgagactgtctcaaaaaaaaaaaaataaagtgtagatgactctttgaagcaccttggctggggagagacagagctgggtggggctggacgtgggccttacaagggactttaaaatatatatatatttttttcttgagtcagggtctcactgttgcccaggttggagtgcagtggcacaatcatagctcattgcagcctcaaactcctgggctcaagctatcctctcgcttctggcccccaagtagctgggattacaagtgcctaacaccatgcctggctaatttttatatttttgtagagactgggttttaccatgttgcccaggctagtctcaaactctaatctcaagcaatctgcctgcttcagcctcccaaagtgctgggattacaggtgtgagtcatccagtgtggccaagggacttttaaaactttttaaatgagagaaagtggaccgtggggctgggcgtggtggctcacgcctgtaatcctagcactttgagaggccaaggg

SEQ ID NO: 42009 - DNA, 1043 bp, Homo sapiens
tagactcagagctattgttattgtttctgtctaatacatagtgagcttttattgtatgccaagtaatccacagagcactcctttatgtttttctagctcttaaagagcatctgtacaagtcttttggcatagataataggctctactggaaccagcttaagaaaaaacgacaaaagtagttaggggaccagggtgtatgactcagaatctgaggatgggcgtgcacgtaaaccttagccagggattggaactgggagattgaaatcattcaggacgtacaggaccttctacttttctctgcttcttggggtatgtctatttcattctgtagactgtcctgatactcagaccacttgatagaaggatcatgtcacacagctccatcattcaagagaacagccccgacttagtcccatttccaaaactcgaagcaaaagactctaacacagttggaggcaatcagctgtgatcctgaattgggggaccattcaccttatacaaatatagctgctgccagcttatctttgtggattgagaggacagtttcctgataacatgggaggttatgtgctaggcagacttcccaaactatgttcattttagtaacattgagtagtactatcatacttatagtacaaaatttaaaaaaacttaattgatctatacttaaaaataggtatcttccttttgcccatttctcttggaagggaagaaaagggacatcaggatgataatggcaagattagctcagactttcaaaataatttgaaacccaggacttggcatactaagtataggcttacttgagctcaggagttcaagaccacctgggtaacgtggcgaaacaccgcctctacaaaaaaataacaacaattagccaggcatggtggctgagtggtggagtattgcttgagctcgggaagtcaaggctgcagtgagctgtgatcacgccactgcactctagcctgaatgacagaccctgtcttccaaaaaaaaaaaaaaaggaagcttagtgcttagtgatgtctctgccacttactacc

SEQ ID NO: 42010 - DNA, 1072 bp, Homo sapiens
ctgaggcaggagaatcatttgaatctaggaggaggaggttgcagtgagccgaaatcgtgccattgcactccagcctgggtgacagagcaagaccctgtctaaaaaaaggaaagaaaagaaaaaagattgattacatgattaatttgaagttgtttcttggttggctgccagttgtagcaattttatctctacgaaaaaggggggaaaaattagtacctgccagagattaaataagaatgtattgggctcatgatttatttattaggaggtggaatagccaggtagtaaggtgactttggagtcactcctggtttgagccctagctttgtatttaccagctttgtgaccttggacagactaacctctccgagtcctgtccacactgagggacaataatacctaccagaggcacgtgatgaggattcagtgagttaatgcatgtaaagagcttagcacagtgcctgacacacacagtagatctccagtaagtgttagctgttttaaaatgcaagttattcttctgatagaattatcttgcagggagcacaagggcatttgctatgaagaatactcattcctatttagcttaaggtctgtttcttgatgatatgtagtgaaatgataagtatttatgataacagatgaaatagtaaaacaagtataaaattatcagctccaatagcctcattttgcagaggacagtgtgaaagtccataaaggttaactaatttacccaaggttgcacaatgagtttgtgcatgagaactcatgtctcctaattcctgggtcaatatttttccattatattcctttatccaatgtgtatacttcagaagcccaggttatttaatatatatcataaataatatatatatatgaaattaagtttctgttacttaagtacataattgtcatttatatttgctaactctccttggtggttttaaaaacctgtgtcccaaaagcctctgtacagtgtgcattatactattgaaagaaaatttacaattcaatgcagagtctgtactttaaaaagaaacatttctggagctgggtgcagtggcttctacct

SEQ ID NO: 42011 - DNA, 1221 bp, Homo sapiens
agtggcccagatcaatactattgtttttttttcttgcaagcttttctgctaggctatggcgtaggtcatgactactctgccccccgcaccttttgctcggggaaccccataagaggttgaaggtggaggccttctaaaagcctgaatatggacctgggacttgtgtttttcctgactcttactagaaagttcaagatcagctggtttacatttagagtgttctatgagagttttgtccaagccaccgtagcctttacggcctgttgctaatagggaagtccccagccttcctggcctctttcacccaagtagggcatggttcactgggcgacagctggtagcgagtgtttgtgtgacccatcagtggtgaaagtagaggtgggtggcccaagggatcaggaaagcatagctgtgttccatgaatagtgggactcgataggagaggctgcccgttaagttacacagtgtgggtcacgttcttctagggcaggaggctcatgttctgggctgacaagtaacaaatacgaggtctgttgaagagaactgcataaaattttgaaagtcatcaagtcctctgccctgaggtcgaacactctttaggacttctgaaaggaagagtgtgccaccccaggaaggggatcagagagtccatcatcagctcctcttagctccaagagtttaggacaaggagagtgtcagggcctgtggctgatggtggaagtttccctttctttctgttttgtttaatttttaatttttatgtgtacataataggtgtatttatttatgagttccgtgagctattttgatccaggcggataatgagtggtaattaccttaggggaaatggggtccatcctctgaagcatttagcttttgtattacagagaatcctgttatattctcttaattactttttaatgtacaattaaattacttttgactatagttcccctgtcgtgctagcaaatactaggtcttattcattctttctaacttttctggtaccccttggccatccccactatcccccatgccctgcattacccttcccagcctctggtaaccatccttctggtaaaacatccttcagttttaagtgtttagctcccaccaatgagtgagaacatgtgatggttatctttctgtgcctggcttatttcacttaacataatatcctcctgtttcatccatgttgttgcaaatgactggatcccattc

SEQ ID NO: 42012 - DNA, 1055 bp, Homo sapiens
acggtacagtgcctggagctgggctgttttgtcttcagagtggtgcctggtaaccgcgacttccccgccatgttctgtgtgttgctggctggagaagggtggttgacaaactctgacccagcacggtgtttctgtgggtcaaaactagaaaactatatccgggcgccgaggtgaaaggatcccttcaggccaggagttaaagagcagcctaggcaacgtggcgcgaccccatctctgtagtcccacctcagcttcccagatacttgaaccccaaagttcaaggctgcagtgagctatgatcccatcacagcactccagcctgcgagactgaggtaaaccctgtctaaaaaagtaaaaaaactatccaagtgtgcaacagggagggactgcttaaagaaaacagaattgtatgttcaaatacttttaacaagtgcaaaatgtataggctgaaataaatagagctggccgagcgcgtttgctcacgcctgtaatgccaacattttcggtgccctaggcaggccatcacttgaagtcaggaactcgaggccagcctggccaacatggtgaaaccccatgtctactaaaaatataaaaattaggccgggcaccttgcatcgtttcagggggctgacacctccctaagggcccggtaattgaatccctcggatttgagagtgagaaaccttggctcagttcttcccagggggatcagcccaggggtaagcgaggagaggccagaaagcaggacccatgagaaggaccccctcctggagtttgaggcccattccttcctgcccctgcgtctcctctttccaggactcctccctgctctgccgcactcctggggccatggccatggggggctgcatttgggtacaggccccagcggcaaccctgggcccaaaatgggcgggctcacctggaggggatcagagtaacatggcaagaagcaggaaaagccgcgctggaaccgcacctctctgccccctgatgtcagtgggtgcactcttccctcacctcactcaggcagcggcatgagttccatgggagcactg

SEQ ID NO: 42013 - DNA, 1066 bp, Homo sapiens
ggctcagcctcccaagtagctggcatcacaggcacctgccaaaaggtctgcgtaatttttgcatttgtagtagagttggggtttcaccatgttggccaggctggtctcaaactcctgaccttaggtgagcctcccaccttggcctcccaaagtgttgggattacaggcatgagccactgcgcctggtcatatgtttttttataatgttgttttattttaggaaagtaaatacaatgagtaggactcagctccatcagctccacaattctcttactgttttttttttgtttgttttttttttgagattgagttttgctcttgttgcctaggctggagtacaatgctgtgatctcagctcactgcagcctctgcctcctgggttcaagcagttctcctgcctcagcctcctgagtagctgggattacaggtgcctgccaccttgcctggctacgtttttatttttagtagagacgtggattcaccatgtttgctagtctggtctcgaactcctgacctcagttgattcacctttcttggcctcccaaagtgctgggattacaggtgtgagtcactgcacttatctgtaatgggatatttcactgcagactttgatgaacagaacattagcatttttggtggtgtttttattttactcataatatttttctttggactcaattacagtaacagaagtaaagatcaaattataaaaattaaagagcaatacagattcaataattattcttttctacatattgtgtttaaatgatacgcttttttctttttgtctttatagctcaagctgtaaaagccaaaggtccaccccttttttccagtctcaagctgaagatctttatgtagaaggccttccccacaggaattttttttttttttttttttttgtgacagagtttttactcttgtcgcctaggctggagtgcaatggcatgatctaggctgcagtacaatgctgtgatctcagctcactgcagcctctgcctcctgggttcaagcgattctcttgcctcagtctcctgagtacctgggattacaggcgcccgccact

SEQ ID NO: 42014 - DNA, 1052 bp, Homo sapiens
tggcgtaggcccctgggggcacggcctctgccccacagtggcccctccgggcccagctcgtgcctcggcttggccgcctcaggcccagctcctgcctgtgggcggcctctctccagacccggctctcgcctcccggcatcctctccaggcccagagctgtttccagttgctagaccatttttgtgcctgcctcgttgcagcatctccaagcccagcttttgcttttctgcagtttcttgaggccgaactccatttttcgaatggcttatttaggcccagctcttgcgtttgcattgtcccttcaggcccagaactttctcacgtcatcgtcaccaggcctagcttctgcatctggtcagccttttaaggcccagcttttgcctcataaactcagctcctgtttaatggcggcctcccaggtcccaccttctgccttcctgtgtccactccaggcccagctactgccttggtgctctttttaagtcaataattttttccagtcgacctctccaggcccaacttgtacctctgagtgtcctctaggatctcagcttctgcctaacaatgacctctttagactcagctcattttcactgctacatcttcaagccattctcctgcctcttggcaacctctagtggcccagcttctgcctcacagcagcctctccatgcatgcctagctcctgcctctttagggaacttacaggcctaaaactttcttaatttgggcttctcaggcccagctcctgccttctgttggcctctacaggcctggcatcatcctttcaacagcctctttaggcccggcctctccaggaccaaaacatccttaagtcaacctcaccaggcccggctcctgtctccttgcggcctccagaggccgagcttttgcctgccaatggcctctctagccccagcttttgcctgccaatggcctctctagccccagcttctgcctttcatcggtctctccaggcttagctcctttctcttcacggcctctgcaggcctaaaacttcctcaatttggcatctccaggcccagctcctg

SEQ ID NO: 42015 - DNA, 1020 bp, Homo sapiens
aaaattatactttaaaaattttcattttcattttattttatttataaatagagtcagagactccctatgttacccaggctggtctggaactccaggactcaagcgatcctcctgccttggcctcccaaagtgctgagattacaggcctgagccaccgcgcctggtccaaaattacatgtttatcagcagtgattaatatacaagcacatcaacagacacacgcatagcacacacatgagcatgcacacgtgtgcgcactccctacacatctacgcatgcacacacccataccatcacacaccacacacgcgcacacagatgcacatacatgcactcactgcacacaccgttgtacacgatgcacactacaagccacatacacgcactacgcacacacgcacacgcacaacaccagaccggcacacagacccataaacgtccatcacgcactccacgcacgtccgcatgcacgctacccgtcccggaagcgtggtctccgccgcctgcctctgacgaagcttgtcccggccgcgccaccgtcggacgcccggggtcggaggtcacggcggcgttggaggtggcgtggttttttttttttttttcacccggaaaccgcggttgccggagcccgaactgaggcggcggcgggagcccggttggcgtctggtcttcgcgtcggccccgcggagccagacgctgcccccggcgcggggagaagatggtgcctagcggcctcgggcccgccacgcgccgccacgagtgagcccagcgcgaccgcgggcgtccgccgagcagctggcccggctgggcccggggcgcgcagctgcccgccggggcggggtgagccggggctggagggcgggctggggtcgggcccagtcggggctgcccgcggggccgggagcggggagcgtgctggtcgggagcggctcctccgccggcttttttcaccgcttctcagggtgcagaccccgccccaactgctggcgggggtcgcccagcatcggccgacctcggcct

SEQ ID NO: 42016 - DNA, 1047 bp, Homo sapiens
gttcaacatgggaggtggaggtttcagtgagccgaggtcacaccggcctgggcaacagagcaagactccgtctcaaaaaaaaaaaaaaagatgatatagtttggctgtctccccacccaaatctcgttttgaattgtagttcccataatcctcatgtgtcatgggagggacccagtgggaggtaattgaatcctggagattgttacccccatgctgctgttctcatagtaagagagttcccatgagatatgatggttttataaggggttttccaccttttatttggcacttctctttgctgccgccatgtgaagaaggatgtgtttgcttccacttccgccatgcttgtaagtttcctgaggcttccctgaccatgctgaactgtgagtcaattaagcctgtttcctttataaataacccagtcccgggtatgtctttatcagcagcatgagaaaggactaatatactaagagtttagctcatttgagaagataggcttaaaaggagcttatgtgctttgcatcacatgtgagaggactgtaggctgaattctgaaggcaaaaatccaacacccaaactcctaaatgtcaggcacctatttatttttctgttatatttttattttttaaaaaagaccctcaaactaaaatataatggtatttatctcaaagaagcatgaacgtgtaagttacatttttcctttccatgtgtgttgccgtgttcagtgttttaccagctgctgtgggggtgacacaagtgaatgactcaggccactgagcacgtgtctttcctcctcctcttctcctgcagacagccaccgcactgtgttcctgacacgtacagcaacgccacgctctggtacaagatcttcacaactgccagagatgccaacacaaaatacgcccaagattacaatcctttctggtgttataagggggccattggaaaagtctatcatgctttaaatcccaagcttacagtgattgttccagatgtaagtgagaaaaattgtgtgtgtgtgtgtgcgtgcatgcatatgcacatgtg

SEQ ID NO: 42017 - DNA, 1445 bp, Homo sapiens
ctcaaaaaaacaaaaaccagttaattctgtctccgcacagtggttccagatgggccgcgtcttgcaggagactttgagatttctagtaatttcttcctaggtgagattttctttttagggatttagtaacttcactgtctggttgatatgtgcaattagtgtggcatcctggtctttgggtaggggctgagttacctaggcttcccttttttgactggtttccctggcttgctgtcttccaggtggctttggctgaagcctaattccacagctccttgttttttgagagagactgagagaaccataatccttgcctgctgaacccagcctgggcctggatgctctgtgaatacattatcttgcgatgttgggttattccagccaaagacatttcaagtgcctgtaactgatttgtacatatttataaaaatctattcagaaattggtccaataatgcacgtgctttgccctgggtacagccagagcccttcaaccccaccttggacttgaggacctacctgatgggacgtttccacgtgtctctagagaaggattcctggatctagctggtcacgacgatgttttcaccaaggtcacaggagcattgcgtcgctgatggggttgaagtttggtttggttcttgtttcagcccaatatgtagagaacatttgaaacagtctgcacctttgatacggtattgcatttccaaagccaccaatccattttgtggattttatgtgtttgtggcttaataatcatagtaacaacaataatacctttttctccattttgcttgcaggaaacataccttaagttttttttgttttgtttttgtttttttgttttttgttttcctttatgaagaaaaaataaaatagtcacattttaatactactctagttaggacagacttgtgcttttatcctgactaaaaagttaaatatttaagtcacatacatggtaaagatctaagtttcattttccacatggatgaccaggaacctggtcttgttggagctggcataggaggttctactgtcttgtcgtccactcttgtccctcccttctgttatcaaagttaaagcgcctcttcactcaaaagggcttcaaaatgtaaatggctctagagttagagtgactgtttgctcttctgctttctggaatgcagatgacagtatggaaagaaagaataatgattctatctaataggaaaggatttcttctttcttttttaaagagtgggtggattttctcccttttgttttgcttttattttcatgctactaacatatcttcagaaggaaatggcaactagtagatcagtaaaattacgaaaacgatgcctgcaaaatttgaaggaatgcaattctgatttgccatttatcagggaaaactgaaagcatttttcttataactttttttctttttctttttttttggagggg

SEQ ID NO: 42018 - DNA, 1053 bp, Homo sapiens
aattttgtgtttagacttgatatatccccaaggtacatcattatgtatatgcagatttaaaaaaaaaaaccaaaacagaaaaaaacctctaaaatccaaaaaacttcccatcccaaacattttggataacggatacctagcctgtattttgtatccccgggatttgcaacagttctgtttagataatggtgccaagtgttaaattactttatgtttaaaactttttattgctttaatttattagataattttttagagatctctctgtattttttcttttcttttcttttttttttttgagatggagtcttcgcttcgttgcccaggctggagtgcagtgtgcaggggtgtgatggtggcccactgcagcctctgcctcctgggctcaagcagttctcctgcctcagcctcccgagtagctggaactacaggcacccactaccacgcttgcctagtttttgtatttttagtagagatggggtttcactgtgttgcttaggctggtcttgaactcctgatctcaagtgatccacccgcctcaacctcccaaagtcctgggattacaggtatgagccactgggcccagccaacatccactgccttgatatggatattcacagcttcctgcctgaggagatggtaatggacctagaacatggttcccctattccttggagacttcagagatttaaaacaatctcaaacaccaaatacaactcttattgggtaagcaaggtcaccacattccttgtctttctgacaccacagagcagcttccactctaaggaagcaggaacatgagctgttgttttctcttaaggtttgaaactcaggtgccttattttcccccagtgtgttcttccattagtagccaccgtgcctggccatctctctgcattttttccttttttttttttttttttttttgagatggagtcttgctctgtcgcccaggctggagtgcagtgacgtgatcttggctcgctgcaagctctgcctcctggattcatgccattctcctgcctcagcctcctgagtagctgggactacagg

SEQ ID NO: 42019 - DNA, 1028 bp, Homo sapiens
tcagatatgtaaattttttttttttttttttttttgagacagagtcactctcttgcccaggctggagtgcaatggcacaatctcggctcattgcaacttctgcctccagggttcaaggaattctcatgactcgaccttacaagtagcctgaattataggcatgtgccaccatgccccactaatttttgtatttttagtagagatggggtctcaccgtgttggccaggctggtcttgaactcctggcctgaaacaatctgcctgcctcagcctcccaaagtgctgggattacagacatgagacacttcgcctggcgtagatacgtaaatattttgtttaatgccttgccactcaggaagcttattaagtttttgaactcttaactatgcctctgataactcctgttcctcagcttaattgcttcatatcacagtgaaataaattactgagtttaggaaattacgaatcttgccaaattgattacattttcattttataactgagtaggcttaggccccataggctttgttacatttttggaactcatttattttgttaactcctgttttgttcttatcatgatatagaatggtaggtttcaaatttttttttttagtcattaatccttcatttgataaagggggtttgtttgtccttttgtttaaaaaaataaatctaaggcagaaaagtagaatacataaaatgaccctcttctgggtcaaggctggagcttgaaggcttgaaggtcattttgccagcaatttcctcttccttagcggcagcccatgaccaggggcctcggaaggactttgggcttttgcagagcagtctggaaaaccctgatttagagaaccgtgcttttagcctatctatcttttcctcacaggttggcaaaaatgttgacaagtggctctggatgcttggcgcgcatcgtgtgatgagtcgaggggagggcgactgcgacgtggttaaaagcaagcacggcagcattgaggccgacttcagagcatggaagaccaagttcatctc

SEQ ID NO: 42020 - DNA, 1029 bp, Homo sapiens
tccttcttatctccttctggaacttttattatgcatatgttggtatgcttgatggtgtcccccagctcttttcaatttgatggtgtcctaaggctctgttcaattttcttcacacttttttttttctacttagacaagataattccaaattgatttgtcttccacttcactgaggtttttctttggcctgttcaaatcttctgttgaaaccctctagtgaagtcttcatttcagttattattctttcacatcttctgtttggttccttcttatcatttgtatctcttcattgatattctggatttgtttagacattgttttcttggtttccttcatctctttgtccatggtttccattagctctttgagcatgtttaagatagttggcttaaagtatttttttagttggtctaatgcctatgcctcctcagggagagtttttccaatacatgctgggaatacacacttgtttctttgcatggtttgtatgcaaagaaatgttttgttgaaaactgtatattttggcctggcacggtggctcatgcctgtaattccagcactttgggaggctgaggtgggcagctcacgagatcaggagattgagaccatcctggctaacacagtgaaaccctgtctcttctaaaaatagaaaaaattagccgggcgtggtggtgggcgcctgtagtcccagctactcgggaggctgaggcaggagaatggcgtgaacccgggaggtggagcttgcagtgagcctagatcgcgccactgcactccagcctgggcaacagagcaagactccgtctcaaaaaaaaaaaggaaactgcatattttgattattagaatgtgttaactctggaagtcagatttttctcactcttcagggtttgttttttattgcttgctctgggttttgtttgtttagtgagttttctaaactatatttgtaaagattttattctttgttttatattatctctgaagtctgtgtcttaagctcaggggtcagctaatgatttgacagagatttcc

SEQ ID NO: 42021 - DNA, 1032 bp, Homo sapiens
tgcttgatctgaatgtccatatctctccccaaatgtgggaagttttcagcttttatttcattaaaacctgtttacttttccatgccttttcccacctgttctccttctggaattcctaaatgcaaacatttgttcatgtaatggtgtcccatcattcctgtaggctttttttcctacgcctcctgctgctgctcctcctcctgctgttcctcctcctctctcctctatcctttcttccttctcccttctctcttcttcttcttttcttctttctttttctcatcttctcctcttcctcttccttcttcttttccttttctttttcttttctccttttattctttcttcttcttccttccttttttttggtctgactgggtcatttcaaaagtcctgtcttcaaattcagacattgtttgttctccttgatctagtatgttgttgaaactctgagttgtatttatttcattcatcgaattcctcaccttcaagttttctgtttggctgtttttttgtgatatctatctctcttgaatttctcatttaggtcatgaattcttttcctgatttcattgaattgtctatgtgtattctcttgtatctctctgagtttccttaagaccattattttaaattctgttacaggcctcgattttcctttttctttcaggtctgttactggagaattattgtgtttctttgggagtgtcatgttttcttgctatttcatgtttttgttttttactacattgatatctgcacatctggtataacagtcaccccttccatttttatggagtagttttcgtagggaaagactttcctggagaagtattttatagtgttggttgagtggggtgctttgacttgtcctctagacgggtacagtagtgtagtagtatagtagtgtacatgtgatttctttggccataatcggtgcctgtggttcctatgagtgcctcactggcctggactgtgggtgtttgtggaggcagtggcatgactttgctaggggcagtattgctgggcttg

SEQ ID NO: 42022 - DNA, 1075 bp, Homo sapiens
tttgttttgttattttcctacaggatttttggttgggaatcggttgtttcaagcaaactccttcctccagcactttctagaaagaaagatgctagaactaaaagttattctaggcaggtccttggaattcccacttacttgcaagtcatcccttattttttggtactctttttattctaaggctagaaatccctttctaaggacaagtatagaagattttaagccaggcatggtggctcacacctgtaatctcagcactttgggaggccgaggtgggaggaactcttgagcccaggagtttgagactagcctaggcaacatggcaagacctcatctctttaaaaaaaataaataaaataaaagagaaaaaaggaaaatttgaaactgtgctttttaaaagattgtatttgacagcctacctaacaggaaacaattccattgggcaaaatgcttttaagcacaggaatcaaccttagttggagtggaatgattcaacactatgtggccagtttaaacaagactctgggaggtgtggttgggtgacttggtctgcgtggctgagcattacatcttctctatgtggaaagattggtgtgtatggaggtgtggattaagacctaattaaaaaaaaatttgaggtggaatggaatctataggaggaatctatgaagacgccctgcatcagacatcctgtccaaagggcctagttttctcatctctgtggtgcttagtaagtgtttctctaaggagacatcacagccactgccgaaaacaacctcatcttagcagcagagagaggcccacactctcacaccatgcacctcttcctcttgatcccagagtaccgaaaaagagttttggactaagaaacctgggaggttgctaccgatctggactaggccttgtgctcttgttaatgcttaaagtgactttctgagaatgggctggccagctacctccttgtggctaagggcttgctttgcagacaccccacacttcacagagaggagcgaggggttccatcccctgtgaagcctaggcagtgtcctagcaagccatctgtatgatgcccaca

SEQ ID NO: 42023 - DNA, 1067 bp, Homo sapiens
tctgtatcaccatctctgtctttccatccttctgtgcatccatccatccgtcatctgtctatccatccattcgtccatccatccatccattcatcatctgtatgtccatcagtcatctgtcatctgtttgtctgtcgtctgtccgtccatccatccatccatccgtccatcatctgtctgtgtctatctgtccagctaatctctgtctattcatccatctatcaatccatccatccaccttctatcatctatctatccatctgtccatccatctatccatctgtccatccatctatccaaccatccatccatccatccatccatcatctgtctgtctgtctttctgtgtctgcctgcctgcctgtctgtctatgtgtctatatcagtgtgaatgcatgaatatttattttttacctagggttataatccagtactaccttatttcttttgttgctcaaattgtcccagctttggccattcggatctctttcagttggctcctgtgttactttgccatacccccatcaacattgtgtgtgtgtgtgtgtgtgtgtgtgtgtgtgtgtgtgtgttttgagcactttctttctggcactacaagattctccaggattatctcacacacagatggtcccaacttacagtggttcaacttgcagtcttttgactttatgatagtgtgaaagcgatacaaattcagtggaaactgtacgtatgctgccatgctgggcactggcagtaagccgcagctctcagtcagccacgtgtttttgacttattatgggtttatcaggacataaccccattgtaagttgaggagcatctgtattttctgcctcagccatggtttattggagaatggtgttagaaatcaagctctggggaaggtatgctcattgttgggctgtctttttaggccttctcagctgacagagcagagaaatacatgtgtgtatccacatttctatatttctgtctatacctatattcaagtgaacacactgatgtctctaatccatctccccatgggtcattctagcctcctccccttgctcatctgtaaattc

SEQ ID NO: 42024 - DNA, 1035 bp, Homo sapiens
ccacctcagcctcccaaagtgctgtgattataagtgtgagccaccatgagtggcctcaagatttaaattgaacaaagatattttattgtttcaaagaaaaaaaaaaagcaaacctcttacctacagaatgaaccctcctgattccattaacttttttttttttttgagacagagtctcgctctgtcgcccaggctggagtgcaatggcacaatctcagctcactgcaagctccgtctcccaggttcacgtcattgtcctgcctcagcctccccagtagctgggaccacaggcacccgccaccacgcctggctaattttttgtatttttagtagagacggggtttcactgtgttatccaggatggtctcaatctcctgacctcgtgatctcaatctcctgattctcattgatagatgagtgtttttctttcatcccagaaaatattgatgtattgattcatatttaaaataacagcactttaagcccagttcacagtcacaacagaacatttgaaatgtctaaggaaaatacaatgcaatctacatgaaaacattcattaagtttgctgaacagtataaaagtgggagagaatgggaaacctgaatgttctaagaaggtgatctgttggcaaaataacatcccaagttctatcagaatttctttttggagcttaagaaaatgattctaacattcaactgaaaaattagccaaacagacaatagttaagaaattttagaaaaaataactattaagtgaaagttggtttatattaaaatatgctacctaaataattaaaatgaaatgagatcagttccaaaacggcagagtgggggcctcagtgaactctgtctccctctaaaacaatgaaaatatgcgcaatacatctaaaataaaccaattttagaattctgataataaactggaatttcaccacaaactgaaaatcatctatcgaatgaacttcagtaaaattagctgttgacttctcagcagaaaacatggatgccagaagagaggatgaaatagatggttagc

SEQ ID NO: 42025 - DNA, 1037 bp, Homo sapiens
acaaagtcagggtccccagggattaatgaaacctttagggcaaaagtcagtttgcttacctcccagggttgctactacacctcatttttggactatatgaaattttacctttcattctagttcaccagtacattgtgaaagatgttttaaatgttttacagaagtttagatggttcaactgggaagatcatataggatttctgttctgttatattgccagaagtagaagtcatctgtattttttttttactagtctttggtagatgagtggctggatagctacaagcaagaccaggatgcaggatttctggagcttgttaactttttcatctgatcttgtggatgtaaaggtgaggaaactgctccccctttctaattcccagccttttgttcctatgttatgaattctttctccatttagataagtaggattagatatttcctaaataaaggaagatagtaaagcattagaaaaattttacttatttaggctgggcactgtgactcacacctgtaatcccagcactttgggaagctgaggcgggtggatcacttgaggtcaggagttgaagaccagcctgggcaacatggtgaaacccctactaaaatacaaaaaattatctgggtatgtggctcatgcctgtagaattgcttgaacccaggaggtggaggttatagtgagcctggatagcgccactgcactccaacctgggcgacagagccagactgtcttcaaaaaaaaaaaaaagagagagaaaagtttcacttctttaactaaattttttgttgataaatacgggaagtgatccagtagggaaccatgttggtttagagacaagaaactttggggaaaaagaagtaatcatgcttatgttatggcacaaatttgaggacaccttttagtctttctagatgcaataatctgttattttcttactctttatttcccagctactttgcccatatttctcctctgtagctgtggtacccccagaactcttactgccatggcttgatttattgggacagatggtctc

SEQ ID NO: 42026 - DNA, 1224 bp, Homo sapiens
ctgtaaatgatcacagcatcctgttattttcctcgtaagcacctcatatccttcattctttaggcactgtgagccctgagatgttcaagaagatgtccaactcagagatcatccagcacctaacagagcgtttaatgaggtggaagaagatgaccaggatcctcttacccctcttatttcaaaacacaatgcctattatccccttctttttgattctgtgaaatagggtagcttttagaaggtggagttcagtctcttgggggtaaaagagatctgaatatgcctctcaaactggggagacagctaggaaatgaagcataacagatatttttactagactgttgggttttgacatccaagcccctatgacttcatatacctggtcataactttcccatccttttcatacatccttttgtaggactcgggggactatcctctgacagctccaggtctatcctggaagaagttccagggcagcttctgtgagtttgtggggacattggtctgtcggtgccagtacatcctcctccatgatgacttccctatggacaacctcatctccctgctcactggcttctcagactcacaagtctgcgccttctgtcacactagcaccctggctggtgagcattcattttcattccggacattcttctggggatttataggactttcctctgttctctgattcagggtcttctttcctacctgtgtcttggctcttcacttcaaggccatgcctcttttatcctaaacttcaatccagtttctcactggtggagttttgagaaggggtagatcacagcaacaatttccaggcttagtatttttgtcagagctcaccactagggtatgctgatggttaaaagaagaccacaagggttagagggaaacagtccactccaggacaggcagtcaggattttagggtcacctacctctggcttctcatttttattgcccttctttccttctatttttccttctactcatcctctctcctctgacctcagtaatgatttctttatctctttttccttactcaaagctatgaaactgatgacctccctggtaagagttgccctccaactgagtctgcacgaagatatcaatcagcgtcagtatgaggctgaaagaaacaaggggccagggcagagggcacctgagcggctggagagcctgttggagaaacacaaagaggtgaggagtgttccctgcttct

SEQ ID NO: 42027 - DNA, 1062 bp, Homo sapiens
ttaagctttgttgtttcatttatagagcataggcagagtagatttagcataattcttaagagccttaggatttttaaaatggtaaatgagtattggcttcaacataaagtcaccaactgcattagcccctaacaaggagtcaggctgtcctttgacgctttgaagccaggcattgacttctcctcaatagctgtgaaagtcctaggtggcattttccaatataaggcagtttagtccacactgaaaattcattgtttagtgtagccaccttcatcaatgatcttagctagattttcttgataacttgttgcttctctatcagtatttgctgcttcaccttgtacttttatgttatggagagggcttcttttcttaaacctcatgaactaacttctagcttcaaacttttcttctgtggcttccttactttgctcagccttcatagaatggaagacagctaggatgttgatctggattgggctttggccgaagggaatgttgtggctggtttgatcttctgttccgactactaaaactgtctctatatcagcaataagactgtttaactttcttaccctttgtgtgttcactggagtagcgtttttaatttctttcaagaatttttcttttgcattcacaacttggctgtttggcacaagaggcctagctattgattggcctgtcttggctttcaactaagcttaatcatttctttttttttttttttttttttgtctttttgagatagtgtctcgctttgttgcccaggctagagtgcaatggcgtgatctcggctcactgcaacctccgcctcccaggttcaagcgattctcctgcctcagcctcctgagtagctgggattataggtgcctgccaccgtgcccggctaattttctgtttttagtaaagacagggtttcgccatgttggccaggctggtctcaaactgacctcaagtgatttgccacctcggccacctaaagtgctgagaatataggtatgagccaccacgcctggcctctaagcttaatcatttctagcttttgatttaaaatgagaaaca

SEQ ID NO: 42028 - DNA, 1049 bp, Homo sapiens
ccactagcaaacacgtaattcattctgcagcagatactagctgggcatcctctccttggagacagcatctgatcccataggttgagaaatcagcccccaagactactccctactttgatgccaatcacaagccccaggttgttttatctgtgcttctgactggtgactataaatcagggttcccacaactccctctttgggtttgcttaatttgctggagtggctcacagaactcagggaaacacttacatttactggtttattataaaagatgttccaaaggctacagaggaagaggactgtgaaccccgagcatttgagacaggtctcggtaaatttagaaagcttattttaccaaggttgaggatgcacacccatgacacagcctcaggaagtgctgacgtcatgtgcccaaggaggtcggggcacagcttggttttatgcatttcagggagacgtgagacatcaatcaatatatgtaagaagtacattggtttggtctggaaagacaggacaacttgaagcaaaggctggaagactgcaagcagggaggaggcttcccggtcataggtgagagaggaatggttgcattcttctgagcttctgagtagcctttaaggcagtcagatatgcatctatctcagtgagctaagggatgactttggatagaatgggaggcagatttgccctgagcagatcccagcttgaaggagctcaagatattttcctttcacaggtgcatagggtgaggtatggaggaagggatggagagattccatgccatccctgggtgcaacacccccccacccccactaggaatctccacttgttcagccttctggaagccccctgaacccagtcctttagggtttttatagaatcattacatagggcatgatggattaagtgactggctgttggtgattcaggtcaccgttgagcccatctctcctccctggaggttaggggtggggctgaaagtcccaaccctctaatccttccttggtctttgggtgacttagcccctatcctgaagctactcattaaca

SEQ ID NO: 42029 - DNA, 1043 bp, Homo sapiens
tgagagactgagtaccatgaagagctagtgacttgcctgaggtccctaaaggaaatcaaattccatcctgcacctcctccaataatactggcttccaggccaggcgcggtggctcatgcctgtaatcccagcactttgggaggctgaggcaggcagatcacgaggtcaggagttcgagaccagcctggccaacatggtgaaacttcatctctactaaaaatacaaaaattagccgggtgtggtggcacgtgcctataatcccagctactcgggaggctgaggcaggagaatcacttgaacccgggaggcggaagttgcagtgaactgagatcgagccactgcattgcagcctgagtaatagaatgatgactctctcaaaagaaaaaaaaaagcaaaaaaccggcttccagcatttgtgaaatggcgtgatcaggtcaagtattagttcaggccatctccagggtctcttgtttgtttgttttgagacagggtctcacactgtcatgcagactggagtgcagtggcatgatcatagctaactgtggcctccaactcctgggctcaagtgatcttcccacctcagtcacccgagtagctaagcctacaggcatgcaccaccatgtccggctaattttatttttttgtaggggtggggtcttgctatgttgcctaggctgatcttgaattcctgggatcaaggaatccttctgctttggtctcccaaagtgctaggattacaggtgtgagccactgtgcctggccaaaggggtgcattttgtgtgtttatttttatttttattttttgagacagagtttcactctgtcgcccagtctggagtgcagtggcacgatctcagctcactacagcctctccctcccgggttcaagcgattctgccacctcagcctccagaatagctgggactacaggtgcccaccaccacgcccggctaatttttgtatttttagtagagatggggtttcaccatgttgaccgggctggtcttgaacacctgaactcaggtgatcagcctgcctcggcct

SEQ ID NO: 42030 - DNA, 1071 bp, Homo sapiens
aggaagacaatgggaagcccccgtcctccgccccgtcccggcccagacccccgcggaggaagcggagagagtccacctcggcagaagaggacatcattgatggatttgccatgaccagctttgtcacttttgaagcgctggaggtaagggggaccccccttcccccgggttccctttatgcacgaccccactcggctgcgcccggctctcctgcctccctcgccgcgctccgggctgtctgtctgtctgtctgtctgtctgtctgtctaggctgaggtcttattgttggtggggggagctgggggcgcgggcagacaggcagcaggagggagtcgcaaagccgtgcctggtctcgtttcctcgctcgcctttcccctgcgccccctccctgcaccccctccacagcagatgggcagaaagaaaggggttcgggcatcacaacaatgcgccccctctccacagagagctctgcccccactccttcctcctctccctccccaatcatggcttcttggctggtggaagtctctttgctgggtttggggcgcctgtggacggttctgtgtgctttctacagagtcatatgttcgtgtgtgtgtgtgtgtgtgtgtgtgtgtgtgtgtctgtgtagtatatacctttcccgggtgtcctcgggactggagactgatggggttttgtgatttctttgcgcctccccccattacccccccatattctttttttttttttttttttggtgaagctggggaagggggcgttttctcctggttgggagaaaggagggaggaggggagagaagagggaagggtggaatagctctctgtattctgtatggggttctgttacagaaagggttaattataatattatctatacacatacataggcacatgtgtgtgtgtacatgagcaatttagttaaaggacagaaaaaggtacaccagggaagactggtgggagggaagaataaaatcctagctgctatctgaagggcttgtcaccaattgtccctctccctttccttttttgtgttttcttttttttctttctaagtgattggctttgtgtg

SEQ ID NO: 42031 - DNA, 1051 bp, Homo sapiens
aaatagaaatcatcatatatgtctggttctttggcaaaaggtagttttgttggctgtgtgctatcacattgtgtccatgctggatggtcagaacatatgtgttagtgattgttaaattaaaacctctggtggtccactctattcagtctggaagatttattgaactatcaccaagaaatgtgagggcttattgggaacaggcaactaaactatgagcttggacaaaaatgtgtgttgggggagtgtttgtaaaagttaagaattattatagatgctaagagttatcctaaatacgtagtatgttttcgggccttgtgtttagaaatgaaatcagttgtcaccacatgtcattaaggctgctgctggtatgatattgtgaaaagaaaccagaaatattggcttgcacagctaggtttatagcttgtgccagttcagagcaatagctggcaaacagtggagtagcatactttgtgtgttaatggacacattatttgactccatgattttgttctgagtagctggttttggacttctcttttaaaaaagaggctcctaactcattatgaaatgtgctaatataaatagttccagttcaactgattttactgatactggagtaaaagtgataacttgcctaatgagaacctgcatttttatcttgattattttttgctgttgttggattcttttttgagatgatgaaagctttaggggtagtttgacaagtctcacattttataggcagtgaaactggctgaaacagtttcatattcacagggacacttctcttgagtaattgtgccctgaagttcaagtgtatgattatgaagagcctcatgatagaagataagagggtaggcgaggaggctaaagttgaacatggtgttcttttcattatgcagttgagaagcagaattaacgttggtatatagtatattgtttgtttggatattcttcgagtgacaggatgagagcaaaaatccccagataagatgtctagttttcttaaaaagtggcttttagcaaagtataaatgggaatgttggggtcc

SEQ ID NO: 42032 - DNA, 1556 bp, Homo sapiens
gctcccctttcctgcctgacatctgcctttttactgattgttaccaaccccaccaggaggtgaatattggtgagtggttctcattaatagctctttcagtgtgatgatactagcccaattctgatgccaccaagctgcccttcagccaatgttttatcctctttgtcccttctggtttcatatattgctgctctttggcaacctgtaaaaaaaggttggttgggaaaggaggttgacattgatgttaaaacaacgatttcaaattatctgcctttggcttgctgtatatgaagtggtagttcaaaaaagggtcagaaccgctcttttgctgttacatagccaggaaaagctgtggaactgtgtttctgttgcatttttcactttcttttttggaaaatttggccatgggactgtaaaataaatgggtcagttccagcatttgacttctgaaagtatgcatagctttaggatctgagaagggatgagagaatttggaggaaaggaagggtgtgaatagtgtgtgtggttatgaattcaagtattttactgtacttactgagtttcattattttactttataaggcagagcatcacttgaggagtatttatgtgagatgtggttgaacgttgtgatatgatgattccatgcagcttttgttaattgtggagattaactacttgcaccttttttttggaattagaatgtaaatgaatccgtgaatttaaaaaatgaattatgaggttaggaattgagcctttgatcctgagagtagtgttctgtagttctcactgttgaaaaagggttaagaaaacagaacagtaaacatgattcaaggagtgttgagggtgatagattctgagactcttctacaccacagttttatgtattatcaaagataaatggtgattatttagttttaaagaatgttaggattagaaatgaggtccccagatggacacaacaatagttgaggctagctattaggaataatttaggtctaagagctacgagatttggaagcctttggacgagaaggtctgtggcatttcgggtgtttgtgtatgtgtgcacgcacctgtgtgcacgcaaagggtgaaggatggtgggttagtggctttacattttattttattttacccctatcctgtatagtagtcataatatactaaatgcagcctaactttgtaaaagtgtttcatgctgtttttttcctcctcaagaagcaacttttttttttctttcagaattaggattaaacccaatatgctgcagatgtaggataaagaacctagtaatgggagagcaactgttaattttagaaagttctgaaaagattcaggtagatttgaaaacttagatcattgaagtttagaagagcaatatgataatgaatttggtaaaacttgagacaggagaagatcaaaaataattagtgagctggggcagaactgttttctcttatataatcagaacctgttccatgaatgtagacttttttcccctctgggaggtgaagaggacatagaatttaagactggtgagaccctaagtgtgt

SEQ ID NO: 42033 - DNA, 1033 bp, Homo sapiens
tcgtctgcagcacaaaatctcattttaagtttttgtaaagtttctgatggcagtaatattttagaacttaaaaggaggaattaagagattacagtcccatattataagtatttcttagttgttatgttgaagtagacttcttttttcttgttttcttctagatctctttgttcagttatactcgttggctaaaggttgctggttaaatgttgtttagcgaaatattctatagttaaaatctttacaaagaaaaaagtaagaatgaagatgtggatagcacaataattgaacattagattattacttgttttctagccacatgatagaaattgcagtgacttccacccattctgtctgtacatgttcagttggcaaagagaatgaaggtcctggaccgtgcttttctaagaaatgattttatatagttgacattatactttcactggagcaaaaagggaaacaagcatttgattagtgtgtcttactgcatattgtggtctgctccctcatttgttacggtggtcactatgattgcttgacaattacagttttgagattaatatgcagagctaaatctttaggaggtatcctaaagttaggacctaaactttttcatagcagccttttgatccattttattccagccattgctagttgatgtgctttctaagccgtgtggcatcagaggcacagatgttgtctttagtgatgtagttctacctctcattttgcaaatgaaaacaacagcccacaggggttaattgacctgttcaagatcacactgggagttagaggctctcactgttaccctatgaatctaggagtctgcttcttgtaagttagtactggggagtcccaaggattgggaaccttggaaggagattttttaaaaacaaaaagtcttactacaaatgtggatgagcacccatgattgtaaagcttcccatttcagctaagaaatgttctgatttacacaatatcaagaacctttaaaaagcgttgttctctccctgcgctctctcccagtgtatca

SEQ ID NO: 42034 - DNA, 1050 bp, Homo sapiens
gtctgttcattgctgaaccagaacatttataacaactgtttctcatgtgtatgtattcatagccattcatataatgaaaagaagttttcatgggattgtaataacatatcaagatggatgtaattaaaacagaagcagattgacaccctgaattaaatgtaaaccataaaccaggatacctgagcattgtgccttacatatttgctgtagggggcagtcagccaaatatgcaaataaaaagacattgatgaatcttcctgggtgtgtatgtggttgcagagaacccaactattttattaatcttttatcaagcattgtttagatttgcagcagccatggaatgtattaatttggcagaccaaatagcttaggaccagaaagtaggaaataataaagggaagacatgattgatacgctgtcctataaataacacatgcgactgacaaaggggctgagtaatctttagatctgtgcttcatttcattaatggagttgttaaaccaggatgtttgagttgaacttcaatcagagaggctctgcctcccatttaaaatgcaggcctacctctactcactctctggactgatatgttgacaaaattggtgtaaatcgaatttttgtaaattggatcaaatgcactaggggaatcttgctgtgaaaaatatgagtcctttttatcaactatagtactcctcctctctgcagggaggctgggattttggtggagtgagtctcttcagatgggcattgcttcctctgagacagtttcctgcacgtgttcccggtgctctgttccccgtgctcctggaagacagtgactgtgagatttgcattttttcttcaggttttatacctcacttggtcggtgcttccaggaataattggtggtgatttgaataagcccgcatcattcagatttcagagcttggttttcaagtgcttgctaaggagggctcccagctatgaatatggaatatgatttccatatctgttccattggggagtccaggcgtgtcataaccacttcagagtcatgattgtatcgagaca

SEQ ID NO: 42035 - DNA, 1022 bp, Homo sapiens
atatacaggatggggttgccagcagaagttacatagtgataataacatatcagcttcctttttagggaagatattgtaattgtgagaaaaatattcagaaaagccttggccaaatattgtttgtagttggtaagagaatactcagttattaaagcttctgcgaaccttttccaaataattacactttttccctaaaggaatcctcccacctcagcctcctaagtagttgggaccacaggtgctcattaccacacctggatgggtggatggatggagatatatatatatttgtagagacggagtctccttatgttgcctaggctgtgttacattttttgtcacacatgttgggtatggagaatttggagtaggtagtttcagatttgcacatcacaagttcttgccttgtgcagtggtttctaaaccgagttgcatatctatactccatggtaacttggtaaacatactgattcctggaccctgtgtctgatctactaaacattaatccctgctctgtggctctggaacattagtgttttgttttctttttggggtttgtgacagggggacaaggtctcgttctgtcacccaggctggaatgtagtgggacagtcatgactcactgcagtctcaaactcctgggctcaagcagttctcctgccttagcctcccaaaaagctgggactaccaccaccacgcccagcaatttttttttttttttttttttttttgcaggggtagagacagggtttcaccatgttgcccaggctggtcttgaactcctgggctcaaggaatctagctgcctgggcctctcacagtgctgggattatgggtgtgagacactgtgcctggcctggaacattagggttttttgtttgtttgtttgtttgtttttaacatcaagttccagtatagaagtttcagaaacactatttcttaaaatatttttgagtgttttcctggggcagtggtaatggtgatggtttacaataatttatttctatgctatgtaacttttct

SEQ ID NO: 42036 - DNA, 1044 bp, Homo sapiens
taattgaatttcaattaaggatgttctcttccttttcctcctcctcttctctctaagttgtactcattgaattcatgtttcaatggggaacaaaaatttttcaaatattgttgttctggtaatgctgcattttaggatctggagagggcagtcagtgggattaaatgttatcaaataggttaaattatttggccatttactttggtatagttcctctggagctcaggaggatgttagaggtctttgttgtcagtgaaatcttgtaaatgtatttttaggctgttcaaatgtctggatcacctattttgaacttttgcatataccaccttacattacttatttttataaagtggacattttatctttataaggttttgccttgctggacagtgattatgtgttctaggtctttatagctttgccattacccggcatactgagcacataacagacactcaataaatatttgattaattggatatgttgattgggtacccaagaaaccagaagatgaaataagtctggagttagaacttgatacatgcttagaaaggtaggaacgtaaaagtggattatgaggtctatctcttaggctgacgtgctctcctttctccttccccatccctctccaccccctctcctcccttctctcttccatcctgcctctcctctccctccccctctcccctctcccctctcccctctgccttctcccctctcccctcttccctctctgttttctttctctttcctttccctttctctttccttaattttcttttctttctgttcatatataggtagtagagccagctcacgtttgctagttctttaaaaatcttaagtatttagaattccacagttacaagaattttatggtagagccacaacactaagttttcatttggaaaatgttaaatgtagtgaaccttgagagaggtttttattagttattgcttttatttatttttaaaataagtttcattgtgtatttgtaagatatataagattataggatgcatagagatagtaaaaaggttacta

SEQ ID NO: 42037 - DNA, 1050 bp, Homo sapiens
ttgtagagacaaggtcttgctttgctgcccaggctggtctcaaactcctggcctcaatcagtcctcctgcctcagcctcccaagtgctgggactacaggcgtgagccactgtgcttagcccatccagttttctaattaaagacatagaagttcagaaagatgaagtgacatctttctcaagactaagttaatgatcacagcagaagttgtagttctctgtatcaatgtatttctgagattctcatagtactagaattgtatgtttttcccttgatatggtactttgtatgattaaatttcaaaatcaatagtaaaattttaatttcaaatgcagtataagcacaatttccctaactcctctttttttcctctgtttggaaatagcctcagtttttgttaaaattcaacacagtcttaaacttgcatttcttttttccttactttctttctttctataatattttcacctatcctatttcattcacagtggaggttttaatttacttcaagcagtattgccatctggatgtcaaaagacattgaattgacttcttatctgtagatcccaataaaggtctcacctgcctagaaacaaaagatttagtcaggaattgaggaggagcaaagcaaaggcttcaccagaggcccaggtgctacctatctgcccacttgttctttgattgacagtggggcacagaggtgccttgtgtttctctaggaagtagcttttgcatacagtgtttgtttggaacttttcaatttgctagtgctgaataatgtctgcagtaaaagttggtttagggtaaacccggagaaaggaattaaagagaagttttaacatttctattgtttttcttctgtgactttagcctttcccccttcttagtgaattattatagagttttattaaaatgtaagttctggaaattagacaccatggtatttagaccagcatgggatactgtactcttaggttccataatatttcatagtacatctctttattgtatgttaaatgatagcgaagtataataaaatgcacctagagag

SEQ ID NO: 42038 - DNA, 1031 bp, Homo sapiens
gatagcagggactggctggctgttagtgagccagggccagtggcatttaattgcagtcattcccattctttgctgagctttggtcataactatttgtagaggacccctagactttttttttttcttccaggacaaaagtgatccaaaacatactgtcttcagtttttgagcattggactaccaaacaggaacatttaaggaaaacaaaatgttgctgttgtaaagccttgatggtgggaagttatgtagtgaattctcaatttcttcttcctgcatcttgtcttaaaaaaaaaaaaaaacttttaaagtttttgtttgttcatcattcattcattaataagtcaagatgtagagggctcagtagccttcccctagttttctacatttctgactttggtaaacttcctttacttctgcaatttccctaattgtaatattaacatatatctaaaaagaatacaatggttatgtaaacctcctagcacttaataggcactcaagacaatatgacttaactgtataagaatgactaatgtgctatgtttatttatttggcttcattcattttgccagcaatggtgtagtatatatgtagtatatattaaaaatctcttgagtaagagaggtttggaatgggaaaaggaaccaagaaaatctcaccatctttcttctgcttggcagcaagtcttgaattctgttttatttttcttaagagacggggtcttgctctgtgcccagactggagtgcagtggtgctattatagctcactgcagcctcaaactcctgggctcaagtgatcctcctgcctcagctacctgagtagcggagactactggcacctaccaccacacccagttaattttttttttttttttggtagagatgaggtcttgcagtgttgccctggctggtgtcaaacttctgacctcaagtgatcctcctgccttggcctccaaaaatactgagattacaggcatgagccactgtgcctggcagagtcttgaattcttcaacagggcttttgaatatt

SEQ ID NO: 42039 - DNA, 1035 bp, Homo sapiens
ttttccaaattaatttagatctctgacccagagagacttagagtgatgcacagtcatgtagggggaggatgtgtatgtgtgaagggacctgttattgattatacgtcttacattcttgcctttcttgtgggattttgtgaagattaatatctgccagataggtttaagtttgcaaaatgccttgagttccttgggggaaactgttacataaatgtaaataaattatgcagcacctgaatttggttgttcatcattttttatagtgtgttttaattaagaacttagtgctatttaagttggatggctggggagagggtttaatcactccaagatggttaagtaagtaggtaggagcaacatttaggctggaacccatggaggaataaatgaacaagactggagaccagtcattttccatggcatttgctgagcggagctgtggattaatgtctcttcttgtacgtgtgtacatggtgctgttagaaaatcagccagtttttcactacactttgtctcggacctgtagataccttggacctctctggttttcctgagtaagctggaaaccctaacaacagccaaaacaaaacaaaaacggagtttgtcttacagtctaggtacttggggagcaagaggcatccagcaaactgcattggcttttggtacactgtgtttctgtagtccaatgagctgggttccaaactacctccttttgcctgttacatacagctttgtgttccagtggatgatactgttccttaactcttaaagagtggacatacgaaacagttgccaacaacccgtggtccagttgtgcctcctttgtttgctgctttgtcagagtctcactgtatgcttttttttttggcctttggcgctgtgagcagagtcacctcatcctcctttccgtggccaactcaaagacttacaacctttctccctcattcctatgtatctacagaacactcactagttgctaactagtggatacatgtgaattatgttttgatgccatagggctgtctagtggaggat

SEQ ID NO: 42040 - DNA, 1037 bp, Homo sapiens
attataggtgctagttggctcttgcctgtttctacaggtgcagtgaccatttttctgaagcaaaatattcttgttgtcacaggcttttcctcaatttgtgaatttatggacctgcaaagttttacaaacacatgaattatgtcaaattttgtaatgtcttttgaaaaaaagggggaaaagtgtaagaaatttagaccatgtaggtctgaaagtatgcttactacatcgatagtgggggctggaggaactgtgaaaaaagtaatagtaaatttccttttttagatctttgccaaaggtagttttgttagatataaacaacttcaagacccacaagtgactactacacactggattggccttcagagatactgggattttctttccaagtatctttaaaaatgaggttcgtagtgctttagctaggaggctgagtgcccactattaagatcctgtgagttaattggtttggttcacaaactaactcatattgcagtgtatctggctgttttgtggctgggagaaggttcctgcattgaagggactgaagtgacactctgaccttgggacttccagtgctgttgtggagtggggacttccttcttcatgtgggcttgctggctcttcatttattgtcccacctgggctctgcctgttactcttctcaggccaagaagtgagttaggttccttatttaacttttctaatggggcagctctgcatctgtgtcctgtccccaaagactaaagagaaatttcaggtgtgggccagattatggagcctgaagaacagttttatgattgattaatggttttgatttgcttttaggaagaaaagtgcaactagcccattggatgaagatagtatctctctccagcactcctgtatcaagtgtacagtgttctcttcctgtatagcacttgtattttcaagagctagggtcattgagagaacacttctcactcatgagtttcagagcgtagcagagtacacacacctgaagcaagaaatgtaattttctctaagtgtactaagaatta

SEQ ID NO: 42041 - DNA, 1508 bp, Homo sapiens
agggaatggcatgaacccgggaggcggagcttgcggtgagctgagatcgcgccactgcacttcagcctgggcgacagaggaatagtgcgttttcactttttaaccttagttgcacagggtatgttgaaagctactgttggcttcaccatgtcattgggaagtgggaacgctgacaatcaaagcagctaaacaagaagcaactcaggaattatgacattggcggcaagtcttttgcccctcttcagaggtaacactactagatctggagagagttctgtacattcagggaatcttcctgatctctaaaaaatttgagaggactagagaggagtaaagactggaacctggatagattgatttgtgagggacaaagattcagagaagacattttcttgaaggtgatgaacctgctttaccaaaatgttgtaaaaattctaaagaaaagttaattggatcaagttgacaataaatgttagaagggaaaaatcttaaagggtaaaatttgaaagtagaaagtttgtcctgtccacagtgtttgccatttcatagaccaaggtggttgggggaggtggggcaaaattactgtagtttccagtgatcattgccttctctcggtcctataaatgcaggcactatttagcactgaaaccatctggtgttggtggttgtttcttatgtcgtatgacctgcctctataaatacattgtgtataagcttaactgggacagtaattggtgtgatccttttctttttctgatctctaaggtctgaggcccatgaccaagggaaagagaagtgctttttaaaaaaacggacacttttgttgttttggtctcatggtttcactgaggtagtgttccacagtgtaagacaggttaggattgtatgttccagaattatgaacaagagtatccttgggaatgataaaaaccatgctgcagtgttgcatgtgtatttgtgtgttccatgtggaagaccttctgggctgtgtctgtctttgctatttatttatcacctgaaatggtgctgctcaaccactctgtgacagtgttattttaacttgaaatagcatgagggttaggagaaaatacctcatgaatgtgaagggggattctcctgggcgtatgtaattgcaatgatttgaaatgctttcacaggtttgtaggagagggtaatttttcttctttatttgctccttttatcttgttctaaagccagtattacctcctctcccaccgcccatgtatacttcttattcccttctccttccccctccctttctcccactctccatgtaaagaaactctttcctaataagaatcataggtattcagagctttttttttttttttaattaacagttgatttgactttttagtactgtgtaggagatgggaaaagtcagggccatttgatagtaattgcttcctggaagagccgaccaacttattataagggtgaggagtgtttggaggcattattttctggttccaggtgtgttttgagta

SEQ ID NO: 42042 - DNA, 1046 bp, Homo sapiens
agaaaatctaatctatttggatgtcttgttaaatggagctttttgagtataagggtttctgaagaaatataggctgtcagagctgatagagtttagagagtctctgtgtaccattctttataaataaagacagccaaaagcccagagaagtgaggtgcttgatgttaagatttagttagtggccccctactggtctctgagctgcccatcactctaccttgactaatagtgataactgatgtttctggcaacaaatccaaggtacaagttttccagggtcttcaaaggaaagctacattatattaaagttcatgctgaatatcttttattgtgttctgatagtttgaaaattggttatttttgtactgttgtaaaactatagtgcttaactggaaaccccagcattaacccagcctttgccagcgtttcccttctataggatgagaaagttgttgaagagtgaggaaaaaagatggtatcttgtccttaacaaaaggtctacgtggatgaaaggagaaactgacacttattgttagggaaatggtaatgcttacatgatgatctaatctgggtttgagtttcgtttttgaagtcaccagtttttattttggtgtttttcagatattcttatagccttcctggggagatttattttttggagacatcgctcacattgtttactcctctaggttaaatgtactaggccatctgttgttaattttgtagttgtattaaattccatcctttggctggattttaagcaccaaaagcaaacttagacagaagcaggagcatttgcaaattacatagctttgagcctaaatggtggtttttataagtgcagttttcaaatgggctgagattctattttgagttttgggatcagtaatttaaacacagggacctctacgagttctctggaaaagcccattttgagaccctgaacagttgttatgccaaagcaagctcttggggtaaggttggcagtgatgctgctgataaattacttttaagatgcttggggctgaaggacaatgattttgtaa

SEQ ID NO: 42043 - DNA, 1050 bp, Homo sapiens
tacatagatactacattttttagttagatgtgttttggaagagcattgactttttttcctgttacattggaaaaatttaatggcacgtgtatgttattcttatcatgaagtgggtttaggcatgctgccttatactaaatagaaatcctatagtagttgtttttcagaagtaatccattgattcaagtcattcattgattcatttatgaatacttaagtatggttacataggtagggattgtcagaattggcttttgagcattttgtttagcagttataatccaggtggcaaatatactgtctgattcaattacttgcatgaaatcactttaaacagctacttaagatgagttgtccctaggcctgtctttatctacttattgtgcatgtgtgctagcatacacgcattatcattgttgttttttattgtgttaaaaaaatattacaaagtgtaccatcttaaccattttaaagtgtagatacttcagtagtgttaagtatagtcatttcattgtgaaacagagctccagaaatttttcatcttgtgaatatgaaactctataccccttaaacaacaactcccctcccttgttccctccagcccctggtaagcaccattctcatttctctttctatgaatctgagtattttattttattttttattttttgagacgggctctctgtgttgctcaggctggagtgcagtggtatggtttcggctcactgcagcatccatcccccaggttcaagtgattctcctgcctcaccctcctgagtagctgggattacgggctcgcgccaccatacccagctaatttttgtatttttagtagagacagggtttcaccatattggccaggctggccttgaactcctgacctcaagtaatccgccagcctcagcctcccaaagtgctgggattacaggcatgaaccaccacacccagctgaatttgagtattttagatacctcatctaaatggaattacatagtatttgtctttttgtgactgacttatttcacttagcacaatgtcttcaaagttcat

SEQ ID NO: 42044 - DNA, 1177 bp, Homo sapiens
catccttttgaagctgtataccacaggttgttggctagttttccaaaagcaattaaaatgcccactgttataattaagcctgttactagttgtatgttctagttataaaatatatttggcaattaaggaaactgagattgaggcttttggcttggctctttgagatgcagtagactggcttccaccttgatctgttaggatgactggtgcggatgcctggatgatgggacatgtcttagtccttgagtacctatctttatgagtaagagcaaccacaggtttttacaagaaagctaaagttagagaatgtgactcgtgtcctcacatatgccgattatgtcctacttggtatacaggagtcaaaacctaaacttctaagttgcagtctcttagctgagaagtcctttttaaagaagcattcccttatctttaagaagatggctcgactctgactgtgaacatttaatctgttaaactaacacctccattgcgctgtttaaatttctgtctggttgttgaaaagaaggtgtgggagaaatgttgcaggtacatgtggttaatgtctgtttctgaactgtatttcatttaggagttgttaagctgtgtgcccaccatctcagagacagatttgtctgaactggcctgtggaggaagatctcattgtcagggctggtctcaatggcagatacagttctcagtggtgtgctttgcgtgtcgtgtcttttattcttcctttcctcctgctcacccttaggaatgtttcctttttgtgccttaacaccagaacggtatggtggctgagaccatgggacaaatgcgtcacttagtgggcagatagaaatcagtatttaaagtatgattgaggtttttgtgtttattttgaaattcatttagtacacagggaagaaaacagcacttggcttatgtggttctatcccattgctttgcctgtttgtgcccccgtgcaattaacatgaaaatgatagtttaagaatgagctcattaacatttagaactgggtaggaacagggcttcataggatgttaaaatcagagaaaaagagaaaagagcaggtgctttgtaaatactatgtggttttgagaaatagtagaaagttgggtcttattttaaatttccttttttccagagtccctttaaagttgtgattaatgatata

SEQ ID NO: 42045 - DNA, 1197 bp, Homo sapiens
tctttgagagttcagcttcagtttcttttgcccatcagtgtattcccagtacctaatttatataaaaatttgtggaatggatttttagggtatctcttgcctatcacagtgagaagagctgagaatgaagaatacaggactcagtccttgtcctgtgttatgcaatgtattacatagttatagtaagtataacagcctgagcacagagtgctgtgagctttgagaaataagctagagatggtcatcacagaactggatcttgaatgataaagaggagttttgttctgtggtggagacaaggaatgatcttctaggctatcaaagcagggtgagtgaagttggagagatgtagaaatgagttttgtgtttggatgtcattgagtgattttgatttggctgctagagcacaggtacatgggaaagcatgacaaaggggcctgagaggtagggttggggaggacatgtgaaacatatgttgagatctgattggtaaagttattgataggcgtttggaccttgtcttttgggaagcagggaagtagcaatatccaaaagagagtgcttaaggatggattggaagagggaagattatagaggggatagagagcaaagcaggatgtgactttcccagccttgaaatgcatgagaaagtttgggatcctcacaatgaagggcaaaaaaaaaaaaaataaaaagcaattctgtttatggatgtatagcaatatattgtgtataggtggtggctattagaagactagtagttcttggaactgttcctttttttctcacaatagtagttaagctgtgtcattgggatacaaagggaaggagaaggctatttccattcttagaatagaaaaattggaaaatgccttggcaaatggaggtattcttattctacattttttttttttttttgagaccaagtctcgctttgtcacccaggctggagtgtagtggagccatgtgagctcactgcaacctccgccttctgggctcaaacgctaccacacccagctaatttttttatttttgttttttaagagctggaaatttgctatgttgcccaggctggtcttgaactcctgggctcgagtgatccgcctgccttgtccccgcaaagtgctgggattacaggtgtgcaccactgtgcctggccataccttacaggttaagcagctatgtggccttgtgcat

SEQ ID NO: 42046 - DNA, 1044 bp, Homo sapiens
ttttccctacaaatgatatccacagtactgctgttgtcttgtgctctctggatcagcacttttccagagaaatgaaaacactgcacttttaacggcacagaaagcaaaattactgtagcatcaggattcaaggttacagaattggttaactttctggtttgttttgctgagctgaatgaaaaagatttgatcgaatgttactgcttagggataaatattaataaccacaaactctcttagtgatcattgtccccccttttgcagaaaatttcaaattatggtctaggacttagattgtgattgtcagctgaatatgggcgtgaaaaatgtggaataaccagataaaggacccttaattggttgtagaggaacaactttttggggatccatgtccagagagggaattggttctggattattgatttgtatcattactttgattaagtgtctagcagttgctgtagacctttataacattatataatagaaatggtattagaaaaaagtcatcaaaggtaggatttttttaaagatataagaaccgaagtttttaatcttcagtccttcatagagaagaatttattaggtttgagagttctcagtaccaagtaaattctaactgcagacttaaaacatatgaatacactcacatatagtcaccccatcctctggcctggttttgttctctattatagttgactttgctttaggggaaaggagggagagtattggtattaatttatttgaaaaattagcaggagtatatcaaacacttactgtatgccaggacttaccatgataaataagaggtggacccctgtccttatggagcccacttgaatcaaaaagtaaacatatgagcatgcaaatagatggctgtaagaatgtgatgggcatgccattttttctagcaggttgcctaccacatagtctatatgtgttagagatacacattaggtacacagaagagggtccatttgtggcatagagagagattagaggaatcttcatgaaggaagtgacatgatgatgatgttttgaatg

SEQ ID NO: 42047 - DNA, 1075 bp, Homo sapiens
tgggaggtcgaggctgcagtgagccatgatcatgacactgcactctagcctggaagacatagcccaaccctgtctcaaaaacaaaacaaaacaaataaacaaaaaacgtgggctttgacagagagacttgtttaacttaattaaacaagtgccacttaagtgatttggggtgagtaattttagctctctaaactcagtttcctccactgtaaaatggggataatattgatgagtggtttaattaagaaaatgtatgtgaaatattgagcatggtgcctgacccatagcaaatgctaagtaagtagtagctgttattacttttattaacaagtaacatttgtataacatttatgacctacagagccctttcacatgctgtttcttatttgtgaactgagtgttttatacagaatgggtttttaaatgttccataggctttttattcatggcttcaagaggttgttccctttttgggacctgtacagcttgtgtatactcagttggcatttgtcacgtatcttcatgccagtgtctttgtatctgaattctaaaactgcgtgaacacaaaggttatgtcttttgtcttattcatctgggttgtcactggaacagagtcaggagacattcctatttattatgtgcgtaatcgtaggcaagtcaatctctggcttgccaaagctgtcctttcctcatctgtaaaatgggtaacaagtttcttgtgaagattacgttaaataatgcattaggaagcactttgtatagaaaattacaaatagttttttgttttttgttttttttttccgccatgcctcactagcctagtatcacagtagatgctgtaaggttggaggttgttaggaaggctatagagccaagtcttaactttagtgtcacaatacctttgttaaacaatgaaattcagtctttgggggctagttgtcatgctgggtgctgtgccaggctaattaatactttggtaccttgcctttaaagtacttactgctgctgtctccctccctcccctttggtattcattatttatagtataaaacatttgctgcttgctgttgtaaag

SEQ ID NO: 42048 - DNA, 1102 bp, Homo sapiens
taagggcatgactggcatgttgaatcttgggtataaagctttctgcactataccctggggacaaacaggatagctcaactggagaataaagagcttgcaagctcaaaagaaaacaacaaccaaaaatacctcaaccaaattctgctcttgcttctatcctactgtttctttaggtgtttaaagggctgtagttttaaaaatctcccacccacctcatctttttaagtaaatgtcacaacagtactatgtcaatacagttgaaaataagtatttgagttgaaagaattggctctttgaggctttaactatcagatttgtgctaattctttactgtttccttgacatagtatatgcagtctgtgctaagagagtatggatgttgtcgtcggtgtatagaatggtggctgttgtaaacttctgtatgttggggaaggattgaacctgctgtctggagaattagaaaccagcagcttgacttaaatccctcagtgtcacaaccagctaatgaaggagaggactgctaaactcccagtggtctttgtggctacgaggacttactcaagtttgagactatctttagtgggccaatgacgtaggaacacaatcagcagaggacatgtagtttacagcagcctgtaatgtgccagagacatgactagctgcctctttggccctggggaagtgtgtctggccctgcttgcatcctctgtgagtgggaattgtgccagacaccagctagacatgaccagctgcttcttcgatgttctgtggacatgattggctgtagcttttgatcaggacagtgttcctaatgaagtgtgaccagcgtcatttagacaggaaagaatgacagctgatgtgcaagaatttttcttgattggcagcatttggaactagtaaccagagaaggtaggtggggggaggagaagccagctctgattgacaagagcttatctttatttaatctacttctgaggcactgaagttgaaatcttaggcaagtgaaagaaaggaagacacaattgtgaaacataattaaagattcttgacaaaaacatacttaaatcagaaatgtcttttttttttcttttttgagatggag

SEQ ID NO: 42049 - DNA, 1797 bp, Homo sapiens
caaataggcttgggaacttggcatcctggattcgaatctgggcaccaccattttccagctcattccttcttattcaactccaccccacctcgaaccccgatttggttttaaagattcacatactattgttttagtaattacccttgaaataaagtcacatatacttttaagtctaaagttaatccaggacaggtgcggtggctcacacccataatcccagtactttgggaggccaagttgggcggattgcttgagcccaggagttcgagaccagcctgggcaatgtggcgaaaccctgcctctactaaaaataaaaaaattagctgggtgtggtggcatgcacctgtattcctagctacttgggaggctgaggcaggaggatggattgagcctggaaggcagaggttgcagtgagccatgatggcaccactgtactccagcctgagcagcagagcaaaaccctgtcttaaaaaaaaaaaaaaatccatagcctaaccaccttggataatacaagtgactaccctatatctgatcatactgccaccccaacctaaatccagtatttgttttgccttttttttttttgagacagggcctccctctgtcactcaggttgaagttcagtggtgcgatattggctcactgcagcctcaacttcacaggcttaagtgatcctccccacttagcctcctaagtattaggcatgaagcaccacgcttggctaatttaaaaaatttctatttttgtagagacagggtctccctatgttgcccaggctggtgttgaattcctgggctaaagtgatcctttccacctcagcctctgaaagtgctgggattataggcataagccactggtgcccagcctattttacctttttttttttttttttttgaggggggagggcagatggtcttttagatttacctatgtatttgacaatttgtttgttcatatttctttcttgtgtctcagaccttccttcaggtttgacttttctttagaatttccttgagcgagtgcctattggtagtaaatgctcttttttgtttatcatagatgtctttcttttgcccttcatctcaaaaggtagttagctggatacacagttctagggggaaagattttcttctctttgagtcttgtaggtttgttgtgaagattacctgggttcatatctaaagcccttagcactatgcttggcatgtttgctctgtaaataacagtggctgttacattctcagaaaaatactggaacagttggaggcaatgcaggcttggttgggatgtccatactttgactaactttttacattattttcttaaaactttgatttcattgagattggggtgggagtacatttaagcatcaaaactaactttgaagatagatttgattgaactgtgagttctatcactcgctagttgtatatacctttggtagattatcttacctgtcctaagaatcagtttcttcatctatacagtgatcattgtaatacttcctatttctctgagttgctgggaaggttgcatgagaacacatttaaagctcttctccaagcctcacatagtaggtggctagttgtggtaattatttgttgcctgtaaaccacttttatgacttttatgtagagatgttaccaacttgtcttttttattgttgttgttctagctattctgtttttatttgctcttccccagatccacagaaaagatggggtatctcctgcacaattaactttctactctactgatggggaaggccttctgcagagttggtggctcttgcttgga

SEQ ID NO: 42050 - DNA, 1060 bp, Homo sapiens
cgccccacacccggccttaatgcccagacagtgcccctgtactgactaaggagcctttcttttgagttcactggtctggcactggctcctagaagtgctgttttccagtgacagcaggatatttggaccactgggagagtcagtgggctggggtgggcccttgctctctgcagaggtgttctttctcccagtgggaggaaacaccacttgtcagaacacagctttggcttgcccaggttcctgttgtgcagatggggcctagagtctctctgggccccttgtcatggatccaagccaaggctgtcgcttgctgagccaggaataatataggaattagtctttttcttctttatactaagcactaatcaatctacagttaactctgtatctaatttctgaaccagatgccgtgaataactgcccctgaatgtgtttttgccaataaaaggataagtttaaggcttttaatcaatgccgcttgcactcagtatttaaggtcagaatcttgtgtgcgacttattttgatcaggataattgttgggttaaaaaatgaacggtttttgaaattgtgacactcgcggttgactcgtgggtgaattaatctttgagaggatggaaaattgtcgagttcataagagttctcttgctctctagttgtctttcaggtcacttatggaaaaatatgacttttaggaggaaggcattctttttcaatgggaaaggagataagagactaatagaaatttctaaggagtcagtgatggaggctcaggggaaattggaaatgaagctgggtgttttggatctgcggtgagctgagggactggaacagcagctgtgtatgttctaggtaatattaacttgttgtaattttatgtctccagcatacctttttcaaaggaactcatgtttcctgaccaacgactgtgtactgtctagaatgaagcatagtgtttagaaacatctggggtttagatattggcttcactgaatggcctagggcaagtcactgagcctctgtgccctcagtttttataattataaaatgggatggtaatag

SEQ ID NO: 42051 - DNA, 1070 bp, Homo sapiens
gtgcagcgtggaaacctgcagcagtagaagtgacaaaaggtatgttggtagcacggaagatgcagtgctagttccgtgtggcaaagggtgaaggtgtcttagaggactccttggtcaagaagagtttggaggacaacagggagtttgcctagtagacaataaggcagattactggggcagaggaacagtggtctcttggggagattaggagctgggaatcaaatttcaagatcaggtttttttatttcggttcagtctcatacctgctgcctgtcatgtgaccttttttttttttttgagatagagtttttggtcttgttgcacaggctggagtgcaatggcgcgatctcggctcactgcaacctccacctcctgggttcaagcaattctcctgtctcagcctcccgagtagctgggattacaggcatgcaccaccacgcccaggtaatttttgtgtttttagtagagatggagtttctccatgttgatcaggctggtctcgaactcttgacctcaggtgatctgcctgcctcgccctcccaaagtgctgggagtataggcatgagccaccccacccggcccgtgacctgactttttttactgagaagaaacagaaatggggatccttatgtcttcattccttttgtttggcataggaagctggactgcatccaaaattgttaccttgtgcaatttctggataactgaagcttacacagcctgaagtgtacacaactggttaatgacagatccggttcaactcagaaattcacatttgtccagattcattcagttgccctataatcttaagtgttttttctgatgttggattcattccttctcttacttgttcaataaatgtttgccaagtatgttataaacaactgtgcagtctgatagaggtataaggtcctttctgtcagggaacttaaagtctttttgtttgtttgttttggagatagggtctcgctgtattgcccagactggagtgcagtggcacgaacattgcaaccttcatctctcagacttaagccatcctcccacttcagcctcctgagtgacttggacta

SEQ ID NO: 42052 - DNA, 1061 bp, Homo sapiens
gatagggccatgctccatccacaggtcctgggaaggatgatgtaactgtggtctaacagcattgtctgaatttttggcctagggcaaagaggaggagggcgggtaaagaaacctgatcagaccatttgatgctaatttcacaggtgactggtcactgtgtgcctggctgttgttatttatagagctgtaagtggctggagctacacacaggaacctgaaaggatggtctgtattagagtgtggtggtagatagaagcacagcagtagaatctagggacaaatggtcactggtgagtgtcattgctggagttaaatgagactcattagtggctgttatgatttccactcttacttcattgctattcctgagtctttttgaaagcaaacaacaaaatagaccgaaacaacctctgatagactctccgttatttttaattgaggttgataggattttaatcaggtcaacttgcatactgatttcaaccaccatttaaagagctatccacaaagctataaattagaattatagttcaaaaggtctgactgttttaacctactgctcctattccccaaattattgatggggaaactgagatctagcagggttaaaaaaccagcccagtttcacagttagcagtgatgctggagctgtgatctggatcttaaatctctcagtttagccttttctgttttctaccgtattagtcctacaatgaaaatgcacttctctgtctttaaatttcagacgttgtctccatggcctagatgaaggttatcctttgttatgatattttctcagaattactttgaaaaatggttccattgttatttcttaaaatgaaagtaatatgaaaacaaattccttctattgataatacatttgcccactactgatagttttaggaataatgagaaaagagggggccaatttatggtattggccaagaaggagcgctcagcagcactggactgctatgtgtgggctggaggtaccagcagataacactcggaggcagtgggtcctgtgaatcacagcttggcctcggcataagctctggaga

SEQ ID NO: 42053 - DNA, 1046 bp, Homo sapiens
tcgcggcccggctcacacctgtaattgcagcagtttgggaggctgaggtgggcagatagcttgagttcaggagtttgataccagcctgggcagcatagtgagaccttgtctctactaaaaagagagatcagctgggcgtggtggtgtgtgcctgttgtcccagctacttgggaggctgaggtggcaggatcacttgagcctgggagatcgaggctggagtgagctgtgatggtattactgcaggtggggtgacagagtgagaccccatctctctctcttgttttttttttttttgtttctttttaaaagaaccttcattacattaattgacttccaaggtctcatccagtcatgatggtttttgcatggtccctaccagtagaagatggatttcagaccacagggaatttatttgtagctacagtcaattttcaaattatttgccttacaaatgttttcaatcccagagacctttttcccagctggttcctgggttatattgccaaagtccctggttggtatgcactcgagaactgaaagataattttcttcttgattttaagaaaagataattaaggagggaaatctaccattaaaaaaaaaatcagacattacaaccaagtataacttttagagcagatcctctattgggaaggagcaatatgttatgttaccttgtatttgagcagttaattagggtcagatgtagttagttctcatgctttggccttgcaaaagtaatcccctttttggaaaggctttgttgagtccctaggaattattttaatggtctctaagtatgtttaactcagtcataatattctagttgtttggatttgttgtgtattgacattgacttagatattctcccctgctctgggctttacctcttactcgtacccaaatccatggtccacatgctgtggtgtcccctgggcatgcccagccttgccatgtgtgcaaggtaatccctttgaccctctcaagagggtgctgctcatcttttttttttttttttttttttttggcttcacttatcccacttg

SEQ ID NO: 42054 - DNA, 1052 bp, Homo sapiens
aagaaggtggaagttactttgccaagagtagcaggcttgggggaaactaaaatagaggcttcaggggaagggcagcagcatggtgtcagagattacacttggagtttgtgaagtctgggcaggcttcaatctaaagaaactttatgcacaaaagcccaaatccagggaaataaatgaaagtgattattcacttttctaaagtccttacagtagcgttcctctggtattgtttgaatacagtttaacctgaagggcacttggtttttgtgcagctcttcaagaacagaagcatctaagtaagtagaaagtctgagaaattaacagagaagattccctaaaagtcagccttcattacttgaccattattcataattctgcatttgtctattcctccagtggccttgaagcaaaattaaaaaaaaaaaaagacacttctatgccccttaaaaaaagaataatcaaaacttgcatagacagaataagaatcaaatacactggggaacaaatactctgattagctgtccggttcagctctgacgcgtctagcactctgagttataagggaaacgataggacacttggtttttgttttccaacaacaggaaacatatcaggtttctaagaagatgtaaagtctttcttaaaacccaattatagaaggaatttatgcaagtctttaggcaaggagtattaaagaaattaatgtttaatgccatcaacaagttttcaagcagatgcagaactcctagtgtgggtgactttttggtgtttaccttatatcaagaatgcagcatttaaggccactttgacagagtgcagctaagctttttgggtttgcttgtgtggacaatttccattcagcaatggctctcaaacttcaatgcacatcagaattacgtgggggcacttaaaaaaaatgtatgcccaggctgcatccagaccaattcagtcagaatctctgatggtgagccccaagtatcaatattttgtaaaactgattccaaaggttagctaagtgtgaatcagtgcgttagatgatctttaacgttaat

SEQ ID NO: 42055 - DNA, 1055 bp, Homo sapiens
tattgtgtccagaggtttggggctgtaatttcataatgaaattgaaaaacatgagattaaaaacctgaatatagcacagtaattatatttaagtatcacaaatcatctccctgtatttagttaggtgtttgagatttggcctctttgtggagtgcagtcacgtcgtttcatacatctgcaaaatggaaggcttctaatttatggctaaaatgtgggaattgctttctcttaatgggaaggtgaggagaatggtattgaatttgaaggagctggtttgcttcattgactagagtcaagaagggaggttgtacaatagctgcttaaggtaaagaaatgtttgggtcttttcatggtttaattcccagatacttacacatgactatagtctctccctttagaaattaactgacataggctggcctgggaaattctacagtcctgcagcaaatggtgcagttgcagaagtgtgaatctttacctaaggcagggtttctggtatagataaagacttaactggggtttgtttcccacaggtaagttatggatgagctgtgcctggcccatttccatttactgtctgagaatctgcatgtggcctgcaggctctgtagttgggctgagtcctcctggagtaggaggctggggaaggtgttggtggtggctgtcgataggcattcctgcaggatggtgggtggagagttagggtgaggggtgttctttaataaaggaatagaaattagagtggaaagtggtttaaagctagtgatacctccttctccttgatttctaggaactatcaagtatgaaatgaacatagaaggaagttatgaaaggaatcattattattgtcagtgattcttgattatctactataggcaaacacgttaagttgttgttttttttttgttttgtttttttttaagacggagtctcgctctgtcgcccaggctggagcgcagtggcgcaatctctgctcactgcaagctccgcctcccgggttcatgccattctcctgcctcagcctcccgagtagctgggactacaggcgcccacca

SEQ ID NO: 42056 - DNA, 1038 bp, Homo sapiens
atgagagaggacagttatatcttcctttaaactcttatttggtgcagttgattgtcagatgcagagtgctgatgtgaggatggactgtgaatatgatccactgtggcagtgtttatagtctcagcccaatgccttgttgacttaagtagcagccttgataacaggagataaatctgcaaagatactgtgaggttacatggcaaggcttttaaaatacaccaacattacatttgtggcaagtgctttgctcaatgttggcatttttgaagtcaccctttacctctgccccctgcccagaaatttccttgtgagaaatgtttttacgttagacaaactgccatgggggaggatagtcagaaagaggagacaaataatacgcagaggcagacttttttttacatttgttgctcagaagaaaaaaattccaatgaagaatgaaagaggcttcatatcctgaataaagtaaatgatctgggtaggatggtacaggaatagaatgtgactataaaaaagaaccaaattgtgcagacaagaaaatatgaaggaaaaaagaataggaaaaagacagggaaaatgcaaattcttatggaatatttttgcaaatctgtgtacagaaggaaccaagcaacgcagatcagttcttctgaggctgggagttctaaaaattatgcagtatcaaggaaggctttcttcctgagtcaagtgtaggaagcagaaccaacctttatttctctatgaagatgtatattgtgatgtccccagtgagcaataagttaatattggatgatagtatttaggcagcagtgacagaaagttttctttctcctgactgaatctcacaccaaggtccctttttatttttaattgtttagtttaatttttgttttttgttttttgagacagggtcttactctgttgcccaggctggagtgcagtggcgcgttcatagctcaactacatcctcaaactcctaggctcacacgattcccccacctcagcctcctgagtagctgggactataggcacgtgacaccacac

SEQ ID NO: 42057 - DNA, 1046 bp, Homo sapiens
aatagtccaggacccaaatcccagtcttttgttggctgaactatatttgttatttaaagattcttttagcagtggaactcttctttaaatggagatattactagatagcacaaccaaataaaaaaagtggaaacttagctgctgtggtttaagtgggataggccaggcattgaccatgcattccctttattcagcccttgctgtggcttctgagaaagccacatggagcatagttttattttatttattttaatttttagtccctacaacaagactcacagtagggatatgattttaaaccctggctctagttagggatatgagctccagattgctctcttttgggtcacaattaaaatcctaaccggcaacagatatttttggtcagatctggtcattctctctgcctccgtacccattgggggcaaactatgaagcttttgtagctgcattattgtagatttgcaggatttctgttcgtaatcagaatcgggtatgtgttagaaaaaggccttcctgagtgtatgaacccctttgcctgctgacagtctctgggctggagttaacattaacatctgcatgcccagaggacagtgaattgctaacttttcactggctttctttttgcttggacattttacagtgctccagggtcatcattctgggcagtacttaccttgtaagtacctgattttggctcttttctcactcactagtctgtgatctagtcttctctctgtgtctgcagagttcagtcccatttctggagcaaagcagtagctcagtaaatgtcagtggagttttttgaatcactttttattattccagattataggcatatatgtatagatcaagtaggctgaatatgacttaatccccaagtttcttctataataggaccttattttatctctccaagtaatggaataaagggatggaagctggtctagttggggttgtagatttataaacaagacattaatctgaagcttatattcttttagagagttacaagaaaacccaagatctccccccatccccaatta

SEQ ID NO: 42058 - DNA, 1055 bp, Homo sapiens
atattgctgtaagtgagatgaaagtgaaaaaggattcaacatttaaattctatttggacatcagttattatatctaagtgatatatgaaatcatgttgctctagaacaatattaacagattttatgaggttcccttataggaatgaaaatttatacgtgtactctttctttctctttgacaccactctacccttttctccttctctaacatattccattaagaaattttactcaaacttatgctttgcagttggaataccctaataccgattataagtcctgaatcatttattaagtaccttgtaattgcccagcactgtgctaccaatgcctttcagtgactttctaaattcaccctgttaggtataattatcttactgtgtagctgaggaaacagaggcttagagaagtcaagtgatttgctaaggtcacttagctagggagtgttaaaactgggacttgaatacaggtcttagagtttaaagttcatgctcttaacctttatgttttacttcctccctgtattctcttgtacttcatcaacctgaattctttagagctttttgatctgttgggacctagtttgaattcttaagcattttattatttttatttgcttcaatgaaaggtaaaagatataacctagattttatccattgctagtttcttttagtgccatagtggttttatctgtcagcgtgtctgtgtgtttcttaatgttcctagcaaaatttaagatgtgatctagtaactgtattcttccaattgattcatctttagtgtcactttaattttatttttgaaaaattaacgttatcttctcatttctctgttggagtgtgattgagtgattaattcagcaattatttatagagcctactgtgtgataattattgtgcgagatgctggggatattcagtaattatgtgtttctttgttcttgtaattgttctgtgactttagttacatctttcttcagaatctttcaattcacaagtcatctgtaagatttcactcattttctatttctagagtgtagtccagaaaccatatgt

SEQ ID NO: 42059 - DNA, 1050 bp, Homo sapiens
gaggttagaaccataagcagggtcccagtcatggaaggctttatttggagattgaaattgattattggatagccattgaacattgtaagcaaggaagtggcatgcttaaacttgcactttggagatgtcacaatcctacaacaggctgaaaggctggagacatggaggccacttgggatgttgttaatggaagtccagatgaggaggtctgaattaaggtagtagcagtgtagtcacagtgaggtggacaacagatggcggagattaagaaggtggaatttgtaggtgtcagccccaggcattgcatctattttttttttccaagttgtggagacggagtttatctctgtcacccaggctggagtgcagtgacgcgatctcggcttactgcaacctttgcctccctggttcaagagattctcatgcctcagcctcccaagtacctgggatcataggcatgcaccaccatgcccagctatttttgtttgtttgttttgtatttttagtacagacggggtttcaccatgtcggccaggctggtcgcgaactcttgacctcaggtgtgagccattacgtccagttgcattgcatctgtttgatgttgggtatctaggatgtacatctgtcaactcgtgatgcctccctgaaccttcgatgattatctattgactataatctacccccaaccctttttttttttccattttcatctttcactgaattcctctgtggatccattgatcacgctttgcatatttattccttctcccccaaccccattcttcctggatgagctttttgctctcttttaaaccattgcacttgactgtctaggcatttgccagtatatcaaataagtatgtatttgaaagtctaggtgagcctttcttaaatactggatgctcagtctaaggtatccattgtgtttatggaattactttctctcctgtgtatctaaatggtactagtttgatacttttctgaagataattgagaaaaagtaactttgatctttttttcttctgtggttcagaagagaaattatttgtt

SEQ ID NO: 42060 - DNA, 1066 bp, Homo sapiens
gcggcaaaatcccttccttaggtgcttcctccactgtggtttttcgtaacaggtggagaagatatccttggtgggatgctgaagtggttgtccaacaaagctgtgtgcgtgcctttaaaagaatctaaaacccaatctcagctctttctatgaggatttgaaacttcagcatggtgccctttcagtcagatgtgctttatgcaacaaagcttgatgctaagtggtactggtatttagggcagacctgtcttaacagttgtcaagatggactggcttgcaggggagagatctttgcaattaggataaatggaacaggtggatttcatcacatacattgtgcatctcatggttctaaggtgctaaaatgattgcctgtgtgtgagaaatgccttgctaagatttatattttccggggaagctcagatattgtggcatctgggagggcaatggcaaaaaatgaatttgccttttggtgtcttagttgttctccataggctataattcaagactatctttgtgatctgttgattgtatgaacgtctgataatgaggcttactggcctgttaataattaggtttcaatgatccacaagaaagtatggctcttggcatttgggaagcctttctgcctgtggaaatccccacatgagatggattaataatgagatatgaagctgtttatagcagtttttctgcacaaatccagaggcttcagtgcctgtcaagttagttacctgtgtcctgggtgtgttttatttatttttggcaggaccattgggtaggattgactatcactgaagaaagcagaggaaggaattgtggtgtacagagcaggtgctgctaattagaggtggaataggtaatttttggtttgcagatgtttctctgcagaggcagggagatctgggatcaaacaaaacaatggttcccaaaccacacagatcttgagaatcatataatgagagctactaaacctaaatttctggcccctctttaggacctaatgacatttgtagttttagaaagtttcctatttgaaaacagtcagcctggttggaagtcactc

SEQ ID NO: 42061 - DNA, 1050 bp, Homo sapiens
aatgctgtaccagttctctaggtattctttaatccagtcaagttgataccctaaattaaccaacacagcacattaactaccacctcataaaataaaacctgcagagagaaaataagctgaatgggaaaaggaactgcaatgaaaagaatgggccataattcagcttgggtgatcctgatacctacaggagttgttccataaaacagtgaccttttatatttcccaaagtaagaaaattttatatgtgtatttgtgcatgcagaactttattaagggccatttaaatcccatatattgatagaggagttaagaaagataaagtgacaggagtgattctcaactctggctcccataaatttctacaatgtcagtgattgaagaatgagggagcacatctttcctttaataaggcctagccagtacacttttggtagttgatgagggtaggacagaactccctttctttatttgaaactgtgtatttttgtgctgattaaattttacatttttccctcttgtgatgatataaagttatctgcatgtggccagatctcagctaaagaacatgaaataagcctctgtacattctgcattctaatctctgttcacagcaatcttgtatccacacaagtctgtacatgacaggtaatgagtgggaagtgggaggagatgggtgtctgtgtggtttgcactggtggtggtggggaactgagcagatggttgtgatagccacatgctgcgtgattcccgtgggagttgatggtggtgacaggcgactcacaatgtgctatttacagtttgggtttgcagtctttcggtgacatctgaatgctctttagcaactgctttcattactgcctttcgaggagctgttaattgaaaatgaaattgtgggtgggctttaagacaggcagacgcaggcaattctgtgtggtaaatgttgcttgagaactgttggatgtcttcatgcccaatttgtaattcattttctaagactgtaaaagccaaaggtgcatttggagattcagttatgtatatacataggcagag

SEQ ID NO: 42062 - DNA, 1129 bp, Homo sapiens
cctggacaccttatgctatcctctttggaagaaatggttccccctctgttttttgaatgatgagatccttctagtcctttaggcttgaactgaaatgtcatctttcataggggcttttctcgaccatatggtttatttaactcaggatctgccatttgtcttctgtgttttgcactcacctttttaacttcctaacaccacatttataattatagatttttctttctatgtccttccttatgtctgcaccttctgctgcactccaagctctactgaggagagatatcacctccaccacagtgtttgtagcacattgcctggcacacagaaggtggcactcaataattaaagttgagtggtttgaataatttttgcaatggatgacattgctaattccacactcctgttacattccaactttaattggctacaaaaaaaagcacacacacagacacagacacacacacacagacacacacacacacacacacacacacacacacacacacaaacaatccagaccccaatacagtatgactgttgtcttctctctctggggatatgcaatgtaaaataagatactgatgagcgcatgctgcacaccaagcaaaaatttatcccaagcaacccctgcgccctgcgtggaccgtgtctgctgttctcccatggaatctatcagcagtttgtcttcccagggttgtagcctgtcaggatggtagaattgctagtgcagccaggaaaagctgacctaggaaaaccatagccttccatctttttagaggtaatccaaaagagactagacaagcagaaagacggagaggaaagttggtgggagtgaggtgaaattcactgagtactcttttatatgcaaatatttgtgtggggctctacttttttaccatgagtacaaactctttttagtatcaatgcatgaatagcgtgtcttttcactgaaaaattattgtcccacgtgccctcggtttaaaatgttttgatcttagaaaacagtttatttccttttaaagtggcccaattaattcattttccacatatttgctcattgagcaaacatcaactgaacatcgtttgtgtgcaaaccttatacaagaaactctgacataacagggag

SEQ ID NO: 42063 - DNA, 1056 bp, Homo sapiens
aaatgctgtttattcaataacattcactcctccaaggatactactcactgtcccttgacattcattcattaaatatttattgttcatgtactgctatggacagacataattttgggtgcttatattagtgaacaaaataatgaatacatctgccctagtggaagttacattctcttcatatattaaattctcttagtagtatacagcttccatttaaatgtttaacccagacctttcttctcaacttctagattcataaactcagctccttatcagagttttgctgcctagatcattcacaaacatttcaaactcagcatatctcactttgaaatctataatggtggtccccaaattgctcttcctcctcaatttccttccttactgtgtgcaccatctgctaagcatccaagccataaatctgttcatactagaaacctgcaagtcaaactcctcttcccctcttccccccattcttacatcctatagatttttatcctatgtatttcttatctgaccctctctcttcaatgttttctatccttcctgcgagtgcagtagttcaggttctctttctcttggaggtgtgatgactagcttctcatctgacttctcagcctctaatcttgccactgttaaattctgctcctcaaattcctccattattgtgttcttgacagcatgcaaattgaatcgtgtcatttgtttcaagagttttcattgactttacttataggttaatttcaactttctttatatggtatagaagcccacacatttttttgttttgttttgttttagagaggatctcactctcttgcccaggctggagtgtagtggtgtgatcatagctcactgcagcctccacctcatgggttcaaaatgtccttctgcctcagcctcccaagtagctgggactaaaggcatgtgccaccacacctggctaattgtgtgggtttttttttctttctttctttagagatggaggactcactgtgttttctaggctggtgcccacacattttaatgcctttcagagcattccctttttttttc

SEQ ID NO: 42064 - DNA, 1733 bp, Homo sapiens
tttaatttgagattgtgtgaattgctttcctagtctgtacaccagaaagaatgcttctctccttacacatttcgacacttcttagtgaagatcatttacttatagagtgtatgcattatattagcatatggcctgggtaacttcagacttgttaacatagcgtgggaaaggttactgaaagcatgaggaggcagtatattatctctcagttgattttgtacaccattttgaatattttctgtacattccctttcctctagtgttggtttcttatacttatagtaaagggaaactgatgttgatattgttcaaaaaagaaatgaagtgaatttttgtatttttaaagaataaattaacatgctttaaagtgcttaaccagttgttacaatatcagttatcacagattggtatgcgttggtccatgttatgtatttgcctgaatcaaccctaagactggttggcttatttctgccttttcttttccaaaaggtatacttgacatgaagtagactgtgcctgtttgattttaagttttgaatatggtgggaggtatagattaaagttaatttcttttgcatatggatattcaatttttctgaaggcatttttgaaaaagctgtccattctccacctttgcattgcctttgtacttttgtaaacaatcagttgtccatgtatgtgtgagtttatttctatactctctattctgttcctttgatctatttgtctatctttatgcctatactatactgtctttattactgtagcttgctttgtagtaagttttgaagtgagataatgttacatagttttggctttttaagattcttttcactagcgtatgacttttagaatcagcttgtcaggttctataaagaatctggccaagatgttggttgagattatattgatcgtgtgatcaatttggggagaattgacagtttaaaatattgagttttcaactctcgaacaaggtctatctctctatttagatcttacttatttccttcagcaatattttgtacttttcagtatataagcctttcatatattttgtcagatttattcctatgtgtttcatatttttgatgcagtattaaatggtggtgttttttaactttagtttccagttcactatcaatatgtagaaattcactgatttttgtatattcacttgcattctgcaaccttgctaaactcacttattagttctagtagttttttttgtaggtcttactggattttctacatggatgatcatatttttagtgaatagaagcagcttatttctttcctcctaatctgggtatcttctctgtctttttcttgtctgatttctctgtcaggaacttacaggatcatgtttaatagaagagacaagactggacactcctgcccttttcctgattttagggggaaagacagaatcttttgccattaattctgagcttagctatacgtttttcatagtgccctttattaggttgagaatgttccattctaagtttgtcagaattttaatcaagaatgcatgttatattttgtcaaacaccttttttttgtctatcaagatgatcatatgatttttctttttttgtttattaatatagtaatacattgattggtttttaaatgtgaaaccaaaatgctttccttggtaaactctatttagtcatgatatattaacttctaaatagattgttggatttgatttgttaaaaatgttttaaaga

SEQ ID NO: 42065 - DNA, 1042 bp, Homo sapiens
gaatccatctgggcctagagttttctttctgtggaaaggttttaaatgaaatattcatgttctttactaaatattgaactatttatgttatccatttcttcttgagtcagctttggtaatttatgtcttttcaaggaattttttcattttatcaaagttgttgaatttattggcataaaattcatataatattccttcattatccttttatatctatagaatctatggcaattctatatctgttgatagcctcctttcctcccctcttctctctctgtcatatcagtatgactgggagtttattaattttattgatcttcttgaagaacaagctttattttcattgatttttctctgttgttttatatttcattgatttccttctttctgcttactttagttttactttgcttatttttctggcttttaaaagtaggagctgagtttgttgatttaagatctttcttctcttctaatatagccttttgatgctataaatttacccccaaatattactttagcagcaccccaaatattctgatctgtggtattttcattttcattcagtttagagtactttctgatttcccttgtgacttctaattgaaacactccaaatattttaggggttttccagggatctttctagtattggtttattacattaaatcagtcaattaattaattaagagacaggatctcaccctgtcatccaggctggagtgcagtggcgtgatcatagctcattgcacccttgaattcctggtttcaagtgatcctctcatatcagcctggcttttaaaaatcttttgtagagatagtgtcttactatgttgcccagcatggtcttgaatccttgctctcaagcagttttccctccttggcctcccaaagtgttgggataacaggtatgagctactgaacctggcctggaattggtttcttatttaactccattgtgatttaagacagacaaacactttaactgggtatggtggtgcgcctatagtcccagctgcttaggagatggaggtaggaggat

SEQ ID NO: 42066 - DNA, 1027 bp, Homo sapiens
gttctctcttctctttcccccttttttcttcccctccatcttactttcccttctctctcttctcatttgatataactgacagatttgagcagaactgtgaggctcttaggagctgtgtgtgatgtggagtggccagatgactttatgtgagtatgcacgagggactgtaaagaggctgtccagaggccagcctccctccaggttgttcctaaccctggagagtcatcatatgttatttctcatctcagactgccacagaattgaggagggagattgaaggcagctcattaaaccactttggccacagataagagtgttaagagattaagaagtagatttatctgggggaggggtttggtcccggatgaagccttttcctgccgtcggaaaccaaagatttccttgtctcttttgttctgatccatggaatggtgtggcttagctgcctctaaatctgttttggcaaggttgtttgtaaggagacatggcagggtctgtctggagggaacagaaaagagagtacatattgaatgtagatgcttgaaactagatcatagtttacctaattgcagaccttgaagaaactcttggggccacttggatgggggtgcttctggaagtttgtctctgggggtatgtgagtatggacctcttccacactgagaagagggcagagcccagtcatcagttttcatgtccctgagtacaatattaggcttctttttattattatcattatttcaactggtaacaatgtttcccctcaggaaatgtctttacctctctgaagagaagaccgtgatgccagctgttagtttgagaaatgctgcagggtcctctcctacctgctgtttctgtgctctttccatgtgttgtggtgaagcccctacctctccagccatggggccttgttcttcatcatttgttcctatcttcagtttgggatgtggcaaggagaggcagagtgcactagagaaatctgatactgtaatgtgctaggagacagcatgatgagaggttttgggtg

SEQ ID NO: 42067 - DNA, 1032 bp, Homo sapiens
aactgggaagtgaagatcttctgcaacacaggagtttctaaaggaaaaacaattgggccagactggatgaactggttagattaaatgctatcttcctgactcagggttattatttttggttgcttattttatttttaattgttgaagatttattgtaccatgctttgctcaggacagtgtgtaaggtatttagggaaagacctgaaagagacaggaagcatgagcccttccatcaggcacctgaataactgatggtggacatattgagaatacgtagaaaatttgtatcttatggtcatattgcacttcagacttttcacaatgcccttgtatctctgttacttgattctagttttcttggctcagcatgcacagttgttttctttacttgtttatggtctgtctctcccacttaaatatcaggtccttgagagcagatacttgttctcagctacagcccagcacctagatcaatacctgacatattgtgggcactcagtaaatcttaggaggataaatgaacaaaaaacctatcttctgaatatcagtgataatcatataaaacaggcttggtatgctaccatttatgtacttctgattttgtgttttgacaggttttcacctaaggtttgtagtagttggttttcctcagagaagtttttgggctatttttctttttaagaaagggtgagtgatgtcattatgaagttgaagctataggactaatcatatacttgccctgcatctatggtgacttttttttctactggaaagaaagcccgctattaaataattattacttccaggtctgagggagactgtccagcatctgcaagagttttgctaggatgcagggctttgttcccccactgggctgtgattccatccatggagtaagctgcattgtggtagcaagtcatcttgacagtggcaagtatagcatatttcaactggtgatttctgcatgatttgcatgaatttctgtatgacaggagtcacaacaaaactgttacgtgacttgtgtctaaagct

SEQ ID NO: 42068 - DNA, 1034 bp, Homo sapiens
taagtttctacttattttagatactgtaatataaaattataaacaaggcccaattgttgttacccactaggcagatttttttattatccaagtttctgtttcgggccatgaaacaagttaaaatcaaaactttcgctggttgccattttaaagataaatttgttatataggctttctaagcttggttgccttgctccacaaagacaaaacattaataatagcttacatgtattgagcagtgaatctgtgctaggctttgtgttaaccactgtatatttggattatctcattgatctaaggtaggtacggttgttattcccttcttataggttaggaaactgaggctcagagagattaagtaacttgcccaatgttacacagcttgtaagtggcatttctgtttaaagcttcccattttataaagttttgtgtttttaaatatgctttagaattttaagtttttactctgttattatttcgcgaagtcctatgtctacatacacatcaaagcaattctgtggttcttagggaattatttaataaatgaaatagccatagactgtaattacattatgagtggcatcttttagctgtgcccagcggtagcccagttgctaatctttatcccttgagtagtcaagtagataagaagtggataagcaagtggagtggtggccactcaagcaggcctccaccagaataattccaaataacttcacacagtgaattgcaacccactcaatccacttcactggatagcattgctcaaaagatattcttttactcttttatctaccttgttggcaagcatccccaagaggtcttatgcctgtggcctacagatcaaagatattttctcaaatactgggaactttgctgctagttagaattaagcaaataaaaacatacacctccagaatgtaagcaaactagtttaaaacactccagccattgtattacttatgctttaaaagtttccccacaaaacctcattaatcatataaatattttgacaaacagaaaggggacagagc

SEQ ID NO: 42069 - DNA, 1031 bp, Homo sapiens
tatatagtctaaacttagatttgattctgtttagaaacacttaatgttcctaatgttatcaggaaatttgctgttcattttttcaagatctgagtagaatgtcacattctccatgaactttccatgatgctcttcttccaaatgtttctgtagcacctggttgtagcctggctcttaggattcccctgtctgtgctctggacttctttagaagcaccttgtctggttcagttactgcctttgtttgtattgctggcacattcctttgtgcttggtgcatagtagataattaatagatatttgttaaattgaactggatgcttaataaatgtttggatctaattatgatcttaactctggtgtgtacttcaggtacttcaggaaggtcattgcagcattagatgactatggagaccctcagtgttttagactgagatgacttgccattcctacaagagatcaattgaatgaataattggggctgatttttccctaagtattgcttagaacatatactgttttttttctcctcaaaaattgccagttatattgccatactggacaaaataaaactgttagctatatatctatatctatacctatataaattttaaaaacgtagcacaaagtttctgcaccatactttgtgagcagctctgtgtattccaaggctcagaaaatcagactttcaaagctaaattttaccaatatatatcccattgaaatttgcatgagcaagcagaaataatgtggatgttggagttaggtaaatgaatcaaatcctggttcagccactttctaggtatgtgattttgggcaagatatttaatttttttcaacatagtttttttatttttaaaatggaaaagttatgcactggcagatttggaggatgaaataatatgttgggagacagtgtgttaagttacttctcaaaaagttctattataattataggttgctaatttttggcatattttcattttaaaacttttattctaatttcattcttaaacagtgtaagcatattca

SEQ ID NO: 42070 - DNA, 1047 bp, Homo sapiens
gtagttttctctcaagggctaatatttatatttttttgcttccaaaaactgttaaagtctgaaagtgtaaatttatatttgtggtgtttactttgtcctttaaatgtttttgtgtacccatactttttgtcataaagatggaaaaatgatattaaattaaccaaatgaaagtaattaatgctgaacattcactaaattattaagatgttaatgtgattccaaatgcagatagttcatgggcagcagcatgtgtcctgggactccccctcaaaggttggcaaggtttgggcaattttgagggagggagttaattcttaagtagtaagctttttcgtttacctctactatttataagctaatatgcaggatcattgtaaattagtgaaaagtgcattccattgaactagtagttgtaatactgggttaaatatctaagttgtgtgactttgggcatgagtttctgcctctgtgggtcttatttttccctgttatcagaactgtagcattggactagatcatgtttccttgtgtgttttttggaaaatgtgacaatatactaggacctacatgaagtcacagtataaacacccaagggacacaacaggcatatcttcctgcctttcatatctattcacttgaggcttttggtaagacattaattttatacttaagcaaacatattaaagactgaaaggaactcatatatcttcatatagtgttaaagatattaacacaaaaatgaaagaaatattgtccatacagcaggccacagatagatatcccttgttttgtgatcagtcttttctgctatggagggcactttggacacatttgaggatcactgcattagatgacaggaaatgtgtttcttcctatgctcaagttgtgtagccatgacatttgaggatatttacattttgaatttccctcctccctcccctaaattagtggcatgttctagagaagggttcatgtgctttatttacataaaacctatctcaatgttgtttgataagaatctgttaagagatcttgtcctaaaaggat

SEQ ID NO: 42071 - DNA, 1049 bp, Homo sapiens
acaaagggctaggagtccagagactgacactgtgtggccttctctctgggcctgtttcagatagtcactctgcaactacaagatggcactggattagtgattctcagacgtttttctgcaccaaaatcacctaaaaggctggtttaaccgactgctaggctccacctccaaggtgtctgagtcggtaggcctgaggaaggcctgagaatgtacatttttaacaagtcctcaggtaatgcaggtaggcagtatgactggattgtttttgtggttgcctgcctctttttggcattggaaaggggaaagccagagtattccttgaggaatgacatttggagagaaccaaattttagatgcttctgtgatatgtacaccagagctattctggactagattgtaaattctcacatttcacctatgcaaaaggaaatactttctggtctcctattagtaatcagttgtctcaaattttgcccgttacctctggaaattctggaccctcaagtgatcagtcttttaaggcagtgtggaagaacagcacctattatggcagttgatttttcatggtctctaccctgtccttcctaatataactgctattctttaccttcctgtttttcaaaactctcgtattgttcctgttgtgttttttctaaatattttcttggttacaataaagtgctaatatttaaagagcttttgggagcctgctggtgccagaaactattcaagttacttacagaatactctcattcagttctctcaaaaatccttggggaagttttatttttctcattttacaaatgagcagtaattacaaatttggagtcagagaagctaagtaatatgtgatctggacaatttcaatatctatgtatatcaaaaaccaagcttcctaggtctttgacctcctctccagtatccctcaccttcacctgctaagtatccattctcattttggatctcggactttgttatcacctaggattcgcccaggatttcactttctcggatcatgaccttccacatcatactgtcactgcatctca

SEQ ID NO: 42072 - DNA, 1791 bp, Homo sapiens
gaaatactattagactgttaaggtgagtgtagaggacaatgcttcttcaaaattattacagggaagtttataataatggtgactgacttgaggtaggggtagggtttttcaggagggtctttcagtggtaatcacgcctaaaattttgaatgcttaaatgaagctgctgcttagctcaatgataagtaatagcagcttctttttccatgaggacatttattaaatgatgttttaggtctcagcaaatgttacgccttcagacaccttggctcaggaaagcctgatgtgcctccagtgaaggatttgtaggtccacatcttcgatgcttctgcaacacagagttagggaaatgaaacagtgggtcatacatgctcctgatccattgccaacagcaaagggacttgagcccccacataccttttgacccttctggtcatgataaagccacccactagctataatgctatagtcagcagtagaaataagagggagcacaaagcaactgaatggtaaaatatttcagacctttttggaccactttggaagatggaagctgataacatcatacatccaaattcctctgcattgctgtctctctctttacaggtggggaatagtttacagcaatcagtagaatctacttttgattccaaatgggtcttaattattttgtatttgggaaatattttttacttggcaatagagatgtgccataatattatttaatattttggaaatcactgtttcccatgtgcctgaacatctcgagcacatttaccctgagcgtggcagtgcctgggtgtctcacatccatgtatgctcaaaccatgctccttgatttcacccctttctctctgtttctttcatctcgtaaactgagtgctgatgccatttcacactttttcttggaagtttaatgagttagtagtagtataacaaaaataaaaatattttctttacgtttctgaaaagaaatatgtctataaagcgtcaatcatttttccaagctgttagttcctgctgctgagtactaggagctgttctgtcagcaagaccacgtaagggggaatagtaagagaaagctgtcccaattttctttctctggtacaaaaggttagaagatgttgtttcagctggagaacttaagatggattcttattcactatttgctaaagagactggactgtttttagtgtgataattttctgtaggcgtggagaaaggtcacctcctgatcttgttttggagatcatggggttaaatctgtggcagtgtccttttcctagacacagcctcttgtcaaaataatgtttggccaggtgttaatctgtgtcctgaggggagtgctggaattcattattcatcccgtgggagtaggggtcagaggagaaggttgtccttctgggaggtaccaggggacatagcctgcctcctgcctttactgacatgtgccatttgtgaggagggcagttgaagtccatttgaggaattctcttgtcagccggccaacacagaaacacagagggagtgggagggagggagaggcaggcagcttggcaaggcagtcctggagtgcagtttccggagcaagatcacacacagtgttttaggagctcagggaaggtgtgcaggaacataaaggggaagggggccaggtttgaaagagtggatttttcctattttttccaccttttattcctcctgtctttgaatacttgtcatcctttggaaaactcagcatcggaaagaagcctttgctgacacactgctttttctccagcgctatattgt

SEQ ID NO: 42073 - DNA, 1157 bp, Homo sapiens
ctgatatttggggaaaaatgcattcagtcttttgctgtttagtacaatgttagctgtaggatttttctctatgttctttatcaaattgaagtagttcctttctattcctagttttctgagattttttttatcatgaatggatgtagaattttgccaaatgctttttctgtgttaattgatataattattaggtttttcttttatagcctattaatacggtagagtacattgcttgattttcagatattgaaccattcttgcaagcctggaaaaagttctatttagtcaatgtgtataattctttgtatgtatcgctcaattttatttacttatattttgttaaggacttttgcatctgtacttacgagaaatactggtctgtaattttctttttgtaatggttttattatgaggatattactggctccataaaatgatttaaaagtgttcactccttatttgtttgctggaagagattatgtataattggttttcattcttctttaaacattgtgtggaattctgtagtggaaacccatctgggtctggaaacgtcttttttagatattgttaatttaagaaattaaattttcttaatttaagttattgggctacttaaattactgtttttcatatttggtgggttctggtagtttttctttgtaaggaagtggtccacttcatctaagttgtcaaatttaagtgtgcagaactgttgatagtattctttattgacttcttgatgtctgtatagttatattccttgtttcatccctgatattgataataatgtctgtgtcttttttctgtgtcagtcatactagatgtttgtcaattttattgatttttttcaaagaacaagttttgtgttccattgatttttctctcttgttttcctgttttcaacttatttttttctattctgttatcttaattatttcttccatctgcaagctagaaaaccaggaaagctggagagtgtagttcagtctgactctgaaggcctgagaatgaggggtccagtggcgtaaatctcttttcaagactgaaggcctgagaaccacaagggctgatgttccatctccaagggcaggagatttggatgtcccagctcaaacagagagtaaatttctccttcctctgcctttttgttctgt

SEQ ID NO: 42074 - DNA, 1056 bp, Homo sapiens
taatggcgtaaccagatttgaaccttttcttccattctgtactaggttgtcttttctttgttaggaaaagcctattataaacggaacattgacatgaattttaatttttgcatattttcttacaacatttgcccttactgcattttataactaattgtatatacttttatattttcctttttgtactcatgattctaatgtttctatgtggcatttctcacaatctctgtggggttttattataatttgctaaattattcccttgtttgggggcatttatataaactttttttttttttgccatgaaagagaaagccacagcaaacaatgtatatatgtagctctttattctctcaagttattgtttttgttctcatcatctgagttattgggggtgacttcattacagcagtggaaaacacatggtaacctgccagcatcagaaggtgtcgctttgtactgtgtgtgtgtgtgtgtgtgaaggttatgtgggtatgactgtgtaggaaagaaaaaaagtgctactctttgtagatcaaacaattgatgagtcttaatgtaggattacgtgttgcctgttaaattgctatttctgctgagaaagataaaggcatttttattagtgtagttgattagctttattaatgttggacaaaatcaatgttatgaaaatgaaatctatagttttggggtaaaataaaatttaataggtaggtgacccattcatacacttatgtgaagtaatttttgaaatgataacatgcatgaaaatttactatctatactaaatgtatattcaaagatattcttcctctagggttctagttataaacccttataaacccttataaaatactatgattcacatatacaacttataaaatactgtgattcatcagacagctctagtttcattttatctattgactctgatttaaattatcactcttttttatgcaggaatatgtggtaacaagttatatggtaagaaatttaaatgtaaagattttgacctaacgttgattcagattgtagagctgtcagttgaaaagggaa

SEQ ID NO: 42075 - DNA, 1156 bp, Homo sapiens
tgtaaaggaaaatgaccctctaactaaatgggaaagtaaggtttcacagatgagatagaagttcaaggtgaaagaacagtctataaggtaatacctgcctgtctgcagagaatggattcaaggctcctgatgcaattgaattatagcctcattgtcatatttttttttttttttttttgagactgagtttcactctgccaccaggctggaatgcagtggcctgatctctgttcactgcaacctctgccttccaggctgaagtgattctcctgcctcagcctcctgagtagctgggattacaagcacgcaccaccacgcctggctaatttttgtatttcaagtacagatgaggtttcaccgtattggtcaggctggtctcaaactcctgacctcaggtgatctgcctaccttggcctcccaaagtgctgagattacaggcgtgagccaccacacccggccttcattgtcatctttgagttaaatgcattttggctttaataaaaacaatatgagtaaattctgaacctataatttgagtcccaatagtatttcctaacaagtgatataagtaaacactgagaaaagagtatagtgcttacagaatgacagcatgaattcagcaattcctgtttagcaagaggtctgggccaataacttggggatgtcatagacagaatgcatttggctttcagcaaaatttttggtctgctctcccataatctctttgtgaacaagtagaaaaatataggcggggtggcattatgattatcagtattcataattaattttataactttttccagtggtgattaaattttatttcactctagagatgactttctaagattatcataaataatctatccttggctctatcttatccagatttttgtcttagactaggatgaagatacaattttaaatggtaccaaaacttcttgggtcataaatatggtagatgggaggaacaggacacatatagattttaactcttttggcagtggcgaaaataagatttgctaggactaaaagtgtgattatgtttgaaaatccaactgtgaaaatagagaattgatagagatgagacttacgatttttagacgacacttacagtgagtcagcagcatgtagttagctggcaataaagctaatggta

SEQ ID NO: 42076 - DNA, 1113 bp, Homo sapiens
aagcacccagactcagcatcagaaggcccatatccaaacctcagtataacctcatgattgacttgtgacatgaccgcatgtaggcttaaatgctgtcaggaaaattaaaggaagtaaaacgtgaattgagaaatttggagatttctgaaaattttgaaaattgagattttgctgttaatatcacagccgtatcactaaaatttccacaatcctttgaatttgtgaaatctatataaacatgatttaaagtacttatgatattgtcctttttttcatattacccaaagtatggaatttgtggcaaataaataaccaggtatatatggcccatatagatatggtttttatcctgcacttcttttgagatagctgggggctttactagagagaagaaataaaacaagataactttggcaagtatagatgaagtttgagaggtgtcttatttcattttgtgttgctataaaagaatacctgagagtggctcatggttttggaggctggaaattataagagtatggtgctggcatctggtgggggcttttttgctgcttcattccatgggagaaggtggaaaagcaagagagcatgagagcaagaggaagcagaactcactttaataacaacccactctcgcaataaccaacccaactccagtgtgaatgacgttaattcactcatgaaggcagtgaccccacgatctaatcacctcctgtttggccctacttcccaatagtgttgcattggggattcagtttccaacacacaaactttggggacatggttaaaccatagtaagagggaagtttaacatttgtttaacgttggtatcgaaaggaactatttacgttgcagccccgaaaagactacaaataatattggttaaaatagaagtgggctgtattcttttgccattgcagcaagccttagtagtgacctagattcaaaatgttactttgattttatttaaagcactgaagtattgcatttttcctcgtggttttatgcacctactaagtgcagctaccaatgacaaagatcttctataataaaaatgatgtttccttatttttgggtcttttttcaatctgaaaaatgtttctttaatcggat

SEQ ID NO: 42077 - DNA, 1026 bp, Homo sapiens
tatacccaaactagatattctccagtatcaccaaacaggatctatccattctacagtgctcaccagattgcttctgtcatacttcacctggacatctgtggattctggatattagaaattggaaggaaaagcttgtaaggggatctcagtgcccagggtcaaagcttcattgttgggcagccaaggaagagatttgcttgacttacttgagtaatttttgacacatacttgatttggtcatcaggcataaaggatggccagattactagtaacttattggagatacacttttaaaataggagttaaggctacttatgtgttgatctgaaattaagaaaagggcaagatttctccctgtggcctgattttcaaccatgactaaataaagcctgaggggagccactgaggatggaaaaggtcactcagtcttttttgctgatgaaaaaatcgagttgtctagctctggattgacatccagcactgacatgctttaggaaacaaatcttttgatggcaaaactctcactagcctcacctctcctctcctttcctctctcctctcctctcctctcctctcctctcctctcctctcctctcctctccctcatttttcccttttctactctcccacttctaccctcatttacttatttctcaatttagctcatcagggctttttgttacaaaaaaatggtgtgtaagttacttagctgtaacttggaaactgttttcccatgaatagatgacagaattactacatgccaaattatcccagaataggtggcttaaccaattgtataattaagttactttaataattaccaagagggtcctgagccccatggaaaccttcactgcttggaggatgtataaatggaaggtgggcagcatgagtcttttggactggtggccggaacaagcagttcttagctttttttaaaatcatctttcatatttcagagcaattctttgcataatccagattgcttctgtcatccttcacttgatcatctgtggattctgagct

SEQ ID NO: 42078 - DNA, 1058 bp, Homo sapiens
aataagttaatgaaaagtcaggctcttagaatagtgctgggcatatatgaatgttcattggatattatctaatattgtggtcattatcagttgatttcttcttaatttaaaaaattttcgtatgtgatttcatgtggttttagggaatgataaatgtaatttagactttttattccattgggtctgttacagcttttttctcaatgaaactgatttggttacctcagttctaatgctggctttgcctctgctttttgatcacatttagaatacagcactcagttctgggtatgtccaagatagataggggagaaaggtaaaagagaatattaatgcaacttgattgtgcagctgttctttccacaaatatttattgaatgactgctgtttgtcacatgttgatgcatagggacacggtgcacacctgagattccattcctgtagacaggacatttgcctgcttcctggcacttatacctctccccaaattgacaccaagcattattttagaaaggcatttagtagaatgcaatatcagcaaatgaaaattgtagagttgtatcttgaagaaacttgaccccaccccccactctcacctgcatccccacatagagccaggacatctcttaagacccaccttcctgggtttgctcatagttggcacttaaaacattctattgcagttacctatttttgatggactctgcaagagagagactgtcagttcacaagggcactgatgtttggttcttcattttatttacagtatgctatacaaagggataggtttttgttgttttgaatatatcttgagtactcctttggaaggatagagtccaaaggcatcttacctgagccagaattcataggggtggttccctaccgtttcttctttcctgtacacactcaccaccctcaaatttccgctcagtagaggatgctttaggaccttttttcttctttctttctttcttccttttctttttttcctttttctttttgaggtagggcctcactctgttgcccatgtagtggcacaatcatagctcactgcagcc

SEQ ID NO: 42079 - DNA, 1082 bp, Homo sapiens
ttgttgtatatttcacatgacagtgatacgagggataattgattatttgaggtattgatttgacctaattcagcataataatttactgattttcattcagtgcatgctaagtactaaatccagtcttgctgggtacagagaaacatacattcattcaaacatcatctcttctctcaaggagctcacagtagaacctatttaaatttaggcagtggggagcatgaggctgcagagaaacaaacatccaactttatgaaaagacaaaattatggagacagaaaaaatgatcagtggttgctaggagttggggagagggaggaatggataggcagagtggagaggatttttagggcagtgactctgtattacagtgggtacatataattttacgtacgaccaaacccatagaatgtacagcaccaagagtaaaccctaatgtaaactatgaaagttgtgataatgatgtgtcagtctagactcatccattgtaactatgtaccagtcctgtggggaatgctgatagggagattgtccatgtgtagggacaggaagtacatgggaactctgtactttctgcccagtttttctatgaacctaaaactgctctgaaaaaagtattaattttaaaaagtggtcttactgctttggagcacaagtaaatcatactaagaagacgatgtttaaattaatatactacagatacagtttgctttactgaaatgcagtatatgatgttcaaaacatatatctttaagtaatagccattttacaaaggaattgcatgtttttacagggaggtttcactggcctattagggcatgttggcttggtggtacagctaagatctaattccttctgccaccaaggagctttgtgaccgtgggaccacccaggaacctctctggctgtattctctgcagaaagacttaggacaacaacatggcatgctgtgtggacatgatttgctttgttgggcaaactggtgggattggtggggtggatactctctaatggaggttaaaggtcctgaagccactgcaggttaccctggggcgccatttctgtgctctggattaattctt

SEQ ID NO: 42080 - DNA, 1046 bp, Homo sapiens
gaaattttgggtgatttagacttttaactgaagaaaatgtcagggtaagatgaccagattcaactgtattccatgtagacaactatgtcaagagagaaatgttttctggttggaaatgaagacaatttgacttaaccggagcatgtttttaaagaaacccatagcatgttttttttttttttaacttagctctttttttcgaaccttatgtttggccctacagagaaattaggtgatgagactggacctactgaaagtgttaccggacctattctgcttggacacgctagacttgtgaactgctgactggtatatttcagttagtacagttaatgttttatcatcactgccattagaaggtattacatagatgtgatctttttcattgtagtttaaagaagatagttaatcctggggcaaagtttatgaaggaagtgtgtgaacagagcaatctttttagatttactttaactacaaaactggatatttgttttaaagctgtgctgtttaggattgtagacactagccacatgcaactgttgcgcatttgaaatatgaccagttctaattgaggtgtgctgtaagtctagaatacacacttgattttggagcttgagtatgaaagcaagaatttataggtcctctttaatcatttaaattaattacacattgtaataattatattttagatacattgggttacataaactgtatcatcaaaattaattttatacctatttttaccttgcttttactttttaaaatgtgactcctagaaaaaccttaaaattgcaaatgtgactcacatttgcaactcacattattttattatattatattttattttattttatttattttcaagatggagtcttgctctgtcacccaggctagagtgcagtggtgcaatctcggctcactgcaacctctgcctcccaggttcaaacagttctcctgccccagcctcccgagtagctgggattacaggcgcatgccaccatgctcagctaattttctaccttttttttttttttttttttttaagt

SEQ ID NO: 42081 - DNA, 1047 bp, Homo sapiens
accaaaaccctgatctttttactttttccatagtttcgccttcgcaagaatgtcatacagttggaatcatactatatatatgtagcctttcagattggcttctttcacttagttattatacatttaaggtcctccgtgtcttttaatggcttaatagctcatttcttcttagcactgagtagtacattgcctggatgttccacagtttatttttccattcacctaatcttggttgcttccaagttttgtcaattatgggaaaaagctactgtaaacatttatgcgcagatttctgtgtggagatcttaacattcacattggttactttttttaaatttcagatttatcaatattacagagctattgcaagagtcatatgagaatcgaggatctggaaattctgtatgaaagaggtgccatctgagtagggccttaaaggatgcgctgatttggacacatagattggaggaggtacatcgtactgtggctggcacagtatgtgattttctgtttgattggagttcatggtaaatgtaggaacacggtgttatgttttcgatgccttcgatgctaggctaaagaagataggcttccttagtgaggccataggaacccatggcagatttttgaggtaggaagtgataagtaatgtcactcatttatttaagcagctagtcaagctcgcttagttccaaatagctgcttgaccttgcctagttccaaataattgacttaaaattaacaagttgacatttattaaacagtactttttacagtttaattgttcaccactttagactaaattttttctacaggtggtgcaagttaattagattttcttataatgagaaagaaaagcatttcagtacagtgtcttctgttctgatattcaaggtcatttcctatataaaagtaaaattctacacagcataaaaccatcctttttgacatttagggaccataggttttaataacattgaacaaagggttaaattttttaaaaagtttttgtacactctttctttggtatgcttcatctctttcatt

SEQ ID NO: 42082 - DNA, 1025 bp, Homo sapiens
ctttgtttctaaaagggcaccaggtctttcagaaagctgtggttctcagcagcaattttagttaggtttcgtttcatgttttctggtattctgggcctcccaatagccatttgtgcctaaaagagagagaggatgaggagatttgggttgcttgtactgccagcctggtggcactctggggatattagatgtgttctgaggatatatgtgtttatttaaatttaaacagaaagtatttcaatggatgctgggcgcagtggcctgtagtcccagcactttgggaggctgagttgggtagatgacctgaggtcaagagtttgagaccaacctggccaacatggcaaaaccccgtctcttaaaaaaaaaaaaaaaaaaaaattagccaggtgtggtggtgcatgcctgtaattccagctgctctggaggctgaggcaggagaatcgcttgaacccgggaggcggagtttgcagtgagcagagattgcgccactgcacttcagcctgggcgataagcaagactgtgtctcaaaagaggctaggcgcagtggcttacgcctataatcccagcactttgggaggctgaggagggtggatcatgaggtcaagagatcgagaccatccatggctaacacggtgaaaccccgtctctactaaaaatacaaaaaattagccgagcatggttgtggtggcacacacctgtagtcccagctactcgggaggctgaggcaggagaatcgcttgaacctgggaggtggaggttgcggtgagccgcgatcaagatcatgccactgcgctctagcccgggcgacacagggagactccatctgaaaaaaaaaaaaaaaagaaagggagagagggagggagggaggatttcaatgggacagaaattcaccaggtacattagaaagccttaacacttgagaatgtgaagtcttaaaaaaaatttttttaatagtttgggttacttaaaatgaaatactgtactgaagcagatagaaggactcttaggacctttctgtgtttctt

SEQ ID NO: 42083 - DNA, 1030 bp, Homo sapiens
tgtgtctagtcattagataattcagatttctaccttggatgccttgaagtgatgacaccttacccttgctcatctctctcccaagggaataaacctgtattttgctttcagcttctgcttagaggagctggctccatccagaacaattcccctcccactggacatcaaaagattgcatttccattggcaacaagtctcaacatagctcagaaactactgttgactacttgtctcccctataacaatattggatccattggagagtgaatcagtgtctccctcaagttcagcccactcatttagatttttcattttagactccgtgggaaggatgtcccagtgcagagttggcctctgtacccctgattatgtttcagctttctctaatttctctgctaacctgctgttgatgcccctaaaggcactcaatattgagtgtgctttataaatacatgaactacatgtattttatgaaaacataaactacaaatacgttaaaatatactgtagattcattactaaaaggcattatctattcagtatccttaatgtacaaataataaaagagatatgaaaccctgtgtctagagctaaaaatataccttgacagtacaaatacacatggctaaaaggcattatctttttagtatcttcaatgtacaaataatcaaaaggtctgaatacttctgattttcataatggagaaggggaattgtagaaactgtagaccaattagcttgatgtcagctcagaaaagattctagaaaatattattaatgaatgctttctgagagtttaataaaagaagtagtcatcactgggaacctgtggaggttcacttaaaatgttatgccatctatattccttcttctgcagcagagattgccaaactttttctatacatagccagatagtaaatattttaggttttttgggccatacagtctctggtacagctactcaactctgccactgtagcaggaaagcagccacataggcagtatgtaaacagatggatgtggatgtgttc

SEQ ID NO: 42084 - DNA, 1045 bp, Homo sapiens
tactttagttctggttttaatgatggaattcccaaaggactaaaattgttccaaatgtctgaaccgtgtctgaagttcaagaacagtatatggttggtctgaagactttaatcctagttggaaactttgaatgagaaacctggccttttagtcttgtatttcttgaactttctgttaacagaatatctcctcgccttttatgtagcccttaactagctgcagactgacttggtcttctctagtaaagcattttctatgtaaggtcaccagtaaatttctttttgtcaacagagtaccttcttgcctcctattcagccgttaactgttttgtactgacttggtcttctctactaaagcattttgtatataaggtcaccagtaaatttctaagtcataaaattaagtgatttttcttatttcccatctatccagtcaacagtcattttattcagtacctactgtgtgacttggtgctagggattcattagtaaacaaagcaggaatattcttttacaatgtggagctttcaattttctgaccctgttgaccttccttcttcaaatttcataaactcgcttacttctggttagtgaaatcaatgatgattattttaataatgattcctcccctcatgattgtgctcagggccctctctttccctgatgattgtttttcttgatactttgtggatgattttatatggctaagacttccaggttgtcatctgcccatacacagaggaagtcctgagggaacccacgagtttcctctcactgcttccgtgctgtgtaggcaccttctcctgttagaaaaccatcaataggagcttccatgatcatggtggaggcggcaaatagtgtgtattttgcagggataaggcagcgaggacaagttgcctctatctactttagccagaagattagtactaatttctaaaactttcaaatttgtctttaaaaaattgcacccatatagcatatacatttagttgtatgcacacacacactaaaataaacttctttgtatacagtgatttggtataatc

SEQ ID NO: 42085 - DNA, 1091 bp, Homo sapiens
attgtaagtatgctgttaaaacagaaatgttaacttcatgagtttaatgagtagcttcgatgatagcttagtgaagagatggaaggaaaggcaagtggggggaaatgagaaaaggagaacaagtgtttaatgaatatctacttgcagacttgaatgtcagcagcaacattctccctcctggaaaatgtctttcaactgtgcatcccattatgttcctgcagcccgtggtagcatgaagattgagacaaagagagtgtttctaagaaagctctcctttacaatataatgagatggaggtgggtagtttgcagagattgctggagcagtggtcaaatatgaaaaaaaaaaatccagcagaatgaaaagaccatgttaaccaggagatggcttataatgagcccagaaattgcatatcagatagccagctggctagcatttcctcatatccctgtgttctcatgcaaactgctaaaatgttctcctactctattttctcagcctcttaatagttctcatttctacctactgcattgaaaatatgaatgaaatggcaactctaccacttgaagaaataagaatgaagcccttttcagcaaaagtatttgcctaaacatggatggatattatttcaaatgcttttgaaaccaaggaaacttctgtttctttccttaaaaaaacatcttaactttcaagtctcagtttgactcacagccttttcagtattctgtggcctcttttgctatatagtttggacagactttgcttgaagtctccaagcaaaaaaatggaagtcctcccttcttattggaaattgataggggaggcttggcacggcgcctcatgcctgtaatcccaacacttgggaagccgacacaagaggatcacttgaagccaggagtttgagaccagcctgggcaacatagtgagatgctatctctaggaaaaaaaaaatagctgggcacagtatcgcatgcctgtagtccagctactcaggaggctgaggcaggaggatcacttgagcccaggagcttgaggttgcagtgagtcatgatcttgatcattaaggaagagtcttgtgaaattgttcaata

SEQ ID NO: 42086 - DNA, 2189 bp, Homo sapiens
acttctaagtggaaatgatatgggcacaacttacattagttctttgccaacatattatttacactgtgctttgtgatttgtgctgtcataatagctttttacttaagcctgtaaagaaggctcagcttcaggtaagtgaaatggtaatttttcaagtctatccttactcctcttcagcatgtctttgaaatgtggatggagggaaatcacctgcagagtccatgagctattagcgcaattgaaccataacatgaattctggtgtaagaaagctgaaggcacttttaacaatctagaaccgttttcttgaacactgtcccaagccccaacttcacagacttcctttgtttctatttagagcttttgtcaacagaggtaagatgctgttcattgtgtttgttaataaaatagacacctgagtatatacatgtgcaggtgtgtgtgcatgcacacacacgcatacacacccttagccaaaaccagtatattttactttcagttcttttatctgtagtgatacattcaagggtttaaaggagaagcctttgtttttgatctggttgtatttgtttatatctccttggttttgtgttccaaagatgtctgcttaggtctgtcacttttccaatccgtttagaagcagaagatttgagaaatgagaacagcagctcaaatcagtatttacataagcatattgcaaagaattcttaaagtagacaaaatagagaaggattggaacaaactttctacatttttgggagcttttgaataatgtgggtgttatacacacagagagacacacatatatattcattacatactcatgcccagctcatattctaaatataaatgaaagtatagactagttggaatcgatttgctttttttttttcttttttggcaagaggactaaaacttgttagagtgtgtgtaggattttcttttttttttttgttttgaacgtcaatgcaatgaacacattttcttttcaatttaaacgttttaggctgtattttctccttaaacatgtatttgaggtttcaatttgcatagtgtataattaagaacttagaggcagaatgatcttttaagactacctgtatgaccttggtccggttattttatgtctctgagtctatttccttatcaatacctacctattagtgttgcaaatattaaatgagataagatattttaatgaacacagaatatcactctatactaccaaataataagtactgccttctgttattcacacaatcgtgtgtgatggagcaaagttggtctcatcaggtggctgtgcaatgttgtgcaaagtaggttttataatttgtacctgtaggatagtagtattttattcttattatattcttcttgtagctttctcaggagcacagcttttgtatttgatcagttatttacattttttctgtatgtgaacataaaacagggtattcatcctctgtgattctatatgaacatgacgatgttggaatgaactgttctattagctgtccacatattatggttgttctctgtaatttgtcagttaaagttacttgtgtattttcttcctcagaagcatttgaagtacttggagcttttaaagactgcttagcagcttttaggattgggctgagagggaaggtacacctgttcaatatattccacttttatgaacttgtatcacatttgctcctttctgacaagaaaaagaaaaattgatgccctagcatatatgaacacagtaactgaaatcagtagaatgaaaagaccagtgagaacatttcgtgttggccagtggtctggtatgtcatcacaggaaagatctggactcattctttatagcacttgactccatgtggagttgggagctacttttggggcaactaaccagccaggcagaacttgattcctgctgtaagggaagtacagccttacttttttccaagtgacatgttctgccttctctggataattttcagccctcttccaggtttgaatctaactgtcttagaaccacagcctcaaatagcttgtatcctgcttttgtaaactccataatttctcttaaggattctcaactaataattttcatcttcctcaattgggtcacatctagtaattgacatactttaaagttatcagggaaaacaactcacttctactcagtgattaaaactgccgcat

SEQ ID NO: 42087 - DNA, 1050 bp, Homo sapiens
atatattgacaaaaatctattataatggaaatatttttgaaaatctaaattttatctagaaatccatgaaggatatccagttattattagggcatttggactaattgataaggagttgagttggaaaactactctccagatggagatttcaattcattttaactcacaagtatgacttaaatatctactcttagttcttaagttgcataacgtgtaagcatggctctcaagtcaaagatatgtagctgaatttgaagcaaagcaaactgattggtctatgagaagtgtaagtagagcacttggaagtataaaggagggtcagttaaatgtagcaggcttaaattgtgcagagcttgatggatgtttagatagtcaacaggaaagaaagggtggaacaagtttgaggcagggggagcaacaaagacaagaatacagagaaattgcataatagtgtggattgaattgactgtatgatgtctctggagaaagacgggacttagattgtcagggaatgttggttgattacagggaatgtgggataaagccagggaggtagtcgggtgagtggggaagagatggtttgtagagaaggacgtcaagtaaaggatcaatgactacaatactcttacttggagttagtccccagaagaggagatttgaatgtaggaaaatggtgagtttggaagttagaatacgtagttagaaatttaagtgtgtatttaagtgtaacttaaaatctaggacattaccaatgcctttgaagctacctgtgtactgtgcagaaacatctgggcaaacgaaagttgttgctctcccttatggtgaaacattgtcacattttttaaatgtaaccttcaaaatactacccttaactgtgttttttcctcctagtaacaaaaccagaatctaaggtgcattctgacagactcctccacgtggcgcagataaactctctaatttcaagggccttagacagaaaatataattgtatttcccatgtctaattcttacccttttttggtcatgtttttgatctgttaacattttaat

SEQ ID NO: 42088 - DNA, 1115 bp, Homo sapiens
ttgttcatgagacaggtcttgctctgttgcccaggctggaatgcagtggtgtaatcttggctcattgcagcctcaaccacctgggcttaagcgatcctcctatctcagcctcccaaagtagttgggaccacaggcacatgccaccatgcctggctaattttttattgttttattatttatttatttgtttatttatttattttttctttaagagatgggggtctctccctatgttgcccagactggtgttgaactcctaggctcaagcaatcctcccaccttggcctcccaaagtgctaggaggcatgagccaccacacctggctcttttctgttgttcattctcttcacccttgtttagatcctaaagtgacccaggcacttcaggatctgaagatagctggatgatgatgagtcttcttaaaaggtagcattttatagcaaacatgatgtagagccactgaagggttttatagttgctgtcctcaggggctggatttttaaactggaatatccatggggactttgaaaattccacctgctggggctctacctcatttgagaaccactaccttaataagttcatggccttacaatgggagtgggaggagaggtgactttggagcagacaattacaatgtgagtgacagttatctctttcatgagtactgctgtacaaactgggaatgcctgatctggttcttggagagggagtggaggttaacctgatttatgtaaagttgtagtggtcatggcgggggaggaggttgcattccatgaagcaccatttggaaagacccaaagtgtggggcctggttatttggaggacctggagatgttgttggaatgcttagaaattacaggaatgaggataggaaggagccagatcccaagtggtcttgacaagtcttgttaaagagttttcatttcatagtgcaagtgatgtagagccactgaagggtttcatgttgtagaatttattagatgtgtgtgagagatagctcactcagttagttttgtggaagatggctgtgtaagcatgagattggaggcaagaacttcaggaaaaattatgatgatgactgggagagaaggtggacaattctagagatgttt

SEQ ID NO: 42089 - DNA, 1033 bp, Homo sapiens
ctgtcattattattagtgaaggcatgttacatatttgtttggaccacagcatactttcaggaaactcttgataaacagctttcttttttatttattgccctgctttcttttgattgcttttgccgtagcatcaacctgcatcttattttaatcatctcctctctgaacattgatgattccgcagctttgttagaatacatcttgggagattccattttttaaaggctctttcaagggcatatggcattagatgattatgatatggcgcatttagaatatgccatgatttctctcctgctgaatccctcacacgtgtttgaagtaattattatcctctctgctagctcatgagacttgttagatcactatttgtgggtgtcataaaatgttggcaagaccccagtgtgaaacgcagtgtgaaatacatgtggttaaacttctctgattttgtatgtcaatcaaaacaaaatggcttaaaacagtagatgaatttcaaaagaaacttcaggattctagagcaaaaatgacacatggaactctttaggtctgtgttttgatatttaattcagggagtcatacacaggaggacgtatgcaatatagtagaatttagatgtgttatgattatatctgataatgttacaaatactgagcagctttttgttacatcatatttggtcccaaaatgtcatgccatgcaatgctgggggtgtttaaataccaaatttatgcatattttcaaggaagaagcagataatcttctaactatacagactgtgttacttatcagaaataatagtttatgaattgtcaaacagtgaaaattttaaaccatgtatccctgataatacttttatgtcttcattaagcatcactaatactgaatatgagtatctatctgatgaggaccttagaatcttattatagttagatataacaagattttatttattgtttttatcatggtgaagggtatataatgtcagcatgatctctcctttagttttacctcttctggtgttttgcagtcttaa

SEQ ID NO: 42090 - DNA, 1045 bp, Homo sapiens
ttgctgaaaattggaaactattaaaaacattcatttgctgggaatcaggagaggggagggaatttcaaataatagaggtttttttttattaaaaaaaaaaactcacaaaatctttgatccactgtctctcaaaaggcaatttgatagctaaatgcaagtattttttttttttttttttgagacagggtcttacttcttcgcccaggctggagtgcagtggcatgatctcagctcactgcaatctctacctcctgggctcaagcgatcctcccacctcagcctcccaagtagctgggtctacaggcatataccaccgctaatttttgtatttttgtagtgttggggcttcaccgtgttgtcaaggctggtcttgaactcctgagctcaagcaatccgcctgccttggccttcctggtgggattacagggattacagccactgcgcctagcctaaatatattaataagttttaaagttttatattatttccatttctattttggtagtaaaggtaaatgaacaagcattatagatcacagacatttaggttaaaaggtccaagctctttgagatgggatatactagggacacgttatcttttttttttttttttttgagatgaagtcttgctcttgtcccccaggctggagtgcggtggtgcgatctcagctcactgcaacctcactgcaacctccacctcccgggttcaagcgattctcctacctcaccttgccgagtagctgagattacaggtgcctgccaccacgcgtggctaatttttgtatttttagtagagacagggtttcaccattttggccaggctggtcttgaactcctgacctcgtgatccaccttcctcggcctcctagagtgctgggattacaggtgtgagccaccgcccccggccggggcacattgcctttataactctatttaattcccttgcttgcacgttgaatagatctaaatgactgggggaaaagtaaaaacatagtctttagtccctttcattgtggtaaattcactgaatgatagacggaaatttc

SEQ ID NO: 42091 - DNA, 1047 bp, Homo sapiens
ctaaaaggattgattttgctgcaaagtatatgcgattacattttttgatacctagtaagtagtagtggttgaggattcactggcctggccagagtgagggtgtatactaaatgtctgtggggtttcaatttcttcctattgaattcttttaaaatgtagagtctcttaccactgggagtttggggaacttcgcacagtggctcatgcctgtaatcccagtactttgggaggccgaggtaggtggatcacgaggtcaggagatcgagaccatcctggctaacacagtgaaaccctgtctctactaaaaatgcaaaaaattagccaggtatggtggtgggtgcctgtagtctgaggcaggagaatggcgtgaacccgggaggcggagcttgcagtgagccgaggtcgtgccactgtactccagcctgggcaacagagcgggaccccgtctcaaaaaaaaaaaaaaagaaagagagaaagaaaatgttgacggaaggcattctatctcagtctctgcaatgagccattcgcattttgtggaatcctttctggcattaattgggggacagaaacagcatctggcatatttacatgacagtagcatgtacttctcttttatatgtcattcattcgtacttccaataagttcttttctaatatgagcatacattgctttattgtgcttggcagatactgtattttttacaaattaaagttttgtgtaaaccttacatcaagcaagtctgtcagcaccgtttttccaacagcatatgctcacttcatgtctctgtgtgacattttggtaattcttgcactatttcaaacttttttattataattataactgttgtggtgatctgtgatcagtgatctttgatgttactattttagttattttggagtgacataaacctcgctatataagaacagtgtgtgttctgtttcaccaacctgcctttcctctctctctctctccttccctggccttcctattccctgagacacaacaatattgaaattaggtcagttaataacactacactggactct

SEQ ID NO: 42092 - DNA, 1029 bp, Homo sapiens
agcactagtgataacctggtgaaaagaaagaccatcaatttatgtgttccaaaaatgatgtcagcattgcaagaggagagctgactgcgtaggctcatcctcatttctcaggagagtgtgcctgtaaatgaccaaccaattacaagcagatgataatgaagcaaaatgatgtaaatcaagatctgaggagtgacatttatggccaagacttgataaatatggaattggagaaagaagataggaaacaccagaggaggacagcaaggactgtagttttttttactgtggataagcccaactccctactgtggcattgaatcttggccaggcaatagtttgattgctgatttccttagaagggaaggattcttgtgtaggattaaagtaaaagtaattccatgacaacttgttactgaggaagacagccaaatacatatttcatgagtaagcaacagtcattttggtggaatatggtgtgttacgtaaagcttggtgctagattaatgcccaggtgaccacttggaggacaatcagtgtagccctgtgaaagatacaaagtattgcctgcctaagtctcagtttctttgtctgtaaaatgtgtgtttaagtggagctgtgagacaatgagaatatatgtaaggtgcctggcacttaacagttgttcagtttctctctcttgagcatcctcaaagctccttttattgatttctttgatgctgaaagaaagagaataaattttgactgcacgatgagcttcattttttgaaggtgctgattctcacccccatttccagctacattgactatcgttagccacttgttacccatctagtgaagccatcttctatagtgcagtgtgtgttagtaggaaaggcttatttggccttgaagggctcgtttggccttgatccggtactgattgtggtttgaggttgagcatgttaaggatgaatagtagctggaatggtccatgatgtgtgcttagtatccttcagaatgtttacatagtcatatttagattgcttctga

SEQ ID NO: 42093 - DNA, 2245 bp, Homo sapiens
ggaaagcttcagtaagacacaactattaacataagtgctaaggattaagaaaaagatctgtcacaaattatgtctgtctgtaggaaggtaaagttgtgcctttgatatgacacctacccctggaaatcatattcttttccaagatataaacccaaatcagaatagggagtgagctgttaatatgaatactgaatctggacaggcacggtggctcacgcctgtaatcccagcactttgggaggctgaggtgggcatatcccttgaggtcaggagttcaagaccagcctggccaacatggtgaaaccctgtctctactaaaaatacaaaagaaaattagtcgggcactgtgctgtgtatcagtagtcccggctacttgggaagctgaggcacaaaaatcgcttgaacttgggaggcagaggttgcagtgacccgagattgtgccgctgcactccagcctgcacgacacagtgaaattctgtctcaaagaacaaaacaaaaccaaaagaattctaaatctgctctgaatagtagaagacaatgggagacatttatctttggtagcaacatattccaaagacttaagagtttaaagaaatcatcattttcctatcgcttccttcctttctctctcaatcctaaaatactctctgggcaatcaatttcggaattctttcaaggaaaggaaaccttgattcgtctgcctgttaactactacaaaatgtgtagattcctgctcttccatgttactactcagagtaataacgaaacacctattattgtcattatctggagaaaagaagctcctatactggattaaatgatgttgctgtgcccataagaaaggcaggtattgggcagtaatgaaggtatggcagcaggaatttatactttgtctctttcatcagagtagctcccccctcccctttttatcctgtaggaggaaattgtggagtgagagaagaggtctgatctgtttggggaaaaagtatcacagcctattagttagaagcaatgaaattgagacagctttgggactccattaagtgtgtggtgtttaggcagactgtgtccctgggtaaagtgtgctgttgaagaggatagtacacaatgaaataattgggcttgggaaatcaactgggcttcagcagcctcatatctccttgtggggaatgggtgagggagctacagctttccctcccttcttttagcataaaagctataccgaataaaatagaagggaatttcttgctgagtagatggactgtgaatatattttgaataacacaaacaatggagataattaaattttgtctggcacaggaaggattcagagcatgtcacttggaaccccctcatgccatgttcttctctaggcgtctggatatatggttgcagcaactgaataaaaataactcagatttgatcagtaatggcagcatctatagggacatgttttaatgcactgatgtgtatgaaattaggttcttaaataaaacattattcctggatattttcatttcaaaggataagctgaaattcacgaacagtgtgaactagactgacttttcccactgagatttactgataggcaaacttttgtgcacattgtggacactggttgagggtaggctcactagttttggtactattaatggtcagttgcctgtagaacttgtgaagtaagaaaaggtatatctatagcaagttcaaggttcagataattgttgttctctcttaagaaaaaggttttgagcggttgtcttctttacacttagtgtatgtaatgatagtttggctaaatatgaagaagaaagagaaatagcattactactgtttattaataacttttctttgtgccacacatttagctattcaggcactttgtgtttgtgtgtatacatatacattctcttatatacatttgcgacatgtggtaaaaggccctactttttggagtcagaaattgtgctcatttctgtatctgccaccttgtagctgttggctcttgaacaacaactaagcctctactttgaacatcaattttctcagtaaaatgagggaactagactaaatagttgccaaaattcttagtccacacacacacacacacacacacacccattttgtacttctaaagacactggaaagaagtttacggatggaggaggagccaagatggccgaataggaacagctccggtctacagctcccagcgtgagcgacgcagaagacgggtgatttctgc

SEQ ID NO: 42094 - DNA, 1041 bp, Homo sapiens
ccattacacacatgtggtaacattttaagactcttctggttgggctccttgagaaccaagctcgtgttcttataagctcatccttatattttcccattgtatgcatcgttgcatggcaaacacaggatttattcccaagctaaacctgtctcttggggtttcttatcttttacctccttggtgagcctcgggaagctagagcattgctctatggagaaaggagggtggcattgggaggaagggtaggaaaaacattattgggaagcagagaaagtcaatgtcaaatgaactgccaaggatgaatattatggctgctgggagcctcggagagtatcgtgtgtcttatgtgtctatttcacagtcggtgcttcatgtgagatggcagtctcgcctggaccgtgcttagtatcgatttactctcaggcatgccagaccattttagcattgctgaaggaaggaaatcctatgtatttccccttataaacagacatatcaaaagtgtatcttttaaacctttttctttctgtcttcttactgttctttctgtcttactgtaactcctcctccctccctgatttaaaagaatttttttttttttttttaaaagaaaaaagactttctggccgggcgcggtggttcacgcctataatcccagcactttgggaggcagaagcgggcggatcacgaggtcaggagattaagaccatcctgattaacatggtgaaaccccgtctctactaaaaatacaaaaaattagccggatgtggtggtgggcgcctgtagtcccagctactcggaaggctgaggcaggagaatggcgtcaacctgggaggcggaggttgcagtgagccgagatcgcgccactgcactccagcctgggtgacagagcgagactctgtctcaaagaaaaaaaaagaaaaaaagaaaaaagactttcttattaagagagcattatacaggccaggcgcggtggctcatgcctgtaatctcagcactttgggaggccgaggcaggtggatcacgaggtcaggagatcgagac

SEQ ID NO: 42095 - DNA, 1392 bp, Homo sapiens
actttgcacacttctagcccttccatgaaaatagaaggaccttatttgaggctagttttgtggtggtgggatctgagcactgctgagtgttaacaaaagggaataaattgatgccaaatttagagaccaaaaatgccatcattttcacctgcctgaactcttctgttgttttccctagttgctgccttgcgctttttccgcagtacagggagagaaatcagttgtctggctgtctaaactcacggcatctgcttagcagtttcaccagctcatagttgggactcatccctctgtcagaatcctttgctccattagaagggagactgggaccacgttcctgaattgatttgcatacttctacgttacctagctcagacaacatatggccatgtggagcacttggatttatttctgtttcctcaaattaaattcctaaaaaattggataactccacagtttgtttggtgttacaaaaaattttagttccttttttggtcggcaaagcaacacaattttggcattaaaaaaaaatctctggattactttaaaaagagtgttgatttgatttgcttcccctcttctcttacccctttcaggaaaaaaaaaaatgtatgttgaatcttaaaacactgcatcatgttgcaaaatgtccatttaggcacactgaatagaaagtatcatcgagtcatttttattcttgtaattcagtaatcttgtatcttttgcctttttctttttccttaatgttaattgtgtaactaaatgtctcaaacttgggacttttcactttacacatccatgtgtaaaaatacatagatacatacagtcagatagaagaaataagactcagtgttaatagatcagtggttggggtgggggaactatacttaacaatagtatgttgtacatttcacagtagccaaaagagaacaattcaaatgttcttaacataaagaaaagataaatatatcaggtgataggcattctaattactctgatttgatcttcccacattatataaatgtatcaaattatcacgtactccccattaataatactgtatatcaacgaatttttttaaaaaaagaaatagatatcatacaatgaataactggattaatgtgaaatgatagaaaaagttaccattttaggctggatgtggtgacccacgcctgtaataccagtactttgtgagtctgaggcagtaggattgcttgaggccaggagtttgagaccagcctggttaacgatacaagaccccctttctaaaaaaaaaaaaaaaaaagccaagtgcagcagcatatgcctgtagtcccaactactgagggcatagaggtaggaggatcatggatcactggatcacttgaggagtttgaagttgcaggaagctat

SEQ ID NO: 42096 - DNA, 1050 bp, Homo sapiens
ctttatttatggacacaaaaatttgattttatgtaatttttatttgtcacaaaagataattctttgatttttttcaatcatttaaaaatataaaagccattcttagctcatgggttatacaaaaggcaggggtgtggatttggcctacaggctgtagttgccaacctttcctctgtacctgctgcatgccagcgtcactcctcattctttagtatcagacgtgtgttaggcagggtgctaagcatcgagggatattcagagatagagcaaagtcccttccctgatgaagcttacagttaagctagaaaggaaccatagatgggacagagacacataatattagatgttaaatggtgtccctctgtgacaaaagccaccattgctttacaagtttaagagagagggaagtcacttcagctgatttaggtgatctgctaagtaagacatgacctggctagctacggatgcatggaaatgatgggatatcagctggatcctgaagaaaaaggctgtggacctttgaaaaggtaacagggcataatgcctccttttagaggaagggggaactgaggatggcgaaaatgtcaaccatgagtcacttattcctatcatttttcccccaattctttctttcatgtcttctcatgaaaatttcaaacatatagcagttttaaagaatgttacagttaatacccaaatactcaccatatagattctaccattactattttgctatactgttttattgtatatctatcctatcctcttttgttttagaattctggtctcgctctgtcacccaggctggagtgcagtggtcactacagcctgcaactgctgggctctgcctcctgagtggccaggaccctatgtgtgtttcaccaccatgtttggctaattgtaaataatgttttgtagagatgaagtctcactatgttgcccagagtggtctcaaactcctgggctcaagctgtccccctgtctcagcctcctgcattgttgggattacaggcatgagccaccacacctggctgctttattatatatctg

SEQ ID NO: 42097 - DNA, 1042 bp, Homo sapiens
aggtgacaagagcagaactgtgtctcaaaaaaataataataaataaagaatctatcatttgggtttggctttttatcatcatatattttgtctttacttgcttagtatctagcaagaatataaatgcaattattttgccagagaaaagtatatgtttgattaaggaaaacataaaatacaactttgtttaaatatctgtatgtatattcttaaattattgtaaaattaaattacctatggattaaatttttcacattaacattacttagtctattatgctccagcattttacatatttatgttatttaattaaaatctttgcagtagatatttcccattttgaagaagaggaaactaagacagcgaataaaataataaacaatattatttcttacctcttactgttgccacttcagtgtcagggaggaagagggatagcaaatgtaggaagggtgtttgcaaggtgagtgaaggtgaagctgctttgttacaagttttcttatcaagaaatggatagaacataggagtagagaagttcaataggaacatgcaaaatttgtctattgtaaaagaaggaagaaaactggagaatttaaggactattttttaacatctatgattaaaatattatgaaacaatatctttttaaaaagtgatatttttcctctagtataacacaagttgttagaaactaaggaatcaccctatcttctttagtaaaagcctacaactggtagagtttttttttttttaaggatctcaagatacttcatgaacctcaaaagactttaagttctctgcaatgttaggaaatgacttcatgaatatcacagttcaaggttctgctactgcttttagaagcccccaaagtgtgaagacatctagtacagtatacagtaagaggagaactggcttttattgctcacaataggaatgttcccatctatctgtttgcaaaccaactcataaaatatttgaatattcttcactctgctttatgataatatttcttggcttggaaatttgcttttttttttttttt

SEQ ID NO: 42098 - DNA, 1023 bp, Homo sapiens
cacttatcactattcgatataacattttatattcttcaccaccaacccagactagaatgtcaggtccctgaaagtgaggtatgtgccatactcaccactttctccccagtatccagagtggtgtgtggtacatagcgaaactcagtaagtattattgaatgaatgaatgaacacagatgactagaaaaatttctagaaaattttaaaacatgggcatattagccatgaatttaatttatagttttgttgttttcttttgggtattcaaaaatataatttcatttgtttatatctctaatgagatagtacagtatttgtgattcttctagtgtgatggcatgtacagtttcattggtgagtatatgtgacctactgtgccaggtggaaatggagtgaatgaacattttggggggaactaaaaagcaattttcaacctttttgataagctaggttaatactgtcttctcaataaaaagtactttttcttcctcttataatgttcatggtcttcatctgtatgtgtatattgccgatttaggaactaaagccgaaatggatctcagactatttcccacagactggtagctgtatcccctctgtcagcaagtatttgatatcttcagtgaaaattgtttctttttccacttttagcttctgtttagttttacaagtctaaacaatttttggcaagtgctaggggctcacctgatgcactttttaatgcattccactcctcgttgttattttctctgtccagtacacatggtgctccttccccctcattgccatcccactttggcagaaagcattatggatgctgtgtatgtagactcatcacccaagccagcatgcatgggagagggggcctctagaataataattgttacttggtgttctctgtactactctgtttaatctccctgcttaccacttactgccttcgtaaagtaagctcaatacaattatttattgcaatttgtgtagaatgtcagatgtggaacagactttgcacactcatcagat

SEQ ID NO: 42099 - DNA, 1060 bp, Homo sapiens
ataattttatgaactacaaaatttacaaaaatgttttacaaaccctctgcctccccagtatcttctccagcccccatgtcttggggcaggccacatcaggtctctctggctgcttcctttcccaggccctactacctactctggcccatcatatgtcttttgagaagatgatttttcagttcttttctttagtttagaaaatcagaattaattgattaatttttaaccccttctacctttctcctcccctaccatatgaattcatgcagagccagccctgcaacctaattttttttgttttgtttttgagacagagtttccctctttttgcccaggctggagtgcaatggtgcgatcttggctcactgcaacctctacctccggagttcaagggattctcctgcctaagcctcctgagtagctgaaattacaggcacccaccaccatgcctggctaattttgtatttttagtagagacagggtttccccatgttggccaggctggtcttgaactcctgacctcaggtgatctgcccacctgggactcccaaagtgttgggattacaggcgtgagccaccatacccggcccctgcaacctaatttttaaggagaggtggtaaggttcattccatgaatcataccacttggaattcttgaaaaattaattgcatttattgcacacctactctctgtaaggcaatgtacataagaatggaggagatactaagaaaattgagtcccactcctattgccgatcgggaaagtacggcataagcacatgaatatttagaggtcctgtggtttaagtaacggtaggtaaggaatcattgggccagatgggatcagtgactcactgaatattataatcagagatgtgagtgcagaataaggaggagatatgactggggactggtgtagttcttagaggttgcctgagctggctagcgtgacattcctactaagcaatgagcctagcaaccagaatctcccagccccggtagccaaggagcacaggtggtaggctatagaaggagatttaatgcaacacagctgggttca

SEQ ID NO: 42100 - DNA, 1051 bp, Homo sapiens
ttattcagttggtctgctcaaggcttgcatgccatttttggcattgaacatgtgatcctctagtttaatatagcatgtgcaatatggtaatttaagaaaataaatgtctgtatgcatagaaaacacagcatcctcctttaattcatgggtttatgggagattacagttttcttttagtttaagcctacaaagtgtttatagtaaaaaagtttcaatgaaatgatttccaatttatatttccttttcactcaccaccacaagtcagaaatcaaatcttatgcttagaagaaagcaactccaggactgtatccacttcgggttttgaataacaacagtaaggtggtctgactccaagattaggtccttgttgtttggacatatctaacaaggaactccatccccaagtgctggagaatccatgaagtcagtggtgtcttatgaagcttgagcaattgggaagccttcccagtcagctttttggcctcctctaggtcttaattacaaagcggattcatggtcctgcctgaaatctgattgagacatagactcctctatcccaaatgatatcattatcaacattggttccctgtggtacacatttgtcatattcattatgatttgtacctaagattccaggccacaataatagggtaagagtgtataatgggaaaaataacacaaatcgttttgattttctttaaggaaattcattgccttaacattacatacttgcctttgttttaaaactcactctatgccttatctaagaggagtcaatataaaagattttaattttagccccatatgctgtagctatatataaatgttctgtaaaatatatcccctagataaaagtacttactacttttttgaagttttttttaaaacctttcttttggtaaataaaagtctttttagctttgatgtgactattacacccttggtttgggttctttctccattccttcatccctagcccctgtgggacccctgtaagaaaaatgggaggggagagaagcatgaattccttaataagtcccaaaggtaatca

SEQ ID NO: 42101 - DNA, 1879 bp, Homo sapiens
agtggtgtccacatctaaaatggctcctgtaacctagtgatgtgctcatgtcattgatttgagcagttgtttatgttatggcataacaagatgtcattttgtatctactctgccttagtcctggaatggaaaaaagaaattttttgaattcaaaactgttgattctttatttaaaatctttaactctgttagtacatactaggtggtgttgattttttttgagactgttattcttcttgagacattacatatacttagcgtgtctgaaatttcaatgtctgaagcatttccaatgatttatgtatctgattgttgttatctgccagctttcactcatccttttgcctttccttacttgtttggtaatttttactgtgaattgcttatttccctgagaactttgtgtgagtattgcttgtttttcctggaatttttaggaattctttgacacctgggagaaggtggtttttaccagatatttgattatttcatgcctctagtgaaactacctgtgtgagaccatcttatattctcagggtgaggtttttcttttcagaccattttatgtaaattaaggctttaaaactctatgagagtcagcttgtcattatgcattatcagaagagattttttttttctgccggcaatactatttgagatgagaaattttcattgcaatttacttgagggagagggtagtttatttttagttcatctagcactgaatgtgtagtaggtcttttgtgtatagctctgttgggatcttctactagatgtcttacctggggtgggggccatgtgctatgctcttgatccctggatttgtgaagacttgaagccaaagctgaagttctaactagtttgggaaatattcataagaggaaacaaaaactaaattttttttcttctctttgctttatttttgacctgagtattgcttactttctgtctagctcatggatgtagattagaataatattttaaacttcattctgtttagtttttaaatcgttttcagtggaagtatcagtcttagtacctaatctcccatggcataaggctggaaatagccatgatcctgccaaacacggacactctgcaacctggaacaaaatattctactctaaaaatcaagtaattatgtcttttttcaataaaatataaagtataatcattaatgtaatttacttctttcattccagtcttcactcatgctttcaaacatagattatattattccaacccttcttaagtggaattagtatttcattattccataaggttctacaaatacctacaaagaccatcatgaattccaggtgctctgtaacctgatcaggttggagaactgctgatgcaaccaaatttaatcacttaatgttcttactaagcactcatttgtttttctgcttctatgacttgctctcactgcttgctatcccaaacactgtccgtttgtacatgttccaatgtcaccattcctttttcgggcaaatgcttcaaaagctactgtttctataaaactttcctttacccttctcttttgacttgttatgagctccttttgtagtttgtaatctccttaagagcaaatttcacaaatgttatatttgtaatatcttatgtagcagagtattctcacagtctagaacagatggttcttctgtatctgttgaaagaaatgggaagatagcaaagcaacataataggataattttatttttgcctactagactatctcaggatgtatgtgttttaaatcctaaaactggttagtggtatttcagttgaaaaggtcttgaccctttcccttctaacataacaatcctcatcataagtgagagagaagattgggtgagtagggctcagtgggggaagc

SEQ ID NO: 42102 - DNA, 1690 bp, Homo sapiens
gtgtggataagccccttcagtgatatttgcaaatcaaatcatatctgctttttgtgctacattgtcctcaaaatcttctgattggtttggttatagacatccctatatcagctttcctgttctctttcagtttaaatatctgtatgctgtagcaaattgcattatgaaatcctctcacatttatcgctgtttagtgcatggaaatggcatttcctcattaccagtcaaagataaactctaaatgtttctttttttttttttcctgaagtatcaaattatgtattcaaaaaacttttctctatagcattatttctctgagctgtttcttttttccctcctgaatgctgacaccagatgcagtctgcatggacattagtcccagggaaatcttgtcttctacccaggacaaggagattataggaagcaatgctgactcttgttgtagattcacaatgtgctgacacgataataggacatgaatgggcttttggaatgccttttcctttgagctgggctgagagggggacagaggcagacagctccatggcctgaatttcgttagctgtgtgacaatgggagagataagtagatgtgacagttatgaatgatcctctgtcatgcactttcacgttcagattcagataaactgacactgctgtcaaacacaagctatggagagctgagacctctgatgaaccttctaatatggtaaatgggagtcttaattcttcattaactgaaaaaaggagatttggccatgtaattttctccttgctgcctgttttaaagattccaataacccagcatttacagttgactaggcagggattgcttttccccccctacacttgcaacatgcagactgtgaaatctgaggaaacgctgcttaaacccagacttattgccttggttatctttaatgactttgaaatgtattggcctcattatggaacagtgcagttatcaattcctctaattaggtgatgtgctcccataagaaatttaacattaaagcacaaaaatgaactcgttagaggcatctattgctgggaacttcagtatcaatggtgaattgaagatactgtgtttcgttaccaactcttctgcaccatacatctgactcctccttgaagactagagcatgggcatttttttctttttccttaagggtttaatcctcatatagcacctctaacacctttgatgacattttagtgcttctggatagtaaactgtgtgcctttgactaaatcgactaggagtctagggaagggaggaggtgagcagtttacatttaaatgctccacatatcagcccatctttctttcttggaatttaacccatggctatttactctttcttatgtaagtccaataaacttcctttctataagtagcttagtacagtctttgtttttatcacgatagggaccattatttgtttattaaatagtgatgctgtttcactcataaatatttcagctgtatttctagagaagtaggatggggtttctgggtttaggcttcagtgaagggactttaagtctcttaacccttctttacctcaatcatccatctgaacaaaaaaaatcattatagcctcccctttggggaaactacatagtttaattagtgttttctaataacttacaaatccttagagaaaagttatagtagaagcataagaaatt

SEQ ID NO: 42103 - DNA, 1041 bp, Homo sapiens
acctcagcctccaaagtagcctggacctcaggcatgcaccaccatgcccagctaacttttgtatttttttagagacagggttttgccatattgcccaggctggtcttgaactgagctcaagcaatctgcctgcctcagcctcccaaagggctggggttacaggaataagacactgtgcccagccttcaatttttttgttattgttgtgagtgagtgagtgagaaagagagagagagcgcaggttgatatgctcaagcttaaggtctgtaatgggtttaaagctccaagttttataatcggaatggtagagacggaaaggatctctgatctaatccatcctccatttcataggtaatgccatggaggcctgaaaaggttaaggttctcaaagatcaaaaatgtatccttttggaaagtattatagtggttcctcaaaaaaatttaacagataattaccatatatgattcagcagtcacacttctgggtatataatcggaattaaaaacagggacttggacagatacttatattccaatgttcatagaagcattattcataatagctaaaaagtggaaacagtccacatgtatatcagtttgtaaatgaataaataaaatgtggtatatccatagaacagaatattgttgttacttttgtttttgagttgcattttattctgtcactggggctgaagtacagtggcacaatcacacctcgctgcagcctcaaactatggggctcaagaagtcctcctgcctggtactacagacatgagctaccatgctcagcctggaacattattacctagccttaaaaaggatgataattctgacagtctgcaatacgaatgaatcaatgtaatttgaaaacattatgctgattgaaataaactacacacaaaaggataaatattgtgggatttcactgctatgaggtacctagagtagtcaaactcacagagacaaaaagtcaccaggaactgggaagaacagtgggatagggagttacccattcatgggcacaaggtttcattttgggat

SEQ ID NO: 42104 - DNA, 1034 bp, Homo sapiens
caacctgttaatataggtctctcagttgcaggcttttcttattctatggattgactaagaagcccccaaaaatccttatgaggaaagatagagtcatgtgtcataagagaaggctagtaataggcttgagtttcaaagaaaagagtttatcagactgaggagtaaagaacgttggtaactggccttcaaaagatagttaagattgcatccggaaagatgtggggaaggggatgtaaaatggatagcaaggcaggatagcaacagggcattcttggaatagacaaccatccatttgttctcagtgtgaaatatacatggttttgtaatgggaattaaggccgaaatggcatgtcaaggccagtagttgagagctttgtaggtcacattgaagagtttgtatttggagtttgatggactcctaggatggatctgtccagtggacaactggatttcagacctaggagagcctctatagaggtattaattgaagcctttggatgatcgagattgtgaagatagaatataagacagagcctcttgagcatttctcccttagtgagaagaaggtggtgatacacagaaggaaccttcagcaaggtgagaatgatagataaaggatggactttccccaagaaacctggcaagggagtgatcaggagtgttaatactgtcacagagactttaaagaggatcacaaatgaggggaaaccttggattttaatcttgactcttagtactcaaggaaactgcatgttaagatgtggtaattaaagtattaaaatattctaagggtcccttgcactctccctttctgtgcccattgtgacagcatggtcacatcattgcttgaggcatgcaagagtgctttattgaagatagtattacggggggagattttattttgatagagagtaacaaatagactaataatctatcttaaagtaagtatcttaaagtcagtaggcaaaggagaaaaaaagatattgataaggaaagcatctgcaggacagattctagatttctgttttttgttg

SEQ ID NO: 42105 - DNA, 1030 bp, Homo sapiens
attgctgcctacataatattccacctctttggagcatttgcattggagtgaccagtggcttgaagctctgtatggtggagtgactgatggtagttgaagactgcaaaagtaggtatctgagggctggaaggcattcctggcacccctaaaactaccccactgggggccatccaagcctgtgattaacaaaccctagttatttgctaggtagtttccacatggcatagtaggatatatatatgtgaggcacaatacagtgtttatgtgagaataatatagattatttgaatctaggctgcagaacctacctgaaaatgggttttacagttttgtgtaattgccttttctttgtgtttgcatagaaggcattgcatagctggaagatgatggcaattataatttattatgctgtaattgttacctaaatgtttttgaataagcaaaaatcacatctgtttaggaataagttgcacagcaagagaattccctttgaaatgaataccgtgttctcatattctgtaactgtacacataaaacaacatatttatttccccactgagtccattacattcccaagtcaaactgcatcctctcttcctttcccatattaaaccctttgatttaatggaggttttaactactggttctttagggaattttcagtaggctttgcacagattaggttattggaaagtatagttatttgcttgtaaagtggcagttctgtgtcaaaattgcttttctctggagctgcaacagtaaaaacgataagcttctgctttgcatccaaaatgccctgatgttcctagcatgatcgtttttcctttgcttcttgctcagcaccattcggtcacaggctggtttggacaggcgaatatgagcacatgtagcccagaggactttgatatccagtggtgataatagacaaggcctgtcttccattctggttgccactggtctgtgacaaccagtgttccgggcatggtgagcatagtgctgcttcccttctccgttaaataggaaatgcata

SEQ ID NO: 42106 - DNA, 1052 bp, Homo sapiens
attaacaattttaaagtgaacagttcagtaggatttagtatatccacagtgttttacaaccactgcttctatcttgttcccaaatattttcatcactccagagtaaaaccccttacccattaagtagtctgtacctatcccttcctccccattgcccttagtccccagtaaacctctgatctgtgttctgcctcttcagatttatctattttggaatcatacactctgtgaccttttttgtctggcttctttcacttagcataatgttttggaggttcagccatgtatgtgtgtataattactccactcctttttatagctgaataatactccagtatttgtatataacatgatttgtttatctgtacatgcactgatggatgtttgggctgtttataccttttggctattgtgaacagtactgccatgaacatgtgtcacatatacttgtttatgtacctcgttttggttcttctgcatatatacctaggagtggcattgcaggacgatatgatacttctacattaaactttttgaagattgccgaactattttctagaatggctgaaccatttcaagttcctaccagcaatatatgagggttccagtgactccacatcacttccaacacttgatattttcctttttcttaaaatagccactcttatgggtatgaagtggtacctcattgtaaatttgatatgcattttcttgaccaatgatgttgagcatcttttcatgttttttggccatttttatatttttttttagagaaatgtctactcaggttttttgctcatttttcaatttggttatttgtctttttgtcattgaattgtaagcattctttatgtattctggatactagatacatatgatttgcaaatattttcactctctaggttgtcttttcactttcttgataataaatgccttttgatgcacaaggtttttaatttgatgaagtcttagcctgtttattctgttgtaacaaactacttgacactagagaatttataaacaaaggaaatttatttcttacagttatggag

SEQ ID NO: 42107 - DNA, 1064 bp, Homo sapiens
gcagcagaataaccccaaaaatggtccttaatccaaacaccgagaagtcaagttataagtaattaagaatacactggatggaacatacctacatggcagctagcatctgtgctttccagaggttgctggggacggttagttcagttctcatttttgatcctctttggaaactcaggagttaaggtcagcatcctcagtacaaaggtacttgaacatgtatgaatctttgccttcttgaaaactttttatcttgggaataaggaacctgatacaaagagaatctctagtatttcattccatcgagagaagttttgacatttacaattctgctaatttcacacatcatttcgcagcatgcaggattttggcgcctgccaaggggactgcaaattctttttggaaaaagtacttttttgggtgttggaagagttttgagttacagacacatttctttaatagtgttcttgaaatgtccatgtggtcttaatatgtaaatcatatgaaactcaaaacccactcctgaacttactcttccaagaaagctttaaaacagccctcattctaatagtaaggctgttttcctcttttccaatgtttatgtatactgtataatgtttactgtataatgagtttattgtataataagggactctgatttattagctcttcattattctcattctgtcagcttcccaataaatgctacaacccttggcagagacatgagtctcaatcaggtgatatcattgctttttaatgaactcttcttaccggagtaacagcattacatgtgaaataccttatcctgcattattaacggaccgcagcataaaaggcacaaaggcactgagaaggttgcactgaaaaatggggcagaattcattaccaattcgatatactgtcagctaacagtctttgattatcatatttacccttctgaaactgtgaaaaatcatgggcggagccgctgtgaacaatagcatgtgtaggcattttgtaaatgttgccttagttgtttaatgcccaggctgactgctggaatttaacacagtgacaactttctc

SEQ ID NO: 42108 - DNA, 1104 bp, Homo sapiens
tcctcacctcactcactccatacatccaagctccacccatactttttgccctcaccagcccagtaaacagctgcctgttgaccaccctcaagcctataggtgtgtgtaccaacagcatggcctgcccttgggaggatggcttccagggtaggaacctgcctatgcaggccctagaagcagcttaggccatctgggaagaggagtcctgtctccttggtgtgcaccacatggtcctaagggggaatgtgtcagctaggtgggcccatccccacgacttcatggattcttgccccatgtggagggacacagctggaggggccaagaaggatccccttatgcatggtctcaaggcaggggctggatctaacctgtattgcctctgccttttcatttcagtcttcataacctcacacttcatgtcctgcaaaaataaaatgaaataaaatggatccagctctccttcagaaaagctaaatggatgagctagttaactcatcagtgtctgcggacacaaggtgtgaaggcttagtctttagattcaatactggaaagtcagctggggtcttgtgcaaaagatgtgatgcattttgtgtaagaagtctgttttttccattagcatttaaagtatagcatactgctaaccagacacaaggaatgctctactatacagtgaaagaactatgcaagggaaaattgcagctgaaggaccaaattaggaatgttttcaatttcaagagtccagagaagaaacaaagcattatattgacatagtttgaacaaagtaaagcacttcgaaccttgctaacatttttaaatacacctttgttaaacctctttaaagaatgacgataattgcgttgttgttgttagtattcctaatgtccaaagggttgctgtaatttactctcccttcaaatttgaatatggttcataggcttctgtcttagtccatttcatgttgccataacagaatacctgacactgggtaatttataaataaaagaggttatttagtacaaggttctgcaggctaggaagttcaaggggcgtggcactggcatctgcttggcttctggtgagggccacatgctggtcaaaacatgg

SEQ ID NO: 42109 - DNA, 1032 bp, Homo sapiens
cagaaagggagaaagatgttgaattgagccaattcagggagtaagtaatacatgctctctggttgaactgatttttcatatggctaggtggctgggttctgcctgtgacttgttcaactctgcaagctactaaatagaataaaacttgctgaaatcagagaacttcaagaagataagttttatgtatatgtatatgtatataggcatatattcatatacatacccatgctctcacacactcatacacaaacttaaaggattctagtttagggtagacttaaccctttgacagttcaaagagagaagttagagtctacaaagtgattattatgtaaacccaacagggcctttcctggaaataccacaaaaatttcttagaattgaaaagatgacaaatgctgatttatgcagaactcgggacttcattgatagagcactgtcacttactacttccatcagcaggaatggttccttttaacatcagattgggtgtttacatggatgacaattagggctggtgaaatagttcaaataaaagaagaaccagaccggcatggggagtgaacctagttagttcccaagtattaaatacctgtcttccctcccttgtctctctcctcttcccttcctttctccactttgtttctcacttcactccctttccagactgttcttccctgtcagggaaggctgaacagagattgaaccacacaatacattgagattctgcagcagagaagacattcaaatcctgaaatactgtagtgggatctggttttcaaatgtttcttccccgggaaagtgaaacattccttgcagtcttataaaataagtatgttcgttgatatttcaagcaggagaaattcattttaagaagttggagtatttatatgtgacaggatagtagttcctctttctctcccccgtccctccctccctctctccttcctcccgtcctctcttccttcctccctccctttctctctcctctttgattttattttttaatcagaaagttctttttaaaggaag

SEQ ID NO: 42110 - DNA, 1043 bp, Homo sapiens
aaaaattatggaaaatctgaagctattgatatacctaatgctagatgacacattggtgggtgcagcgcaccagcatggcacatgtatacatatgtaactaacctgcacaatgtgcacatgtaccctaaaacttagagtataatataaaaaaaagaaaaaaaaaaaaaaaaaaatctgaagctattgatagtcttatttttaattgctctaaaataagtattaatttcttagaaagaattatttatttaaattaagatatttatgcagatgaaatacccaaatattctggtttgctgtttatttttatcccataactcaacgggtatttatataattaattatacttttcaagtttttcacccctatgttctacatatattgctacccatgtactccatactctattcttttatgcttctttgaattctgtaatttaaaaaatcaaagcaaactaaaaacaaaacaattcagctcaaataacattttttcctaaaaacctaagtctcccagcttctttgaactcctccttctatggactcttacagtcctcctctagcctatttatctcatttgttaattagctagctagcttttatgctatgttttattattagaatcctgtttcttttagtagattgcaaactactcagagccagagaccatgccttgtgttatttgtgtacacagctagcagagcaccttacacatcataggaatgggatctattttagtgattaatctgttctgtttttatttcagcagggtttgtggaagggcatggccaagttgatggtgatcatatgccttcaaatatcatgttgacaattatcacgttgatatggaaggaagggagactggcttactaaaaaagcattctagttgtctagattggaaaaaaatgcatttagtctttcaactgtctagcacctagtaggcagtcagtaaatagaagcttaaaaaaaaaaaattaggccgggcgcagtggctcacgcctgtaatcccagcactttgggaggccaagatgggcagatcacgaggtcagg

SEQ ID NO: 42111 - DNA, 1079 bp, Homo sapiens
aatacaggatgcaagtaggtttggcagcaggtttagccagaattttgtcagaatttgaagattttggaatcataatcagatagccagtattttctctctcccctcaaaccaaatgcattgtgcaagaacttgtgttaattatccctgttaattacagtgataccacctcagcttttccaggctcttttttgcagctgtctttgtggtgatttcttgtcttaccacttgctgaccaatggaactcaccattcttgctaggttctcttaaaaagcagcataacaagaaccggtcgggagtatgttcccttgaaaaataaaaatctcagcatcacacccaagtaaaagccatgtgccttattgaagttctaagtctatagtgtgtttgtgtacatgcccgtcacataaagtgattgtttattagtttcagtggatttttttcctagaaagatgcataaaattttaaagtaaaaagaatatagtgagccaggtggggtggcccacacctgtaatcccagcactttgggaggctaaggtaggaggattgcttgagcccaggagttcaagaccgacctgggcaacaaaatgagacctcgtctctacagaaaagtcaaaaaatgggccgggcgtgatggctcatgcctgtaatcctagcactttgggaggccaaggcgggcggatcatggggtcaggagatcgagaccatcctggctaacacggtgaaaccccgtctctactaaaaatacaaaaaattagccaggcgtggtggcaggcgcctgtagtcccagctactcgggaggctgagataggagaatggcgtgaacccgggcggcagagcttgcagtgggccgagatcgcgccactgcactccagcctgggcgacagagcgagactccatctcaaaaaaaaaaaaaaaaaagtcagaaaatgagatgggaggatcgcttgagcccagggtgttgaggctacagtgaattgtaatcgcaccactgcactcccacctgggtgacagagcgagaccctgtggaaaaaaaaaaaaaagaatacagtggctggaaaacaaaacatcacttgaaaatttt

SEQ ID NO: 42112 - DNA, 1050 bp, Homo sapiens
taaatgtcaaagggaaacatgatttttccccgtgtttaatgctcttgaaattttgactgcttaggagaaaaacttgaaagttgtggagatgttgcctgtgtgtgcagacatgtgccacccatgcttatgtctgtagataccgggcataagtatacatgcagtacacacatacacaatctcacagaaatgaatccttctccttttcctatcaatcttttaacatgactcctgattgcagttttttctctctgtgctgttagcagtaggaacaaccacctggagaaggtgtttgtgctcctgggctttgctttggtactgtgtcctgtacccaggacagcctactggcacaatggctaactgcaaatgcagtactaccgatttttcacacctgctttccctctttccacacactttttggtgcattcccttttttgtttagagacagggtctcgctctgttgcccaggctggagtacaatggcataatcttagctcactacagcctcgaactcctggactcaagcagtcctcccacctcagcctcccaagtagctgggactacaggtgtgtaccaccatactcagataacttaaattttattctgtagagatggagtctcactatgttgcccacactggtctcaaactcttggcctcaagtgatcctcctgccttggcctcccaaagcactgatattacaggcatgagcaaccatgcctggtgttcatttttaaattcatgctaaaagttgttgtgtttgatcattttatgttcacttgtgtgggaaggggcttctaagaaaaggagcaaagaaaaccagcaaagtcttatgttcctaactcaacacaaaccacatgcctaacttggctcgtgcaggagtcagaaactgctgagatgtcaaactgaagactgggcatgtggtttgtgcttacagtggaagagtcccatcccttggttggccatgtttcacactcggtaaggtttgtgcaccctcagcaacattccagaagctcagaaggccctcattgttgcttgtggaacccccagcctta

SEQ ID NO: 42113 - DNA, 1056 bp, Homo sapiens
gggaactgaatcacagaggtattaccgaacatgcccagtcttgctcctggttaatggcagaggcaggtttcaaacccaggtcagtgtggcagtgctcttagccgctaagctggactctcccacatgccacattccaataagcctgagagctgataggaaaagaccagtgaaaactgtaatacgttggaatacaaggaaatgttcaaagagtattttatcactttctgttgtaactctaacatccaacaaaatatcactcaaagaagatgttttgtgatgagctttaattaattaataagtcccatttgcagttagcacattacttgcatgcaaatgatgcttctaaggtgcttgaaaggtatttattttgataggttaagactaagcagtcactctggcaaatgctttattcttttatattcttattggaaaggctgtaataaacttatgttgaatcatgttctttaaaaggacaatttaaggttgtctcccagtaattagtgggatatggatgagggcccataggctgccatatagaataaaatgactgcagattccatattggtggattccgaatgctggacacttgaatgtactctcgtgcctacagtgtggacatgactttttgttctgacacggaaatacccctttttacctctctagccgcctcatcgctttctattccaagcttgaaatgttacccctcctggacagaatggacaagccattcttaccatcacctgtgtacatgatagggttgtaattcatgaatttattcaataagccagacataaagtgagttgtaccttcagggcagttttttaaatgctgcaacagaagagccatagataagcatggcttttctcactgagaaatttaaaattaagttagcacactaagaattgtcctccctgcccccgctcccctccttgggctcacaagcacacacattgatcttccctgctagattaccataggtccaggggattgaccttagtttctcctctagccttagatccaatcactcaagtagtaaagaataagaacaaaagtatt

SEQ ID NO: 42114 - DNA, 1050 bp, Homo sapiens
ccctgccccacccaagtataagacagccaccttgagagacacaaagatctcaaggaatgtcaattagtaaattacatatctagggtacaaaatgaaacttctttgtccaaagggattgtggtcaacctggagaatccaatttgcatgccatgcagtactacttaaacttcagcaggcagccttcctgaagtgatgttcctaagactagaaaatagtaactcactcatagcttctttcactcatgtttcattcaacaaatttaatcctcacttgtatgctaagccaagcactgtcatgggaactagggatgggaagaagacaaagacatagaaaaccttcagggaaatatggcctaattgaagggaaagctgaggtacctagatgaattacaagaccccgtagcgtatgctgtttctgaggaatggcatgatgtctgaatgcaaaaaactgagccatactctgtaagggaggaagcaattgagttagatcttgctgcagcacatggaatagatgttactaggtagcaagaatggggtagatcacaggcaaaggggatatcatttgcaaataacagagttaggaaaggcttagcatgtggagagaagcatgaaaacttctgtttgtttggtcagggtccatggcagtgttggggggaagatgagactgtaaacatatgttggtatacacagttccataaaaacaggccttgcacggcaagatgagagtttggacttgatccagatggaagccactgggtaccttatgtaggtgaatgacacatcagaattgacattttggaggaggattcaggcagtggcatgaaggatggagtgaaagggggtgaaagttgtcataatgggggatttgagaggtgatagagatctcaaccaaactaatgtggaaagaaggagtctgattttagaggcatttctgaagtgatgattttgtgaccactgggaaggggggtcaagggaggaatcgtggatgactcaggtttcaagtcaggctgactgggtcagtattgatgatgccatcaatcacacagcgaaa

SEQ ID NO: 42115 - DNA, 1050 bp, Homo sapiens
gtcgtaatgctttggtgataatatccccatgccttctagggtcagtattggggttataccacagtatccttagtgatgatattttaacatctaacttccagtggaccaaacagtaactcacttatagcctgagatcctattgctttccttaaggaaactggaatggaatcagccccacagcatgaactgggccacccagcagcagccaggtcgccgctctgagaggtctggttctgaggggctctgtgggagtaagacagcatgaggccatatagctttggatataggaaacgcctagaaaggtagagagatatgataccacacttccagctctagcaacatagtgctgtgtgactgcggccttgggcagtttactaatgcttctaagcttctgcttttgtgtttttttgtttttgttgttgttgttgtttttccttttaaaaatctagatataaaatacctagaattatatggcccataatagtaactactcaggtcaggcactgtgactcacacctgtaatcccagcactttgggaggccaaggtgtagaccaacctgagtaacatggtgaaaccccatctctacaaaaaaaataaaaattagtcagatgtggtggcaagtgcctgtagtcccagctaattgggaggctgagggaggaggattgcgtgagcccgggaggcggaggttgcagtgagctgagattgcaccactgcactccagtctgggcgacagagcaagatcctgtctcaataatactactattaataataataaggattcagtaaattttacatttcagtcccttccaccctgtttcctcctgctggtcccccaccattgaccgacttaccctgcaaaaaaccataacacacattagcaagattcatttattacagccaaatcagcaccccaggatcaggccttttaggaaatgggatccaaaacataagtgtcttaaagaggtagaagatcagagggctttgaaacatggccatgtcatcagtctgaaatttagaaagaagttccctgtggcaagagaatccgcagg

SEQ ID NO: 42116 - DNA, 1052 bp, Homo sapiens
ccttctggaggggtaggaacagaggaacagtgcctctcacctgaggagggaacttctctgaatccaccaggaaacccagtcacaaatcacacagaagcagtgttcattttttctgtccacaaccaatatgactaaagtacggtggaaagacaagtattttttgtcctggtgaggaaaggtgccttgatatgtactttttttctgccttgtggatggactgcattggacagaggtgggggtggtggagggagtggaatttaccatggtggtacaaatgagtcagtctgctcaatagggatgtgtcccatacagagccgcagatgcctggtttaaaagactcaggctgcagttaactatgctaaactcaaattttactgagtggaatttagtctttctctgatgattaaaaggcccttcagaatcttctgagccgttttgttgaacagtgcttttttgttacttcctgggtgtaggaaatggtggggaacagagggttttgctggaacacccactggacttgtgtgtcctcctctcggtttctaagggcccctcaggccacacgcctcccatttccaagagagtgagaggggcctagaaaaggctgaacacaaagccccacaaccgccaaattccctttcaagggtgttacttagtaaacatgagcccttgagcccacattcttccagactgtgtctgcctcaggccacccctccttctagaaggagcagtgggggccctggcaggaggctgccggctcagcctggagtggcccacagcaatgctccaattcacagtgaaatgatttcctctgcctcgtataatttaacctgcccacattgctaaacttctatattacacatttctgtcaggatgtcagaagaaatgataagcctccttgaaacagcaacctctattacatgctaagagcattgcgcctggctccccccagctctggtccttctggtatgtttctgagatttttagcatggtctctcaagtataaagaataccctacttcatgaccccagcctcttgttagctgatagatgaaa

SEQ ID NO: 42117 - DNA, 1009 bp, Homo sapiens
aaattttgattggcaagtttggttgggttcagatactttcactagaaagccgtaggcctgtgagtctccagatgaaaggtgggtttagatctacacatctcctgtttcagggcagtgagctgttttggacccatctctagtagaagtttcttggagctctccagccacaataaaggtacagtgttcctgttcactcactttggcagagccttgaaaaggagcacagagacggtcaaatagtaaaatctaaaaacccgtagaaaaccctagcagaaagtattcttaaagacccagctgtatttttctgttcataagacccagataagcatagtcttcccatttgacattctgactttaacatgagagggagtttcatgcccccttggtaggacattggagtacttgttgcagcgtgcaagaagtggactttgtccagcttatatttagaataaccttgccagcacattccagggagttgatcaaggagttttgccaaactgtgataaatcagcacattgagcagcctctgatggctgataagcttgggagtgccagttaattgacaagaaccgcacttgtcaatcttttgaggtcatggaaatggatctcttgtctttctgcccttccccaagtcttcacccgcttgctctttggtagattgagcatggccttgcactgcatggagcacacctcccacctttgttcttgtgtgtttgctgagtaattaatctcattgtgctagtatggaaatagtctattaaaacattccggaggacaccatggagagggaggaaggaggatgaagactggcggagggagtagtttgctctgtttaattggttctttcacctaatggtagtttgtcaattaaggggatacttagagaaagtgaaattaatccatgtgggtcaaatgcagctattaatttttaatcaaaacacaatgttcaacaaatctgtagctgtgcttagtacaaatgtaagcatgccaccagcctcttcccaaagga

SEQ ID NO: 42118 - DNA, 1042 bp, Homo sapiens
tacagagagaattttcaagaagtgttaatttaatatgctaaagtgttcccttcagcattttacctttcttgttgttttcacaaaacagccaagactaaataatgagcccagggctgtgccctttggtagcgtgatagctcattacccactagcggcctccatctgccctcatggctgcatagggagccattacgattatgatggaaatctcagaagccattaccaagatgcaacagagggcctactgcagacagcctaatggactaatttgtaattgggagagggaaatgagttagcgagctggggccggttttgatgagagtggaagtgcgcatgctaaatgtgataaatgaataggaatgtgtgtttgcacagtgggctctacaagctttccatctctcctggggactggaggcgtgctgacaagccgtgaggagcgaggaggaaaggctcaggggaggcaagcaagattcaaggagagtagctaaggataaatcggtgaggaaaactaatggcagtaaaaatccaaggaaatgactgcatctgccatgaaagtagtaattaggaagcattcggtgtgcatgtctttaaccgttaaaatagggggatgagtagatggaaggctggggcggtggtgggccaagagagaagcccctcgtagagggctccgaagggagagcatcctcagacctggtggtctgggcaaatgctgcctgctcagaacggagccgagtccagaaacaccacgggcaccgcccttcgaggggcttctggaacccagcaatgggaaggcctagcaagctcacaggcagccattgtgcaaggcaaggaggccaggctgcagtgccagacctgcagaacatctgtccttggagggctggagagtcgcttcataagccctcgtgcccggcgctctaagctgaggagtgctgggcaccagtgtggctatggacagatttctgaaagctggcctttccttctgtttgtcatttggctcccagcatttcatctgcccagcctggagagtgcgccaggtgccctc

SEQ ID NO: 42119 - DNA, 1049 bp, Homo sapiens
ttccaacatgggaatgacatgctgatttaaaacagttgaagcatactccagaatgactagaaatggtctcgtgtttgaagtttctgctcattggtggaagttaaaattccagtttctccagcaacatttggttaaatgtccctatccagcattggaactgctcactgatctctttttttgggggggttgaacccctgcccatcttctcagtatttcaagggcatagtcacttggctgtaataactgctcaaactatttactcaccagttttaagtatagatcagcctggtgtttatgtgataaaattctagaaacttcttcctttgcatctttctctacctgtgcccaccaagaaaaggagccgtacttcaccccatagccgtagatcaaatgaaaagaaataaatttctcacttgtctctaccctatgctaccttttcctttgttaaaaagggagataaaagagaaaagaaaacactggtctacataaatagcactaaatataaacagtggaaatgggcttctgggctttgaactctacagggaagttgttatggcaacctcaagttgaattcactgggggggaagtgtcagtattaatgagataagatcgaacttgtgactccaatggtaactgtattctccaaggtttttcttcttactgagacaagaagcaaagcctttattttatcagtgacatctagatttagaattgggagacaaattgtgtgggcattggggcctggagtttagtttccaggatgaggtttctatttctctgttgagaggaattagagccactcctaacacacctgctttagctattcttgttcaaagcctatagttgtaaatttagaggatgggtaacatagaccattaattccctaaagagacttgaagttcacttaaatttaaggattttttttttttttttttttttttttactggagtgttacacagatttttctatagggataaggtaataagatataattgatattgtaactgtccagtggaggttaagttcccaaaacagtgattgaccatgg

SEQ ID NO: 42120 - DNA, 1033 bp, Homo sapiens
acctgctttagatggtgctccagtgcactgagaatgttaacctcattcacccttctgtggatgagcagattattcctagaaaatggtccgttcatgtttgaccaggcatagccccactgtgaatgacaaagtcttttttgacctcccacgatctttctccctttctgtctcagccaagccttttcttctggaaggagctactctcttttggctagacgatcattcagaggagtcacctctgtccctccccctactgatacatctcagggtctcagagccgtttatgttcccatttttgcatcttgacatagggatgcaaagatgggaacatcaagcatcagttcttccgagccttcatagaaggagtggggggagtgggtagacatggagatgaaacaagactggccatggactgatcattgtgtaagtctggaaatggttgcacaggagttaatttaactactttgtttactttcatattggtttgaaatttcccataacaataagctaaaaacagatagtaagggatctcaagtgtcttgggcagtggttttcccattgccacaatatatgtggtgaatgggcattatctgcttggaaaattaacaaaattaaaatttacatatagatcagtgaaaacactgctacagagttaacttaaaattttagctgggtgtggtggctcatgcctgtaatcccagcactttgggaggctgaggaatgtggattacttgaggtcaggatttccagaccaagctggccaacatggtaaaaccccatctctactaaaagtacaaaaattagccagacacagtggctcacgcctgtaatcccagctacttgggaagttgaggcaggagaatcgcttgaacccgggaggtggaggttgcagtgagccgagattgcaccactgcactccagcctaggcaacagagtgagactctgtctcaaaacaaatcaaaaaatttaatataatatgtgttcattataaaaatcattcagggccaggcgtggtagctcatgcctgtaatcc

SEQ ID NO: 42121 - DNA, 1032 bp, Homo sapiens
aaaagggcagacctactccttaattgtgtctttctttttagcaggaaggaaaatcctttccgggggtcctgcagcagattgccccttacagataatagccagaactaggtcacgtgttgataaggtttagatacttgttcccttcaaatcttttgttgacattgcatctccagtgttcgaggtgggcgctgggaggtgtttgggtcacggggtggatccctcatgaacggcttggtgtcctccctgtggtaatgaatgagttctcactctactagttcacacaaaagctgcttgtttaaaaaagcctggcacttcttcccctctcaccacgtgccctgttgactacccttgccttctgcctcgagtaaaactccctgaagccctcaccagaagcagatgctggcaccataattcttgtacaagctgcagagccatgagccaaataaacctcttctctataaattatccaccctcaggtattcctttatagcagcacaaaatggacaaatacacatgggtgccacaaaccagtcactagcaaatatagattagaccacttggttatctcctggcctggacacatgtcactttcctacctgaacaaagttgatgttttctaataacagagaatgaaggatgacaagctgccagggtcgacaactaacaatgtctgctacagcagtacaacccgttactcctactgaaaaaactcactccaggtggaatagtagcttatgtcagggtctgtattgataggccagtagattataaagtatttggaagtgatcttagaatctctgctcatttatgtcaccactgtttcatttacatacctctaggatagcacttaccacgtggcatcatgattccatgtccacaggtctgactgttcctaccagattgtcaccaggaaccccttatttctttgtgtccagagtacccaggataatacttggaacttaatagaggtagaggctcagtcggtgtttgctgaacaaatgaatgaataaactaacaacaaataatgaataa

SEQ ID NO: 42122 - DNA, 1032 bp, Homo sapiens
gaagctgagtgctggtaggtagcagtttattatacagttctctctacttttatggaaattgttcatttaaaaaaaggaatagaaggttactatgcacagggagcagtggctcaggcctgtaatttcatactttgggaggccaaggtgagaggattgcttgagcctaggaattcaagaccagcctgggcaacatagggaaaccctgtctctacaaaaaaatacaaaaattagcccagtgtggcagtgcatgcctgtactcccagctgctcaggaagctaaggcagcaggattgcctgagcacaggaggttgaggctgcagtgagccagggttgtaccactgtactccatcctgggtgatagagcgagacactgtcaatccatcaaacaatcaataactatgaattcagctttgcttttaaaaagaaaatatattttaatgatcattgaagcatttccatatacttgaaaaatattaataattgtatgagaatagcatataatttcctgagactatagacagagctttgtgctcatggactctgaaccctttgttgtaactattagaatacaatagacaagcaagttcaaggtagcttgatacatactgtacacaaacactgagcacattccaagggatgtgaaccttaactacagaagcgtgtatggagctgctttaatttactgtgactgtgttgcatagaaaaggaagacgaccgtgctgccacttaagtactgataacatttaacactgtgtgcataagattgaggcagcttggaaggtccagaatatgaagcaaagaatccgatccattcagaaaccaagaaacctccaaataatagcactttcactctaattcagcctctgccaaatttgcctttggccaattgtcaccagtgccaaattaccaacagacttccttttctggtcttagtcatgttgacctcttccttctgtctcctagtcaagcagaatttaaaacatttacattgtatttcaatttctatgaagatgggagaggaaaggtgtatttc

SEQ ID NO: 42123 - DNA, 1065 bp, Homo sapiens
gccaccatgtctggctgatttttgtatttttagtacagacagagtttcaccttgttggccaggctggtctcgaacttctgacctcaagtgatcctcctgcctcagcctcccaaagtgctgggattacaggcatgagcgatcgcgcccagccgaaataaagttttaaaacactcgaaacaatgctacatggcatttgtatctatgtacaaatatagcaaaagtataaatgccataccgtgcatgataaatatcaaattggtgagtgtgtaccctgcgggaagatatctgaaatatatatttctccagctatatggtggctctacaggttttccttacatgtattcttatgttatcctatacttttcctgtagtccaaaaatatttcataatttaaaaagaagcaagcaggccttcagccaacagagaatggtttcattaaagtaggggagtgtatttgttggggtgcatgtaaggaagggaaggattctatttagggttaaacatctcaagaattgctccaggaaatgatgcgattgggagcatgactgaagcgttgcattgtactctgggatagcactggtagacaggcactccagaaagcacaggatgcctgcccattgcattgatgtttctcgagttctcagcactaaggcttgcatcctaaactctggtgtgggaaagctagctgcatatttacgttctgggtggatttgcctccggagaccctgctgttcaatcccattcagtttgcaggttaacatttactgttcctgtccttgaggtcagcacttgcccacagattttcctaatttctttattttactcttcctccaacaattgcaataacttggatactttctcttcactacttgcaggaaacaggaaggaggcacacagtgtgatacacagtcttgggttgatgtctgttttcaaacatgtttttggaatctccatttgagtagtttaggtctaattccagtcataccaactggcttataaaagccaccaggaatgggtaaaattgctccagaatgggaagggagcagcattccatatggcaaggga

SEQ ID NO: 42124 - DNA, 1991 bp, Homo sapiens
ataagaagctccagcaggtttggaaatcactaggttttgaatacactggtagataattagcacttcaagtaacaatatttatgccactctgtaccttgacttctttttcttgcttacacgaggtctagattttcaacaggatgatcagggactaccttctctagagagcttgcatattgcaagtgggttcagggagcaccattatagttgcatttcactccagaagagacagtgagtggcatggaaggggcattgcatcttgaatactgcatgcgttttaaagtttgcagagcttattcataaatccgcttggttaatgagaaaaaagcaggtatcgaaagacgtttgctgtatgtgtgcctcccagtctcagcccttccaggtgctttgcaggtccctaagtacagagtgtcactgtccagaattttaagggcttacctaccctggtttttcccctctcccctagtcctgttttgtcattgctaccatgaaaatctagcaaaagtgtagaaagttgtgtccttccagaaccacggtttctcagtgcaggtttactgtattgagcgcccactccttttctgtttgtattctgcccaaggcacagcagacattcactccttttatttcccatgaaattgtacaacaggcagaagcttgaagatacaacacggatggaaatttgagccttgtaacgttcaaaaatgacacaattgccaagtttcctaacttttcctaagagttgattaaagatcacaacttcatatcgctcctttttccctatgcatttgccgtccatcacacacctgactgtgagctgttgtaatagctagatgaggtttaaaaaaagagggagtaggggctcaaggattgctgtcctctcagaaatgttgcccaaggctaccctaaggctcagcctacccccagattctctttctgacaagtgggtgtttggtaggatggtgtgaaagtttccttctatgataacatctttaagatttgtttccaaattcccttttttttctttttgtaacctgctgagaatatgagtctgtaacctatgtatttatctgaagtcagcctgaacagatagaaaaactgagttacaaggtatgggactcccagtaaattaggaacagatgtgggtcaaaaacagatttccaaactctttatcaaatgatcccacttggaaacaagacatgaacaggcctaactactcttaaaatgcaaggtttgtctgagggcaaacatgctggaaaagatggtggccaccaccctgcctctacttttcttttcctttcatctttcttcccaccgtctttggttccctgcataggctgtgtagtgggtatcagtcagcacttgtctgctggttgcacaatgcagattactcacttctgcccaagtaactccctgaagccgtactgtaacaatagagcatataaaaaagaaactcaggttgatcttggcccctgtccaaggggattagctagggagcacctgaaaggcctgtgttgaacacactcacctgtaacccagttccatggcctggatctcaaggacagggtaatctcagtaccttttaatgacctagtaaatgtggtatctttctgtctttacactcgacctgatggctcatagagtctcctcattatggagctggaggagtactttgaggtcatctaggccctcactactcaaagtgtggaccatgggtcagcagcattggtatcaccaaggagcctgttagaaatgctgaacctcaggtccatccctggatttatagaatcagaatctgcgacaggttccccagatttctcatatgcattatgacaggtggggttgtcccatgatccaactctgagatggagtttagccagtggcgtatttattaaggagtgccctttggatcaatacctatgggaaggaggaggaaggaacaggaataggtaggtagagcaagaagtcaagcagcaatacaggcccagtgacag

SEQ ID NO: 42125 - DNA, 1359 bp, Homo sapiens
tgcaggcactttgttagcagccggggatacagtggtgaaaaaagtagacatgaagcttcatgaagcttatattatagtgcagcgcccataagcttttcaaaatcttcaattactgtaatagtgtttcttggggccagacgtggtggctcacgcctgtaatctcagcactttgggaggctgaggcaggcagatcgcctgaggtcggaagttcgagaccagcctcatcaaaagtggtgaaaccccatctctactgaaaattccaaaattcgccaggcgtggtgatgcacacttgtaatcccagatactagggagactgaggcaggagaatcgcttgtacctgggaggtggaggttgcagtgagtcgagattgtgccactgtactccagcctgggcgacaagcgagactctgtctcaagaaaaaaaaaaaaaaaaaagtctttcatggaggacttctcatacacgtgcgcacacacacaacacattgaacactttattgtttctgtagtgatggggagacagctaggtgtggagacctgtaataagtcctagtgatagcgagccccagttcccacctgggcagagttagatttatcctgtgtaactgaccaattcggagtgatttggagtgtttctcttcttgatgaggcccaggggccccactgcacttggcctacttctgaaaggagggaaatgctgctctcagtaatcctctgctggggggcgaaggtgggagtgattggattacagttcctttagtagctgcgtggagcttgccatgtgtcagaaaaccttagagtgtagtcatggaatcctcagtgctgacaggaatgcactctttttaaaataagtatgcctctctgtgttgggatatatgatcaattgaagcctctgggcagaatccattgatggaaagcctatatttaaaaacgaacctagtggaggtgtatgatacagaggatatggtacagagaagaagaaagcagtgaggtctcaggtgttggaaaagtcaagtctagacaagaagcaagacaactcacgatgcagacgagatgactggaagagtctggggaactttgggagattaaaggatagagatggtggatgctgggtgatttctacctgtgagcacgattaccagatgtccttgatagtgtgcaatgcccatgccatttccttcaggcgacgctgcagttcagcgtgcaagatactgccacacagttgagatgcagatgaatttggcacatgttcatgttgatgttgcccatgtgattaagcttatatgaagtggtacacacaaaaaaagaaccatttccttccacagatatttatatttagggaaaaatgagaatatttaaagaa

SEQ ID NO: 42126 - DNA, 1047 bp, Homo sapiens
tggaggctccaggatctaagcccaagtgccagcctaaagaccccacgctcttctccctggctgagtgctgaggtaccattcggctttaacagctgacggggctgatgcagctgcccggtgacaccatgtgccctgctgtgtactgcagttgccattttgcatttatagtgggattatctgatgctccaagctccacaagggcaaggtcttagtttttacatactgttgagtccccagtgcctgacactgtgctctgcacaccatatgtggtcaatacatacttggcaaatgaaaaagggaatgaacgagtggtcagggttaaaaatcaacgtatctttaaagtaagccaatgtgcttcccaaacccaaagaaattcttctcaaaatagagtgtcgaatagttttttttttttttttttgattggagaaacttgagcatgtttttaggccaagcagtaggaattattagagagggaatgatggcactattgatggaacacggtcccagaggagatctgaagtgacaagattaagagcagagaagaattttcattagcagaaacagggcacttcctccttagagaccagaggtgaagagagaaaaaaaggatccggtagtcatgggctatgtatcacttaggagtgctttcagctgcaagtaatagcttgactagcagtgcctgaaacaattaaggatttatttttttcatgtgatggtaagacagctacagctgggtgaccactgtgttgcttcagtggctcagtggggtaagggccattgtcttcaagactttcttggcctttccctcatgagatgcaccttctagcatcacatttgcattcaagtaaaagtccgtgctatccttgcagacacttacttcgcatgctgcctgctctgctgattgaggaaatggtcaagactaaatgaccactagtccctccttcaggtatgacagtggagtccaacggttagtgggatctgacctccagcgagcttatttctcctatgatgaatataagaagtttgtggccgggctcagtggctcat

SEQ ID NO: 42127 - DNA, 1026 bp, Homo sapiens
ctcaagaggccattatgtcctgtccttttgaagggcatgtttctcaaaagccaaggttgtacctttagtttcttgagagccaaggttgcatctttagtatcttcagtcatctttgcaccccagaatgtttagcacagagcttgcccatgatggctactcaaatgctgaaaggatgaatgactaaataaatcttgagatcagttgtatttttttctttaaaataactggctacagtcactggctctcaaccctggtgttgggctcatggggacattgtaatcagttgtaagcgggttgaagtgatttgttatgaatgattgttaggttttggaagtttgcaaactatgtactgtttgtataaattagaatgtttcccttcagtaatattctttaatgataatatcatcatcctgcagtgttaatacttcagtgtgacactctcccttgcattgtgatttgtcttaaatggaagaaaaaaggatggacttagagtcaggacccaggaaattgtatgttaatccacagcctatcttttctgtgccaaagcccataataagccagaaatcactgctaatggttatggaactatggaaatatgatagtcctctactactgtacgagatgtgggggccttgtcaaaatgaacattatctgtcaatttagagaaaagaataaccattactctaaaccaggggtcagcaaacttttacagtaaaggtctagatagtaaatatttgagggcttttgagggccatacagtctctgtagcaactacccaacttcgctattgtaatgcaaaaaagctattgtaatacataaatggatggacatcactatgttccaataaaactttatttacaaaaataagacggaggtcacattgggcttaatgagctgctctaagccatagagtacatgggaatgtaaaccatactgcttattttttttaattgtattaatggcatttattctacttcctttgtaatagctaaggagttcctgcaaagaaagaaaaattaggggtta

SEQ ID NO: 42128 - DNA, 1017 bp, Homo sapiens
ggcgcagtcggggagcgaagtccggagcaaggggcccccgcgtagccgccgccccctcctgctaccgtccagccagggagcccgcggcggccgccgatggagttcacttgagctgtgaaccggcgggagaggcaggcgcccgcaagccgagcgcgggccggagcccagccagccccgggcgctcacccgccagcccgcaagctccggccagaggcgccgccgccccgcgccccgccgttgcagcgcctcctgggccgcgcgccggcgagatccgcacaaaatccagactcccggagcggctccctccagcaccgcggcgggcccaggaccaggcagcccgcggcgcggctggagaggcgggaccggctgtcggggagccccgggcggccgccggggagaagccgccgcgcgccctcctcctcctcctccctctccctcctccctccctccgcacatggtctcctttgtcctgtcgccgccgccgccgcctcgctcttagctccgcgcgccgcggcggcggctcaggccgctcttctccgcctcgccctcccgccggccggcccgggacgcgccttgttagcccccgccgcgccagcgcggccccgcgcgccgcaggagcggcggggagacagtggcgagcgcgggccgggcgatctcggcgggcgcgctcctcccgccgcccggggcctcggccgcgctggatgtgtgcgcgcggcgccggctctcggtcgccccgaagctgttgcccggttcggatctggttcggcgcctccgctctcggactttggcgaggaaggagcccagagactcttgtggacagagccgggtcgagagttgggcgttttctcttcgtgtgttttggtggtttcccccctggtctttgacgatcgcccttcgggagccctgctaaagaaccaaaccatgaacttggggctgaccggaccgtttaaccctttgcaaccaggtaatgaagcccccggggcgcggctcgcttgcctacctctcgcggtcggaagg

SEQ ID NO: 42129 - DNA, 1026 bp, Homo sapiens
ttgcaaaatcattatgtgaatgagctgaattgctttgtgtatcatctcatagaaatatgttttgcacagataatgtgtctaataaggacacatttttaaaatcagatttttttccccccagcaaatagctgcactgcaggtctctctcaagcagtcaactagcaccaccttatggatgatttggggacattgctgcttccctgctaggctttcgtaaaatgtagtcaactgatttaaaataatgggaatgttgatggtgatgacaatattaatgacaataataatgcttttttcccccttcttgtttttcaggcatcagatgccagctctgaaaaactcttcaacactgttattgtaaacaaaggtaagacccattcattctcctgagtaatggcttatttttatgttagtttcattgtcattgcctaggaagaaagaagagctagagtgatctttctcttataattctgaagctactgttgatgtttcatgtttttgcttgagatggaagtctgcatactttgtgatgcattaacattaacaaccagtttattttaaaagaatacattgagtccctatttaaactgatttgactaatcactactactatgtgactttaatatagaaagctgtactcgagaagaatagttctcaaaatgcctgaactttattgttacttatcaactacccagcaataggagaaatataaatagctgatgtgcattgcagactccagtaatcaatggatgtttagaattcacagtattatggtcataaaccaagccttactctgctgtgggctttctgtaaagttaataaacgagcgagagggcagaatttaaatatgcactatcccattaatttcttccaaaccacgatctagagtaagagaggctaatgatatagcagtacattaagggaaaactaaccttaaatcattgccagtaggtttctgcgcagctttcatttgttagcagtatcgttggaaataaggaaatttaggggagtctgtaatcactggctctg

SEQ ID NO: 42130 - DNA, 1031 bp, Homo sapiens
atgagggtggggggcaggggcgagataccagagaaagtgcccaagagcaccccaggggcaactgccaggcagcttctttttctatgagatgactcattttaccaccacgaattgaaatgaggcttgcatgggccattgtagataatcgaaagaatgtcaccaccctcccatctgtcttcagctgtcacagactcacacaccaagcatttcatcagagttctagttcttcaagttcatctaggtctttttgactggagcaatctgacttcctacttttcttttgctagaaggtgataataattgcagcttcattcactcagtgctgcatttgctgtttgttggtttgtaattcgatgcgcagtcttcttgtgtctttgcgggagagttggttttagaggtggcacacaccaaaatcatgaatggatttaaggagggagaggctgaactaatttgattgttaccaagtccataatgtgttccttgggaaaattccacttgtctggactgtgctcctcactttctgagattgagaactggagaaaggaggaacgtcacagacaagacagcaagaagcttaaaaaacaaattcctggatttggagcagtgtgctctggtggaatattagatgataaactacactttgtggttttgttttgtgcagttggctgtagaggccacatggccctgtataatgacctcttcccaagatgttagacatcaaatcagtttgatttctacccccatgggaagaggaactccggttgtaaagaggcagcttgagaataactggtaaagggtgacttgccatttccccgctggtcttgcctcccaggagtaactgttatttgaccacatgacccagttacaacctgttacccctgtgtggccagggcctcacccccccagagcacaccttcgggtcaggctcatgcctgatttgtgccttctttccttctcagggccctccaggttgagggaagacagctttacacctccaccttctgtattagctccaggataaacttgaaaac

SEQ ID NO: 42131 - DNA, 1012 bp, Homo sapiens
aactctgttttcacaagccttccaggtagttctaatgcagacgactgtggtccagaaaaaacgaggaagaacattttggcagtgaggttttgtaaatgctcagacgatccacagagtcactgggtgaaatcatactctattgcacagggaataggtctaggttcgtagttgggcagccttttttttggaggggacagagtctcaatctgtcggccaggctggagtgcagtgtcacgatctcagctcactgcagcctccatatcctgggctcaggcagttctcctgcttcagcctcctgggttggtttgtttgtttgtaaatatcaacttcacctgatctgttcaaagtgcccctgcacctaccatttccaatccttccactctctatagccttgtgaacaggcctactcatgtttagcgtggttctgacagatgctaggcctgtacctagggctctgctcatctgaatagagtttgaaaccatgaccttgggccaatgttatgctgtaaccagctgagctaacttgctcaaccgcttctgaaagacaaactgttccatcgagttccttcttggcaggtgctgcatcaccaatgccggcctgccatctgtgtgaagggctatcacagcacacaacacacacacatactgggcaaatgtgccgtgattaccactaactattttgtaaacaaagtactgtgttaattctgttttaaactgctttatccaggattgtagaacaatgggcagaagtgttttgaaatctttttttcttctgtattgaatattagagttttaaggccataaaattaacatgtaaattgagttttcccaaaaaatgtaaaactcttaagaagtttaagtaagttacctaaatagtaaagctttttcagttgtccttcaagaataggcatcttccaaaactagttgtgttaaagtagtggttctcaaactttagcctgcatcaaaattagctagaggacttgttaagatacagcttgccggccgggcgtgg

SEQ ID NO: 42132 - DNA, 1025 bp, Homo sapiens
gctctgttcaaatgccacattctccaggaagccctcctaccttcccaaggtttgaacctttcctgtggcacttcctgcatcctgcctgtctttttttcttttcttttcttttcttttcttttcttttctttttttttaagatggtgtctcactctgtcacccagcctgtagcagtggcatgatctcagctcactgcaaccttcgcctcctggactctagtgattctcctgccttggcctcccaagtagctgggattacaggcgcatgccaccacacccagctaatttttgtatttttagtagagatgaggtttcaccatgttagccaggctggtctccaacccctgacctcaagccatccacctgccctgtcctcccaaagtgctgggatttacaggcatgagccaccatgcccactgcctgcctgtcttttattgaagttgtagatgtcctcttccccttttctctgaattctacccctatcctacccatggtgacccacagggtgctttgaattaaaatgaattaaaatataatatcctaaaagtgatttcaaactttggaatttaggttatatcctgagaatcttaagtgacttgattcaagaaagtaggcaaaaacctgaatcgtgtttggtctgatcaacccatttggaattaatcgaaaatctgatgatcccaactgggtacttttcaggaaaggagtgggaggctgcccacgtatattgagtgcctacagtgtgccagggcacctgctgatttatttgattcatacagtagcctagccaggtccgtctattacctgtgagaacactggtgactggtaagtgacagtgagttcttgccatctcctgttctttgccctttctcttataccagcccagcataaagaggatcgggggcttcagtttggtgaatttaaaaatgtctcttgttaaaggccgggcacagtggctcatgcctgtaatcccagcactttgggaggctgaggcgggtggatcacgaggtcaggagattgagaccatcc

SEQ ID NO: 42133 - DNA, 1049 bp, Homo sapiens
agtgttatggagaggaaagtagttggtagggatctttttattgtacatatgttttaacacacacacacacccctttctttcagctctggttccctctaaaaaggtcctgttctcatcctggccaccagacttcttccaccaggggtcccttctctctttctttgtcaccaggccaagtttgttaaccatcttcagaattacaggactttagtagctgaggaattccttttaaagtggttccaaactcagcacctttaggcaacacagcacattgttctgctttgttaagagaagcttgttttgaagagctaggaaaatgagttcaagctcagatttctctgggtagaaagggtatcccatatcagatgatgatgtgaagaagcagattgtgaactgtaaagtgaaaaggtcttaaacacgagagataagcaaaggggtgtgtatttcaggtaacatacaaacacaagggaaacagacctctggcatctcatcgcatctataaatctggatgatttcaggcaaaaatgaaaacatttgcttttcttcaatcttgggaatttctaaaacattgagttttttaataataataataataatagcaccatttgctgagccccaaatatatgtcttctgctctactgggctcctgatatacgttctctctagtgggcccaggacctgcaaggctggtattgttactgctgtatagaggttcaaggagatgacatgccagaggccacacgactgacgtgtgtgacagccagaatttcattcgtgtgtgtgtgtgtgtgtgtgtgtgtgtgtgtgtttccgatggagtctcactcttgttgcccaggctggagtgcaatggcatgatctcagctcactgcaacctttgcctcctgggttcaagctgttctcctgcctcagcctcccgagtagctgggattacaggcacctgccacaatgcccggctgattttttgtacttttagtagagaccggttttcaccatgttggccaggctggtctcaaactcctgacctcaggtgatccacccaccttctt

SEQ ID NO: 42134 - DNA, 1641 bp, Homo sapiens
aagctccacctcctcggttcacaccattctcctgcctcagcctcccgagtagctgtgactacaggcgtctaccaccacgcccggctaatttttttattttttagtacagacagggttttaccgtgttagtcaggatggtctcgatctcctgacctcgtggtccgcttgcctcggcctcccaaagtgctgggattacaggcgtgagccaccgcgcccggcctcatcctgacattctttatgtgtaaggtgctaaggtggtagcatactgctaaaactagattagtagtacttaatctagagggatcttttcaataattccatacattaaacaatttactgtctccattacaaggtgtaccattgacttaatactggttttttggggagggagtgagtttgagaaacactaggacgttaaaaactgctatgttgattgtaggatatctggatttcagaaacgttagcacatgcttgtgcaggggtgggagagggagaacctgtgtcttagaaatgaagaactatggtacatttatgtaggatatgatatcacattttataatttgtctgcttaaacaatgatttacagatcttttgagaaagagagcaaggaggttgggccttttagtaagacagaaaaatgaccttccgtttaagacttagacaaattaaattggactttgaaagtggtttacccttttcctctcgggtaaatgtcggaagtgagtgccctggctgaacataagggaaggtccattgtcagcaccctgaaagcctgtttgaaatgtcatcaacttggagcattcattggcagcgactatcaacagcccattttaaaaggatgccttgggtagaatggaaattacagtggccagccgttaatcctttttaataagggcaactgttgaggagaattatgttgtaagaatgaatgaaatttgggagcaactctagtccccatgttctgtcgtgactgtcaacaccaaatgtactttcatttttgcaactgcctaaggattttccatttaacaaacttacatgacaaatgggaaagcagtggcattccctgagagtccaaaatctggtttggctctgccgttagcacatttgcctgcagggattgatgtatctgattgaagaatgttgagttcagccaagagttaaggttaaggtccttctatttgttttgggtcagttcctacaggtagagaatttgaaagccctgaagtggtttcattgcccctagtagagataaatggccaaatgtaataaaaatagacagtgctgtccttaattgtcctcccctttatataaaggacctgggaggtggatcacctgaggtcaggagtttgagaccagcgtgggtggtgggcgcctgtagtcccagctactcgggaggctgaggcaggggaattgcttgaacctgggacattgaggttgcagtgagcagagatcgtgccactgcactccagcctgggggacagagtgagactccatttcaaaaaaaaaaaaaaaggacctgggagaagggaaggctagagggctagagccagtttgtattttattaggggtcaggatttactatgttaagttttaggatgtgaatctggaattttcttttttttcatgttttaagaagagaat

SEQ ID NO: 42135 - DNA, 1050 bp, Homo sapiens
catgctttaaggtacgtctattcctacttttaaaagtggcagatttgtgttttttaatgcataaattagttgaatgttcatccatccaaagagggatttcttctgatagattggggtgattagctgaaagactcagttcctggagaagagaacactagtggaaaatgcccaactgttaggggaatgaggaacaacagtgctgttcactgcattcctaacgccggcttatcagagttttgttttctgtttcatacacttaggaaagtattgttgccacaaagtgcatctctgcctgttagaaggatccagacatagcgtagacggattgtgcaatggagtcagaaataggctgtcctgctcccagtgagtgacttccccaccccttcatcctccttgtaaatcaccggcattcctgatcactttccgtggttccagctaggttaacaacagaagggatcatttccctcataacagtctccccattagtcaaaagttttactctcaagtgactaaaacgttactcataactgcttacaaggagaaaagatttattttccttttacttctttaatgcacatctggtggagaccctgataagcagtaagaaatggaaaaagcagggacctagaaagtgaaagtagacagatttgggtagtgcatgcaggctaattaatgatcccaggtgggctggagtgttctggttacattttccatgggtccagccctagagcagagaccatgggcatcagcctgccccttcccattatgtggctcaagcaccaccgtgtgccaaagggcgggaacattagatttccccaccgctgtaacatctgtaaattccacagtccatagaatcaaaatggaagagaacctcacgtttctgattgccagtcagaaggaatttatttttgaaacccagtttgctctgttatttgtagtgcaagatagaaatatcttaaccgattttatccagttcttatttaatgtctgtgattttaggaggaagagactattgtgtcataggtatttgaaattcacaagcccctctcc

SEQ ID NO: 42136 - DNA, 1031 bp, Homo sapiens
taccttctgccttcttttttgaaagcatctctgaagataaagttcaggtgattgcaggaaagtagaagtcattctgacatgcatttccgaagcatcaacttggttgtctgagagcatttcccttccaggattataattgtgagtggtaagcagcactagtgtattggtgacttactccagctgtatccaaggacaggtaaaacttcccactgtctctttctagaggctactttgtagcatttcagatgtgaaaggtgactccagcagagagctcatctatttattatttatttttgagacggagtctcactctgtcgcccaggctagaatgcaatggcgcaatctcagctcactgcggcctccacctcccaggtacaagtgattttgctgcctcagcctcctcagtagctgggattacaggagcccaccaccacacctggctatgttttgttttgtttttgtttttgtttttgtttttgttttgtagtagagatggggtttcgctgtattggccagctggtcttgaactcttgacctcaggtgatccgcccgcctcagcctccccaagtgctgggattacaggcgtgagccactgcgcccagcccagcgagctcatttctttattttattttattttattttatttatttttgtttttgagacagagtctcgctctgtcgcccaggctggagtgcagtggcgcgatctcggctcactgcaagctccgccttctgggttcacgccattgtcctgcctcagcgtccccagtagctgggactataggcacctgccaccacgcccagccaatttttttttttttttttttttagtagagatggggtttcaccatgttagcaaggatggtctcaatctcctgacctcgtgatccgcccgtctcagcctcccaaagtgctaggattacaggcatgagccaccgcgcctggcccagagagctcatttctaacaagctattatcaccatcctcactgctttctaaaccttataggtatgtagcttcaaagtttatattt

SEQ ID NO: 42137 - DNA, 1022 bp, Homo sapiens
ggtgcaaatccatacatgtttgtttgaaaatccttttagaaccttgccttgttaggacctcctacacctgtgtcacagacacagaagtaccgtgtttaagtattgagcatacactagttttttgtgacagaatctcactctgttgccaaggctggagtgcagtgggacgatctcggctcactgcaacctccgcctcctggggtcaagtgattctcctgcctcagcctcctgagtagctgggattgcaggcgcgtgacaccacaccacctaatttttgttttttttttttagtagagacagagtttcaccatgttggccagggtggtcttgaactctggacctcaagtgatccactggccttggcctcccaaagttctgggattacaggtataagctgccacgcctggcctgcatacactggttttaagggtggctgtgcttgggctgtgtatgtgcgtagtacacagtgtcatgtgagcacttagttaacagccaggcaggggtggacaggccaggacagctaagaatcgcggaaggagtctgggggtagcaggaaggctgcactgggaatggaaagcaagcaggagatgatcttatccagaggaagcagctaataaatattgaggctggcaggaggatacaagcaaacaaacaaaaagtggggccgtgtctttaaaagctttctccgaaaccaatatttggagttttcctgtgttcttggaagtgactggagattgcatccttcataccttatttctcctgtcaggtctctacatatcacatcacaggattcagctgatattggcctaagacccttggggtcggtgcagtgggaacgtgttatagatataaatgccttaccgttgataactcagaataagatataggatatcatcattaagtctgattatctaagcttatctgtgagccttacagaaaacaaaaacgaaagatcaggaccacaggttctttgactaccatttccctatttttttcatttgtcctgaacagggcctaacaca

SEQ ID NO: 42138 - DNA, 1021 bp, Homo sapiens
ttacagtaaataatactattatttaataactatatataattatttgctgtgtttaataacaaagtgaacattgactttaatttttatattgtgcttaactttccaaattttctataatattcatttgttttgcacttttcctcctcctcctcctcaattttgaaagttaaaagcacaatatgagaattaaagtcaatgtttatttctggatgatgggactgcaattaatgtttatctttccagtctcttttctgtgcatacttgtatacatttacacacgtagttttcactattgagatcacactgataatagtgcactttatttaatggcaattttgtcatgagatattttctgtgacattaaatacttcttcacaatagttttgggaatattgattgattacttacttattatgtgttgtgcattgtggaaagcactttacatggcctaatttatttccacaaccaccctaggaggttgttactgcatttgtgcagtaagtcattggacttttagaagtgtaggagttcatcagagtataccgaatctcaaccctaccagacccagcataataataagaaatattttatagcgcattcattttttactttctggaatgaaatagatacttaatgtacccatctacatacataatttaaaagtatatataaagccctaataaaatataaaggagaaataagtggaaaccaagtcatttataataacatacctttaagtatgtaagtgcttgtttatattagaagacaatgtttgactttatatctagaatggtatctaaatacttctactacaaatgcagactcacacaaatacatggtcatggagattcagatacctggagcagccttaccattgtgtcatgattttcccaaatagccatcaacccttgcatatgacccagatataacaaagtacagtccctgcattcctggaaaaatcagcgtatattaaaacccatgcaaagaattactttgtgtttatatacaaaaacagaggtgg

SEQ ID NO: 42139 - DNA, 1987 bp, Homo sapiens
ttgctctgtctgcagtagcgatgggaaagtttgcaggagttgtgatttcagaaagtgtgctcgtacagggaggatctgtaaagaggaaggggcaagagagactgtggtgagggtttaggggaaggaggtaggattcttttaaagagaatacattgcttacctttttttatttttttcttttcttttttttcttgttccgatagcagcagcagaagcagcactccagcgaagactcagcccgccccacctcacatctcccaccacccctctgcctccccgttccccctctccctgcccaaccacagccccctgcacagcttcacacccaccctccagccccccgcacactcacatcaccccaatatgtttgcccctcccactgctctgcctcctccaccaccactgacatcaggaagtctgcaggtggccggacacccggccgggagcacttactcaggtaggacggaggggcctgtgctcgtgaccccgacccccaccgcccctcgctgtgacctcaccctacctatgttgtcccgattgcaaggttgcatttgcctacaattttttccttccttactgtgatcttcctcaaacgctctctggcctgaggtccagcaaaaatacctgtcagcacccatactaagctagctcagcccctgtgaatcagacactgcccgaagagagtgggtttgtttggagttaggaggcatttccagctaaattcagccactgagtggtcagacccaggtagtgtgtcccgtgtcgtctgggctcccctgagggcgatggaagcgtccccaagcccatgtctgtctcgctccaggatcttagattgtgtcctggtttaaggggtttcttttcattgggcagggcagggccttctcctgtctccttgggaggagatgacacactctttgtgacaatatatcccagaattttaagggcagatctcatgttagacacagggtccttgtctcctcacctgtgttaatcaggtcaagcgtcccagttttggtccagtgtagccatgttatgccgccaatacagagagccatatagcagtaattgacacttgaagaggacatgcgagccctgccgtgtgaacagctgacatttattagtgtgctatcactgttcccaagcacttaaacgtgcaaattgctttaaccctcaaaaatcaaacccatgagttaggcaatattattgtccccctcttggagatgggaaaactggccctcagatgggttatttgccatgcccagggtcactcagccagtggtgacagctggaaatcggactttggcatttggcctggagtttgttccccagattgatagactgcctgtccctgaaagctgggagaccagctagagaacagggagacagggtgcgaccgggccttggtctcgtctgcttcattgattgcccccgtttatctcagggcccagccacaccctgtcacccctgccactgtgtcaccagccccgtacccctccacaggaaggcagtccgatgtccttttctgaaggaaaaggcgtcatcgtctccctcttcttctcttccagagcaagacatcttgcgacaggaactgaacactcgttttttggcctctcagagtgctgaccgcggggcttccctgggccctccgccctacctgcggaccgagttccatcagcaccagcaccagcaccagcacacccaccagcacacgcaccagcacaccttcacgccgttcccccacgccatcccacccaccgccatcatgccgacgccagcacctcccatggtgcgtaccccaggcagaaatgtgaggataagtagagcacgactcttttctttatgcagcacgtgggaccgggctgggcagcggggccaccagagatcgaatggggactgacggctgttggctggagagaagggaatgtgtcctagtgccctgcctcaggcagctctgacttcaggggcctaaagtaggaacttctttcta

SEQ ID NO: 42140 - DNA, 1048 bp, Homo sapiens
gaaagttttctgctggcctgtgtgagctgtttcacaaataaatttaaccaaaggtagttatagcatcaatatgatgacattatttagagggaacaatagtatactctttttctgttccaatgaaaggctgtctggcctaccccagatcactttgtatttgggtataatacatttcagaagacagctgcatggcaagacagtttttctgccaaagtgaagatgaaaatagggggaattcactgggtaaatcagaccaaatgctcacctctctctgatttatctggataattggctgttctctcctgtttagaggtttggttcgtgccaatctgtagaaagaaaatagtaggaagaaaggcatcctagtacgtgcagaactaaaacgtaccacttggtttttaattttgttcttccatttctgttggcttcttgtcagggagactcaggagctcagaatggtttcatatgtaatgaggttatggggtctcatgacagcttaatgacagggaagctttgtagggccacctccactgtagcagtgaacaaaaatgcagattaagtaactagcttttgctttgatccctttacagtttgacaaataccctacaaaagttgacccattctaccggcacagtgtgagtttcattaccatgctacacattgaatgtaactgctttgccatttttgtgctcttgccacagatcagtcaatgactagcagccttccttaatcatctttgcaagagttcccattgctcctcgccactttggatgcttgcttttgtggtgttttgcttttggtaaagatgcagtatcatcttctgaatcaaaagatcataagcattccaaaggcttgaaagcagagttgctctttagtggcagtcaggcatctgtcctgcaaagtgagatgtctgcaatggagtcagtagagttccaggagagtctgaaatcacagcatttcagtcgtcagttgaaatgccactaacacagaagttctggaatgcaacctgaattatttcctcttaaatagaaagtcccttgtctttttg

SEQ ID NO: 42141 - DNA, 1066 bp, Homo sapiens
ggcatcaaactgagattacgtggcttgctcatgtcgatgtctttctatgggacgggaatttgaatatgtcacttgcctcctactaaaatcttttttccccctctccgtctttggccacagctcttccattcctatcctcctgcagtgtcgggcatcccccctatgatcccacccactggcccttttggttcactacaaggagcatttcagccgaaggtaagaaacctcacagtgaaaacacacaggcatgtgtctaagtggcgtcccgggccaggcgtgcaggaagttctgcgtcctcttgcctgtgcagtgactcattaatcaggtcctaagtgaccactgggattagagtgagcctatttttcttttttttccaagtccatctagttttaaatggccgtgaaaatttacttttcaaactgtactacccagataatctcagttaagctaagatttcttgtgctcttcaaaatatacacaatatttatttttttactaccaatatcgtggacataacttctggtcaggaattctatgaaatatcagacacatgtgcgccaggttgttccgcaggtgtatgtaattagtaaagacacaaagctgggtccttactgattttagtagaagtggggataaaggttccacaactaaaattgtatcctatgaattctcattctccctcatttccctcgccaaccccatcggctgcaaacagggcctgccggcaggtggggtggtcgcctcccattttggtcctcctttctttctccctctctctcagccatcccacccctgccatggttacactggccaaggccaagactttgtcatcagttactaacatcctagtgtgaaattaacctttcatcctttataaaaatcaaattctgttctacctagtcagtgataatgccgtccagcgttggctacagctgtctctaaaggtcaatattgaagagtcattctcgaaacactctctttttaaatatacttacaatttctattttaccttcacacaaaaataaaaagagccgtactttcatgtgggtaaccattctcagacttg

SEQ ID NO: 42142 - DNA, 1117 bp, Homo sapiens
aagtcaacgagtccgatctcttgttagcagttctggtaaaaggtttgactagttggaacttaaggggaaagactgaagctataggctgaagttagtctctcttgcacttagaaaatatgtagctgggtccatttattttggctggtggctccctctttctgtagtaagtgacattgacttgccatagccgtttgacctccttttaaggtgcaggaaggaggtactataagcatctggtttgttaacatcttgcttaaagcaaattgttctcgaggtctggagactggccagtgtgatgacctctaaatgaatcctggtggttgggggtaagacagacatgatgaattgttggacagaagatggatggacagcagatttcttgctatgcataactcatttctagggcacataatcagataatttgatttctccaggggaaaaaggagaattgtgtcatcacttaggtgaggcagtatattatttgtgatttcaaactacccataatttcattgcaagagaagagaactgacccagacttgcatttaagtatatattttcggaactaactccatactgtagaaaccagaagcttctgttcttcgccgatgtagaatgaggctgtgttttcttctcatctgtccagtagtcactgagcgcgcacgccgagcttatgggtagattacttagcagaaatgaagtgaaaaggtggtccctgcccgctgactggtagaagagaatacactcacagcactccactccttataaagcaagacatgaaataattggggagatgtggattcaaattcaaccccagagggtggaggatggacttgagatctgcagaggcctagatagagaacaggaaggaaggaatattcttctctttgtttctttctttaaacttaggaacagcgcccaccaacacgaatgggtagttgactcttagcatttacggtaactgggcttcaatcaaaatgtgaatttctttgtaccactttgggggttaaaataaaaaccaccacggtcttgggggaggttaggacaggttctgtaccctctcttattttgatttgactcacagacattcactaatgagctcttctgaacagctgatttg

SEQ ID NO: 42143 - DNA, 1025 bp, Homo sapiens
ttatagcatggcaacatttgttaagtagggcttcccactctaccaggtctgccagctggcagcagaaaagaaagagaagaggcacagagtgggattcaggcttttgccgtcttgtccttggtaaccggggaggcccttgtcaatgtggttttctgagtagcaaacccacgtggggagagagggggagctggctgtgactcccttatgactgggcgctggagagctactgatggaaggcacttggagagtacaaagcactcttgtttcacgaaaaaagcctctgcagccaaaatctgctgaaagctttggggaaattgaaggtggttttctctgaaatgtcttcctcctaaccacgttgctctttcttgttccagaaaccagggaagtggtgtgctatgcatgttcacatcgcctggcagatttaccaccaccaacagaaagtcaaggtcagtccgaccttcgtggtgtagggaagaatgggatgcacatgtgagtgtgtgacgtgctcgggagaacctgatgaaggaggcatttaaaacacattttacagacccatagttaggaaggatcaagcctctcttggaaaagctactcagaagtcttacttattttttcctagagtcagggtctcactctgttgcccaggctggagtacaaggggacaatcatagctcaccacagccttgaattcctgggctcatgtgatcctcccacctcagtctcccaagcagctgggactttaggcatataccaccatacttggctaatttcttgattgttgtttttgtagagatagataggggtctcactgtgttgcccaggctggtctcagactcctggccccaagcagttctcccacctgagcctcccaagtagctgggattacagtgcaagtcacagcagccagctcagaaatcttactgttaattagggaaaccactagtgaaattacaaaacaaaagcaaactgataatgccccagggttttgttccctttataattttgtcattttattgatccaaagg

SEQ ID NO: 42144 - DNA, 1050 bp, Homo sapiens
caggtactaagggcagtgaaaacccaggagactgatggggaagaggtcatagcaagggaaattcaactagaagcttcaagtcccaggaccccatgccttgggagcagtgcttatccaaggcagtgtgaagccagttcaaagagaaagctgtcaagaaacaaggaggtggggcagctttgaaaccatgctggtgcaagggcctccagcctagagaaggatgccaggggaaaagattgagaggaagattaagacccaatttctactgcctaagaggatggtaggcggaaagattagcctgaggatagataaataagacaaaacagagtgatttctgtccatgataaggacttcacacaagagtttgttttttttttttggagacagcctcggtcacagcaacctccgcctcctaggttcaagcaattctcgtgcctcagcctccccagtagctgggacgacaggcgtgcaccaccacgcctggctgatcttttgtattttagtagagacagggtttcaccatgttgcccaggctgcccttcaactcctgagctcaggcagtccgcccgccttggcctcccaaagcgctgggattatggtttacttgtctggatggacactgccctcccccaaccttcctcaggtaattacaggtagtaggaagagaaagggcctctgttagttaaattaatactcctactttgtttttctttgttattgttatataacagtgatcatttgaaagttagcttatagacatgcaaatatttcttcataacttttggttactaatgtactgtgagctattagagtatggcaaagagtcattaaacaaacaattaatttatacagcagattgttcatgcagaattcctaataaaatgagctttaagacactattattttaaaccttactaaaatgggcctttacagcaaaacactgaactactttgggagtggtggcagtctccataaataggatatggttttatttctcaagccattaaccttgaagaccaaacatagctgggtgcggtggctcacacctgtaat

SEQ ID NO: 42145 - DNA, 1038 bp, Homo sapiens
ctgtattccagctggtgatcaagtctgggaacagccgtaacaggtcaaccttgtggagccatcgcgagttagagggtgaaagatggcagaaaaaaaagtcttgtgtgtgagtgtgttttttgagtttgcatcaatcttaatgtctcttcataatacttttataatacattaagcctcttgtctacatatttggagagaatatgactttactagcagagaaatacaatatatcttgtctactggactgtaaaatatatgtatgaaataaaattagttccatttggtcttctagtatattaaagtgctatctgacgttgttatcctgtttttgcaaaaaaaaaaaaaaaaaaaagttaactacagaccattgtttctaataagcagagagatctattttagtagtaaactgaaggtttagttgtgagcttcagattttgtgaactccagatgttgtgcggtgtttttttttttttttaagacaacaactaaaaaaaatgcaaggaatatgtacactggaactgtagtggtagctttcagtattgtaaagagattgttctatacggacctttttgctgtttatcctgtatgtaataaagtcctttctagatcctatgtgaaaagaaaagtgaagcaactgaatcttcagcatgttctcatcggcggagccttcttgtgtaatgtaaactgtgccatgttattaaaaaatgtgaactaagcttccagctgcttgtttgtgtgaggtgaccatcattaccttagggaagaagccatacctgtacaagaccgggctcttgaaaagaaacacctcgaacccagcccgtgtaagaacagaaggctcacctgcagtggctgaccaccctacccaactcggttagtgtctcaccaatttgttactataaacatttgcaccccacacagtcgcttgtggtttgttttttgaggagggggggttctgttagtttttcgtatgtccaagatactgtaaaaggtacttctggattttgtagacgtgtgtacagtgtgggccacgttagccag

SEQ ID NO: 42146 - DNA, 1080 bp, Homo sapiens
ctcagctcctcggcactgatgggtaccagcaccaatttgatttcctgctaacctatagatgctctaattatctcccccatctttgactgacaatgatcttgttaccttctaatggtacatgacaggtaaaatagcgaatataatgatgcaataattaaccactttggatggatatttgccacggcatttgctgtttatccatttttctgcctcaatcaaggtagatgaggggaaataagacgcaattgttgacattctttacatacgtagcataaaagaagttgaagacagaattttgcagtgcaggtagctgtgcacttgtggggtgcccaaggccttgtgtgtattcatgctggaaaacaaactaggcctcagtggcatcaatcggttgaaggaaagaggataacaaatgtaacctgggctttttcatatgttattttttaaattctgccatcctttttttctgtgcatttctgattttttttgtttgtttgtttgtttgttttttgagactgagtcttgttctgttccctaggctggagtgcagtggcataatcacagctcactgcagcctccacctcccgggatcaagtgattctcctgcctcagtctcctgcatagctgggactacatacaggcgcccaccacgcccagctaattttggtatttttagtagagacggggtttcaccatgttggccaggctggtctcaaactcctgatctcaggtgatctgcccgccttggcctcccaaagtgctgggattacaggtatgcgccacgcctggcctgaaaaattcttaaacatgcaaagtcttcttgcaataaaatagggttattttccagataggaaatcatattatctaaggctgtcaattccacaatatgaaattgctagtctttgccactgtcacaagtactaagctaaggttttcgtgtctcacgcccaaaatgctacaagttcctaatgatgagcttggtgggaaggagtccttgggccacagtcatgggggctgaatccaccccgtgtgccttcacagtcggtgaccccgtgcacaaagagcctctttggaactcagttt

SEQ ID NO: 42147 - DNA, 1049 bp, Homo sapiens
ggcatttatcctgtcccagtatttgagtgaaacttctcagcatttcagagcagtgaccatgatacaccctttcctttccttctccttatgggaaacttggttctaacccagaggacttgggctccaggacccagtaacgcagccctggacttgaccctaaaagggagtaaagacaaaggtgaagttcagtctggggttcagggctgccaaagctcatagcctggagcttcttaacctttaggcggggtagagacatttaagacggcccctaaacttggggagcgcgtaggctcataggaaatagagtccgttacttgtcctgggaacggcggtgggtgtcccaggaggcggacttccggtgcactcctgcgcgtgtgcacctctccctgcgtgcgtgttcgcgcgtgcgtgctcgcacatgcgcgccacctccgcactgccctcgcttcctgcgcctcttcaggtcaccgcttgctctagttcccaggctttggcctctagtggatgagaatcaccgagtctgcggggctggacgctgaccgcccgggccagcacctaggcgggcgggagctgtgcggcccagggttcgcgcgggccgggtagaggctcgagccgggacccccgagcgtgaaccccggagccagcggcgctggggccagaggggccaggcgggaggtggtggcggaggcgaaggggcgacgggacctgggcctggcccgtgtgtgtcctcggcggcctggcgccggccgtcgctgtacggtgagccccagggaggcggatctgggccccgagaaggacacccgcctggatttgccccgtaggcccggcccgggcccctcgggagcagaacagccttggtgaggtggacgggaggggacttcgcgagcagacgcgcgcgccagcgacagcagcccgccccggcctctcgggagccgtggggcagaggctgcagagccccaggagggtaagtcttgggttttcgggcccggagcgagaagggcctgagtgaagtcaccgtgtgttggggaccttagagtgtggggcagagg

SEQ ID NO: 42148 - DNA, 1078 bp, Homo sapiens
gtaatccgagcactttgcggggctagggcaagagtatctcttgagaccaggagttagagaccagcctagacaacatggggagaccctgactacaaaaaatacaaaagtcgccaggcatgctgggatgcatctgtggtcccagctactcaggaggctgaagtgggaggatggatggagcccaggaggtcgaggctgcagagagccgtgaatgcaccactgcactccagcctgggtggcagattgagaccctgtctcaaccaacaaaccacaaaaaacatgagccgtataatgggaattttttttctttttgcaccttgtatttgatgatgatggcagactatttgtaaaaggagtcgtgctacccatgagagtctaactcatctaattactacctgattatcttagagttacaggcgcatgcttcccctatcactcttttttttttttttttttttttgagacagtgtctctcacccagtctggaatgcaacagcgtggtctcggctcactgcaacttccacctcccaggttcaaaggattcttgtgcctcagcctcctgagtagctgggactacaggcatgtgacactatgcctggctaatttttttgttatttttaagtagagacggggttttgccatgttggcccaggcaggcggatcacttgaggccagaatttgagaccagcctggccaacatggcgaaaccctgtatcactcttttagacccttctgagtgtttgcaggttgagtgttcacagggtgttagcctattgagctttcttttgcggttcttatgcaggtgatttctgcctttgcaggccggagccctcatgacttcagtgacctgcttctgcccctctaggtctatcagccacagtctctgcaagtttccaagagcagcagaaaatgaacacattgcaggtgagttttcctgcttgtgtatatgttcctcaattttattttatgatgcattttaagaggtttgtaaggattcatactttttttttcttttttttgagatggagtcttgctctgttgccgaggctgcagtgcagtggcatgatctcgcttcactgca

SEQ ID NO: 42149 - DNA, 1019 bp, Homo sapiens
gcttgagtggttctctcacctcagcctcccgagtagctgggactataggtatgtgcccccatgcctggctaatctttttttttttctttttgtagagatggggtctcactatcatgcccaggctggtctcaaactcctgagctcaagtgattccccccgcctcggccccctaatgtactgggattacaggcataagctaccacacttggccatgagtcatttttaaaaaaacagattccaacaacctttttgattgctgtgtttagaagatttatacttaattttagatgggtttttattatctcttttctaagttgttccctctgggtttttttatacctgtttgccttttcttgcctttttatggggtatttagacatttcttagtatgccatttaacttcatatgccgtgctaaatcaattcagtatgccatttagtatatatttttgtataggattttataggtggctgtagagattatattatacatacttatgattgttggctagtatcaaccttttaccagttcaagtggaatgtagaaactctacttctttctaggcccctttgcccttttttatggtattgttgtcttgaatatcacctctacatatgttgagaaccacgtgagataatgttatgattttgctttcgcccatcaaatataatttttaaactcaagaaattatattcacccagatatttaccgtcttattgcttttttaaatttcttttttaaaatttaatttgtatactttttcttctgaaaaaaaatctttttggatttttcttcattgctttttttttttgagacagagtctcactctgtcgcccaggctggagtgcactggtgtgatctcagctcactgcaacctccacctccctggttcaagtgattctcctgcttcagcctgttgagtagctgggattgcaggcatgcaccgccacgcctggctaatttttatatttttagtagagatggggtttcaccatgttggccaggctggtcttgagctc

SEQ ID NO: 42150 - DNA, 1049 bp, Homo sapiens
tgtgtgcaacccagaggccaatttgtttttttgttgttgtttggagacagtgtcttgctctgttgccctggctggagtgcaatggcccagtcatagctcactgcagctgtaacctcccagactcagtcactccttcttctcaacctcctgagtagctgggaccagcggtacacactaccatgcccagctaattttttatatttagtagagacaaggtctcactctgttgcccaggctgatcttgaactcctgggctcaagtgttcctcccatctcggcctcccacagtgttgggattacaggcatgagccactgcacccagccctggaggccagtttgaaacctcagagtattccacattgccgttgagctctcaaagcttttgctgtgttgatcctggttgttttcacacatgggcacttcgagggcatggccaggacttctacacatatttaacccatttcccatttaggaaaaaaaaagtgcagcttgctgctagcgttcatttaattttgcataaacacacttttgagactgaagtaaatctgactgattttcaatgcgaaaataaaatatgaaaactgggtttggccttcttccaagtgtactttccttcccttccttcctttctttactgctttaaagctttttaatatactttcactcctgttctaaaagaaaaaaatatatatcaactgttcttggagttattattaaacagaacttgtctttaatccgaatgtaacagaaatgtacacgacgttatattaggattagagaggaatattctgcggtgggtgggacggggaacgggaaatgggttggagaatccttgcttctagctcctcactgtctttgagagaggatggggtgccaccttgttactgtggttcagtcttgtgcaggttgtggatggtcagcagggcccttccacacagtctttccagtgcttggtggagaggggagagatgccacctctgcttgtgttggcccaaggtggggagggtcaacaggtctttgttccacagtgtctacagtatctggggcagg

SEQ ID NO: 42151 - DNA, 1041 bp, Homo sapiens
ctcttcgctgtcatttggctcgaaagatgaggctccttttgcgggggttaggggatgaagggggcactgggatttcctggttgtagactctgctctaacagataagacagggtatataggaggccaaagaacaaaccatcaaaccaccccaggaactcaccactgggtcagcccttctcttctctacctttccagaatttgttggtttgattgattggatcgttgcttcatgtatttatttatttgtttttaattgagatagtctggctatgtccgccaggttggagtacaatagcgcaatcttagctcactgcattctccacctcctgggttgaagcagttctgcctcagcctccctagtagctgggattactggcgctcgccaccacgcccagctcatgtttgtattattagtagagatggagtttcaccattttggccaggctggtctcaaactcctgacctcaggtgatctgcctgcctcggcctcccagagtgctgggattacaggcatgagccaccgtgcccagctgcttcatgtattttgaacaggggttttagttgtaattagaagagaaatgtaatgggtgtgcttattccatctcctatggaactggaaacaacatttggcattgaaaattgttgtcttgataaccttcagggtgttacttctcattttagcggcaatacattttgcttccgtgtgatgaaacatcctacccatttgcatgttgattgtgtctcatgtcccatctcgcaacaggcagtaaaaccccatctccagcccaaagcaccttgctaaagagcctgcaccgcagtcactgtgcctttgcgctctggctcgtgcgacctctccagatcttcttcctcatttcgtctgttcactggggccctcttctccctgtgactcgcctcagccttttcactccttgctggacatggagtaggactgttgggaggatgaaatagacgaatgcgtggcaagcatgtaggagagcctgtggcacagaagcagcactcggtacatggtgcttgttgtta

SEQ ID NO: 42152 - DNA, 1083 bp, Homo sapiens
tcttctaggatttttatggttttggattttacatttaagtctttaatccatcttgagttagttttttataaggtgtaaggacagggtccagtttcagctttctgtatatggctagccagtcttcccagcaccattaaatagagaatccttaccccattgcttgtttttgtcaggtttgtcgaagatcagatggttgtagatgtgtggtgttatttctgaggtctctattctgttccattggtctatgtatctgttttggtaccagtaccatgctgttttggttactgtagccttgtagtatagtttgaagtcaggtagcgtgatgcctacagctttgttctttttgcttagtattgtcttggctatacaggctcgtttttggttccatatgaaatttaaagtagtttttctagttctgtgaagaaagtcagtggtagcttgttggaaatagcattgactctgtaaattattttgggtagtatagccattttcacaatattgattcttcctatctatgagcatggaatgtgtttccatttgtttgtgtactctcttatttccttgagcagtggtttgtagttctccttgaagaggtacttcatgatttatgagagtttttaaaaagtttttgtctgctaagtccaacgtctgggcttcctaagggctgatttccatcaatttattttgttattttggatacgttcctttgtcttggcatgatttgtgactgtcattgaaacatggacatttgaatattgcaaggtagtaactctggcatttagatgatacttctcattgtttgctatgtgtctgtgagtgagtgtgtttttaatcattgaaggctgtagtagtacatacatttagtgacttccaaactatttttgcaaagatttatcattttcatgtgtggtcactgaagtctctgattcttttagcttgtgttcagctcacattttgatagagatttccttgaatactaggagctaaaaatggaagaaaacacctctcccagtctttgaagtttgcctttgcaccacagcttttcttcagcacttagctgggcctgcactgaccctcgtaatc

SEQ ID NO: 42153 - DNA, 1034 bp, Homo sapiens
ttttttttttttttttttagttggagtctggctctgtcacccaggctggagtggagtggcgcaatctcggctcactgcaagctccacctcctgggttcacgccattctcctgcctcagcctcccgagtagctgggactacaggcaccagtcaccatcaccacgcccagctgattttttgtatttttagtagagacggggtttcaccatgttagccaggatggtcttgatctcctgacctcatgatccgcccgccttggcctcccaaagtgctgggattacaggcgtgagccaccgtgcccagccaattttttattcctatatacattttcttgagctttgttttgggatgtatttaagatcattggaaagttggatcctttcaggtcttgtttttatgattcattaggtgggtccagagcagtgctcaatctaagactgattctttcccattcctgcggtgcttgagtactccacacagagccctataaattgtgagtttttccagtctgacttgtggtggcccccatctctacaaaaattaaagaggctgggcacagtggctcatgcctgtaatcctagcaggtctttgagaggccgaggtgggcagatcacctgaggtcagcagtttgagaccagcctggccaacatggtgaaacccagtctctactaaaaatacaaaaaagtagccgagtgtggtggcgggtgcctgtaataccagctactctgctgaggctcaggcaggagaatcgcttgaacctgggaggcggaggttgcagtgagccgagatcgcgccactgcactccaacctgggcaacgagcaacaggccatctcaaaaaataaaaatcagtaaataaataaagaaaagactacctcatccagaaatgcctttatagacacacccataaataaatgttcaaccaagtatctgtgcaccccatggtcccttcaagttgacacttgaaattacccatcactccagccttcagccgtgggtttgtttcatatatagatttctagaactccctctttgca

SEQ ID NO: 42154 - DNA, 1034 bp, Homo sapiens
aagtttgtgcagtggataaaacagtatgaaacctaaatgttaaatttctacatgtcagtttaaaaacaaattggaggaagaattgggtggaaaggaaagtggctcaaaagtatgtgtggaaagacttaggataccttaggtacctcatctgagtcagcagtgtgatgtggccgccaggaaagctaaagtgctcctggtctgtgctgttagaagaaagactagaatgaggcaggtggatggtattcctgccttccgtagttctgctcactgtccgtggagcactgtggtcagatcagtgtactgcactgcgagggaggatgtacacaaacggaaattcattcccagtgaagcaatgaagatgttaaggagatttgcaacagcccaaaggggtggtggtggatgttggggttttggaggtatggaagtattagcccagaggagaaaagtctcagggggaataaagaaataagtgagggaaggacaatggtctccaaaaaaccaaaggactgtcccttgaaagaagcaaaataacttgctctgtttgacttcaaataggatccgtgggtgaaagaggaaatacactgtaatccactgtaagaataaactggttcatggttgacgtgggtcactctaggagagagttgtctatattgtaacaggttggatgactgtcctacagaaaagatgcgtaggagatttctgtttccattggaggtttagtaaaatgatgggttcctcttaactctgatttttttttaatagctttgttgagatataattgacataaaatagaccgtacttgtttaaagcatgtgacattttgacacacatacacctgtggaaccatcccaccactaagataatgaacatccttcacctccaaaagttcccacatgcctgtaatccctctctttacttccacccctgttcccaggcatccactgatctgtcttctgtcactgtagataggtatgcattttccagaatattctataaatggaaatcatacatttaagttttaaatatttggcttt

SEQ ID NO: 42155 - DNA, 1034 bp, Homo sapiens
ggcgcctgtagtcccagctactccagaggctgaggcaagagaatggcgtgaacctgggaggcggagcttgcagtgagccaagatcgtgccactgcactccagcctgggcgacagaacgagacccgtctcaaaaaaaaaaaaaaaaaaaagccccacctcttaatacgatcacagtggcaacacctgaattttggggaggacacattcaaaccatagcagagtcataatgttgcaacctattttcaagtaattcagccaaaaagctgggggggggggggaatatctgtaggccgagcacaatggctcatgcctgtaatcccagcactttgggaggcagaggtgggaggattgcttgaacccaggagtttgagaccagcttgggcaaaatagtgagatctcatctctacaaagaaaaatttttttggcctgacgtggtggcgtacgcctgtaatcccagcactttgggaagccgaggcaggtgaatcacctaaggtcaggagttcgagaccaggctgaacaacatggcaaatccccatcttcactaaaaataccaaattagctaggcatggtggcgcatgcctgtaatcccagctacgggaggctgaggcaggagaatcacttgaacccgggagttggaggttgcagtgagccaagatttcaccatcatactccagcctggacaagagcgaaactccatctcaaaggaaaaaagaaaaaaaagatctcatatccaaatttctcaaggcccaactcaaacaccacctattttataaacttttttttttaagatgtctcactctgtcgtccaggctggagtgcagtggcatgatctcagctcactgcaacctccacatctcaggttcaagtgattctcctgcctcagcctctggagtagctgggactacaggtgcccaccatgcccggctaatttttgtgtttctagtagagatggggtttcgccatgtttgccaggctggtctcaaattcctcacctcaggtgatctgcctgccttgacctcccaaagtgttgggat

SEQ ID NO: 42156 - DNA, 1062 bp, Homo sapiens
tttattactagctaagtgatttgcttttacacatctgcttggcagctggtgcaatgataagttgttaccacaaaataacatggtcctgaattacatggaatttttggggtcactttcgaatggttgaatttgttgatcccaacttagaaggggtcagaaaagagtacctcgggatgattgatccgttttttgtttgtttttaacttggcttttttttgttttttgttttttggtctgggggaagtattcacccagaactcctttaccatgtccacttgtgtttctgccttaccagctcacggatgattgatatccagaccaggatggctgggcgagcattggagcttctttatctgccagagaataagccctgttacctgctggatattgggtgagattctggggcctggttcagattgtctaaggtggtgaagtgtctttgtaaactgaccctgagtgtctggtcatgtcttccagctgtggcactgggctgagtggaagttatctgtcagatgaagggcactattgggtgggcctggatatcagccctgccatgctgggtaagtatgtcctgtctggcaccagggtggattaccctgatgggtgtggagaagccacaggtatttctctttctctgactgccttttctctaatgtagatgaggctgtggaccgagagatagagggagacctgctgctgggggatatgggccagggcatcccattcaagccaggcacatttgatggttgcatcaggtgagggtctttaattcctgcttttatttatttagagacagggtctcactctatcacttaggctctagtgcagtgtctgtgattatggctcacactgcagcctccacctcctgggttcaggtgatctgcccacctcagtctcctgagtagctgggactacaggcccacaccaccgtacctagctaattttttgtttttttgagatggagtcttgctctgtcaccaggctggagtgcagtggtgtgatcttggctcactgcagccttcgcctcccaggctcaagcgattctcctgcctcagcctccca

SEQ ID NO: 42157 - DNA, 1311 bp, Homo sapiens
ccagaggtgagggacactgggtttgcaggcaggcctgtgtcttttgacttccaggcagtggggctcagcctgcagagcctgctgggagaacactggtggggaagcagggcccagccccagagtgcagaccctggagtgctcacatcctctggaatctggaggcagagacctctgctctgcaggtcccagaaaggcgtgtcagttccttctcgtgggactggacctcgtccctgtcggaagggtcaggcctgggtgcctgggcttctggagtggggcagatggtttgagaactctccagggtgacctgagtgcactttggttcctgcaggggctgagtgaaaatcaggatgaagttgaacccagggagtctgtgttcaccaatgagaggtaaagcaactgctgaagcctgccccggctgcagcgggggctgccacatttgttagacatggactttctctctgccctcacccaagcctctcaggtcacatgcagcagggacaccaaggtgacggtagaaacatcaggtcccatttggactgtgcctgtttggggctaggggtttggggtcctggatgtctgggtgcagccatgcagcctggactccctttgtgagcccacacatgccccttccccttgccacgcctggcaggctgtctccttcttttctgatgctgccctccacctgcatctgggaccctctcccttgggtgctgtggctctcccttccttcctgcatcctcatcttgactctcctgggtcactgctgtcggcacacagacatgctgcacaatttctccttttctagaaaagttccttccttaaccccataacaacaactaaccaccccgttgttgcttcccttcatagcagaactcagacctgcctcttcttcccctcccaccattctctcaatccacttctcaggctgacaattctgtctcatcacaaattgttcttgtcaactccaccaccaatttccatcaagccacatctggtcacttgtgactttttttcatgtccttaatgtgcctgctcggtagggtcaaagacagcagtgcgctccctccttgacgcttccttcacttggccttccacccaccatcgtggtttcctcagccttcctggctgctcctcactccactgctgcttcctcttcgagtgctgggcccagcctggattggatcccttctctacctgtggtgctgtaaatgccagccggaaggtcctaattcccaaatgtgtatcttcagtctcttgccacctggggtttcccaatgccccctcagtgtctatacctggagtttccatggg

SEQ ID NO: 42158 - DNA, 1026 bp, Homo sapiens
tcagtatttttctgaatgaataattgattataaggtagtgaagagggaggttatatctgaggtccagttgacatgagggaaaggtcttaagacctttaagacatttaagaggaaaaatgagcccaaaatgcatgtgtttggaaggcccacagctgggcacagccatgcatgttcctcacgtccaccataggtttatgctgcctgaccccttgggtctttgctcatttcccttagtttccctagtccattccccatggggagctgggacccttctggatgacctcttctctgaggcgcccatctcgtgctcccagggagcactcccatctcctccctcccaggggaagtacacattgccttatctccatgtgtcttaggatccttcttgtccttacactggtgtcttcaaacgacatgtcctaaaagtaaatgtgggtaagttgaatgacctgagcatccattcctcagctattcaaaaagtaggggtagtgccacctatcttggcagtgtgttgagggtgcccagcacgtaccttgccatccctcgttctgtaggctctcacttccagttcctcagatgaggtacagggcagggaggagcttctcccgttactgtcatctcagtctaaccacattcaggacacttgtttattttaaataaacaggtgaattaagaaaaagttttttaagtctttacctaatcagtctccaggctctctttttggcctgttcctcccttcctcctggccgcctccctcccatgcctctcatgtgcctcctgcagggctgggcccccacttctcttgggacctgtgctttggggcactccccgtcttcacctccttcctttagctccattgatgactttcccccttgctgcttctcccatggctcacctcttgccccctggttcgccactctgccctcactttgtactctttgtagaatcttgagatgactcctcctgtgtccccagccctgctctgcagctgctcctgctttgtgctggctcatcaggctcaggcat

SEQ ID NO: 42159 - DNA, 1027 bp, Homo sapiens
ccggtgcccttgactgacctcggctcggcgccccctcggccgccgctgctgctgctgggtgcgacaggcaccctcgcgaagctagggccgtgggggccgagtccctcacgcgggagcctccaggctcgggtccagcggagcatgcttgcaagctgttggccggctcgcatctcacaaggtacgtcctccccgcgctccttctcccgccctagctcgcagccccgcccatttccgtcttcagccgccccgcccagttccgacttgagccccgccctctccccgcccccatcgcgggattctccgcccttggtcccgtttccttacgtatccccgagaacagtccggccccgcctccatccccgccccttacgccattacgtaatccccgcaggctttgcgcgggtcgccctgagcgccgcacctggcctcgccctaggctgggcaacccgcggtgcttgcccctcccctcgcgaagcgccgcggtgcgtagaatctgggaattcggtctgcgccgctctgtgcgtgctcggttctggttgcagcttagggctcggttcccgccccgcacctgccatcgctcactgacctgggtggctgccatcgtttctgtgccgccggcgggggcgagcggcgccagggtggctctgggcggcggagtgccagtgtggtggcgccgtgctccactgccgggggcccgggcaggttgggcggagcacggacacccacccatcctggagtcgtcgatctagaaggagctcgggggcactctagagctcttccccaagccccttcgtcccttttacgtttggggaaggctcccccagtctgatcccacctgcttttctgcccatactccccattctcatactcccctatcaggcaccctgcctttcaaggtcttctccacaccccacctcctgctggggtgctgtctgtcttccagatagccagttgcccgagtcctatacttttttttggtgggggtcttaccctcgcccaggccggagtgcagtgacgcgaccgtagc

SEQ ID NO: 42160 - DNA, 1110 bp, Homo sapiens
gagtttgagaccagcctggccaatatggtgaaaccccacttctactaaaaatacaaaatttagccagatgcagtggcacgtgcctataatcccagctactcaggaggctgaggctggagaattgcttgaacccaggagtgagctgagattgtgccactgcactccagcctaggtgacagagcaagactctgtctcaaaaaaaagaagagagggccgggcatggtggcttacacctgtaatcccagcactttgggaggctgagacgggcggatcatctgaggtcaggagttcgagaccagcctggccaacatgctgaaacccctgtctctactaaaaaaatacaaaaattagccgggcgtggtggcatgtgcctgtaatcccagctactcaggacgctgaggctggaaaatcacttgaacccaagaggcagaggttgcagtgggctgagaacgtgccactgtactccagcctgggcaacagagcaaaactcttttctctagagacgaagaagagagaacttgtgctgaagcctatggtccagagagtgcagggagagtgcagggtttttgaggagagaaaggatgtcgagtggggttgagcttggtggctgggatgtggaagggcagtttggggagcacaggtggaaacagagaggcgagcatggcctgtgctcacaggggctcctaaggcatggcatgaagtctgagtgggatctggagggccatctgggggtagagggcctgaaggattttaagtaggggaatgacatggtcagactcaggattgcactgcgactaatggcttggaaaggggcatagctaggttgggagtgtagggagggagcctggggaccagaaaccctctccaggctgttacagaaagagggtggtgtcctggctgaagttgcggcggtgcgagtggagaatagaggtcgatgcatccagacataaagagaaggttgacagtttagggactggttattttattttatttttttttgagactgagtcttgctccgtcgcccaggctggagtgcagtggcgttatcttggctcactgcaatctctgcctcctggtttcaagcgattctcctgcctcagcctcccaagt

SEQ ID NO: 42161 - DNA, 1062 bp, Homo sapiens
gtatgtctctcacctagtaaaagaaagatattaaaataattacacttatttcatatgttaaattatataggaagcattgtgaaatgagaaataatgtttaaccttgtttgagttaaatttgtatggacatgttattaatatatgctccagaaactataggaaattcctagaaatgtagtatgttatcagtcataattttgattattatgttaaaaggttgtatgccacagaaatcaaattttcttaattgtatcactattataatgaactctcatcagatctttaaccatgccattttacatctttatcatccatagacagttattttacttaaattattctgtaaaagcatttgcaagacttagctccagttcaaagttgcttctttgtcaaggaaattaataaaaagactgtgtcaattaccctggaatacaggtttctgataactttaagataataccattggacttggttagacattccagaactctagtgaaaatgatgggctcatgaaactgtgatctcacgatcaagcagaacaaatattaactacgtggattgtagtatcatatggcttcatgtattaactacatgaatataaactgatgaacataattttcacgttaaaaaaagttatttttgccgggtgccagtggctcggctcacatctgtaatcccagcattttgggaggctgaggcggacggatcaccagaggtcagaagttcgagaccagcctggccaacatggtgaaaccccgtccctactaaaaatacaaaaaaaaaattagccaggcgtggtggtgggcacctgtaatcccagctacttgggaagctgaggcagtagaatcacttgaacccgggaggcagaggttgcagtgagccaagatcgccccattgcactccagcctggacgacaaaagcaagactccgtctcaaaaaaagaaaattatttttattttctttatttttctttctaacacttctccctcaccacccatgagtttttatttgaaacattgctggtttttttgaatgttttattttccagattttctttttttg

SEQ ID NO: 42162 - DNA, 1051 bp, Homo sapiens
gggtaagcattcgcccagccaacatctggaacatcccagttctgcaaagagccacacccttcccagaaagagcccaacttgccaaagatttacttatttgttttaaactggttttagttgaccgcttttcattttgtgtatagcagcgttttaaggaaggtctaatttatccaggccacctgctgctttagcaaaccaagggagaggatgtgagattctaaggaatttacatatgtatgtcatatatatatatatatatatatagacacacaatttttttttgagacagggtcttgctctgtcatacaggctggagtgcagtggcacaatcatagctcactatagcctcagatgcctgtgctcaagcaatccactcacctcggcctcctgagtagtgagactacaggcacacaccaccacacccagctaattttttaattttttgtagagactgagtcttgctgtgtcgcccaggctagtcttgaactcctgggctcaagcaatcctcccacattggcttcccaaagtgctaggattacaagcgtgagccactatgcctggcttatttttaaggttatatgcatgcaaagcctgtatcaatgaaaatattttctttggtttttttcaacttttcatcttcgcattttgcagatttatagaaaatttgctaaaataataagtccattgaatacatacacacccttcaccaaggttcaccaattcgtaactgccatatttgggagttatatgtgtgtctctctatatatacatatatggatacagatacatatacatgtttagtgacttgtttatatttgtacatacatgtacatgttgttatttattgatcgtttgggagtaagttgcagggatcattgactcccccacaattatgctagatattctcaaaagaaggaccttctcttttttttttttttttttggagacagggtatcactgtcattgaggctggagtgcagtgatgcgatcacagctcactgcagcctcaacctcccaggctcaagtgatcctcccacctctgcctcccaag

SEQ ID NO: 42163 - DNA, 1029 bp, Homo sapiens
gttcagcaagcaaatcaaaacaaaattccaaatgatcaagagttgattgtaccagatcttgaatggactttgttttgcagtttgctaaattatctttttgaggttccagtttctcatctaccattggcagtaaagtgcagagtaatactgattttatatttctaattgcaacaaagctatgagtgcttagtggaaaaccaccgatcctgagaattagggtggaaattggaggtggcaagaattgaggtggctgaaatggtgccatctaaaaactggcaaaactccaaatttattctttatcaggattcagttagggagtttagaattcttttttaaatagagatgggtttcactatgttgcccaggctggtcttgaactcttggactcaagtgatcctcccgcctcagcctcccaaagtgttgggattacaggcatgagctaccacgcccagcctaggagtttagaattctaacctttgaatctttaaacttagcatgtctgtctaaatttctgagcatatttttatccaaaatttttatggtggtaaaatatacataacataaaatgtgccactttacccatttttcagtatacatttcagggatattgagtgtattcgtaatgtataaccatcaccactatccagctccttaactcttacagcttgtaaaactaaaaccctgtcccctttgaatagtaattccctattgccctccttcccccaggtccctggcaaccaccattctacttcctgtctctgagcatattttaagatttgtatgtaataggaaggaaagcagtgtataaaaactacagctagttttcactgatgctagggcctgtaaagctattgaaaagcttattttaaaatgctgtttacatgtcaaatgtcaagtcgtttaggtttgttatccttcttcactccaagtgttccattgcttagttccaaaccattatcctctatgaaaagtgttaccagaaatatttggatttgctaagaggtctctgcatgacggttcatgtaaaag

SEQ ID NO: 42164 - DNA, 1027 bp, Homo sapiens
gcacaatcacagtcccaaagtgctgggactacaggccggagccacatgcccatgcccagccttgagcactcaactttctgttgcatctacttactggatacatccctaccctcataacatctactctgtacattggcttctttttatagttaccctctctcagtctcctttgacacctacagatcttttctggctcaccctaagggttcagtattggccccatctgccatctggaagtggagtcccacttctgttgctctctgctgtgctgcatatcctggctcccaactgctccaccctggtgaaactgttctcattgctatcttccagattttctgcagtcctttgcttgtgacgtgatttctcctttccaaattatcagctccttgagggcagaaaccgagtcttaggtttgtgccttctctacattctctccacccttcatagacatgcagatacgtggttgatttgagtaaggaaaagtgatttgcctgtcaaggattttagtcacacttggagccgaaagtagggtttcctaaattactgaggctgtaattgactactttaatctttcataatcaatagactgtccctaatgggcagtagaaaggacactgctcagtagtggcagggagtttgcagcacagaccttgacttcaggtgtcctgaattggcacgctctgctgatctgttcctgttctacacgcactcctgccagcccagtgtagcctcaggcctgttgggtctacccaggagcatggcagaattatatagcacttggtacttaggaaatgtttttatggtcagttttaaacttataaaatcaagattgaaatataacagacaagaaaacataggtacagaggtaatttggcagaggtcctacatcaagctagctaaggtgtcaagtgaacctgttctcccatgtgttgttattgatctgtgtaggaatgtactgaatttcacgaaacacagcttatttatttaggtagtagtcccccaaacttgaatctagtgaaaggtggca

SEQ ID NO: 42165 - DNA, 1023 bp, Homo sapiens
ctggggcattcttatggcaaatatcgtttaatataataatctatttatactatattctgatgtcttttttttttttttgagatggactctcgctctgtcgcccaggctggagtgcaatgggctcactacaacctccacctcctgggttcaagcgattctcctgcctcagcctgcccagcagctgggattacaggcatgcaccaccacaccaagctaattttgtatttttagtagagacagggttttaccacattggtcaggctgatcttgaactcctgacctcaagtgatccacccacctcggcctcccaaaatgctgtattaggattaactcagttttacaaataaaataaagcttagagaagttgaataacttctcaaggtcatatgctagtaagtgacagaggctagatttaaaccaatacctatgcagagtaaacgacgcttgatacagctgaggagatgacatcgaggttgaaatggattggtaatgcacgccatacgcatgtatttgaggaccctgtgaagtattgcacgagagtgttaggtacgtcagtacttgctgtgtgacatctaaaatttttattaggacattcttatgcccataatcaggcaacaaggagaaattttttttttttttttttttttttttttttttttttttttttttttttttttgagacggagtctctgtcgcgtgagctgaagtgcagtggtgcgatcttggctcactgcagcctccgcttcccaggttcaagcggtaggagaaataattctattatgtatgaatgtgttaaacgtaaacaacttcagtaatccttcttctgaatacaacattacttctagactgtccatttctgtatttcttagaaccacggtgtgtgaaggagggtacttgcttaggttttaggatgtaaatactgcagatacagattctgagtgaataggagagaagcagttgtcttaggaaggtgtgttacgtttgggctgggcatggtggctcacacctgtaatcccagcactt

SEQ ID NO: 42166 - DNA, 1050 bp, Homo sapiens
acattgcagaaggcagaaaacaagataaaggtggctttggattcagaaaaggtggaccagatgacagaggtgattggttcttctaaagctgaacatcataaagatttgcagtatgcctaccaattccaactcgtgaacgttcctagtagaactcgattatctcataggtgtgataggttctcgtgagctcttaaaagtttgcgtaaaatcctagaaagaatggctgatgcttctgcaagcctggcgttttttgttttctgttggaagcaaaagctcttaaaatgatttcattgaaccttccatcacttgagttgtatgtcttccaaatgaatttttccatgtttgcgcagcaaggtaatgacacgacctcaactttatcttttttgtgtatcctcaggaatgggtagctctcgagaatctagaggtggatgggattcccgggatgacttcaattctggtatcagtatttaaagtatcaccacttaatttttcctaggagccttgctgctgttctctgtttcttacgagtagcccgcctggccggactacttatttagttcctttaacaaatacaactctcctgcagggtgcccaggcatgcaagtaagcctctgttagagcctgtgggggcaggacttgagccccatgcaccttgtgtggtcacctttgttagcctgcagctccttggatgtgtacgggcctgggtccttgagctcgctcagcagtctttctcagactctagcccagggaaactcctctgtggttttgtgtatggcaccaagagaagtactgttccttctggaaaacataggatagaggtttgggttcttacatggtgaaaggtagtcctgatggcccttttttttcttggaggattgtggggaggtccagtcccttgatggtggacctgatgcacttcgccgttctctttcttagccaacccaggcagagcagctggtggtatagcacaaagcatcagtccacacgccaggcctctgccctgcagggtgattttaagcatttttatcatctttactttctgtttttaaa

SEQ ID NO: 42167 - DNA, 1027 bp, Homo sapiens
gcttattcataaaagtgcagtatggtgaagtcaatctgtaattttatgtataagctagtctctgattgaaacatgcagcagctgtcttcttagagccaaccagcagctcagggaacggcctttcccctgccagtttggtattcgcaggtgttatagaagttgcccacatactaacgtctttctacccttggcttagcttggccactggcgctcaagcagagacacagtgaacacggccatggcctggccgccaccagttctggtgggaactgcagtgttttggtgacatctcaaaccctatgtgggctcactcgatggagtaatggctaatttgatactttatacgttatttgcgagagtagatcttttttactttttaataggatggtgctattttttttaatgatacctgctcatgtaaaaaacaaaatagagcaacagaaaagtaccaagaaagcaaaaacatttcatcatcagaaatagccagtgttaaactaagctttgtaaagaaaactctgaagattctcatgaatagtttgcttcctagaaacccaccaacagattttttgttgttgttttttttgagacggagtcttgctctgttgcccaggctggagtgcagtggtgcgatctcggctcactgcaagctctgcctcctgggttcatgccattctcctgcctcagcctcccaagtagctgggactacaggcacccaccaccacgcccggctaattttttgtatttttagcagagacggggtttcatcatgttagccaggatggtctcgatctcctgacctcgtgatccacctgcctcggcctcccaaagtgctgggattacaggcatgagccaccgcgcccggcccccaccaacagatttgatgagagatccttgttcatctgcttcaccagcgtggtgtgagctatttgtttcacgctagacattggtggtcgaaatcatttaatctcatagtaaagggtgtaaatttactttgtactcacgtggaaaggtacacttcacagtttag

SEQ ID NO: 42168 - DNA, 1965 bp, Homo sapiens
tcttggctcactgcaccctctaccttccaggttcgagcgattatcctgcctcagcctcatgagtagctggaaccccaggcgtgcgccaccatgcccagctaatttttgtgttttttgtagagagtgagtctcactgtgttgcccagtctggtcctgaactcctatactcacctcccacctcagcctcccaaagtgctgggattacaggcgtgaaccagtctttttaccaaattttaacatcagtaggttatacagttaaagtttagctttcactgaagtacaagcctgaaggccccttaagaccattgagaaaatactctttcctcctacacaccagtgggaattcagcatttctaaatgagatgcagtttacttctgccaagagcccacttagcaggcacacaaatgaatggggaaagaacgctttgcccccacaggaggcgccggtgggggtgaggcgctgtgctctctgctcatgcccctctgtgtagggcatggccaatttcggataactgctttgtttaccacacaggtgctttgcttgtagaatggcccacacctaaaacgcagccaaaacaggaaaattgggactttgtgtttttattttgtcttcatatagcgttttcttgtgatttttgtgttctgagttgtaaatacttctaaatttcaggtttatcttttaaaatagctgtatagatttctattagaaaatagagttcaacctgctttgaggctttcttgttttgcttaagccgtattaaaatacagtttcgtggtattaatatttttctacttttcatgcaagctgagcatgtaaacagctcgtttgtttgctctcctaagatcttgattcctttttctttgggaagtctgttagcgctgtcattactccacacattggcatttggacccacttttaacacactttattttggagagacttcagatagtggacaaactaaagaatttaaaatgaaactcaaacaattcccagaacattattctataagcagcttggagacgatagtttgaaaagtaattcagtgtcctgtttcttcctcaggcttcagggatgacttcttagggggcaggggaggtagtcgcccaggcgaccggcgaacaggcccccccatgggcagccgcttcagagatggccctcccctccgtggatccaacatggatttcagagaacccacagaaggtacgggctcatgtgtcagtggagggcatcttgtcctgatgggatgatcatggccggttcacaccccgtggggacttggcgttctacggcacacagagttgtcggcatagatccccacgttctctggaatagcaagttcaccttggtcattagagcatctgctgttggggtagcaggccaggtgaattttagaaagtgggctggtttgctgacagcaacatcagcatggtcgttttgctggatatggaatgggatccacactctgacaaactctgctttttctcccccagaggaaagagcacagagaccacgactccagcttaaacctcgaacagtcgcgacgcccctcaatcaagtagccaatcccaactctgctatcttcgggggtgccaggcctagagaggaagtcgttcaaaaggagcaagaatgagcctgcggttgggagggaatggggcgtggggggttagagcaggaccacagcctggtgagtccccgggcagccgtcctgcagccgccactcctgcgcctgccattggcctcctcacagcggaaacacagcttgtgagtgcatgtcagctgttaacaagtggtttttagtacattctgggctttgctgtatctatctagtgcctgtttgtgcgtttttttctttcttccgctgcttccccattttccttctgtcctttttctcctgctccttgttttcccagcagcacatggggttcctcggaggagcagaggtggccgccgtgggggggcgtttg

SEQ ID NO: 42169 - DNA, 1033 bp, Homo sapiens
agagggagtcctggctccatgaccccctcccgagtggactgtccaagcagataggctcacacgagaaacagtgaggctgaaagggggggctatggaagagcggtagggagtccacggagaagatgcagtgaatgcttgcatgcattcacacgtgtgtgtgtcccagctagttcactcctttcgccgtgcgtggtggaggctggcctctctggctgggtgcagtgaatggccagcgggtttcttttctgctgggccaaggcgctttgggggtggagggggtggtgctggtgctgcactgggctgactgcggcgctgacgcagcgtttccccccatccctgttgcctgtgtgttgtgtggatctgttcctagtataggcaacataatgagatactgtgcttcccacctccccttcagttcagagccaaaatgggtctagaatctggcactttactcatttcctttgataaattgtactatgcagagctgtcaggaaccttcagatagcagtagaggactgcagctgtctaggtctgcggccacatcttggggacacactggactgttcccatgtgcagggttcagcagttatgtgggagtgctaggggttaggcttttgagcttgaacgcctgcgtgtgaacagatgaaaaatccttcagtacccaagtcccagtctgtcctatggggagcagtttgggggcggccggcagcaggagcctgggaaagaggccctcgccaggtgatggcagggccagggtggcctggggcacccagcggaatgtgcttagtatttggtcaccagccgtcatcctgggcttttcctactgtgtcttgttacaaggcctcagcaatccacagaactctctctccttccttccacctgtcagcttctctgcttctgagataagaaccatttgtgtaacaccaacacttaacttcagaaagacatgcattatgtggtgtaatcaaacccgatgctttcagatgacctacttacatcttcaatgtggataagataaagaacaaaacacatg

SEQ ID NO: 42170 - DNA, 1038 bp, Homo sapiens
aacggtgataaaatatatacaatataacaggcctgggtgtggtggctcacccctgtaatcccagtactttgggaggccgaggcaggcagatcacctgaggtcaggagtttgagaccagcctggccaacatggcgaaactctgtctcaactaaaaatacaaaaattagccaggtgtggtggctcctgcctgtcatcccagctactcgggaggctgaagcaggagaatcgcttgaacccaggaggtggaggatgcagtgagccaagattgcaccactgtactccagcctgggcaacaagagtgagactctgtctcaaaaaataataataaaaataaaaaaattttaaatttaaacattaaaatttaaaaatttttgtggggccaggcacggtggctcatgcctgtcacagcactttgccaaggtgagtggatcacttgaggtcaggagtttgagaccagccttcccaacgtggtgaaacctcatctctactaaaaatacaaaaattagctgggcgtggtggcaggcgcctgtagcgcctgtaatcccagctactcaggaggctgaggcaggggaatcgcttgaacctgggaagtggaggttgtggtgaaatgagatcgtgccatagcactccagagctgacactgtctaaaaaaaaaattgtgtgtgtgtgtgtgtgtgcatagtagatgtatatatttatgggctacatgtaatgttttgatacaggcatgtaatatgaaataagctcattatggagaacgggcatccatccccccaggcatttatcctttgagttacaaacaatccgattacattaagttatttttaaaatatacaattaagatatgattgactatagtcaccctgttgtgctatgaaatagtaggtcttattcacttattcattcttttttttttttttttttttttttttttttttttttttgagacagagtttcgatcttgttgcccaggctggagtgcagtggcgccatctcaggtcactgcagtctccacctcccgagttcaaatgattctcc

SEQ ID NO: 42171 - DNA, 1015 bp, Homo sapiens
cagctctgggaaatgaaaaatatcacagaaataagaaactgcacagaagtgttagaagataaagataagaaaatatttcaggaactagaacagaaaggaaacagcccaggggcgggggctcacacctgtaatcccagcactttgggaggccaagacgggcggatcacttgaggtcaggagttccagaccagcctggccaacatggtgaaaccccatctctactaaaaatacaaaaactagctgggcgtggtggcaggtgcctgtagtctcagctactcgggagaatgaggccgtagaattgggaggcagaggttacagtgagccgagatcatgccactgcactccagcctggggaacagagtgactccatttcaaaaaaaaacaaaaacaggagccaaaagagaagaacattagagaacctatttacagaaaagaggaatggagaaaaaggaggggagaaaatcaaataattaattcaagaaaattccccagattgataagggtgtttcttgattgaaagggcccctaggagcccaggacagtggatggaaaaaggctcacatcaaagcacctcattgtggctgggtgacgtggctcatacctgtaaccccagtgcgttgggaggctgagatgggaggatcccttgagcctaggaatttgggatcagcctgggcaacatactgagaccctgtctcttaaaaaaagaatgagagggccgggtgcggtggctcacgcctgtaatcccagcactttgggaggccgaggcaggtgaatcacaaggtcaggagatcgagaccatcctggctaacacggtgaaaccccgtctctactaaaaatacaaaaaaattagccaggcatggtggcgggcgcctgtagtcccagctacttgggaggctgaggcaggagaatggcatgaacccaggaggcggaggttgcagtgagccgagattgcaccactgcactccagcctgggcaacagagcgagactctgtctcaaaaaaaaaaaaaaaaaaga

SEQ ID NO: 42172 - DNA, 1035 bp, Homo sapiens
agagtcttcctctgttgcccaggctggagtgcagtggcaggatctcggctcactgcaacctctacctcctgggttcaagtgagtctcctgcctcagcctcccgagtagctgggatcacgggcgcccgccaccatgcctggctaattttttgtatttttagtagagacagggtttcaccatgttgcccaggctggtcttgaactcctggcctcaagtgatccacccgccttggcctcccaatgtgttgggattataggcatgagccactgcacccggacagcatgcctcggtttctgcttctgcaaactgggaaaacctcaaaggtagaactggttggtccccttggcctgccgaccccttagcccctcaaggtcacagtcagccatcccgcttgttagaggccaggccctgttctggggcgggggctacctgtggctgcttaggggacgggagacaatgccactcccaggtgtgtttgatggcagcctgcagaagtggctttctgcatggccctggaggacggtgatttggacagaagcgtagggccagagacaggacgtgacggtggggctgctgcattggctccaggtaaagatctgtatctgatggcctcactcccaggcagctcaggggttcccgtggctcctggaaaagctacagactaggcatggccaggccctgcctgtgtctctctgtgccagccacgatgagcctcatcgtttctaaaacgtactgtgctccgtctcgcttcctggaacgctgctgcctctcccctagagcgtgcgtaatgctccccggctgtgtccctgggctgatttctcgttgcaggtctcagctgggttgtcactcctctctgcaaagcttccctgacctcatctccctctccaggtcacgttaggtgcctcttgtctgtgtccccagccacagcccgcatcacaaacaagactataattgccctcgtgcttgtctgtcaccttcacagacagagtgtgacttccagtgggtcacggccccatcatcatgttgtcctccgca

SEQ ID NO: 42173 - DNA, 1049 bp, Homo sapiens
tgatgtggccaccctggcccagccacgcctcctcactcctcagagctgcaaagggctgtctgcacctgcccctgagtctctccccgccccaggcaggtgtgagccaggcggaggttgggggaggggaaccagggaggagccggctctgcctgccttgggagggttctgcccaggccagtgttctggcctgtcccacgctctggactttccaaaatgccaagccttttccaaatgtcagttcctgagtcacatccaaagagtgttgggtgtggagtggtcaagatcttgttccccataaagccggagctccctctggggagctgcgtgggggagaaggcagctgcccagtactggggaccccacgggtggtggggacggggtctggcagcccaaggcattccactggtcgtgggtgagcaaaccctgctcccagctctaccagccaccaaatctgggtgaattgggccagtgacagtgtgggtggtacaaaggaggaagaaacagaaaaattagaattgggggaaacattaggcttcaggaagtctcgaggacatgtcctctgggatgatgctgggaccaggtgaggggccgaggagggtgcatggtggcactgcatgaaggcagccccttcccaaggggcaacagcagggttcgggggttggccctctgtccactgaatctccccagtgctgaaaagacaagccccaataaaccagatgaaccagacggagacaaattcacaggcactcaaaggaccaattgctcaagggctggggctgggggtggctgctgatgtgggaggtgggggggaagtggggagagatgctttgccagctgttgagatttcgaaggtttcatttgacaacgagctaagtgtgacatctcagtgggatctggatgccaaagccgccaacgcagacctgggccgctgcatcaacaggaaaacagtgtcagaggcacccaagggagggcccaagcagggctggagggaggtccagctctgggctggcacttacaggaacacagacaaagcatagtgtggccagaga

SEQ ID NO: 42174 - DNA, 1034 bp, Homo sapiens
agcccgtgagggcatctgaccgctccctgacatctgcctccacccccaatgcccccccagggaatggtgtaagtccctgatgctgtctcgaacccacatctccccgaccctgttctccctgataaataaataaaactgtaaataataaaactgcaggctgggcacagtggcttacacttgtaatcctagcacttggaaaggctgagacaggaggatcacttgaggccaggagtttgagaccaacctgggcaatatagtgagaccctatttctacaaaaaataaaataaatagccaggcctggtggtatgcacctgtagtcctagctactgaggaggctgacggaggaggatcacttgagcccaggaattggaggctgcagtgagctatgatcacgccactgcactccagcctgggcgacagagccagaccctatctctgaaaacaataataaaacgacaaccaatgctgactgtgtctccatcactgggtggggctgaggaagcaggcctcagaaaggaagccagttttcccccaaaattattccctgaggctgcctctgggcctgtggatccagatgtgtgggggccttcaggagtggcaggggagtggggcctccagcgtgaaaacagaagtcaccgtcagccttgcacccccggctctgcctcccaggactggtgtttttgcctctgttttaatttcctgctgggtcctcccttggacattgtcaggtatgcaggctgggacatcccttctttcctcctacattccccctagagcccaaggctctgtccgtggtccagccactccatggcagggaagctgtacctccataatcagctgcctgagggcccctgacccaccaccaggcaccaccctggtggggctgaggttagaagggaaagaatgccagaactccagtcctggaggcaggagagtgtgtgagcccagccccgccctctcagactctcagacctttatttcatcctcattttcctggctagaggttccatgcatcattttttttttttttttt

SEQ ID NO: 42175 - DNA, 1014 bp, Homo sapiens
aggaacagggcccgctgtgtgtgtggtgggccgggagggcaaccaccagccctacccggcagccttggggaggagctcaactcagcccatgagcctggagtgctaacgagcctcctctgcccacctgcctccactaggcctcgcagagctgaggtgcaaggcatgctgggagcttactggggtcagggacatggagagctgggtgctggcatcaccactgcctcctgtcgatgcccagacccaggctgcaggttcttggaccagcagcctcccctctggggggcctcagtcaccgggtctgtaaatcggagcccctaagcctggcctgagggctcccctgacctccaattccagtttgggcggagccagggggctgacatgacttgtcctaggtagggcctcactaacaagttacagacaccagaatgttctggaaagagtcactctgcccagtcgggatcatgccagacttgacaggattcttcctttcctccttgcaggaacctccggggagctgggcgggctgaggccgatcaaaattgagccagaggatctggacatcattcaggtcaccgtcccaggtaagggacgggcatctgaccaccccctgcagaaatcagggccggaccgttagcctcctgagggtctgccctggtgaagaagtggcctccaggccgctgtttctctctgtggattctgagagccatcggggtactgtgaatgctttttctggccacatctgtcccctgcgttgtgaatcagtgttctcagctctgaccttccagaaggtcccctcaaaacttcacctccctggcttggcttccctgggatttgtgaggctggacagaagaaaaagccatgggtgtgagaggctctgagtttgaccctaccccctgccaagcctcattttccacatcttcagaggagaggatagatttgggcgctggagcctcagtacggggtgactgttagaagccaagagggtgctgggcacagtggctcatgcttgtaatc

SEQ ID NO: 42176 - DNA, 1158 bp, Homo sapiens
ctgtggttcaaggcagggctatgcttcccctcccagccctggccccgtgaccccagctctgtgcctggcactgtacagaagcctaagagatgcccaccgccagagcgggcaccaaatcctcatctactggggaccccaggggtgccctccctgagagtttggcctttgggctcactcccaggcagagactcctcggagttgctgcttgattacccctgtgacagagagctcattacctctccaggcccattacctctccagagagctcattacctctctgctccatggcctaccctgccatcccccgacagcccccttctggccagcatgattttcccagtgtcctctacccaccacaaaccccagccccacaacaggcttgctctaacaggacaagttgtgctgaagatggggccttcagaagcagtgctgtatgacaaagaaggttgactcatgtctggacagggctttctggagtctgtggagctaaagacattagcataatacagagctgggcttggtcactggtgcttccgactgcagtaacacagcagctctcagacgtgagccgtagatctcagacctttccagaagcttggagttcttgcttcgtagtgggccccgactgtttctactcttttctttcattttgagacggagtcttactctgtcacccaggctggagtgcagtggtgctatctcagttcactgcaacctctgcctcctgggttcaagccattcccctccctcagcctcccaagtagctgggattataggcacctgccaccacacctggctaatttttgtatttttagtagagacgggtttcaccatgttggccaggctggtctcagactcctgacctcaagtgatctgccctcctcggcctcccaaaatgctgggattacaggcgtgagctactgcacctgaccttgtttctacactttaaaccagctccacgggaggccacctgaggccacctgctccaatcccaggcagtgacaatcgtgcaatgtccctggagcaggagtgagatatcagatggacctgttcaggactggggggggtctcactcccagctggatccttcaagcccagcgcagccccccagattccacatgtggggcggcagggactccaggcctgaactatgcatag

SEQ ID NO: 42177 - DNA, 1083 bp, Homo sapiens
ctggccctggcattctccccacacccccacattgggtttcccctaacgatgccatcttgggtcccaggaactgcctcctcacttggcttctctccccctgccctgcccccagagagggattccggggaccctctggtggacgagagcctgaagagacagggctttcaaggtaaggttgagctcacggggaggtctgttgtcccagcaccaggacattgacctggtttgggtttggagggccaggctggaagtggggaggagctggcccccaacttcagggcctaagggaccaggcaagccaggttggcagcccaggcccggctgtaccctgccagctctgtgttagagactccaggggagagggggtgcctacaggtggacggtcgggggagcccaggagcctgcctgccccctccctgccccaccccccagaggtagctgacacgcccactcctttttcagcaatcagctgtggtcttagtgctttgaaatcagaataggagccagacgcggcacctcacgcctgtaatctcagcacttgggaaggtcaaggtgggaggatcgcttgaggctgggagctcgagacaagcctggacaacatagaacccgtctctatgtctatttttaagaaaagaaatcagaggccgagtgcagtggctcacgcctgtaatcccagcactttgggcggccgaggcaggtggatcacttgaggccaggagttcaagaccagcctggccaacatggtgaaaccccgtgtctaccaaaaaaatacaagaattagttgggcgaggtggcgtgcacctgtgatcccagctactagggaggctaaggcgggagaatcgcttgaacctgggaggcggagattgcagtgagccgagatcatgccactgcactccagcctgggtgacagagcaagaccctgtctcaaaaaaaaaagaaagagagagagagagagagatggtggtctgggatccctccagcacatgctggcacttgtctttgtttgtttgtttggatggagttttactcttgttgcccaggctggagtgcaatggcgtgatctcagcccactgcaacctccgc

SEQ ID NO: 42178 - DNA, 1030 bp, Homo sapiens
gcctgactagccatgggaatctgagccttcacttccttaccgccaagatggacaagcacacctgcctcaccatgtgatctgaatatgggaaaagatgggcagtgctaggttagctgggaggactattttccgccaattgccctctttttttttttttttttttttttttttttgagatggaatttagctcttgttgcccaggctagagtgcaatggtgtgatcctggttcactgtaacctccgcctcccaggttcaaatgattctcctgcctcagcctcctgagtagctgagattataggcgtgtgccacagcatccagctaaatttttgtatttgtaggcaccctaacacaatgaaagtccaggctggttgaccaggctggtctcgaactcctggccagcctcaagtgatccgcccatcttgacctcccaaagtgctgggattacaggcgtgagccaccgcattcagccgcctttctttttgtcctcgtttgcaaatacagaatggaccttagtctgcaaactcagaagtgcgagacatgtatttttatttttctaaaattgaactggactcctaccaaaagcccccaatgcagagtggcagaaactttatctgagtccattttggatcatcatttcccttgagcttgcactagggcctggaaccttctgtgaggcccactcagtagacacttccacaccgcagagagactgagcatgagaaggtccgtgcttgaaaaaggcctaacggtgggatctcggtgcaaagatgggagagtggaaaccgagtggtgaagagatgactgtggcacccagcagggaattcccaggagggtgaggcttcgggaactttccagggggacaaaccctgttaagaatggctctagggcctggtgctgtggctcacgcctgtaattccagcactttgggaggccgaagtaggcagatcacgaggtcaggagttcgagaccagcctggccaacatggtgaaaccccgtctctactaaaaataaaaaattagctgggcatgg

SEQ ID NO: 42179 - DNA, 1019 bp, Homo sapiens
gagttggctgaagccaacagaatgtgctgatataagctgtgagaaaatgaggagctgactttgacttcagaggttcaggctgaacttggggaaggacggaggtgctgtgggtggagacagggaagatgcaggagaagctggtggggcaggaggtggcggatcaggcgtgttcaatctggggtctcatccagtcgaagttggaagcaagttggggctcaggggagcagtccaggcttgagatatgatttggggaatcatgaatttataactggtatttcaagccttaaaacaggccgggtccagtggctcacgccagcactctggaaggctgagacagaagggtcacttgagcccaggagttcgagacaagcctgggcaacatagcaagaccccatctctaaaaaaaaaaaaatagctgcacgtagtgcacacctgtggtcccagctactagggaggctgaggtgggaggatgacttgagctcaggaggtcaggctgcagtgagccacgattgtgccactgaactccagcgtgggaaacagagtgagaccctgtctcaaaaaaataaataaattacctaaacgtagtggcttcaaacaacacaaatttattgccttacagttttggagatcagaagtctgaaatgagtcttccaaggctaatgtcaaggtgtcaggggccaggtgcagtggctcacgactgtaatcctagcacttcgggaggctgaggcgggcgaatcacttgagatcaggagttcgagaccagcctggccaacgtggtaaaaccccatctctactaaaaatacaaaaattagccaggtgtggtggtgcgcacttgtaatcccagctactcgggaggctgaggcaagagaatcccttgaacccaggaggcggagtttgcagtgagctgagatcgtgccattgcactccagcctgggctacaagaaaaaaaaaaaaaaaagatgtcagcagggctgatccttctggaggctctaggggaaaatctatttccttgtcttttt

SEQ ID NO: 42180 - DNA, 1050 bp, Homo sapiens
tcccaggctgattctgcaggtctggggagttgccccacaatttgcatttcgattagctccccaggtggtgttgatggtggctgcttcccggacagccctttgagaaccattcacaatggtgcaaaatgaagggagagaaatttattggagatatttgctttttcttactttaaaattagatcttggccgggtgcggtggctcacacctgtaatcccagcactttgggaggccgagggaggtggaacacctgaagtcaggagttggagaccagcctgccgacatggcgaaaccccgtctgtactaaaaatacaaaaattagccgggtgtggtggcgtgcgtacgtagtttcagctacttggggaggctgaggcagggggatctcttgaacccaggaggtggaggttgcagtgagatgagatctcaccactgcactccagcctgggcgacagagcgagactgtgtctcaaaaaaaataaaaataaaaataaaatagatgttaaagaatgaaaaataattcggacgactgacggtagattgctcagaaaactggctgagagttgagaattcctgttagccatgattagaaaagttaaaagtttcataagtctccagtttaaaaaggggccatggatttaagtgtggaataaaatgggaaatctttggaagtttggcttttttcccactctgatttatttattaatttagtcgcagcacgggcatttgttacattatcctcttcagatgcccaaagtctgccacaccaccacacagaaggtttgagtgataggaccacagcttgtagttttggcccttggaggtaggggggttggggagcattgtgtgctgagtctcctctgccacatgcccctccagcgattcagcttactcaaatatgactacagagactgacattaaaatgtaggctttgggggttctttttgcgggacagggttgggggcaattcttgctgagaaagatttttaggttttttctttctttttttttttttttttttgatggagtttcactctgtcgcccaggctggagtg

SEQ ID NO: 42181 - DNA, 1035 bp, Homo sapiens
tactgggtgggccaaggaaccaagtctcgaacttggattagagtgattctaggcaggtgttgtctcttgacacctggaggaagctgccttcaccctaggcttaagattataagtaattttttcacgtaaaataactaactcactaagataattaggcatagaagggaataagaaccatgcataagggtaagaaccactgggaacaacagaaatagtcctgcaaaaacttgagatttggaattatcagagactataaaataactgccccattaccaaagaaatatgacaatcttgaaattccttagagagtaggaaactataaaatatgacttagcagtaactagaaatcatagaaatgaaaattacaaacaaaattaaaaaccggataggtgttttaacaacagaataaaaagatgaagaaggagttagtgaaatggaaggtaagccagaagaaataattgtttagtatggagaagaaaacgtaaaaaaaggtaagaagctaaaaggataagtgatgactaacatacattaatgtgagtcccagtaggataggagatagagaatggggcagaatctaaagagacaatagcttagagttttccacatcgaaggataccatttcatagttaagcctatgaatgacagacatatgtttaataaaaataaaatctacacctagaatacacagtgaaactgtagaaaacatcttagacaaagaaaacctcttaaaaacagcaggagtaggaatgggaatcacctaaaaagagaccgtagattacttctcaatagcgacagtggaagccaaaatataatgacaccaacagataatgaaataaccttagtgtgctgaaagaatataattgtcaacctaggtttctattccagcgaaaatacctttcaagaaaaattttttagcaaacaaaaacagtttgtcaccagaggacagcaggaacacaaaagaatgagcaaattatgtcataaatacgtggttacatctaaaggaaaattaaattaagcaaaaatagtgttgcatct

SEQ ID NO: 42182 - DNA, 1023 bp, Homo sapiens
tttttttttttgagatagagtcttgctttgttgtttgggttggagtgctgtggcgtgattttggctcactgcaacctccacctactggattcaattgattctcgtgcctcagcctcctgagtgactggaattacagatggtacaccaccatgcctggctaatttttgtatttttagtagagacagtgtttcgccacattgcccaggatggtctcgaactcctggcctcatgagagtcacctgccacggcctcccaaagtgctgggattacaggtttgagccactgggcccagccaagtgtcaattattttttattatggtttgtatttatttattttattttttttgaggcggagtctcactctgtcgcccaggctggagtgcagcagcgcaatcttggctcactgcaacctccgcctcctgggctcaagcgattctcctgcctcagcctcccaagtagctgggattacaggtgcgtgccaccatgcccggctatttggaatttttaatagagacagggtttcaccatgttggccatgctgatctcgaactcctgacctcaagagatccacccgcctcggccttccaaagggctgggattacaggcgtgagccaccacgcccagtggattatggtttttattataaagcgcaacttcctaagtatgtatgcttcgttatttgttgatgggtaatctgggctagcagttaattcacatggtaacagataaagctagatcacagtctttaataatagggaaatagagcatcctctttaataatagggaaaagatttactgacatttttaggcataacagttttctgctgacagctcctcagctgcttgtccacgttctccagaaccctggggctttagttaaggaatactcgggtgttgtcagtaaattaatttgtttttacagttactattcttgtttccagtgtttaatttttaaatttttcagttatctttccatattaagtttatttaattattcaatagctccctaaaagtagaattaat

SEQ ID NO: 42183 - DNA, 1033 bp, Homo sapiens
cagtgagccgagatcgcgccaccacactccagcctgggcgacagagtggaactctgtcttaaaaaaaaaaagaaaaagatgcccataaatattttgttcccaggttgttatggtggtattatttttaggggggaaaattggaatcaccaaccttttaaataatgttatcagtaaatcattcaaggtatattcattaaatggaatactatatactctgtaacattttaaaagaatatttaatctcgtagaaatatgcttagtaaaagtcagtaaatactctgcccacctaaaagtgattctggctgtgtgtacacaggggaatacttctggaggtggggattatgtaatgaatgctgtagtgtgggtttcagacccccaccctccttttgtactgagggcactaattgcccaggtgccatggctgttcgagcaccttgtacaagattccaccctttcccaggggagggccatgccagctcccagctctgggtgcagctacatcagtgttcagtgcttcgtctgtccggccctgcctgccttccgcctcccaagtgctgtaattgacagtgccccccagcaagcctgtgtaaactctcagtctactacttggagaatctgacctataagagattacaagggaattgtgttttttttttccttataaattctgtgttgtcttttgtttaaaatcaggccaaaaactatctcgaaagagaagtacctttaaaaaatgttgttagtttttttaattcatcgagcagaaatgatgctcttaaacgtccgcctgtaacatgatgtttgctgtttgtattgtagtgtaaagaactggccaagtccaaagccgaagtggcctgcattgcagtgtatgaaacagacgtgtttgtcgtcggaactgaaagaggacgtgcttttgtcaataccagaaaggattttcaaaaagattttgtaaaatattgtaagcattgtatttttatcttttgcatttcattaattttaagcctaaatatttgtaggtaagacaagttatattatt

SEQ ID NO: 42184 - DNA, 1073 bp, Homo sapiens
agtaatgaatctcgaaatgggtacatgacacactttcctattgaaggtaaagtacacatttataccttatctcagaacagtcagaagccaggttactgttttattggttagtgatgcaaatattgataaggtcaggttgatacttagtatttagaagaattctgaaatagcacttgttaatctgtaagtttcgaattgattgcctttttggcaattttttacagtgttcccaaacttgatactcataggctattagtaatggcatttacttctatctattctggctttgagtgcataagatgtattttctttaggcttagcatataatgtaaatgtaattgtttatttcagattttaaaagacatacagaattattgcttacacgaacaatcatcttaactgttattctttgctgaaattttactttttacctactggcctcatcatttcactctcattcctttgacctcacatctcttttttctttgacttttacagtcaaataacttaatgctccataaattcaaatattaagattaaaaaaagagaaaggaagtgtgtagagaaagcatattttaaaaatgaattaaagagtgactcataggtataggtttgtagatttacctagagtttgagttcaggtgagttttcacaatataaagtaagtggaaaagaatccccagataattgtgacatgctaaagctagatactgagaaccaaaaagatgtgacctcagtatgggacttttaattcaaggatattagctaccaaatgacagtttttcagaccgtaagcattgctttttaaaaatcaagataaaatacatttataacatatcttacttttagtatagcttctgaatttagttctcaatagataagacaaaagagatgaacatctgcttcctttcccctcaagcgatgtattcttactaataggtaatatgtttttttttggtacttaaaggcagtgtttttcaatcttttccatgttagtagctcagatctttaaggacagaggatacaaattagggggcagcttgcgttcttaatcctaagtggctctctgatgt

SEQ ID NO: 42185 - DNA, 1045 bp, Homo sapiens
ctctcataaattggtcatgttatcccttatttttctagaatgaaaagaggagtctgttatgtaactgcttatattccattgtatttacatttttattttaattaaaaaaaaacatttgtttgatcttttaccttctttgagggaaaggcaatcttaaaagttccccagtataggctggtttctccaaattcaattatagaattagggtttctccctggaatacatttctctcaaaaatactgatatgctcattgtaaaccgttggttacatttccctgtcagccctttttatagaagattgtgtgggtgaatgttgtatgctttactgtgtggaggtgggtatcttctgtgtgacagagttttcagctttgaataggcgggatttagaacaacaagacctaggtaatagatcatgtgcagtacgagggctcattgggcagtaccgatggctcaccgccttgcagccccgccggcaggtactgcaccttgaagactgcgtttttaggacatttttactgtcatattccagtgttaacaaagttgaatcgaatctgggttctggcctttattcctttactaacaagtaaacataatctttggcaaatcaattaatctctcaacctttgcacaatgaaagagaactaatgaaaatactctataagcttctagcactaacactctgatgtacatttgtcttgtgtaggaacaaatatgaatgaactttgtaatttttgaaatatgttgcatacaaagccagaggatatagtcttgtgtgcacttgtgacactcagtctcttgataggaaagtctccattgtaaagcctgggttgtggttttattgaacagtagaaaccactcctcacatttctgaaaggagagaagaaattctaaccaaagtagaaagcatttgtttctatccgagcatcttctagctgtggcaggaaattcattgtgactttgtcatatcctcattcctccaagactatgggatttttttgagtcaatttctgcaggtaacatgttatcatctaaatttttccagagt

SEQ ID NO: 42186 - DNA, 1055 bp, Homo sapiens
gcaggggagataagaagttgttgattctggggagattttgaagacaaagccaccaggctttgctgtttattgtttaattcttgtattttcttaaatgtctctgcagcacttttaaaatggacataattgcttaggttagcacttgaacactttgttttaaattttttttattgctgccaaatagtcatttaataaatacccaattgtttatgtaaagagttttagaggagctataagtggtatccatgggtgaaagaatgaatccatttatttgaaatgtatagggtaattaatggctctagttttgaaatagatatattacctggtgttgattgtttttttaactttgaatagatgtcagattgtatgataacacattcccagtctgattatgttgaagctaagagtatcagaacatattgtaacatagtctatttattgattcaccggccagaatgcagtgataaacagctttagctctgaagcctgtattatctttaggtgtattcgttaatatgttgcaaaaaggaagttggtgttttctaaacacaaattttgagttagggacggtgttgccaacttgaaggtattggcggagtgcttttgttagtgtgggtagcataactattgtaaattgatgaatagcaccttttgcatattaaaatatcttaaaatgggccaggtgtggtggtgtaatcccagcactttggaagaccgaggtgggtggatcacctgaggtcaggagtttgagaccagcctgaccaacatggtgaaattccatctctactaaaaatataaaaattagctgggcgtggtggtgggcgcctgtaatcccagctactctggaggctgaggcaggagaattgcttgaacccaggaagtggagattgcagtgagccaagatcgtgccactgcccactgcactcccagcctgggtgacagagcaagactccatctcaaaaaataaaataaaatatcttaaaatgtattttaaaagctttacattttgattatggaaacagagtttgggcttgaatttgaagcatgctgaaacg

SEQ ID NO: 42187 - DNA, 1007 bp, Homo sapiens
agcattcaacacatcagcattttatagcgtcattagttgttactatgattatgtttttctgaaatagtatcctttacaaaagcacttctgtctttctaagcacatacataggtcctaaaatgaatttgtctgatgttggtgacctcggaaccattttctccagttgattagcacggccagccagtcaataatttcaggtcactgttggccttagaggaagagcccaaaggcagcaagcaagggtgctggtgtccagtcgccttctagaagcattttcaccttcccttaagatttcccttgattaacacagaagtgtctatagaagtgacccagtgctgccccgggcaacatcgtatattaggccaaatttgcatttcttacctttatgagaagcaccctcgtagtctagtggagttacacacacacagtctgatctcagctgtgctctccagagatacaacatagtccaatcaaataacatcctctgagcctgtttctttagctgtaaaataagaataacaattatacccatctaaaaagatagtgtcttgtacttgagtgatcttttttctatgatactgtctttaacacaataattattttcttcaccataccacatttgtttttaaataagaatttcttaaaatgatgttttcagtattttatagatgatgtttgagcagcaatattaatagcatgttacctgacactttgagggactagaagatgacagtggcagctgatatgacccagatgtctctaatcctaacatgaggtgtactgaagggtcacagcagagtgagttcctggtgtatccacaaggaaatgagcacggaactctcacaacagcgtgtgtgctgtgcgctgtgcttgaatagctgactgctcctttatacacagcctctgtgctgactgaatcaacagtatctgtttcatcataatgcagccctatttctttaagcccatacattttgcacttgttaaaagtatttgaacaggccaggcgc

SEQ ID NO: 42188 - DNA, 1027 bp, Homo sapiens
ctgatctctctttcttttccctacaggattgcaggcatgcagcaccatgcctggctaattttgtatttttagtagagacgggatttctccatgttggccaggctggtctcaaactcctgacctcaggtgatctgcccaccttggcctcccaaaatgctgggattacaggcatgaaccaccgcgcccggccatgctaagtcctttcttggctccattgtgctgtccctcctgcttcctctccaggtccatctgccacagtgctacgtgcaccagcgtgccagcaacagtggctggtctctgccccgtgcctcctccactgggctcacacctgtcttattttgtcctttggtggctctgagaagcagcctctgcccctctccctttcccttactctttgtaagatcctcttccttctgccctaccatgttgcttggacaccagggtggaatagcagagaacggctgcttgtgtttgaattccagctctgccacttcgatagatttctgaactgagacatgtgactctctaggcctatttctgcatgggtcggagagtgggcgggactgctttactgagttatagtgaatgtagttttaacctaagcgcctcacatgactaactcctcatccatcaagaatgagctcagctctcacttccccactcctcacccccctgtaaagtaacctttctccaaggttatgcttcaacaggaatagctaacatttattaaattgtggcacgtaagtatcttggatatattggctcattgaatcctcacacctactattttacagagatgccagtggggcttgagattgaatcacttgcccaggctcccactgctggtaaacagtagagggggctcctgacccatcagtctggcttgacaacccattccctcaactgcggatcccggattcccttatcaccctgttgatttctccatagctgtggtaacatttgttgcatgaatggaccgttgaaatagggcctggcagggagaaattcaggaaatgaatgaatggtt

SEQ ID NO: 42189 - DNA, 1027 bp, Homo sapiens
cacaattaagacactagaactggtgggccgggcgccgtggctcaagcctgtaatcccagcactttgggaggccaaggtgggcggatcacgaggtcaggagtttgagaccatcctggccaatatggtgagaccctgtctctactaaaaatacaaaaaaattagctgggcatggtggcgggcgcctgtagtcccagctactcggggggctgaggcaggagaatggcatgaacctgggaggctgagcttgcagtgagctgagatcgggccactgcactccagcctgggggacagagacagactccaactcaaaaaaaaaaaaaaaagacactagaactggtggttacccaaataactgaacaccacaaaattccgaccggaagacttagagccttctttcttgaaaataaacttttaacacgtttctacagaagcatgaggctaacatggctaatagctgtcagcttatctctgctactcacagaaaaggtaaattatgacatcgatctaacctgtgccttgaaatgaacagcattaaaacccttgttattaggttctctcatgaaagccaaagaaggaggcctatgaaggctcacaaactggacgtggcctctgtatctttacgggaatgtctacatctcatcccataggggtccaagcgggaaactggcttagtactctcctgagcctgttaccttcttttattttcctggccatcaaggaatatttggtcttcttcctccactgtccttttcttcttcttctctttgagggcactcagtacagtctcctttgcacatgggtctggggcattacttgatggtgacgacagtgttgagctgattatctgctctggtctataatgaaagacaagattctagccgtaagatattttaattcccatgccatatcagaaacggaaatcagaagctaaccaacaggccaaagtataatttatacactcacaacagttccccttagcaagtaaagctactttttcgttaacggcaaaaagtgaaaaacaaacggt

SEQ ID NO: 42190 - DNA, 1043 bp, Homo sapiens
gctgcagtgagctgtgatcacaccactgcactgcagccttggtgactccagcctgttccgtgaatgaatgaatgcttatctcttattcgccatctatgcatccccacataaaaacacatcccattgcaccacacttgagttaccccagaccccgagtttctcgtgttctaggctctggtacacgcttcctctatcggtagcttcgctcatccccctaatctgactggtggaccctgatcattcttcacaatccagcccagatgttggcctctgggagccccttccttgactgtttcagactgtcatgcctgctttttccttccagctctatttcccctgcacctggcctccccatgcagccgtgactgttgggataggtctgccctttctcatagcaggaggacaccttggggcaaggttggcatgtctgctcctgcctgaacccacacagttcctggagtgcagcaggtgctcctcagctgtttgctgcacgcatggacgtaagagtgacagaagcatgtccttcgacatgacgtttttgtacctgaacattgtctagaggctttccagactgtaagctctgtgggattaggagcctgcctgcctcgcactccctggcatccttagtgctttgggcctcacaggccagcggagccctcgtgcgggttccaggcctgctttggtgggagtgctcagtacttttagccacacagagccgtggcctgcaaggctttcggagtacatctctagcacatctgagaatccggaagcaactcagagtttctggaatggatttcacaaagtctgtgaataagaaggccccacaggccctactcaacagcttttttttttttttttttttttaaatacagaagatgctagtcttcaaagaacctctttactcttttactctttttctttttttttcgagacagagtctcattctatcgcccaggctggagtgcagtggcatgatcttggctcactgcaaccttcacctcctaggtgcaagtgattctcctgcctcagcagcctccagagta

SEQ ID NO: 42191 - DNA, 1093 bp, Homo sapiens
ttgcttttgaaaagccacaaaagatctcattttcctgagtgaccttccttttggggcctgttcttgacagaaagcccgggaggccaggggtcagggctgccagcatcacgtgtctgttttttatctcctgagtgccaacagatgggaagtggatctgggggtcttgccacatccagttcagggtcactttctctgtagtgaggtccttggctccatcgagcatgaaaagagaaatacaaatgagactgacaaagaggaaagcattaggggaagcctgtggccacgagagtagacggtgcagggggcccactgcctcccgctgctgtgggaacggcgaggacatgggccagggtgtttctgccacttctgcaagcacagctctgggttttctgctgccatctgacctccaaagggacctcgcctcctctccttcctttcctggtccctgatgagatgggggaggtttctgtcactctgacaagtgcttgaaactccagacatgggctgtcgggaactgtcgggtactgccgtgcagagcgcatgttgtctgacctcctgacttcactgggccctgtcgggtgcaggagagggagctgtggatggcacagtgggacatgtgctctactggcctgggggtggtgggaatgcagaggaggggtatcccccattgggggtgtgtcagggatgagatgcccccacaggagcctaggaggccaagtgtggaggctgggaggtgaggacacgcggggctgttccaagggagccacatgctggtagagcccaggcacaggtcaccaagggagtcaggggtcgtggggggtcagaggtcataaaaggagttggggtcaccaaggaagtcaggtcatggagggagctgacacaggagagcatcttagagggccttgggaccttccaaggggtatggatttttttccccagctttattgaggtataaatgacaaaaattatatatatttatcagagcatctaagtttttttctttttctttctttcttttttttttttgagatggagtcttactctgtggcccaggctggagttcagtggcacaatcttggctcactgcaacctc

SEQ ID NO: 42192 - DNA, 1050 bp, Homo sapiens
agagcggcccctgtgtccacgcaggtgtttggtcttgggaacaagacctacgagcacttcaatgccatgggcaagtacgtggacaagcggctggagcagctcggcgcccagcgcatctttgagctggggttgggcgacgacgatgggaagtgagtgcccaccctgccaccatgatcagcgcggcgggcttaggcaggggccgtggaacgtgaggggcgcgcacaccattgtgtcagctgagactcagcgacacgcacctccaacacagagggaaggggctctcctgcctctgccctgcccctgccagttttgcttttcggcttgcccaactccctggagccttcctgatgctctgggtttatgtcgctgggtgccccagggtgcacagtcctgagctttggggatggggtggggtcggggcgtgcctggcaccaggtaccgttgccacatgggcctcccctgagccgctccccctctcctctcctcggcccagcttggaggaggacttcatcacctggcgagagcagttctggccggccgtgtgtgaacactttggggtggaagccactggcgaggagtccaggtgagcaagtgcccgcaggtgcggtgggtggcctgggcgggtcctgtgccgagggcagccaccctggaacaagggctggcagtgggtcgcagcaaggttagaagacactccgtcatagggtcgaggagggaccttggtcccagccaaggactcactctgccacgttgctctgcactgccctggggcagcggggtgcatcccacctctcgacaaggacacatcgcgtcgggctctgtggctaggttcaactttggcaaaagggctcatttccttaaaatctgcctccacagacttggccaaaaacataacgttcctctctgtgcccttgatggcccctgggtgctgcccgggcttccttaccttctcccagatggaagcctgcccagccctgccccggcttctgggcgtctggcccccggcagctccacgccgcctccctccttgctccctcgcctgccctccttgtg

SEQ ID NO: 42193 - DNA, 1050 bp, Homo sapiens
tgttctccctgctcctaatgcatctcattacctgtctcctacagagccagcagggatcttcctgcaacctcagttaccgggagggcctgttgctaggcactcagtgtgtgtttatagtttataaagctgcaggttgaagggaaggctgctgttaccagtccagctgcctgatggagtccagcttgttcttcatctttcaggagggttttgaagtaccctgagtatcacagactctacagacataaattctccccatttgaaagtggacctttggaatgaaggtcctgaattcttccagaatgagactgttacaaatacaatgattgtatcttgctttggcaactgcagtaaaaagaggcccagtgcaacattataggataccatgtgaatccttttcatgctcatttcctcctaagagtcctttctctgtgcctctttttagaacaatgctaaagtagctgtgctaggggcctctggaggcatcgggcagccactttcacttctcctgaagaacagccccttggtgagccgcctgaccctctatgatatcgcgcacacacccggagtggccgcagatctgagccacatcgagaccaaagccgctgtgaaaggtactgggcgcgctgaccctggagacttgcttcctgtccccagtaggccaggattcgagttttgagtaagattcttagatgaaactaaatgtttagagacgggggtttctctgttttaaatttaaattttacaagtgattacacccttttagacttggcgtctataaaaattgaaacagcggtgtcttttagaaatgtgaggtagcctaatcatcccattttctactttttctaatttgaaaagtagtatgaggatggggaagagggaagtgtcagcaacctctggtgaggatttggggacagtaaggtggtggtctcagctgcgggccaccttccctccaccccagggttatcttgccagcttctcaaaaagcacggcctctttgggaaacctccccgtctgtggaaggcagtgtcggatattcagtaaatgttgtct

SEQ ID NO: 42194 - DNA, 1034 bp, Homo sapiens
tgtccagggtacctgcctagacaatcacagtgctgggacccctgcctggcaccctctggctctgagcctcgcactcctgaccgcagctcagtcccacccacctgctcagcaaggcgtccccagcaaggcacccagaacccgcatgtgtagagagactcctcggcagggctgatggagcgacaggtcggggtttctctaacaagcactttcctggaaacttcattttaacatgttcccatctccctcagaaaaagggcatcgagaagaacctgggcatcggcaaagtctcctcttttgaggagaagatgatctcggatgccatccccgagctgaaggcctccatcaagaagggggaagatttcgtgaagaccctgaagtgagccgctgtgacgggtggccagtttccttaatttatgaaggcatcatgtcactgcaaagccgttgcagataaactttgtattttaatttgctttggtgatgattactgtattgacatcatcatgccttccaaattgtgggtggctctgtgggcgcatcaataaaagccgtccttgattttatttttcaaggtcccttctgtaaatgctgtgctttcttccctgtgagagccaactttagagtgtctgctacctcttcattaccaatcagaattagatgatgtttaactgttagactgaagcgtgacgctttcatcagtagcttcaagaaagtctaaattgttaatttatggaattggacacagtattcagtttacccgtacatgctcctcccgcccctcctgttggcacccttgcatcgcccaggcctgattcctcctgggggtagttcacccccacgggttcatagttcagcggcgaatgccaggcagctgttttctggctgagcaaacagcacctttctcattgagcttcctctactgacctctgtcccccttgggatttcatcttctgaccgaaccctgatgttcagtggcagagacagcccatagccagaactgtgggtagaccagggttggggtgtgcggtttgggacag

SEQ ID NO: 42195 - DNA, 1110 bp, Homo sapiens
agcccaggctctggcaggctgccaggcggggctcgccgccttcgcagtgcacgttgtccagcaggatgtgtccggtgccatagccgaagaaggcgttggtggtggcggccatggccgccccgcagcccagctgacgacagaccacagcggcatccggcagcccccagtcgtcgtcacacacggtgccccacaggccactgtgcaggatctccactcggccctgacacaggttcgcgccccctaccaggcgtacgctgccctcacctggggatgggggcgggggtcagggcgcatctcccactggcctctgcccccgtccgcaccgcaagggcagcccggtgtcccaggatctacaacccttgggcatctgctcaccccgctgcccagggtaccgcctccttggtccagactgggggtagcttgtgggatcatagtatcatttctgcctaaaaccaacccccctaccctgctccctgtctcctggcagcctgggacgtgctgccttctcatctactgcaaatgacatcctcaagatacagccccacacctcttcctccaggaagccttccctgatctcctgaggaacgggaccctcttccacctctggacttctttgcctctttcactgtccctcttttagagcacttttcattttcttcttctagtcatgatcatcattcttgggctcatctgaccttcctgtgagattaagctccagtctcaccgcccattcattttctattttttttttttttttttgagacagggtctcactgtgtcccccaggctagagtacagtggcatgatcttactgcaacctctgcctcccgggttcaagtgatccccctgcctcagcctcccaagtagctgggactacaggaatatgccaccacgcctggctaatttttgtattttttgtagagacagggtttcaccatgttggccagtctggtctggagctcccaacctcaagtgatccgctggcctcggcctcccaaagtgctgggattacaggtgtgagccaccatgcccagccattttctctaactttacatcttcaatttgtaatccctgtcttcccactgcctagggtagggtgtgagagactcc

SEQ ID NO: 42196 - DNA, 1020 bp, Homo sapiens
gaattatcagtagcaagaaagaagctgggctggtgactagcacccggaatttatgctctctttcttcatgggcctgtgcggcggtacgtaggctgcgggattgactttgaattcttcctggctgccacagcaaagagacaggatcaggttcttgattcatgatgcccttaaggtgttaggggaagaaaagcaagcgtgagaccaggcgcggtggctcacacctgtgatcccagcacttgggaaggctgaggcgagtctatcccttgaggctgggactttgagaccagcctgggcaacacagacatcatctctacaaaaagtaaaaaaatgagctgggtgtggtggtgaatgcctattgtcccagctgctctggaggctgagttgtgaggattgcttgagaccaggagtttgaggctgctgtgagccaagatcacactgctgcactgtagcctgggtgagagagtgagaccctgtaaccaaaaaaaaaaaaaaatcagctgtggaaaagcatcacgtgtttcccctgcgctgaggctgattctgcagggctactgatgtgcattggtaactgctcatgtctgtcctgttcacagatctgccggaggcgctgggcaatgaccccgggactccaggccagaggggtctgaagctgtttgggaaagcagcgggactccttgggaagatggccatggccccaagcccttccctggtgcaggtgtacaccagccccgcggctgtggccgtgtgggaatggcaggacgggctgggcacctggcacccctacagtgccaccgtctgcagcttcatcgagcagcagtttgtccagcagaagggccaacgttttgggcttgggagcctggcccacagcatccccttgggccaggcagacccctcgctggccccttacattattgacctccccagctggacccagttccgccaggacaccggtaagacgctgtctgcctctcgcacatatctgggtgccgcacctgctttcccacaggctctgcgccaggt

SEQ ID NO: 42197 - DNA, 1030 bp, Homo sapiens
ctcctgcgcgtgtgcacctctccctgcgtgcgtgttcgcgcgtgcgtgctcgcacatgcgcgccacctccgcactgccctcgcttcctgcgcctgttcaggtcatcgcttgctctggttcccaggctttggcctctagtggacgagaatcaccgagtctgcggggctagacgctgaccgcccgggccagcacctaggcgggcgggagctgtgcggcccagggttcgcgcgggccgggtagaggctcgagccaggacccccgagcgtgaaccccggagccggcggcgctggggccagaggggccgggcgggaggtgatggcggaggcgaaggggcgacgggacctgggcctggcccgtgtgtgtcctcagaggcctggcgccggccgtcgctgtacggtgagccccagggaggcggatctgggccccgagaaggacacccacctggatttgccccataggcccggcccgggcccctcgggagcagaacagccttggtgaggtggacaggaggggacctcgtgagcagacgcgtgcgccagcgacagcagcccgccccggcctctcaggagccgtggggcagaggctgcggagccccaggagggtaagtcttgggtttttgggcccggagcgagaagggcctgggtgaagtcaccgtgttttggggaccttagagtgtggggcagagggagggtcccgattgcttgctggagagacatgtgttgggttcgagggcagggtccggctgcaccgaacaggcgctgcatgggaagatctgggaggacgaggcttagggaggcgtggagggtgtcaccaccctcagctgcggacgtcgtctccactccccgctaacccctaacagtccttcctcctcctctccgtgctccagatttcgaccgcctctaaatgtccgtcagcacttctattctctcacttaagtgtctgctgatcccccccttagatctgccctgggagaatcgtagtaatgcaggaacagtctgcagggattctctcctgctgcctcagttgctag

SEQ ID NO: 42198 - DNA, 2058 bp, Homo sapiens
agagatctgttaatgctagtcaggcaattacactgtttcccattcctttaattccttcactatcctgtttcaatttcacacctttttctgctttcttatatgtaaaacacctcctccctgtccttactttcaagtgatcactgtacatcttatttcatgaagaatattcaaatgattaaaagaaaacatcacagattcccatcaccacgtctgcccccacaccgtttacaaacccacactccctgctgcccatcttgttgccccgggtgaactatctgaactactatctaaagtcagtttcttcccacgtgcactacattccagcagcttttacttagcaaagaacattttccagcaatttccttatctctccttaacaccattttctccccttttcctactggatcattctcatcagcatgtaaacaagttattacttgtttcccaacctgaccacatttttcatcttccgtctccgtaaatctgatctgtgccccactatttatttcctgaatttctatgatggccttttacctgatcttcctgcatgtgtcctctcaccctacacaatctattcccagcatggcagtcagaaacaaccttttaaaacagaagccaggtcttgcgcctcctattctgaaatcctcactggtttccccccaccccacccctcatgtcactcagagtaaaccctaacttcgcatgtgcctgacagggtcttacataacctacccgcccccacagcccagacctctctgatcttctggaccattgttgtcctcattgatcactctgctccagctacaactgtctacggctctccctccaccttcccaactgaaggcttttgtgcttgttgtttctatcctgaaaatgaacttctataatgtggttaactttcccttatctcattcaagtatttgctcaagtctttttcagtaagacaggccctaatcatcttatttaaaactggaacctacactcccactccctacacttctgcacccatttactttgctctgctttttcttttttcatagaatgtgtcacattataatactatatagttcactttttactatttatcattttattacctatcccagtcattacattttgagattcaggagtacaaaaatctttgactcttttgttcactgatgaaatcacacacacacaaaaaaaccataaactataacctataaaaaacctataaactataaaataacctatagaaaaacatatgatcacaaaaaaacctataacctatcagcaagaaaattggcatcaattaatacttgctaagtgaattaatgtatttgtgcaaaatatatatacagaagcatgtctggtgtatccttgttttattttttatttttttatttttttcaattttaactattattaacgaacatttatacatttatatgcttttctattttctacactattataaataactgtgatgaatatctttgtaagtctttgatgatacatgtgatgatttccttaggacagattcttagaagtggaattcctggatgcaagaacatgatttttctttttctttctttctttctttttttttaattttatttttattatttttttattttattattattatactttaagttttagggtacatgtgcacaatgtgcaggtttgttacatatgtatagatgtgctatgttggtgtgctgcacccattaactcgtcatttagcattaggtatatctcctaatgctatccctccccccttcccctaccccacaacagtccccgacgtgtgatgttccccttcctgtgtccatgtgttctcattgttcaattcccatctatgagtgagaacatgtggtgtttggttttttgtccttgcagtagtttgctgagaatgatggtttccagtttcatccatgtccctacaaaggacatgaactcatcattttttatggctgcatagtattccatggtgtgtatgtgccacattttcttaatccagtctattgttgttggacatttgggttggttccaagtctttgctatagtgaatagtgc

SEQ ID NO: 42199 - DNA, 1050 bp, Homo sapiens
ttttaatagaagaaaactgtataatatcaatattggaatggttaaatactgttttactcattatattgatattatacattcattagaagatgacttaattagccaggtgtggtggtgcatgactgtagtctcagctactcgggtggctgaggtgggaagatggcttgaggcaaggagttcaagaccagcctggacaacatagcaagaccccatccataaaaaaaattcccagactgacaaagaaacttaaaaaataaaacatagactaggatctcattaacaaattaacattatatatatataacagatgtgaaataaactaccagaaagattctcttctacatcatatgtcaccagggaaatgtgagttaaaacaatgagataccactacctaccaattagagtggtcaaaatccagaacatgctgtggaaaatgtggagcaccaagaaattttatccattgctcatggggatgcaaaatggtacagccacttaccaaactaagcatactttgaccatactctccagcaatcacactctttggtgtttaccctaataaactgaaaatttatgtccacataaaaactggcacataaacatttatagcaggtttattcatacttgccaaaacatagaacaaccaagatgtccttcagtaggtgaatggataaacttggtacatcaggacagtgaaatattattcagtgcttaaaaaagaaagaaagaagccatcaagccatggaaacatctagaggaaacttaaatgcacattactaagtaaaagaagccaatctgaaaggatatatactatgtgactacaactattagacatgctggaaaagacaaaagatggagacagtaaaataattgattggtagttgccagggttagggggagagagggatcaataggcagagcacaaaggatatttgtggaggtgaaactactctgtgatattacagtggtggtacatgtcattatacatgtgtccaaacctacagaatgtacatcaccaagagtgaaccccagcgtaaagtaggaaatgtgggt

SEQ ID NO: 42200 - DNA, 1048 bp, Homo sapiens
aagtatcatcattatttatcatttttgtctttctcatttccaaggttagaaaactgagatttagcgaagttatatgacttatccaaggctatatctcaatactattggaatcaaaagtagatgtggctgagtcttctgaattctagggcaaagtgttttctcaagtaatactgtctcaactgtcaagagtacagttctaccttataactgaaactatcgtaggtatcagaagagggactatatcaggagggcaggcggaggagctccatcatgatggtcctaaaccttgaaagatgggtaatgcttaactaatacaagaaaaaaatgaaagaaattctgagcaaggcaacaccttggataacgattagaaaattaacatttgttgactgatttaataagtattaagcactcataagcaccagctagtgttctaggtactgcgatttggcattgagcaagagacaccatcttagtcttacagaatctatgctataagtggaatatggacccttagaaatgaataacaaaatttaaaaattattttaccttctgttaagaaaatagagtaaatgggttgaaagtggtagagggaaggagtatttcaggccaagtcgtcagagaaggccgctcttaaagatgaccttggaggagacacctgaatgataaggaatgttatcatgcaaatgtccacggaagcattttctggtggatgagaccagtgatgcaacctgggaacaaatttctttctaagtgtgataagaagactttaagaggttctatgtactttttgaaaagatcattattcctgctttctttcataagtccaaaagaggtcatgaatggaaacaggaagagcaggattttttggtagttcatgatatgtaggagaggtttactcagagggagaaagggtgaagtgagagatcaaagcaaaatcctaaatttttggcttgagtacttgaacagatgagataaagaagggtatgaacataagtaggttgtgatgctggccctagttactaaaagggtgtgtatgtttatgaagtag

SEQ ID NO: 42201 - DNA, 1044 bp, Homo sapiens
acttgaaatgcatgaaacaatttttatggtagtatactttattatgaatcgtttataatttttgaagcaaaaacaatgtgaaatcatagtaaatagtataagatttggaactagacagatataaattcaaatcctacctctactaattgtgttcctatgggcttcttgcttaatcttttggagtttccatttctccatctgtaaagtgaggataacaaaatacttcatgtagttgtgaaaactgaaattagatgtttaaaacacttaatacaacatctgacataataaagcatgttccatagatgtttgctattattaatattacacattggccaattaatcacaacatttacgaatgaggtagatattatttctttttcccaaagatatggtgagattttctgggcagataagaggttcctttcatgatttctcataatatatgaagttagaaggagtttcaagatatgcgaaaacatgctgagacagcatggactagtcaaaaaaatctatgacatctggaactgccattttggaaacatgagctgttgtttagagtaaagataatatttggaaatatacctatcatattgtaagcacttgctaaatgaaagtttttactagcattttgtggcaaaatgagaagatatataactgagaccagtaagttaagccataatcctaaaaaaaaatctgtcatttagtaaatggttcacatttggagaaggttagtagggagttaaaatgtttgaataatttgccattatagttacatttttaccatattattagacttcagtgttttgttttctgaaatctttcctcaaagttgtaggctttatataatcttaaacatgtttcttctttatttttaagcccagtgtatctcaaggagaacttaatttgtatgtttctgattcttttatagttaactaattcaaaagttattttgtaagaattctttgatgtccagaaagccttatcattttcttataatatattcaaggtttttttcctttggaaaatggaaatcatgtcttgctt

SEQ ID NO: 42202 - DNA, 1059 bp, Homo sapiens
ggataacttaagtaaaattacttgggaaagttttgtttcatagatacttctaacaagataaactgaagtcatttacatgaatgttatttctgaatattctacgaaaatagatttcatttcataatcacttaagaagctatcataaatcaaaagtcttaaaattaaattttataaatgtttaaatgatgcatttttcccaaagagtaattattagctaaataaaaagagaaagtgcatgccaaaacgtgaatagagtaaaattgtaataaagcagcttttattcacttgagttttagaaatattcttcattggctatttttgttttactttgagaagtgtgattttaaaattgagatacttgtaaatagaggtaagaaaatcattttcagaaggttcagcatatcctagaggatttctttcttctagggataagttatcgacatttcgatgacattcatagaccgccctagaagttaaacatcaataaactcaagacaattctataattagactttaagaagttggaagcgggatttaaaccaagcaaacaagagacttgacaaagcacaaaactgatgttaggaaaacctatagttggtattgccaaaacacaagaacactgtcattcataaaggacctactaacttcccagagacccagatctagtaaaagggcagagtagatataaaagcttatgtttgactacaaacaaataccttttctctagtttaatatacagcctcccaaacaccgaggagaatacttaaataagagaacgggaaatcctctgttgagaaatctcatatattctgtccagaaaataaatggagacattatatcgtgtataaatattcaatatcagaatgttggccaacagatttgttcatagaatagtacagtgtatatttgttttattcccatacgaggcttaaaagttccacacattacttacagataaataaattacatatatattttagctttctagttattctattttacattcacagtaaccttgcaaaggaagtagtgaaacttttagcattcccatttcaaggc

SEQ ID NO: 42203 - DNA, 1048 bp, Homo sapiens
gatcatattaaccttttctaaataagagcaccttcatctgagtttatccttgtcagacttgccccttataacattaggcagaccatgactcctcttcaatcctaataggtgaagaagacatcaggacagcatggaagtgtgtccacaattactctgggttgtcacaaagatcttgactgttatctaggatgaccctttttagcatttgagcggtctctttaaaaatcaaacgaaatatatggtcctcgttctcataaaataaaacaaaaacaaagcaaaactgaaaagaccaagaaacaaaaaggtaaaacagatacacatgggattgttcattacctgtaggttaagaaaccctggtctgggaatatgagattgaatcagtgtaccagctttggaacatagtaagaactgaaagactaatagatgacagaatgttacagacgaattcacaatgagccatgaaggaataggagaccaatggcaaggatatagaagaacctgggcctgaaatatgctagtccttcagtagcatgacttagataaggatctgtatccctggactccccaatttttggggagactatacctggactattttatttgcctgaacatcttaaataaaaattcaagggaaaagcagtaaaagtacataacacaatagagaaataaatgaagaaaaattaaaagtactttagattttcccaacatgaataaagaaaactgtctgtagagatatctaaattataaagagaagaaagacatatttttttatcatggttaatggagttataactagaaacagagaaagctatatatgtgtatttatttttataggaatgaacatatgtactctctcacaaacaaacacgtgtgtgtgcatatgtgtgtatgtaagagatataccatttatctatcttcctagctctctatataattcctttgacaatatcattactagtagattcaggtactatctctcaagggatgtagtataaaacatagctttctctgtagaatgaaaaaaatagactagatatgtgtgagcaga

SEQ ID NO: 42204 - DNA, 1050 bp, Homo sapiens
ttaataaactacaggttcattgaaatgaatggcaggaaaggtagcatttcttgattcaggatgtaagggcaactttaaaactctatagctacttcatgaaaccatacattgctaagaagatgttctcataaagaaaacatggcagattaggtcattctcctccttcctgacttcctggttaggtaaaatcacactcataaaacactcccagcacatattcataggatgtcctagcatgttctaccaggagaggggagagaaagtgtttggtggtgattcaagcaacagtaagctatgtagagggttttgagtgtttccttagagagagagagagagagagagagagagagagagagagagagagagagagagagagagagagagagagggagacttcgtttttactacatagctatcataaagcccttatgagtttgagagagaagaattaagaacggatctcaggttaaattccagagttaatgatgtgttaatgaagatgtaggaagcaaaaatgattagtttaaaaggtgagaatctcaagcaaaacaaaagaggtggtaggtctggagtatcaccgataagttacataaataagatgtttattaacatacattacctatttatgcaattatttttgtagcttttgactccattctaagactatattgctaatagggtttagtaaacatagttttgcaaacctacattataaagatgtttcaacctcatacattggcctttaccatcacgttgaatacagaaatactgttctctctggaatttattgtgagtcctgggttcatttacattttatcagtgacccaacatgaaacataacatttactttttgtttagtactttcctgaagcagacaggagaaagtcattgaaattgcttcaaattacctgagaaattgccataatttgcaacttcacaatgcaagcctggatttcccaagttagctctgatctcaatgatgagtttaaatgccaggatgatattttaactatgcagagtcataggcatacatgaaactccattagttta

SEQ ID NO: 42205 - DNA, 1894 bp, Homo sapiens
agctaaaataggttcaatgttgctaaactgatacaagttgtactctaaaaatgcaacaatcattgagaatatctaggacaaccttctttccccttttttttattttagggtagatcctctgttatggtctcactgctaggaacttcttcacattatttcatagaaatcttgtgtagagcatagaaagagttgtgacagggttgttttgaaatatgtgcttactggagccaaactgctaaatttaccagccatctgacatgagaaaaatcatttgatttttgtgtgccttagtttcctcatctttcaatgcagataataatacccattgcaaagattgcagtgagtattaatatacataaagaactacggtgtctgtccacaaaatatcacatggattgtgacatggcattataacaagcataatgttgtgttggcaaaatactgtatcagttttataatttagtgctttgaggtccaccaaatgtagtttttaatttattgaacaagcatatttgagctctgaaatagttaagatcaactccctaaaattattggtgctacttaggaggccagaggtataaattgttactgttgtcaatgttccacacaaatcacttaggatatgtgaatgtctgctggacagaattcgacttcttttgtggggaactatcttttgtagggaaatgggctcatctttgaagacactgtacaaccaaaatcaaatcatagcaagagacccactttattaatttgtccaatttgattactaagaatttaaccagtattagcttctttaaacatgcaatatgaaataatattttaattgcctggtataagcaatacaccaattaggagatttgctgaatgtcctagcatttgtgcatctttataaacacttcatggatagttccaataagaatccattccatgctgactgctgtgctagggctactcacccagagacgtgataggggctactcccctaagaccaattcctcctggcaggccactcacaatctcacagcaggaggcagctaaacacaaaatcaatattaatataaaatcaactgctatatttttaaagagtagtgtttggattacataagcaatcataaaactcccgttggctttagcaagaggtttagtcctgtaaactccaaaggttttctgtgtgtgctgagcagacaagcatcctaacagaataagccagaactttcctagccatcctagcatgtttgtgccttgtaagatattcccagttacatcctttaatttgccaaagggcagaaaaagaatttggtaagttaactttcccacatgcacaaatttaactgctgttttggtattccacacaggggccagattggatggaagggcaagagggctgctgagggagatcactgcaagtgaaggcaaaatctagtctgatggctcagactaaaaaacttggcctgccaataagagggagcagtgcttccagtgaaaatgtgaggcagtgcctggctttccctgctatactccaccctcctccactccctggactgcctgccaagaaagagaagggtgagcaatagagaaggaagtgaatcactagcacttcacaagtgctgctgcagaggcctgccatagagagctggctgagacctaggtgctctcctgctgatctgagagggcagaaaaataaataaatagaaatgtcaaaaagaggacagcagcagtgtagggaagggaggcagagaggaacaaccccgggcaggaggagtgtgggtcaaatgtgagaaccaataccctccttccctagctaaagttgttcccccatcagcctcagtttccaccatctctgaggcattcacaggaggaataactggtgtgttaaaatccaccaaccacttat

SEQ ID NO: 42206 - DNA, 1050 bp, Homo sapiens
attaggaaatgtaatttagatttaaaaggcctctgttgtttacaaatgaattctaatcaggtaggtactagcagctcctcagggaggtaaaagctatcatttagaatgtggctgccctttctgggtagctttttgttttttctgatcataatggcatgcaaaaagataatacaagaaagtaccaatgctaaggcttacattggtaaagagagagagaatattactcttcagcaattgttcattgttatcagtactggatttgattacggatataggatttatagctctaaatttggagctctaaagaaacctttagttttgaaataactgtaagaatttgtaactcttgagtttccaatattaaatcattttcccaacttttaaaagttagattctccttttatccataaaatggtcctgaatacttgaagtttattataatcacatatctcatgttaaaacaaaaaaaaagctacaatccctgaactaacaattttctttttggggattctgggcaagagggctgactagaagcagctaatatgcaccaatttcaaggagagaagacagtgtgatcagtaaacactagctcttcaactagatcatccaagagtaaacttcggaattcatgaagaaaacaacacaacccacagagaatggagaagcgtgagatatgacaattgcccacccggagtggtacagagccaggggaggcccccacttcgggaaaatggtcagtgagtgagggtccctggggaccacacttctgccatggacccctttgcaatcctgggcacaggaaataccctaggacccctccacccatgggagagaccaccttgactgtggactaatgaagacccccagcatagcagagctgccttacagaaaagtggccacactgttttccatgagggtccccacccctgctactcctcacagggcaaggcctcctgacctaggatctcagaaacacccaacctgggctttcggcctgttgcagctctgcgttttcttggaacagagctcccaggggtaacaggcaggcct

SEQ ID NO: 42207 - DNA, 1660 bp, Homo sapiens
ataaaccatggctgccctaaagagaagaggccagtctgtctccccaggtcccctggtccccgctgcttgtcattgggcagggactcctggcttgaatccacaacacagctgccccacccagggctgattgtaccaactggtagtggctctgcatatctctgcagtggagccccaagaaacaagtgaaagtcctgctgccacaaccattgccaaggtcccatctcttgcttcctccaagctggggagggaacataaagcctgagcttaccccagggctgcagtgtggatcctgggcatgccaagctaagatctacagccagcattctggaggagctgacactttcagatcactaagagggagcacagatacaattgggaggaagtacagaggttccacatggctgagcaagagcctacctactggccattatgcttcagcaccatctactgagtcatagcccaaacttcatcaccaaaaacattttgctaatatacccacctgtgaaaccaaggacaaaaattagaattcagctacaaataaagaccctgcacaaaggtcttggccttctgaaaacatccagaaaagaagtcaactgacgatattcaaattataccacagttaaaggaatatcagcctacacaaatgagaaaggacctgacccgtagaagaactctggcaattcaaaaagccagagtttctcctttcctccaattgattgtgctggttccatagcaaaggttcttaaccagactgaaagtactgaaatgacagacatagaattcagatatggatagaaatgaaaagcatcaagattcaggagaaagtcaaaattttattctaatccaaggaatctaaggattgcagcaaaacaatacaggagctgaaagatgaaatggccattataaggaagaaccaaatggatctgatagaactgaaaaaacacactacaaaaacttcataataaaatcacaattattgtattagtttgttcttacactgctacagagaactgcctatgactgggtatattataatgcaaagaggtttaattgcctcagagttccacagggctggcaaggtctcaggaaagttataattatggttgaaggagaagtaaacatgtccttcttcacacggtagcaggaagtagaatgagaactgagtgaagggggaagctccttataaaaccatcagatgttatgagaacttaccactgtcacgggaacagcatggggaaaacttcccccatgattcagttgcctcccaccaggtccctcccaccagacatgggattatgggaactataattcaagatgaggtttgggtgggaacccagccaatccatatcattccaccacacccaaatctcatgtcctcacatttcatgcctttccaacagtctccaaaagtcttagctcattccagcattaacctgaaagttgaagtccaaagtctcatctgagacaagggcaagtcttttccacctaaaagcctgcaaaatcaaaagcaagttagttacttcctagatacagtggaggttcagccattgggtaaatacacctgttccaaatgggaaaaagtggccaaaacaaaggggctacaggtctcatgcaagtctgaaatccaacaaggcagttattaaatcttaaagacccaaaa

SEQ ID NO: 42208 - DNA, 1057 bp, Homo sapiens
cattgcccttgagaaacagaacaagacaagggtgaccactctcagcactcctattcaacatagtactggacatcctagccagaacagtcaggcaagagaaagaaataaaaggtacccaaacaggaaaagaggaagtcacactatctctatctgcaatctgtttctatacctagaaaaccccatagtttctgcctagcagctcctagatccaataaaaaacttcatcaaagtttgaagatacaaaatcagtgtacaaaaattagtagcatttctatacaccaataacgttcaagctaagatccaaatcaagaacacaatcctattcacaatagccaaaaaaggaataaaatacctaggaatacagttaatgacagaggtgaaacataaacatctctacaagaactacaaaacgttgctcaaaagaaatcagagatgacacaaacaaatgtaaaaacattccatgctcatgaataggaagaatcaaaattgttaaaatggccatagtacccacagcaatttagattgaatgctattcctcttaaaacaccaattacattcttcacagaattataaaaaactgtttcaaaattcatatggaaacataaaagagctcaaatatccaaggtgatcctaagcaaaaatagaaaagctggaggcatcacattacctgacttcaaaccataccacaaggccacagtaatcaaaacagcatggtactggtacaaaaacagacacatacaccaactgaacagaatagagagcccagaaataatgccagacagctacaaccacccaatttttgacaaagttaacaaaaaacaagcgatgggagcaggactccctattccataaatggtgctgggataacctgctagatatatgcagaagactgaaactaaacccctccctgacaccatatacaaaaatcaattcaagatggattaaagacctaaatgtaaaacctaaaactaaagaccttagaaggtaacctacaaattaccattctggacataggtcctgggaaaattttcttcccaaagatgccaacagcaatggc

SEQ ID NO: 42209 - DNA, 1071 bp, Homo sapiens
tccagcctgggggacagagacagactccaactcaaaaaaaaaaaaaaaaaaaagacactagaactggtggttacccaaataactgaacaccacaaaattccgaccagaagacttagagccttctttcttgaaaataaacttttaacacgtttctacagaagcatgaggctaacatggctaatagctgtcagcttatctctgctactcacagaaaaggtaaattatgacatcgatctaacctgtgccttgaaatgatcagcattaaaacccctgttattaggttctttcatgaaagccaaagaaggaggcctatgaaggctcacaaactggaggtggcctctgtatctttacgggaatgtctacatctcatcccataggagtccaagcgggaaactggcttagtactctcctgagcctgttaccttcttttattttcctggccatcaaggaatatttggtcttcttcctccactgtccttttcttcttcttctctttgagggcactcagtacagtctcctttgcacatgggtctggggcattacttgatggtgaggacagtgttgagctgattatctgctctggtctataatgaaagacaggattctagcagtaagatattttaattcccatgccatatcagaaatggaaatcagaagctaaccaacaagccaaagtataatttatacactcacaacagttccccttagcaagtaaagctactttttcgttaacggcaaaaagtgaaaaacaaacggttttactagaatttggtatttctcattcaaacaagcagattcgtcctttcttttttgcgttgtagtcatgttgtcataggaacaactggagaagaataaagtggacacgaaaagggagagtattcttccaacgataatactcacatcgcagaacgcgaaaatcttctgtcaggaggggcgatcctcagagtcactgggctacacaccatcctggagttgcgaggggacagcacagccttcttgtgataaccattccagcacactgtgggaagtacccccggacaggaatactgggcctgatggatcggatagcgt

SEQ ID NO: 42210 - DNA, 1039 bp, Homo sapiens
ctactaaaaatacaaaaaattagccaggcatggtggcgggcgcctgtagtcccagctactcgggaggctgaggcaggagaatggcgtgaacccaggaggcggagcttgcattgagccaagatcacgccaccgcactccagcctgggtgacagagcgagactccatcccccccccaaaaaaaaaaaagacaaaaaacagaattgtgtcacacaggccagatgcagtggctcatgcttataatcccagcaatttgaaaggcaaggtaagaggatcgcttgagcttgagcttgagcctgaggccgcagtgagctatgaccacaccactgcaccccagtctgggtgacagcgcaagaccccaattccaaaaagaaaaaagaaaaatcacaaagaatttcatggcagagtgcctgtctttcacagctttaactgctgcaggaactttctttttttttttttttttttttttgagagggcgtgaggagacacaatctctgctagtgattctcctgcctcagcctcccaaatagctgggattataggcatgcaccaccacgtctgcctaatttttgtatttttagtagagacagggtttcaccatgttggccaggctggtctcaaactcctgctgggatcatgggcgtgagccaccacgcccggccacctttagagttttcttaccacctggttttcctctctcaatatctttctctcatttcctgccttaaaactctagcttggcatctgggcgcagtagctcatgcctgttaatcccagcactttgggaggccgaggtgggtggatcacttgaagtcaggagttcgagaccagcctggccaacatggtgaaaccttgtctctactatttttacaaaagttggtcggacgtacagacgggtgcctgtagtcccagctgcttgggagactgaggcaggagaatttgtttgaacccagaggtgaaagttgcagggagccgaggttgtgccactgcactccagcctgggagacagagcaagactgtctccaaaacaaacaaacaaaaa

SEQ ID NO: 42211 - DNA, 1034 bp, Homo sapiens
tgtctcgcagtttagattctttcttttgtctcaactttggataacctgatgtcaatgtgcctacgagaagatctttttccgatgaatttcccaggtgttctttgtgcttcttgtatttggatgtctaggtctctagcaaggccagggaagttttcctcagttattctcccaaatatgttttccaagcttttagatttctcttcttcctcaggaacaccaattattcttagatttggtcatttaacataatcccagatgtcttggaggctttgttcatattttcttcttttttctttgttggattgggttaattcaaagaccttgtcttcaagctcttaatttctctcttctacttattcaattctattgctgagactttccagagcattttgcatttctataagtgtgtctgtttcctgaagtttttattgtttttatttatgctatctatttcattgaatatttctcccttcacttcttgtaccattttttggatttcgttgtattgggcttcatctttctctggtccctccctggttagcttaataactaacctcctgaattctttttcaggtaaatcaggggtttcttcttggtttggatccattgctggtgagttagtgtgatttttgcggggttgttaaagagccttgttttgtcagaaaaccaacacaattttctggttccttctcatttgggtaggctctgtcagagggaagggctagggctgaaggctgttgagattttgtcccatggggtgttctcttgatgtaataccatccccctttttctatggatgtggcttcctgagagccgagctgtggtgattgttatctctcttctgatctagccacccagcaagtctaccaggctctgggctggtacgggggttggctgcacagattcctgtgatgtgaaccgtctatgggtctctcagccatggataccagcatagtatttcgggtgtctcttgggtcctgcaggagcaatctgcttccttcagagggtctgtgggtcctcttaggtttcctgat

SEQ ID NO: 42212 - DNA, 1035 bp, Homo sapiens
acatagaaaaggtacagtaaaaatataatagaaaagaaaaagacatacctatatagggcacttactgtgaatggagcttgcaggactggaagttgctcagagtgagtcagtgagtggtgagtgaatgtgaaggcctaggacattactgtactgtgctatagttttatgcaactgtcagtataataagtttgtttacaccaacatcgctacaaccacatgaccaatgtgttgtgctacaatgtcaggacaactacactgtcagtaagcaataggaatttttcagctccattataatcttatggaaccatcattgcatatgtggtccatcattgactgaaatgtcattttgcagcacatgactgtatgtaggtatgtgtgtatatttatatacctatatatgaattataacctttgtaatttataaggttataatttatatataaattttatatattaaatattatatgcaatagatacatatgtatgtatatataaattataaagcaaggtcccaatctcaaatgcccacaaggcccataaatatatcatgagtgagtcaaatagttgtcttggtatgtgtgcacacattgaacgaatggggcagactgtgcccctttttaaaagggtactcttatggtagctctgaaagtcatgctgcatttgcaacagtgaatccagtggaatatgaatccagtgtcatcaagcataataatttttgaagaaaagtggaaaactcagatttttatggtaaaatctaccaattctcttttttttttttttggcagggtctcactctgtcacccaggtggcacaatcacaactcactgcagcctccatctcccaggctcaagtgatcctcctatgtcagccttctaaataactgccatttttttttattttttgtagagatgggggtctcactatgttgcctaggctggtccctaactcctgggctcaagtgatcctgcctcctcagcctcccaatgagctgggattatagacatgagccaccatgcctggccccaatttttgagt

SEQ ID NO: 42213 - DNA, 1115 bp, Homo sapiens
cattatagtggacagtccaatgatatggtttacaacagttatataggtattagacctggccattacttactatgtaatgttgagtacatgatttgaaccactctcaatcttagcttctttatcgttaaaacagaaatagtttgtaatgtttgaattagtaagaataaaggacacagtgtcagatgtgtcagaaggaagcatgattagggcattaagtgagaagttaaataaataggaggggaaaaaggccaccccttgctctttttctcttttggacctttttggtgacagagacagaaagaatgtgtatagtatatttaattatctgaaaatacagagctgagcatccctaatctgaagtttaaaatgcccctacatccaaaattttttgagtgccattatggtctgagagcagacattgtgtatgattgctgttttaaatttgttgaggtgtgtttaatggcccagaatttggtctgtcttgttgaatgtttcatgtaaacttgagaagaatgtgtattctgtagttgttgtcttaggtagtctatagacgtgcattatatatccagttgattgatgatgctgttaagttcatctgtgtccttactcatttcctgcttgcttgatctgtccatttctgatagaggagtacggaagtcttcaactataatagtggattcaaatatttctccttgcagttctatcagttttggctcacatatttttatgcacaattgttagacacatatggattaaggattatgctgtcttcttggagaactgacccctttatcatgatgtaaagccaccctatccctgataactttacttgccatgaaatctgctttatctgaaattaataactagtctcattttatttttgtgttagctgatatatttttttccatccatttgcttttaatctgtgtgtgtttgtatatttaaagtggatctcttgtagacagcatatagttaggtcttggtttttaatccactctgacaatcttttaattggtacatttagaccattcacgttcagagtgattactgatagcattggattaatgtctaccatatttgccactattttctgttgtcattgttctttgttccta

SEQ ID NO: 42214 - DNA, 1050 bp, Homo sapiens
agataatgtcctggaatttgaattttaaaagagttccagagatgattcttattgcaactttaatacactgctttacgtcactggtggtggtgtttttttgttttgttttgttttgttttgtttttttgctgttgttgttttgttttaagacagaatcttcactctgtcgcccaggctagagtgcagtggcgcaatcttggctcactgcaacctctgcctcccagccagtttcaagtggttctcctgccacagcctcccgagtagctgggattacaggtgcctgccaggtggtggttgtctgaaaatttatttcatttcctttcagtttaatgttagaaattaccctgctggtacctagagtccattttcatccattgttttttaaaataaatgttcttaagctgtctatttaaccttacttacgcttcattagaaaatacctgtgtgtcaaccatacatattttatgaatttttttctcgtagttgatcacagccgagttaaattgacattaaagactccttcacaagattcagactatatcaatgcaaattttataaaggtatgtactaactttaaatggtgtttctctgccatattaatgtctttctacatactagttttgtaaaaactttttgaattgctcaaacatgataccaacagcaaaagaaataaaaataaagccactgccctggcacaatgtttttatatgctttccttctagccttcttattcatatagataaatagtttctacttagttttgtgatagcagagataacattttcttttttatttcttctttcccatggaagtcttacctattactaaattattttctcagttatccctttggacacaaatgaacatcatcaatccccgttgttgacccatataggttgtttccaaatttttaaaatgataatattgcagtaaacatctttgttgttttgaataatttcttaggataaattactaggggtgggattactggataatactgatttaaaattctagaacatagctttaaatgtaaaacttttggcagttgtc

SEQ ID NO: 42215 - DNA, 1050 bp, Homo sapiens
gtcagtgacattgtttggtttatattctcatgttcattattaaaaacctgtatagtagatgcttgataaacttttgagttgaatagataatggaaggtagctatggaagaaactaagaaagagctcttcactagttttagtattgttttagaatcagagcatgctctgtatttctgccagttagctttgttgagtaggtattagggcttttgttattaatgcctagataagtaataatttttaattagcataaggcggttcttaaatacctattctgtgcaccatatccagtaaacacaaagtaatagcagtcatcaaaagcttaagtgaattgaatatattttgccatgctttaatatactatgaaagacacattatttggaaatggtttaagttaaaacaacaatattactaatacaatttgaaaccttatattttgggtaatgaaatatttttggtaatcaaaataaatgtgaaatttgcttttaaccatttttagggcgtctatgggccaaaagcatatgtagcaactcaaggacctttagcaaatacagtaatagatttttggaggatgatatgggagtataatgttgtggtaagtaatttacttttcacaataaattttgagaaatacttatgtaataacataggctattttactgaataaggaatgaggggatttttaaaaaatccataattatgtttacttattgctgatgtttactaaaaagatggacccatttttaggatgtctcattaaatttttacaaactaggctaaatattttaagaaggtgtgataataatttaaatcttgtcctaagtcagtaagtaatgatacagctatcaaacaacttataaaaagcagaaaaggattagtgctctaataggtcagtaaaatacttgatagtacagttatactcatttgagtccctcttctcaggaaaatatatataaacacataactataaatagactataaatatgcagtataagagaatttcatctatccctggagttcattcagtgccctcttgttcttttggatgaa

SEQ ID NO: 42216 - DNA, 1043 bp, Homo sapiens
ccagctaattttgggtattttttagtagagacggggtttcactatgttggccagactggtcttgaactcctgacctcatgatctgcccgcctccacctcccaaagtgctgggattacaggtgtgagccacggttcccagcctttgtttgcatttttttcttccttttttttttttttttttttttttgagacggagtcttgggctgtcgcctgggctggagtgcaatggtgcgatcttggcttgctgcaacctctgcctcctgggttcaagtgattctcctgcctcagcctcccgagtagctgggattataggcatgcaccaccacacccggttaattttatatttttagtagagttggggattctccatgtttgtcaggctggtcttgaactcctgacctcaggtgatcacctgcctcggcctcccaaagtgctgggattacaggcgtgaaccactgcgcccagcctcatcttttaatagttatacaagtgctttatatattgaggacattaacttttattcatgttgtaagtaccatggtttttcctgtcttctgcctgtttgcaatacataagtttcattttgtcatgtcagatttttgaatggtttttgtccattgagatatttgtacatagaaagtctttccctaacacaatagtgtatatattttgcatatatttttagtactttcatagatttactttttaacatttatcattggataaatatccaatatgtttatatcatatatatatatatatttttatccacctggattttttatggttaaggtatgtgatcagaatttaattttttgctcttcattgatagctaacttctcctttgccacttactgaacggtctgatctctggagaattcactgttatgtaagaaatgttacatgtactcagatctgttcctgaactttctattgtgtttcattgatctggttatctgtatctttatgttatacttttaactatcaaattttagatatatataatttatcccagtaactcaactaaaattctataaatgttt

SEQ ID NO: 42217 - DNA, 1061 bp, Homo sapiens
tcattaggggaaaacaagacactatagaagaaaagatacgaaatcatggtgtcatagatgggaatactatctgcagtcatacgactgaggtaatgaaaaattacaatataacagtattggaaagatagagaaggacacttccacagtaggaagtcagtagaaaatgtgtgaaacaaagatcaagaaataacttttgaaatagtctgaaatacagaggtgtaaattttagaagcagctataaaaaaatgttgaaagttgatgcctctggctaacaggagggctgcggggcagagactatgtttttcattcaaagtcttgtatttgactttttaaacagtatatgtgtattaccttgatgaacattaaattttcttagtctgaaaaactgcagtttttattcgcaaccagattgtaatggctcttaatatgctactcttagctacataattctcaggtatcaacttgtttaacagtcttaaaatgccctttttaaatgtttgtttttcagttgccttgttgaaggggatgctaaagaagaaatactgcagccaccggaacctcatccagtgccacccatcttgacaccttctcccccttcagcttttccaacagtcactactgtgtggcaggacaatgatagataccatccaaagccagtgttgcatatggtttcatcagaacaacattcagcagacctcaacagaaactatagtaaatcaacagaacttccagggaaaaatgaatcaacaattgaacagatagataaaaaattggaacgaaatttaagttttgagattaagaaggtccctctccaagagggaccaaaaagttttgatgggaacacacttttgaataggggacatgcaattaaaattaaatctgcttcaccttgtatagctgataaaatctctaagccacaggaattaagttcagatctaaatgtcggtgatacttcccagaattcttgtgtggactgcagtgtaacacaatcaaacaaagtttcagttactccaccagaagaatcccagaattcagacacacctccaaggccagaccgcttg

SEQ ID NO: 42218 - DNA, 1012 bp, Homo sapiens
gcaacttccgcctcctgggttcaagcgattctcctgcctcagcctcctgagtagctgggactacaggtacgcgtcaccacacctggctaattttttttcttttcttttagtagagatggggtttcaccatgttggccaggatggtctccatctcctggccttgtgattctcctgcttaggcctcccaaactgctgggattacaggcatgagtcactgtgcccggccttttttttattattatttttttgagacggagtctcactctgtcacccaggctggagtacagtggtgcgatctcagctcactgcagcctctgcctcccgggttcaagcgattctcctgcctcagcctcctgagtagctgggactacaggcacacgccaccatgcctggctaatttttttttttttttttttttttttcagtagagacgaggttttgctatgttggccaggctggtctcgaactccgatctcaggtgatccacccgccttggtctcccaaagtgttgggattacaggcatcagccactgcgcccagcgtttttgtttttgtttttgttttttgaggcagagtttcactgtcgcccaggctagagcgccgtggcgcaatcttggctcactgcaacctttggctcccaggttgaagcgattcttgtgcctcagcctcccgagtagctgggattacaggtatgcacaccacacccggctactttttgtaattttttagtagagacagggttttgccatgttggccaagcttgtcttgaactcctggcctcaagcgatctgcccacctcggcttcccaaagtgctgggattacaggtgtagcctgaatgtaagtattttcttaaatatggtcctgagtccaggtgtggtggctcatacctgtaaccccaacacttcgggaggatcacttgaggacaggagttaaaggttgcagtgagctatgatcacaccccagcactccagcctgggcaaaatgaaactccatccctttttttttttttaa

SEQ ID NO: 42219 - DNA, 1048 bp, Homo sapiens
agttaatgtttaggctaacttgctgaaataactgttttaaataagaaatgtttatttctcccctgtaacagttgtgaagatagacatgagttcatccagggacccagctggccatgtctctacttgcctctgcatttagattccatatctgagtaacaggcagttgtcttcaaccacatggggttgaagtagctcaccagtaccctgtccatattccagccctgagtaaggcaatgtgtggagagtaggcaagttcattcttgaggtcattaaagcagaagaatgctgatcacttccacttatatctcattaaccaaaacctagttcaaatggccacactgatttacaagggaagctgggaaatgtctccagctgggaagtcatgtgcccacccatcattttgagtgaagaggggatctattatttatttttatttttatttttattgttgagatggagtttcgctcttgtcgcccaggctggagtgcagtggcgcgatctcggctcactgcaaccttcgcctccttggttcaagcgattccctgcgcccagccagggatctattattaaaagggaaaaaggaggcctgctctaatgacctcattttactctaattacctctctaaagatcctgtgtccaaatacactcacattcttgggtatttaaggacttcaatatatgaatttttggggagacataattgggcacacagcatgggttaaagaaagtggaaattgtatcctttgacttttttttctccacctttctgtgtaagaaggaaaggatatcttttggaaaaaagatacggagaagaaaatgcccaggaatgtgtagaagcaaggatcctgcattgttcttctggtaagaagaaaatgaaggggataaaatgggtctctggggtacattgcctttagctccagaaatgtaaatgggctcttaggctccttctgttacaggcttacgttcctcatcctaaagacaagaatgccattagggttattagtaaaaggatgttttcattttacatttatgcctgaacttaataag

SEQ ID NO: 42220 - DNA, 1032 bp, Homo sapiens
accccaggaaaaatggaagggaaagtggtacaagttaaaacagtcttcgtggccgcagagacgatcgctacctcggccatggcagatctgggggtccggggcgggggttcttccctgatacccaccgggcacgcgagttcacgccagcgacagtggaaagccctcccctcgcagcgcgctccgccactagccgcaccccgccgagctctgacctccgaagagggtccctgtggcgatcccgccccttcgtctgatgtttgtgcctttgattggctcttaggtggatccctcagcgtggcttgcccaatggagcaatgccggctggtggcctggccgctccgccccttccctacccctcgcggagggcccgccccctgccccgcgccggctagcggaggagagtaaatacaacaggagcgcaaaatggcggaaccgccgagccccgtgcactgtgtcgctgccgcggcccccaccgccaccgtctcggagaaagaaccgtttggcaagctgcaactctcctcccgggaccctccgggttctctgtccgccaagaaggtccggactgaggagaagaaggcaccgcggagagtgaacggagaagggggcagcggcgggaacagcaggcagctgcagccgccggcagcaccttcgcctcagagctatggcagccccgcgtcttggagctttgcccctctgtctgctgctccctccccgtcctcttctcggagcagtttctctttctccgctggcacggccgttccctcctcagcctccgcttccttgtctcagccggtgccgcgcaaactgctggtccctcctacgctgctgcacgctcagcctcaccatctcctcctgcccgccgccgccgccgctgcctcggctaacgccaagtcgcgcagacctaaggagaagcgggagaaggagaggaggaggcacggtctcggtggggcccgagaggccggcggggcctcccgggaggagaacggggaggtgaagccgctgccccgaggtgggtgccgtgcggggaggggg

SEQ ID NO: 42221 - DNA, 1078 bp, Homo sapiens
gagcagttatacaaaaaatcagaattcaaattatagaagagggaggaggaggatatgatcatttgtgatcatgggcatcaaggagtgcttagtggaagaagctaaatttcaccgtaatcttacaggatgtgtaggatttgggcaggaggaattgggatgggcaatcgcattttagctaagggatatattagtaaaaatattggagtaagacatttgagtaatgatgaatcaagtaatccggaatcttgttatatatgtgggtgaatagttgaagaaaaggctaaaagaaggtgagtcttaactgaagattcttgaatgacatattatgggagttttctgtttttagataggcagaggtaagctgagttggtttattcattcgttttaagcagaagatagtgacatggtaaactatacatttaaggaatcttttttggtcactgtgcttacttggtggaaaggaaagaaactataggtacggaaaccctttcttttaaaagctagtgagaatacactaggtggtgactctggaaagggaaaaaaagatggaaatattttaacgaagtataaactgaactggtcaagtgatttagtgttaggggaaaattgaagaaagaagtattattagtgttactgaaaattttttgtatttggatgttggatgaggatgtgccattaacatagagaattggaaggagaacttgaacttttttatattagaaagatgatattttggtgttaaatattatggagatgaagatgtggagtttggcagaggggttgggttgggagattaatttggagattagtttgccacagggttatagtttacatcatgtgagtgcatttttagaggcaatatagagaagagagaggaatgcctaggagagatcctaggtaaatgtgcaggtttggatggtgggattatgagaatgagggaggagtcaggtaggatagtacagtttcagtgaaacttagggagaaattttgagaaggaattgatactgttatgttgcagtgaggtccacggaaaaaagggctgagaagccactggattttttagctttgattagctgtg

SEQ ID NO: 42222 - DNA, 1030 bp, Homo sapiens
catctgtaatcccagctactggggaggctgaggcatgagaattgcctgaacccgggagacaagaggttgcagtgagctgagatcaccccactgtactccagcctgggcaatagagtgagattcagtctcaaaaaaaaaaaaagaaaagaaaaagtcaagtctacttaactttacccttggtttagcccaatagccatttttttttctgatttaatcaaatagttttcttattcatttgaaaatatcatgctgtaaattctattacttgagaaggaatctgttttagaaatactttataaaagcctcatatgttcttgattgaatactggattcctaacataatgtgaattatgtgaatccagagattacacatgaaaataaaatttaaaacagcctaaaaattgagatttttaaaaaatgaaatatacgatattaactttgaagtagacaaaaatttaggtgatattttgaaccgagttaaactgaaactagtgatgattaaggtaaaagaatgagatagatgtggaaattaatttgtgacttctgggatgtccatggaaaaatttagggaaaatgtattcacagtggaggtaagtaataatttaattactgccttacagtgttaccaagattaaatgagggaaagtatgaggaaagtgccaagtatagaatctggctcacaggtacttactactgagtagtaaatagttatgaaatctttcttgtaagtatgtatgagagattaactttgtgattaaaaagcaacaaaattggccaggcacagtggctgaagcctgtaatcccagcattttgggaggccgaggcaggtggatcacctgaggtcaagagttcaagaccagcctggccaagttggtgaaaccccatctctactaaaaaatacaaaaaattacggtgggtgcctgtaatcccagcaactcgggaggctgaggcatgtgaatcgcttgaacccaggaggcggaggttgcggtgagccaagatggtgccactgcactccagcctgggcaacaga

SEQ ID NO: 42223 - DNA, 1366 bp, Homo sapiens
gtatgacatagtatacatattataaatgtataacttgatgaatcttcacagggaacacacccatgattttaaaaagccaaatattgttaatagccagaaaccatccccgaacccttctttatcagtactgtgccaaccccccagtcccaccacatgaacaaatacccaggtgatcactgtcctgactttgaacatcactgatatattttgcttctttttgaacttaggtggaatcagatagtacgtacattgttgtgtctggtctcttttctgtagtataacgtttgtgagattcatccatcttgtgtgtagtggtactgctgtatggtattccactgtgttagtataccagtgttaatataccacagtttgttgatcttgttaccatatggatggacatttgagttgtttccagtttgaggctggtagaacacggatgctatgaatatttttcacatgtcttgatgagcatatgtatgtgtttcttttgagtatatacctaagattaggatttcaggatcaaaacatatgcacctattcagttttgctaggtactgccagtgttccaaagttaaatgtgcctatttacattcccagtggcagtgtttcacatcctttgccacggttagtagtgtctttttcatttaagtcattctggtgactatgtagtggtagctccctgtggtttaatttgtatttccctgatgactaaggatgtcaagtacctttttatatgattattatccagttgaatatcctcttttgtaaagtacctgtccactctgtcaatttcttatttgctttttttctagttgatttgttggactattatatatgtagataagaatcttttgtcagctaactgtattgcaaatatttcctctcacttggtgtcttaccttttcactcatagatgtttttggtaactagaagttcctaagtttaatgtaatctaatttataatttataatccatttatgataactgtttcttacattctgttttagaaatctttgcctaccacaaagtcattaatatattctgtgaagttttcttctggaaacttttattgttttacctttcatggttaaatctatagttaataaaacagcagctaaaagtattggaaaaataatctgtagttcatctggaattgatctttgtatatggcatgaggtaaagatcagggtttatgtttttccatataaatatatccaaaagacccagcatcatttatggaaaagataccccttcctcattgtattgtagtgtcaccttaaaccagctaatcatatgtgtgtgggtctgtttctgggctccctttgattccattgttttgtttgtctaattgttacagctttataat

SEQ ID NO: 42224 - DNA, 1045 bp, Homo sapiens
tttctctaatgctgtggccctgaggttagtgatatattaggaaactgtatcatgaaagtccgtttgaggatagaaacatatgcatggacttttcccaaagtttgtaacctgtccatatctgttagcttttgctgtattaaatgtataaacaaaagcctcaaaacttagtgacttgaaaaaaggtttcatttatcacagttctttgggcttgctggacagttcttgtggtctctgctaacttagctggggctatatggcttcattcttatgtctgatgattggcagaccagttgggtcttgggacacctcacttatatggttggtggttgatgtatgttagctgggttgatggccacatttttctcatcatcccacaggttagcctgggctcatttgcatggtggtggttacagggttccattgagtagaaagagggtaagccccagtgtacaagcttctgcttgtgttgtgtttgctaatgtcccattgacaaagggaagtcacatggtgaaacccagattcgtgtggaaaaatagactccacttcttttaggttatttattcattttactttaattttttttcttgtgacagagtctcactgtactccagcctggacgacagagtgagactccatctcaaaaaaaaagaaagaaattcatgataatgctatcctctaggtaattaagtagcactgtttttaatcgataaaagagtatatatagtaatgttatatgtgttttgtattttcttatatgatggtagaagttgtgaattatatatattttaacaggtcattgtccaggatggagtgcagtggtgcgatctcggctcactgcaacttcccaggttcaagtgattcttgtgcctcagtcacccaaatagctgggattaggcatgtgccaccttggcctcccaaagtgctcggcctatttaaaaaatcctttaaatttttaatatttgtgggtacatagtagatgtatatatttatggggtacataagatgtcttgatacaagcatgcaatatgaaataagtgcatcatgg

SEQ ID NO: 42225 - DNA, 1550 bp, Homo sapiens
attccaaggaatgttgttcatcagttcaagacagtttcagctgtatgcagtttagcatggcatattcggctcaaattatatcactcagaggaggacacttctcagaatacagctactcatgaaacaggcacatcatcagattccacatcatctgttcttggacctcacactgacaacatgatttgtgctgtaagcaaagcctccttggattctgttttttcagataaacttcattctaaatatgaattacagcagattaaacatgaacctattgcatctgtaagaatcaaggaagaacctgtgaatgttaatattcctgaaaagactacagcactgaataatatggatggcaagaatgttaaagcaaaattggatcatgttcaatttgcagaatttaagattgacatggattctaaatttgaaaatagcaacaaagatttaaaggaagaattgtgccctggaaatctaagtctagttgatacaaggcaacacagttcagcacattcaaatcaagataaaaaagacgatgacattttgtgctaaatttgcatataccatctaaaatccttttttaaaaaaatttaatgtaataaagattcatgaattctgaaagcaagccaaggacttgctcctatgtctgttacaaaacatagtttatgtagctttgtaacattcctcagtgcctgtccataactgtgaagtattaagcacttagggccagatgcactgtaaacattgcaggtttaaacataaaggagtctttaaaaaaaaatcatttacgttggaattttaggttttagaatagagctgacattaacatatatatatatatataaatatatatatatattttgtaatatgagccagaattctttttcaacaatttaaagcttttccatagagcttatttatatccttttttttcattttaaatgtgtcagcactgtagtgtaaatagcttttaaatatctttttagtgtgatttatactgaaatgtgagccacttaataaaggttcatatgttcatattaataaatatgttttctgttgagtctgtaaagacaaactgacaattcatttaagtcatttgataatgattctctgctggtatatctatttagtgtggtattgtagtgcaaatgtacgtaattcaaatctagtaaatatttaagttcctcacactgtgcaggcttttttttttttttctttttttcttttttttgatacggagtttcattctgtcaccaggctggagttcagtggtgcgatctcggctcactgcaacctctgcctctcgggttcaagtgattattctcctgcctcagcctcctgagtagctgggactacaggcacgcaccacaacacccagctaatttttgtatttttagtagagatggggtttcatcatgttggccaggatggtcttgatctcttgaccttgtgatccgcccaccttggcctcccaaagtgctgggattgcaggggtgagccacagcgcccagcctatgcaggcatttttaacaaccaagactcagttaagaaagtgtgca

SEQ ID NO: 42226 - DNA, 1042 bp, Homo sapiens
ctgccttttgggttactgttggtatttccatttctggcttaatttatggtaaccatcaaaactgcttatatttctggttagggcgaagccatttaggaagaagcatttcaccagaacaagtaaaagttaattgcagcaatgatgtcagttttggcccctagtttaataaaaggataggcaaatatcataggaaatcttcatggtttgtaggaaatcagtgtttgcaacgtaggaagtttcatgggatagggaaggtataaatcaagatagtaagggttttgttttatatgtcattgtcttaccatgctccccacctatttaatcttctgttttaagctaaatttatggatttgcacctacctttttgagtggcagaagttcttaacaaaccagtattgagaaataagaagggatgtagttaaaatggttttctgtttctctttaaagttgaagaatgatatatttaacaagagttgtgttttatttccagttttccagtagcatatatgtagatgcattgaggtcatactgtgagaaaatgtctttagggtatccctccaaaataggagccttaaactttttaacttaaaggaaggcatatctaaaaaccatagtggttgcttttaggtatagtttcctatataacctatagtcagacttatctataatatgaaaatttaattgttttaaaaatgcatacatcggccgggtgcagtggctcacgcctgtaatcccagcacttagggaggccgaggcgggcggatcacgaggtcagaagtttgagaccagtctggccaacatggtgaaaccccgtctctactaaaaatacaaaaaaattagttgggcgtggtggcgtgcgcctgtaatcccagctacttgggaggctgaggcaggggaattgcttgaacccgggaggagaaggttgcagtgagccgagatcgccccactgccctccagcctgggcgacagtctcaaaaaaaaaaaaaaaaaaaagcatacatctctgaaggtaaagtataaatcagtgggctcaagatttgca

SEQ ID NO: 42227 - DNA, 1047 bp, Homo sapiens
gagttgctctgaatataccctctgattagcagcagttaaaagtgcatttttccagcctggacaacatagccagacctcgtgtctgctaaaattaaaaaaaattagccaggcatcatggtacatgcctatagtcacagctattttgggggctgaggcagaaggatcacttgagctgggaagtcgaagctgccgtgagccctgatcgtgccactgcactccagcccgggcaactgagtgagaccttgtctcaaaaaaaaaaaaaaaaaaaaaaattttaaacggaaggaagaagcagttcctgagttgtttactgagaatttatgttaaaataacataaactgttgattggctatacattgttctttgtatcacaaattccagaaacatgaagataaatgagtgaggcagctagtcaggaagaaaatgactttaaacagttgcccccaggcttgggtgtaggggcttgactcaagtcctatactcacgtgtctgtgcttgcctacctcacatggctcagactgctcggagctctttttcttttcacacaattgttatttaacctttattgagttgtggaatatctggctagatggcacttggggaaaactgaggtccagagaactcagtaacttattcaagagcacacagctcttagtatcagaacttggatctagaacccaattatcttgatgcttagtcattgctttttatctgctgtacttcctgtaccatatattacagtgtactgagtacttagagacaaagaatgttgccacattttttccttaagagtgtttacatatgaccaagtgacctgtgtggccacatactgctttacatttctatttaaattacagatttttgagcatatgttggtgctagaagagagacattaagcttcagcattttttagtccaaaggaaagctggccgggtgcggtggctcatgcctgtaattccagcacttttggaggccgaggcgggcggatcacctgaggtcaggagttcgagaccagcctggccaacagggtgaaaccctgtctctact

SEQ ID NO: 42228 - DNA, 1044 bp, Homo sapiens
acagttgcagatctgtatgtgctaggattggctcagcagggtgctttacccccaggatttccctgagatcatcctgtgtgtccttggatgattttggtttgtaatgagttctgcagccaataactgcttttgaacctgttttaggctcatccttaacactagaccagaggtaacctctatgccagtgtcatcttgtgactaaaatagtattctggagttgatgggaatcagtctcaaataacctctagggttaaggaatcattaagtttagtacctatcctgttttagacaaacacagaaaagatgcttatgaaatggtttttggtatttgtcttagtttgattatttttaaaagagatttgcagagttatagaacatatcagcagttttaatctgtttcttgtaagttacaattcagtagcttaatttttttcaataaaataaacttttagggactgtattttataaactgaaatattaaagagtttttttgatctttgaggattaattgtcataactacttaaatgacagttagcaaactgtgatatctgggaagtctttagtgttaattattcctgtgtattaactctaatattggcttagtatttaacataaatactttttggctcttgggttattttaattcagttttgtgtttactgagtgtcagggaaaattaaatatcattataaattctgtcatctctgttaagccatcctttagcaatggtaactgacactggtttttagaaacaaactacattactgattgaatgaattggtttcttgtatgtggatttttagatgaacaatttctggtataacctaggaaattctgaaatttctttaaaagattaaaaaaaattcaatctattttgtaagaaaacaagtgttatttattcatgcaaatagaactttctattattgtggcaactgatttttgtttacttaagagaacctgttgctaaaatagtaatgaggaagagtgtaatataagtctcgtcatacaccccttgctctgcaagtaaccagagtgctatgtct

SEQ ID NO: 42229 - DNA, 1052 bp, Homo sapiens
ttgaagcagggtctctctgtgttacctgtgttggagtacagtggcacaatcacagcttactgcagccgcaacctcccaggcctaagcgatcttcccgcctcagcctctggagtagctgaggctatgactataggcatgcactaacacacctggctaatttttttattttaatttacaatgagaccctgtctcactgtgttgctcaggctggccttgaactcttgggctgaagcaatcctcctgctttggcctcccaaagtgctggaattacaagtgtgagccaccatgcctggtacctagctcctcttatatgaagtgttaaggaatacgtttatgcaaaattaagcacaattttctgctttcagttcttattaaatagatatttgggttgtttaacctaacagttatgaggtttcctttcttacttattataaataataataacattctttcacttttaaaaaactgcatgtaagttaaaccagagtgtatatttctcaatgtcctaatcttggaggattgtcaaacctactttgtgataaattattgattgtctcttaaaatgctgattgtctctattgggaccaaaaaacattgaatataaaagtttacatttagatgtgtataaaatattaatctgttgtttttgttataaaattggagcagttgagtcgacatgtgcagtttaaaaaatttatactcttattgaaatcaaatgtatgagaatattattttttctataactgctacaggctaccgaaaagccattcctgtctttgaggctacaggattttgtatttggggctaattatacacaacaatttaaagtgattatgtactagaggacatatttggctgtcctaggttagctggttttatttttatttagcaactttgggtgagtttcttaactttcctaagccttggtttctttatctgtaatattgagataagaatccttttaaaattgctgtgatgattaaatgacacaacatatataaacaccaagtacagtgcttggtgtatagtaggtattcaataaatactgctat

SEQ ID NO: 42230 - DNA, 1047 bp, Homo sapiens
ttgttataggtttttttttcactagttttgatctacaccccccactccactctgtatactgatagcagaaacttaattttactcagtgttcaataatttcaagtttaaatgaattcagtttatgacaactgcctctccctcctccccttcctggttatggtgtctaagttttgaggtgatgaggtggcatttatggtctgatgaggggttgacatgtgaacataatggcaaccatcatccttgagtagtgcattgtcctccctgggtctcagctgattggcgtctgctgagaagtctgcatcctttctggtcctcagctgtgtgatttactgctttctgaaataatgcctccagcaccacaccttgaggttccttcagggctgctgctcccctagctagcctcaacgctctccaaatgccaatatggggccaatatagttccctctacacctaaagctgtacacctaaatttgcttggtagtaatagtatttgtagtagaattttactgttggtaataaaccggcctggcatgttacacacatctctaaatatatctttttgaacaataataaaatttattacaatactgtaattgtgttctgtttgtaacaaatgcataatgtgttacattttgttggtactattaacaattttattttaaattgaaagctttagaaattgattttctcctgttctagatttaagtatatatacaattccaatgcttcttttgatatattataggggctaaggaataaaccaaagaaaacagcacatgtgaaaccagacctcatagatgttgatcttgtaagaggtgagtctgataaataaatgcttaatacaagtagacattgttctggaagaaacagaattcaaaataggtttaaatattgtattaggctgttttgcattgctataaagaaatacttgagattgggtaatttataagaaaagaggcttaattggttcatggttctgcaggctgtacagaaatcacagcaccagcacctgcttctggggtaggaagctttacccatggcagaagg

SEQ ID NO: 42231 - DNA, 1026 bp, Homo sapiens
tctgttttgttaagtaaattatatacattgagacattttacccctgaatacatcaatatatgtctcttcaaaataagcacatataaccacattacagtgataacacttaacaaaatgaccaaaaatcttataatatttacattttattttaggtactccttggccctggattcaggcatggctggattgagaggctcggataatatcttcacttctttttgctgtagactttggtcttgctggtcacattcttaggttggctctttctaggtggtggctaaggtggcccctagcaatttcattttttcatagtctttagtgtttgtgatctaggagaaaggtcttgaagcacctatattagtccctgaaaaagactgattggccctgcttaggtcacttgcccatctttttataagcttttgtattcagacttactaagactgtgacaagcctaggttacatgtctatccctgaggtgggagaaataagaatgtatgattgatggataaaggagggagacgaaggtaaagagagtttatgtccagaaagtctaagggatgctgtgtaggcaaaacaagatttcccttcatgtagtaatagttagcattgatggatgtttagtggtttctctggaaactatgcctaagtaaatttgttattaattctaaggagatagacctctattaataagaagctctttgtatctgtatgatacacttatcataagatttctttatttgtaaaacaaagaaataatgtacttgaggttagggtagttctttgattgtctgtgatgttacttagaaatgtcctttgattcatatgcatctaatttacgttgcagcgttgaggtgtagtttagagactatgttgggtgttgtcttgttccgagagtttattactaaataccatggttaggctgcggcagacaataaaacagtctgagagagcttgtctctatagtaatattttaaactcatttaaatttagaaaaatattttggcaaaaaataatgtaaaaacaatt

SEQ ID NO: 42232 - DNA, 1034 bp, Homo sapiens
caagcacctctcacagcgttggcactgtcttcagagatctctggcatgctgctttctttttatcagggtttgtatttatttaaggttttatatggcatagagatggcactatcctttttctggcacttcagtctcaggtaatgaatattaattactttaaatgtgacagcctcattatggattttgttttgataaattataatagtatagataatggaaaaatagacactgtaaactttatttggctcatgtgtacatacatctatacgagaatgaatatatcaaagcatatttagctaggatttccttttttttttgggacagagtctggctctgttgcccaggctggagtgcagtggcacgatctcggctcactgcatcctctaccttctgggttcaagtgattctcctgcctcagccacccgagtagctgggcttacaggcacgtgccaccacacctggctaattttttgtatttttagtagagatggggttttaccatattggccagacctcggcctcctaaagtgctgtgattacaggtgtgagccaccgaacccggccaggatttcttgattttggtttcttttatatttctgaagtactattttacttgtgttaattggttaatttatttttatcaccgttttgggtcaaaattggctgtattaaaatgtcatgtgaattgtataatttttttcttctaagttcttgcctcaattatccaaaattatctgaaataaaacatataggcattgttacttaagtgaataaaatgtatattatagtatgtgattctacttttgtacaatgtaccatgagcatttgtgtactatacaaaaatggctttttgcatacaactatacaaaaatggctttttgcatacaactatacaaaaatggctttttgcatacaactatacaaaaatggctttttgcatacaactatacaaaaatggcttcttgtatagtttgtatagttgtaccatcaatgaagacttaccaaataggaaaatataattacagcaaacatta

SEQ ID NO: 42233 - DNA, 1049 bp, Homo sapiens
tttgggttcaacttgtatttcctctgtcccagcctagaatcaactattgtttcaagaagagtagtatatagaaaccaaaatctgagttcaagatacacttgttgcgattggggtgttgttaaccccagtccttttcagtgagcacagctagaaaatgtgtatttggtcctttacaattacatttatttctatagctatccaggtatattatacaccatcaatttgcattgatagctccaattcaaatacaatcctgcggggttcattctatctcttctttttatatttatatcttctttctgtgtcagtgagaaaaatctgattcccattatcctcaatatgtttacttattccattagtcacctttatatagatcaacttctaaccctgccaggctgcacctggtacttttctctaatattgtccctaaatgggcttccattattgactatcactgggctgcttttgctgtcccactccactgatattcttgcaagtgctttcattaccagctactggcaggctgcctttgtttgtaaactctgagagtaatacttacatttagcatttttcttttgccactgcagtttagtttgcaacttaccttcatagggttcatgagaagcatcaaatacctactacagcttagtaaattactgttcttgtctgctgagagtgtagcatgaactttgaggagatagtggggagagaaacaacccagagaagattggagggaagcagaggtaaggacaggaggaagtgagagatagctgaaaggtatcatatgggatgaatgctaccagtactctttcccctgctttcacgtagtatttaccctgccctgttaaggaaagaatacattctccttagaaaaatggttaaagcagcagttattacagactcaaagacccttttactggcctaccctcacccccctaccaccacccttttttttaaccctatagagtctggttcattctacacattcccaaattttcagccactatttctactttgactgctggcctccaggctcatgttttcagttg

SEQ ID NO: 42234 - DNA, 1030 bp, Homo sapiens
agaaagttctcaacttgtacagtttcataaccatgtaacttcttatgatatctgttcagtgtatatgctaactaattttaagatagaattttagtgtcttagagttgtgtgtataaatatattagctgtgcacagatctatatattccatttataaaacatgataaatatattcaccaatttttatttttagtgtcattaaaattgtgtgtgtatatagagatatatatacaactttatatacacacattttatttattaaatgtgatctatatatttactaattttttttttttttatagagtcatttgccctggctccatagttcccacccaggattagaaaaaataagtgctatagtatgggaaggtaatgattgtaagaaagcagacatgtctgtacttgaaatcagtggaatgataatgaacagagtgagtttttaaattttattcttgtagttcaagggtaagacttagtaattatatataagataattactggaatattatattagtaaccttctgacctcatttcttcaccctgaaaaaaaagttacatgtgtgtatttgtttctgtctgtaatttaaacagtgatttgtcaccaaaccactctcatcttctagtgttttcacttatctgaccaagaatagatgatacggtctataatttttctcttttatctttttctttcttttgaaattcaggagcttgttagatatatacaggtgttaataaagacttttctttggactagagattgttgttacaagaactttaaaaataaaaaaataattaaaaagacttatttttctgtatcattcttactggttcatttgtttaataggacttaagacatgaaaaaatcaaactagtaaatttgcattcatacttgcttacctacttaaatatatagaagtaatgcagatagtggtaaaagtcttgagtagttcaaagaagtctaattgaaatactgtggattaaaattttattttctattatttcttttttcagataattactgatttttaaaa

SEQ ID NO: 42235 - DNA, 1071 bp, Homo sapiens
tcattctctttaatattgcagtatttatgaatatttctaacttgaaataatgaaatacataaatttttttcaagatctggatgacagtccttttgccatctacttagtaaattagcgatctgataattgtttttaagatctgaagaattaatgacattttatatgtagtaggctctcaaacttgaatgggattcaaattactcagaatgagtatattttaacaaatgatttcatattgctataaataattctactgtagataaaatttatggtataattttatttttcttttctctctcttcccctggctccctcaaggtgaacagccatataccaggaataggataccagatttttggaaatgcagtctctctcatactgggtttaactccatttgttttccgactttctcaagctacagacttggaacaactcacagcacattctgcttcagaactttatgtgattgcatttggttctaatgaagatgtcatagttctttctatggttataataagttttgtggttcgcgtgtctcttgtgtggattttcttttttttgctctgtgtagcagaaagaacttataaacaggtgggtataatgtagacttccgaataagaatattttatcgttttcataatattaaaagtattcctgaagtactttattatttcattatatcatttttacctaattattttttattttgcttttatagtacctaaccaaataaaatcttaacaattcatattttgttaattttgtttttctgtggtaatctacttgaaaattaatcctcatcttaatcttttttagcgattactttttgcaaaactctttggacatttaacatctgcaaggagggctcgaaaatctgaggttcctcatttccggttgaagaaagtacagaatataaaaatgtggctatctctccgttcctatcttaaggtagaatgggagtgataaaagtagctttaacatgctggccctttctgatagttccagtttctttatcaatatatatttgtctctagatgtatagtaaccagcttttactcattcaaaaactgg

SEQ ID NO: 42236 - DNA, 1824 bp, Homo sapiens
tgtgccattcattgttgatgagatgaaagcccctaccctcatacgtaagcttatacttcagtgagggaatgtaagcccagacctaggaattatcctagtttaatctctagtctccaatttatcaccaattcctatcttttctgctcccaaaatatatcttgaatccatttgcttctctttgttccatttctgccaccctcattgaaaccatcaatcatcttctacctcatgctacttcagttacctcttacctggcattccagcattcacatttcttcttttcattcctttcttcagtctgccaccagtgatcatttaaaaatgtatatttggccctatattcttaaaactttttggaggttcttcatttctcttaagataaagcacaaaatcttaacaaggtttataatgccctttatgatctaagttctcccttattcacctgtcttttgtttcattttgaaacactctccttcctagtccactacattccaaccattttagactgcttccgttctttacatgagctgtgatctgtcctgctttatgttcttgcacatgcccttccttctacctagaacactgctgtgtgccatcatgcccctgcccctcccccttagtttggtgtaaatatcacttccttagggagatcttcacaggcccgcactcctaaccctcaaatctaaatgaagtctccctgccaagtatctcaaagcatcctatgtctttcccttttagcactcatcacaatttatcacatatatctgtgattattaacttgatgtctcactcccctcctagttcctgtgaaggtagagggaccatgtgttgttctctgttgtatttgtagcacccagcacagtatctagtgctaagcaggtgcttaagaaatatttgtcgaataaatgacttgtgtttgacaaaatgaagtatttgaaagttataccaataattttatgctatataaatatagatacccttttaactctgttgcaattcctcaggaaatcataacactatcattaaaatttgcctaacaaattaggtatattcaacattgtgggctgtgatcaactgatggtgatgagtcaacacctttattgaaaccatggaaattatctgctgattagtaaatatattttaaaatgtttccttttctcccttccacccacaccctgcagcgtcgaggtcctcagcgatcagttgatgtaatagtttcatctgctttcttattgactatctcagttgtatttatctgttgtgcccaggtgagttaactcgctccatgtagaaattaaccagatatataaatattaactttcagattaataaataatcaaataataatataagtaagcctagttagaaagtaagttttgaagttacctttttgcagtttttttggtagaataaataagtgcatcttatctctgtgccatgaacagtgagcatgtatgctcaaatgtctgttgaatgaacacagattaattaatttttgcctagaatccttctcattatctttacttcccaaaagaaacgtatgagttatgaaattgtcccatgaatatccaatttattcatgtttactattcttttctttctttctttctttcttttttttgagatggagtctcgctctgtcgcgcaggcggagtgcagtggcgcgatctcggctcactgcaacctccgcctcccgggttcacgccattctcctgcctcagcctcctgagtagctgggactacaggtgcccaccaccacacccggctaatttattttttgtattttttttagtagagacggggtttcaccgtgttagccaggat

SEQ ID NO: 42237 - DNA, 1029 bp, Homo sapiens
caagaaggaagcttatctgactctggatgacaaggacgggggaaaagtctcttctaagaatatataattataactcttcccttactacaggtttagggttcatattgacattatacatcttgtcctgtaaccctcatgtcaaaaagttaatataaaaagtggtcctaggcccctggatacctgacagaagcaaaaccaaggctgtttggaggcatgcgacttcagcctagacctcacgggaaccacagataaagctccttccggtatcaaaacataggaagaaacagtctaacatgaaggagtcaacagataaacccatagcaggattagatctccagctatttcagtttgatcaggtggaaactaagtttgtttacagtgatgaaagacatagataacactgtgaaaaaagaacagataagtttgaaaaagaacttcagacaaatgaaaaatacagttattgacttttgacttgttttttgcttttcactgctggaacaaagtcactgacttttaaaacacaatgaacagaataaatagcaaattaaagaaagctaaagacatagtgaactgggaggtgaaagaaatgactaaaatacaggacagagataaagagacagaaaatgcaaaatggatatttagacatcgtgggagatccaacataggtctaataagaattacaggaggaggctgggtgtggtggcccacgcctgtaatcccagcattttgggaggctgaggcagtcagagcacttgaggtcaggagttcgcaagcagcctggccaatatggtgaaacctctctctactgaaaatacaaaattaactgggcatggtggctcgcgcctgtaatcgcagctgctcgggaggatgaggcaggagaatcgcttgaacctgggaggcagaagttgcagtgagccaaggtcacgccactgtacttcagcctgggcaacagaaagagactgtctccaaaaggaaaaagaattccaggaagaaagaatgctgaaaaacaacatttggagaaataatggc

SEQ ID NO: 42238 - DNA, 1024 bp, Homo sapiens
gcatttcattttatttgcctatgttcaaatatgtttaataatgaccaaagtgcattctgagttttttcaaggaatgtaatactggagctttaagaacatacttagtttctcatgtgaaaacttaggctttgtctgatgtttttccttcctctattgtctaatgttgaggttgtttttaggaattatgttttataaactttttcaatataaggtacatgcctatacagaacttaacattttgcacagaatatatcaaatatattttgagaaaaaaagtacggcatgagttctgttaggaataaaagatgaaactattgtatctcacaaaaaatcttatttcagaatggaaatatttttgagaaaagtagctgagtatactggtttaagaaaatgcttgttttagattgaggttaacttagagttgggagttgatttattaagtacagtatacctctcaacagtttataaataatatgttgaattatgtcagtgtgggcagcagtagaatactaaaaggaaaatgtcatgttaagcaatttcagaacattaactgaactattttcaaagcagaaaaattgacattgctgcctttaagaataccatgaatgtaagaaattgaaagaaattgtaaaatatcacataatatagaaatggcagttcaaagagaattgtggcagatgttgtgtgtgaactgttgtttctttgccacatgtgttgtatttgaaagttttacagtaagtttaaaataaaacattctgtgactgacggtgtttttttttttaattttcaggtcatatacatttctatggtaattttgtgtttacttaacataaaatttagttagatttggggggagtgaaaataaattttttataactttccaacattttagattttgttatgattcttagaacatgaaagaataatacacaggtttttcatcaccaaaatgatattatatcattaatgtttgtttgcttctttgtttttgaatacagcaaactggctgtggcctgaaatatta

SEQ ID NO: 42239 - DNA, 1075 bp, Homo sapiens
agccagacagcctctctagattcctcctctctgggcagggcatctctgaaaaaaaggcagcagccccagtcaggagcttatagataaaactgccatctgcctgggacagaggacctgggggaaggggtggctgtgggcacagcttcagctgacttaaacattcctgcctgccagctctgaagagagcagaggatctctcagcacagcactcaagctctgctaagggacagactgcctcctcaagtgtgtccctgacccctgtgcttcctgacggggagacatctcccagcaggggtcaacagacacctcctataggagaactccagctggcatctggagagtgcctctctgggacaaagcttccagaggaaggagcaggcagcaatctttgctgttctgcagcctccgctggtgatacccaggcaaacacggtctggattggacctccaggaaactccagcagacctgcagaagagatgcctgactgttagaaggaaaactaacaaacagaaacaatagcatcaacattgacagaaaggacaaccactcaaaaaccccatctgaaggtcaccaacatcaaagaccaaaggcagacaaatccacaaagatgaggaaaaaacagtgcaaaaaggctaaaaattccaacgaccaggatgcctcttctcctccaaaggatcacacctcctcaccagcaagggaacaaaactggacagagaaggagtttgacaaattgacagaagtaggcttcagaacgtgggtaataacaaactcatctgagctaaaggagcatgttctaacctaatgcaagcaagctaagaaacttgctaaaaggttacaggaagtgctaaacagaataaccagtttagagaagaacataaataacctgatggagctgaaaaacacagcatgagaacctagtgaatcatgcataattatcagtagccgaatcaatcaagcataagaaaggatatcagattgaagaccaacttaatgaaataaggcttgaagacaagattagagacaaaagaatgaaaaggaacaaagcctacaaggaatataggactatgtgaaaata

SEQ ID NO: 42240 - DNA, 1032 bp, Homo sapiens
gttacagcaggcttcactgactgagacagttgtaaattctgattaagtttacagtcattggacttgaaataatcgtgctgcttccccatcacttcagctcttctgatctgtaggtggtgcatacaacatgatttcccattgcttttaaaagggaattctgatcttagaaaactacccttcatgtttagtgataagtaattgcaaaataagaactatttggtgattaaacagcatgtgttctatagcttctactttcatcataatatcatttgctggttgggcttagttgcagttacgacatctggttcttatgaaacgtgtaaattcattcaacaaatatttatagaatgccagttctatggcctgcattttctaaatatgtgggaatggaagtctttgggaagctgataaagtacataacacattattggaacatttcaccattaggtaaaaccatgtgttttttgttgctgttgttgttgtttagttatgtttaaatataaaaactgggctgtggattctttctctcatttgtcttgataggcctttgtagtaaatcatcttaaagatgttttagatgaatgcagtttataggtcaggttgagttttactgctttttgccaaaaactatttcagactttcagagctaagcactaagtaaatggactccacagtaatttatactgtgcacatggtgatgcttggaattttagaactaattctctggaaggttgtcaactgacaaatgtccattgtagaattagcagtcccatctgaaataacttaaactgtaatttaaaaagtagtatagaaagagcaattctgaaaaatatgaaactctcaaaaagatcttagtggccccttttggagaatcggtaggacttaggctttgtaattcatagacttgtgtagattttgcattgtatttgggtatatgtcgacgtttatgtccatcagtgaaaaaaatgttattttaaaattaaaaaaaaaacaaaaaacttagaaaattagagcatctgaatgattttgtta

SEQ ID NO: 42241 - DNA, 1004 bp, Homo sapiens
tattaccttatttgtttctcacaacccttttacgtattgttttactggtcaggtacatgagcatctgagaaattgttgctgcatattgaaggcacatacttatttacttggagattaatttgtgttaaggaaattagaatcttatatcagcaacagtatttttttgataagcattttaggagttaattgagtacagctctggtgattacagagaaatctgttagaagttgttgacacaaagaatgagttttaaaaatgtcaactattttaccactgggcatgctagtgaaattttccactcaattatgtttgtgtcataattgtttgtgtcaaacaaagaatttctttaaatgtcatatatttttagcagtgcattatgcattatggctgtgcaatataaactctcttagtttttattaaatttaaatgtgtgttagcctgtaatgttatcgttaatgctgtgcttgtttctaaagtgggagctccacaactcaaaatactctgaatcatagactaataggaagttgagtccaaagagattttttttagcatcccttggtttatactgctcttcaaaaagctgaaattacccctgaaactactggatcatggaattatacagtatgattgaaagtcactggaaagatgctcagttttttatttactggtagatacttatacagtgcttaccatttgctaccctatgtcctaaaggatctataaataccaggttatttaatagttatcgagtgtctgtgctgtggactgaatgtgtccctccgaaattgtatgttgaagccctaacccacagtgtgatggcatttggaggtggggcatttgggaggtaattgggttggaatgaggtcatggaatggagtcctcatgatgggcatgaagggaccttgagttctctttatcatgtctggattcagcaagtaagtgactggctgtaaaccaggaagagggccctcaccaagaacctgaccatgttggcaatttgatct

SEQ ID NO: 42242 - DNA, 1050 bp, Homo sapiens
ggagtgtaaacaatacaaagcagtggtctacagtaacaccatccagtcaattattgctatcattagggctatggggaggttgaagatagactttggtgactcagcccgggcggtaagttattaaatttgttggagctgacctgatgggtaaaaagaataacttgtatgctaataccatactgtgtaacataggcttgtcaactatcaggaccatttcataaaaggaaccaaaaggatagaagtgagtgaaatgaggagcgttagaagtgagtgaaatattagaatatgtaggattgtataatctctcctttatgctttccttatccattagatgatttggacaactgaataatcaccacagtgctttctgtgtagcatgctgtgttgggtacccctgtattcccataataatttttagtactgagtaaactgcttaccctggccctcttcaaaatctgtttctgcaatttggaatactgaagtgatctagtcatttgtattcatgcctagactgaaaagcaatctaatctcgaataatgaaaacagtataaaagtttgcttatctttggaataggaaaatatcggctattaaaaaccatgtatcaaaatttgagagctaaaagagatttttggagacaagctagtttcaattctttattttgccaagaaagaaactagcacccaggaaattacatggtacagagattgccatacagctcgtggtaaccaaggcactatgcctgtgcctcctcatttggcccaataacttgtttcagttggattggaagcagcccaatccaatccgtaaggcacctttgttttctttttttttctcttatcttctctttgattgcttaatgtatttatttctagcagatatattattgtattatttttactagtatttatttttatggttcctttataattctgtatattcagtatacatactgtcttcctactaatactatgaagattttgtgtatagagactataaatttttctttttgtcttagtgtcagctagattttattttttaaacatgtaggc

SEQ ID NO: 42243 - DNA, 1049 bp, Homo sapiens
ctgttaaattatatgcaacgatacttctgattgcttccataagtattttaaatttaatacatttgttactatcacttgtcactgatttacaggtggttcatgtaattgaatttacagaaaactaaagctttatttcaatttttcatggctacttctctccaaaaaacaaacattgacctgctttcttaaacaaagatataggtaataattaatttatgtggcaacattagctttgtgctttaatacatgctatggtgttgcatatgcttttttttattttcatttttttcttaaagccttcagtggacattttacgctgctgtcattatctgttactgaaatcgtttaacttcttttagtctgctcattactatttccataatattaaataaacaaactcagtactctgatttcaagtaatcagatatgtctgatctggagaatattgtcattttatcttaaaactaagaagtgattttaatgacaaggaagttcactatcagattgggacttagaattttttttttaacctagtataccttagattctgattttggttttgttcaccttgttttaaagattatgttctaaagcaaacttaaattatgttcaggtaatggcttacggtagtctccccttattcgaggggatacgttccaagaccccccatatatgcttgaaactactgatagtactgaaccctatatacaccatgtttcttcgtaggcatacatatctatgataaagtttataaattcagcacagtaagagactaacaagtaataataacatagaacaatcatagcaacgtactataaaaggtatgtgaatgtggtctcactttctcaaaatactgtaatatttttggaccttggttgaccacaggtaactgaaactgcagagagtgaaaccaggagtaagggggagctactgtatttctaaccaatattgtctgagaagaaaatgtgtggagttggagttaacaagtaaagattctagacttaggttcccctaataagtagttgggtaaacttggttaagtttcttaa

SEQ ID NO: 42244 - DNA, 1046 bp, Homo sapiens
tatggctctgctgctcaaacttttccacaaagtatatagaggaacaaatcccacggggcctggcaccatagtccaaaacattcttcttcaagtgtgtagtgttcctattcgtatcttgaataaagtttgtgcttatgaagatgttatgcttattctatgaccttacctcttgtctgacagccctctgtgtacccatgtttaggatgtatgaatttgttacctattatcttccactaagattttctactaagcagactttcattatttcaaaataaacatatcttaaaatttatcttccaaattccttagacgttactaagcaaattctcttttaagtagtttttaaagcattagttatacaatgatagagtaatagtccatttggagttttataataacatagctacaaaaatgttgagtaataggtacgaattagataaatttagatctatgtgctcattcaaaatgtaaagtagtaatgatactggaaaatgctcctgatacagtaagtacaaaaaagtgtgacagtatgatcttgtgaaaacagtaaaagataggcatgctgataacatgggtagaagacttgcaaatcacatagaaagaacatgaatgatttttcttatactgtattgggtcaggagaaaaaaacatctgaaaactgtccttactgccttattagttgatctatgccagagactgtttctcagcctgtgtttctcagtctttaactcacctaacaaaattgtggtgctatatgttctgtagcttgcaagatttcacagtataaagtgagtgtattaaaatagggaatgttttatatcatgtggtctcatcccatgttccattttagaatcacagctccaagcctctagggtcagcaaatgttggttcctgtgctgctcatgattgccactaatagcatctaaactctttcatacttgtatcagtactgtagttggaaatgagtatacagctgtttacagaattagcccccaaaactgggaagaaaggtgactttattccttgattctggtttttagaagata

SEQ ID NO: 42245 - DNA, 1028 bp, Homo sapiens
aggggtttgagaccagcctgggcaacaaggcaaaactctgtctttacaacgaatacaaaaattagctgggtgtggtggtgcacgcctgtaatctcagctgctagggaggctgaggtgggagaattgcttgagcctgggaggttgaggctgcagtaagctgtgagtgtgccacagcactctggcctggcaacagaacaagatcctgtcaaaaaaataaataaaaagttcctttagctcacttttggttcttactcaattttcctccttgcctttagagcagaataccttgaaaattgcctatatttgccttcatttcctttcctctttttccttaaacttactccagtcaagctttcaccccttaactaaactgtttttcccagctctccaaagaccttcttgttgccaaattcaatggtcacttttttagtgtttgcgttacttgatctgttggcaacttttgacaatatttattactccctcctccctgaaacgttttcacttggcctgtagaaaacattcctctggttttctatttttctgtccatttcttcttagtctccactgctgacttttccatgtcaccagaacctctaaatgtggagcaccccaggactaagtccttagactgcttctttgttttctttactcactttttaggtgatctcaactcaaggttttaaatactatctggtgttaactaccagatttattccagaccagacttctcattctctaaatatttagcagttgtctcaaactaatgtatttaaagcagaggttctgtaacttcctgaatccttacatttgcttcttttacaatcttctcctactaattagtagcaggtgtattcttccagtagttttgattttttttaaaaaaatttaacgttatccttggctcttcagtctcttccatctcttctttgtctacaaatcatagtggctctgccatccaaaatacattcacaatttgaactaccagccactctcacttgccttcaccctagtccaagccactgacctat

SEQ ID NO: 42246 - DNA, 1023 bp, Homo sapiens
gagacggggtttcaccatgttggccaggctggccacaaactgctgacctcaggtgatccacccatctcggcctcccaaagtgttggtattacaggcatgagccaccgcacccggctaaggtatgcatctttgaatgaatttttgatgtcatagtagtccttaccttttaaaaaaaatcaaaaatttagtttattttcttattcaggtttatttcttattagcttagtactcttcattaaatgtcttttgaacacagtatttttaaggctttggattgtgttaaggcatggattgctttaacagtgtttgcttttgaagtcagtgatccatttgggcagactggaaacaggtgaagagtgttagaaagcctggtatcatgtgaatgatacatgtgaattctgtacaagattacagaaagaagagtttttagagcagttatggaaaattttggtagagaaaggatttgagctgtcttaaaggatagaacttgggctagagtagaacttgagggaactgcatgaatacatgccgaagcagcaagaaatcaaagatcaaaaccaacacacattaaattaacccctttaccttgaactaagataaatagcctctggaaaactgggctccgaagtccatgccaaagaatttgaactttatcctataagagatgagaagcattaaagggtttaagaaaagctagtagtttagttgagtaagaaattggtggggtaaatctgtattctcaaggaaatctttctagagacttgctggccatctctgtaatggagttagattcaaatagtgttatgtctaaaatgtagatcattagcatcatttggggaaggatggtgtacggtgtttaaccattctcctatcgtttggtatattgactgcttactcttttccactctacactaatgtagaaacgcagtgctgcctagaaggcccacatttttaagtttaattttaactgcaactttcccaacctaagctctttgaaatacagaattttaaaactctaattct

SEQ ID NO: 42247 - DNA, 1022 bp, Homo sapiens
gatgatctcaaggacccttccaagttagtgattaatgggcaggagtgtgagtaggatttgagaccttttagaggactgtttcagtagaccaactgattgtggcaaaggacttaaactacagtggtagaaatagaattggtagggaaagggcagataaccaagtatctgcaaggatgcctgaactgaatgttgggcaagaaggaaaaggagttagagcaacttaagagtttttattttaggtgattgggagaatgatgatcagattggcagaaataggaaatgtccaaaagattattttggaaaaagatgatttgttcaattttggtttttgaccatagcttttattatgtggtgctcttctaagacttctgtagagctagttttaaacttcagagaattcgaattaattgggtgtcatatgtttcatatttgggttaaaggataaatgcaagtaacgtctataagcaagaaaaagggcaaggagtgtggaggcaggagaatctttcatctcactctgtggtcatcctgcaacacagtgtgcttgcatgtagtagctcagtaaatatttaggtttaatcattggcaaaattggaattgcataagaaagaattttagaaaccattctaaaatttagaaattttttgctgtgaagtttcatacattcaaaagtgtataaaatgcatacactgtgatttcacctgtttttgaaatttatataaatagattcattctctggatattctgtaactcagtattattttaatatccttacccatttatttaggtgtatttcattgtgcaaatgtgcaagttacccatttcacagttaatggtcatttgggttctttttagttttttattattcatttgtaccaatctagtgggtgttaattatggttttaatttatttctctgataacattttgatatgcttattggctatttgtgtttcttctttgaaattcctgtttgtgtctttcaccagtttttctgtggagttaacttttgtttaacttagactt

SEQ ID NO: 42248 - DNA, 1023 bp, Homo sapiens
tttaactcccagacctattttagagtgcaaatacttttttagaatattaagataaacctaaatcaaattttttatatagaagcttatggtcgtgaaaagtttattggtcaattttattatacttcctttaaaaattcaaaagaaaatgtgttatttaatagttaaccagctttttcagataaacatctttctccttcagcagaacattgctaattactatttctgtaccctgtccctttctataaaaaatttcccaaaattataccgtgaaaaagtgttcaagtaaacactgctgttgtgccttttttttttaaactgggggcctgccagtttttacgtgctacaaagaaagaaaaagaggggtgattgggtgttgtgggttactgcactggaaacagtggctcatacaactgtcttggtgccctgaaacaaatagctgagaccagaccatagaaatacacaggagcaaagagcagcctcttaaaccttcaggctaggtaatgacttgagacgattatgccctacattgtattacttgttcgcaccttcacaatgggtaagtacatttgtgtctagtaaactaaactcagtccgtttttgtatataaaagtagacttaatcattgttaaactatctttcctttttcctttagtctttccatctacagcccactggcactccaggcacctacctacttcaaacaagctcaagccaaggccttcccctaactctgactgctagtcccacagtaaccctgacagctgctgctcctgcttctcctgaacagattattgttcatgctttatccgtatgttacataaattacttgatttttgagtacctgttatagaccaggattagttgataaggaccaaaatagaaggtagttatctaaacagttcttcctactgctgctgttccaggcacagtgttatacaccatcactctgccttcactggagtgtatgtttcatcccttctctttatgtaagatggctatacattagaatagggacattagaag

SEQ ID NO: 42249 - DNA, 1024 bp, Homo sapiens
attgctatgatagtagatctcaagtgttctcaccatacatacacacacaaaaatccaaaacagaacaaaacaaaaaacccaacaaaacctcaaaagggataaacttaaagttaactgcttctaaacacatgataatcaaacttctaaacatagaagattacagcaaaaaatcttgaaacctgccagagaaatataatttattacatatagggaacaacagttcaagtgaatgcagggttttcaacaggaaccatggaggacagatgacagtgaaatagcatctttagagttctaaaagaaaagcactgctaacccagaattctgtattcagtgaaaatgtacttcagagatgaggacaaaataaagaaattcccagataaaggaaaactaagaattattactagcaaatctggtctaaaagaaatgctaacaaaagttcttcaggctaaagggagatggtatcagaagaaaacttggaacttcatgaatgaagaaagagcaacagaaactgtgaatatctaaataaatacagcagagtttttctcctctattaaggtctttcaatatgactactcaagcaatcctcccatttcagcctctcaaagttctgggattacaggtgtgagccaccatgcctggccctgactctactcttgaaagcaaaatttatggcattgctggggaaggtttccaggtttgcatgtatagtacaagtgacttttaaagcaaaggctacagagtaaagggaactatgtggttatatatatttagttgaaatgctaaaatgttaactgtagactattaaatattaggtgttctatttcataaagtagtgactataaagatactaagagtttttagccaaaaaagccaataaataaattaaaatggaacattaaaacattaaagttatccaaaaagaaggtggtgaaaaaagggataaacagaaaacaaacaataaaatggtagacctaaatcaaaccttattaatagatatgttaaatataaatggcctaagcactcc

SEQ ID NO: 42250 - DNA, 1052 bp, Homo sapiens
aacttcattgtttacttaaaagttattcaggtgtaagttgtttggtgccaatgtgattgtgtgattttgagagattttcttgctattcacttcaatttttcttccactgtggtccacatatatgcttggtatgatttcaggtttttagaaatttgtttggacttgctttatggccaagcatgtggtcaaacttagaatatgttcagtgtgccaatgaaaataaagtatattgtgtggttgatgggtattctttagatgtctattaggtccaattggacaagtcaaatttacatccagaatttgttaagttttctgcattaatgatccatctaatgccgttaatggggtattgaagtccactactattattgtgtggttaagtcttttgtaggtctagaagtacttgctttatgaatctgggtgctccaatgtcagtgtgtgtgtgtgtatgtgtgtgtgcatgtgtttgtgtatgtgtgtgtgtgtgtgtatatgacagttaagtctttttgttgtattgaactctttatcattatgtaatgaccgtaatgaccttctttgtccttttttagtgttgtttctttaaagtatgctttatccgatataagaataggaccccctgctcttttttgtttttagtttgcatggtaaatctttcttcatgtctttactttgagcctgtgggtttcattatgtgtgagatggttctcttgaagatagcaagtggttgggtcttgttctattagccaccttgcctctctgtgttttttaagtggggcatttagaccgtttacattcatggttaatatcgctatgtgatgttttgatcctatcctggtgctgttagctggttgctttgtagtcttgattttttagtctcgatagggtctgcaggctatgtatttaagtgtgtttttgtggtagtacatattgttatttcatttctgtgtctacaactccctcaaggatctcttgcaaggctggtctattggtaatgaattttcacagtgattgcttgtctggaaaatattatacatttccttttcttatga

SEQ ID NO: 42251 - DNA, 1083 bp, Homo sapiens
cattgactgcttactgtaatgttggaatgtcctccagataacagcaatttcttgattatgaatcttggggagctacataagtttgtctggactagtgtaacagttaagaatgttactacagaacagccatgcaaaccacagttaaaattgttcctgagtgatacagatgttgtttcaacagaatgaatgttattaaaggaaaagaaatttgcattaagaatctggaataccttctttcctaccttatacactgattagatgattgggaaattagaaaactcaggcaaaattctaggaccttaataggattaaggttgatattggctgaattttggcaaatgaggtaattaagatttttttctgtttaaaaggttcatgctggactttgactttctgaaggtctgcgtctttgaatgtctaaactgatcctttcattcccagactagtaacttttcaatttatttttatttttattttgagacggagtctcattctatatggcctaggttggagtgcagtggtgcgatctcagctcactgcaacctcctcctctcaggttcaagtgattcttgtgcctcagcctctgtctcctgagtagctacgattacaggcatgtgccaccactcctgggtaatttttgtatttttagtagagtcagggtttcaccgtgttgcccaggctggtctcaaacttctaacctcaggtgatttgcccacctcagccttctaaagcgctgggattgcaagcatgagccctccaggcccagccgattcccagactagaaacttatcagaagaacatgtgctaacaggtttcctggaactgttaatatattttatttacttatctctgaaaagttattctacttttttactattcattttgttaaactaaaacactgtcacatgcttgtaatagttgtatttatggtaatgatcatatgacagcattcttaaaggtcatgttttctaggcctgccaccctattgactatacacctattaagagtatcttaatgtgttaaggaccttagacattgagtaaaaaataccccttcatcttagaaacaaagtacttgaggtcc

SEQ ID NO: 42252 - DNA, 1045 bp, Homo sapiens
ttgggtctatccttagcatgtgcaacttggaggtaagccctgcacttgcatggatttatatagggaattagggatccctttctctaacttgctcttttcatggatcaatctccagcttgcagtggcctctttcccaggtcttctagtcagaaagtgagggtttctcaatgttagcttaagcttgtactacctttacaatctcagcctcctaattgggacccaccctcagggcagaactgtgggagaaaagaaaataatacagggattctcttggtatttttggccacttgaacctcattcctggttcttcctgccagaaagataggagttttagctgctggctctgccactgctgctaactccatgactgaaggttccagttttgacttccttccacaatctgcctgcttattttacttttcattcttcaggtagttgcttattcagtgttgtccagagtttctagttgtaatcagtggagttgattatccatctttaacatattgaatctttgcctaaattgactgactaataaatgttgactaatttctttattcaatttaatacaaagattttgctgaataagggcataaaaataatatgacttttaaaaaaacatttcattaactaccttttcattattggttttctttttatgaagtcaaaatcaattatagctagaatgcaaggtacttgctgagtgtattgtaaaacatttaaaaacaatagttttttttaacaaagaataatccttctttgatatagcacttttctgcatgatttttttatcttgaagatactgagcaattgcagttgctgttttaactgtactttcaaagccaatcttttcactatatatttttttttagggcaaaagagttggtagtggtgcacaaaaaacaagaagtaagtattttgtgatctttaagtgtatttggtttgcatttgaaaaatcataaaagatcttctaaaatcatataaaccaccctctaaatgatttattcaaggctttcttcgtctttatagaacatagatccttggtgaa

SEQ ID NO: 42253 - DNA, 1078 bp, Homo sapiens
aattcaactccagttgaaagagaagaagaaaaaaggatattgtgaatgttgcttgcagaaatatgaagatctagaaactgtaaatgtgattttatattttgggggcttgtttcgaaaactgtaatacttgtgttttaaattttagcttgttattctgatgcagatattttacattttaagaactcaagggaggaaatgagtattgaaaatgaatttttattcagcaaatactgagcgtctactacatactgatcactactctgggcaaacagcattgaacaaaacagacttaattttttaccgttgtgaagattatattctgtagggtaggggtgggataggggtggagataggtaaccacaggataaaagaagaataaaaatatagagagagaatattagatcagtgctatgaaaaaatagaacataggaatggggatgttgctatttagcctagacaaggaacacataactgataaggtgacatttgagtagagacctgagagaaatgaagtaatgagacctggatattgagataagtaagtgcaaaggtcccaatttaaaatgattgatgggaccaaggaatagatattgatagtccagactaagtggtagtagaagtgctgaaacatggtcagattgtggatttgttttaaaggtgggaccaagaggatttgccaatggattggatgttgcaagtgagggaaaatggtagtcaagggttactatagtattttgaaccttagcaattaaaaagtgggcttattatttataatgggaagagaagagttgaaagaagtaaagaccattgaggtagcagaaagaaatgggagagttgcaaagggtatataggatgaaaatgggggaactattatagtttgtaaactgatgagcaagagctatggattcaggctgccaggtttgaatcctggctccctggctgtgtgagcttggacagtgtttggcacatagtaagtgcttattgttagctgttatttgaataattttttacgtaatagataggtttgttttggtgtttggttcggttttggtagaagatggtgggaaagttaagggga

SEQ ID NO: 42254 - DNA, 1033 bp, Homo sapiens
taagaatgtaaaatgaaaggcaagagttaccccaatattttttgtaagaatatctataacttaagtttcctatgaatgacagtaaattatgacaataatactttgggtattgaagtatcttccttgagaacagcaggaaagagaaggttgcactttttgattaatgattcagaggactggctgcatgatatgtgatgttaaatagtacctggtgttcattagatgctttgatgtggtggtggatttctgtgaggtttctggtactgggattatcctgtgaatacaatataattttagaaatagttgtctatctagaattttaggtttggaaggtgcttttgatttgttgctggatttaatctcttgcatttggtctaagtgtagtgtttaataaatctggttagttactgttcacttttttaaaaaagggtttctatcctacttctgatcatgggcaagtgggcagagaccagggttctgccaggcctatgcttctgagctgggcagaattgggctatagttttctggaagcatttctacaacaggaagaaagtctgaggccagaaattcagacaaatagactaagagtgagaattagagcctgagttgtctgcaatggggaaccagctagatggaagttaatttaaaaaggcatgtaagaggcaagacttaggaccatgttatctggataggtagccattagccacttgtggctgtttaaatttacattaattcattcaaataaaattaaaaattctgttcttcagttgcattagccacattttaaatgctcaataaccctctctgccttcactccctcatctacttaatacctagtctccttctctgtttcattttaaaaataatacttatcaccatttaatatataggtgaattcttatgacattgccatttttataggtcaaaaaagtttgactaccattattgatgtatggccatctaatatttgatattttgattatttatttggtctatagtctttttcctacccctgcaatgtaagctctttgag

SEQ ID NO: 42255 - DNA, 1037 bp, Homo sapiens
gaactttcttatttttgctaatggctttttattgtttctcttaggtttgaatgtaacattctagtttgacaataacatgaatggcaaataattagagtttttcttttcaaaatgttacttattaccatttcctaccttaatcctttttctagaagtttctgaactgtataatttggtgataatagcatttttatctttttttttgtaataaaaataactaatgttcattgttaagtaagtagagtgttgattattgatttgtgagagctagtctttattgtgttaaagcaatatcttttgtcttatattttaagtaataggtattagattttattgaatgtttttctagtcagttaaagcttccaggactagtcagctttcccattggtgacaccaaccctccacaacaaggcctgtagataggtttggattttcttatttgacctgttattatgatttattatattaatgggatataaaattattctcgatgctgataataaacttgactttgtcatgttggataattcattgttttgtcccatatgttgctggcttctctggttgtgactataaagtagaattacaattcctattttttatcttaattattatgacacaagcccctgccgacattcttggtgtaaattaactctatccccaagtgtttcctttaactatttctgagattagtctctagcttttaatcttataattacattcctgccactggtagatccccctgcagtgacctgcagacagctgctctgccgggcagtttcccttcactagtgatgcccgctaacatctgccagagtggtttcttgaagaacccacaagcccaaacctatctataggccttgttgtggagggttggtgtcaccaatgggaaagctgactagtcctggaagctttttaagagagaaatctttgataaataatttttttgatgtctattgatgtattcaggttttctacttgtttttgaggccaactttgagaaattatagttttgcaaggaattgtccacaccatgg

SEQ ID NO: 42256 - DNA, 1050 bp, Homo sapiens
ctgcctctgcctcccaaagtgctgggattacaggcgtgagccaccacgcctggccccaggtgtcaaatcattgaactttcttaaattatctagcagtgatagtggtacagcccaaccacagggaactttgccaggtttgacacattgggttcccagacatatttaatgtaatttgtttatgatatggctgttaaactattggatgaacaaaatctttgcaagataaaagattccatttgaataattggaaacttgttctctaatagttatatttgttttacagtaaggactatgttttagagtgaggtataaggtgcgtgcttactcctggtgataccatctgcacagagctggcttaattactttgtctctgaaatatttatctcagtatgtctgtatatcaatctgttacttcacactctgaatatatgtatattttcctgtgtttcacctgttggcatatcttcttagctaatgagtgtgtggcagattgtactgtatacccttgtcctgtgagtgttaactataaccattctcagacagggactgtagctaccttattctcagttgactcctttattattttgtctataataaaattaaacagttttgacctataatggtgcagaagtgataataccagatatactgcaaagaaacaaagaaagattaacagtgactatttaaatgaaaattttagagaagctgaagtctcttcttggaaactggtagagtatagaaatttagcttgaactttctttgaggaaatggtccggaaagcactggataagaatctacaagcagcaaggcatagcatcatggtttgatgttatgaaggatgtcatacacattattgcagaatggcatcttggtcactgttatatgaatggtacctgggaggaactatagctaggtactaatataacactatgggattttgccagagaaaggcactgtgatgcacctctgtgaggactgtgctgtaacaaccacatgtgggtttcattcatttagcacacccctttgccagagcacatacttggccctcag

SEQ ID NO: 42257 - DNA, 1078 bp, Homo sapiens
gatttttccaagactatggatctgcaaaggatggtagtcataatcatcaagtttatgagaaggagttttacattagaaaacaatttcatgggccgggcatggtggctcacacctgtaatcccagcactttggaggccaagggaggcggatcacgaggtcaggagatcgagaccatcctggctaacacggtgaaaccccatctctactaaaaatacaaaaaattagccagacatggtggcacacgcctgtagtcccagctacttgggaggctgaggcaggagaatcacttgaaccgggaggcggcggttgcagtgagccgagattgcaccactgcactccagcctgggcaacagggcaacagagcgagattctgtctcaaaaaaaaaaaaaaaatatatatatatatatatatacatttcatgtacggtggctataatctgaacctgattttgtttctatatctttccaaatattaaggattccaaggacagggacagataatataattatggttgaaatgtttttcattcatgtttgcatgtgtgtgtgtgtgtgtctgtgtgtctgtgtgtctgtgtttagtatgaccagtggtgattactgtttggcatttattacgtatctaaaaagagaaagaatgagccacttttctttttctcactatcttgtttctatctgtgttattctactgaatatactctcgccactttaccagtaacatactagtcttcaaacttaatgaccgtttttgtccttggattctctgtaggtacttgaaaaggctgattctctcatcctcaaaactcttaatagtaattcttccttccttttctccagcttctttttagcacatcttccctctctaaatgtagacatatccaagcctgagtcagtgtccttttcactctcccactcatcacagttcaaccctatttctgtagatatttgctaagcctgacctctttcatgactgttctccccacaccaccagttcctattgcatctttctcaaagggtcaggatttcagttatcacttcaagatcaacacttccattttttttttaattttattttttg

SEQ ID NO: 42258 - DNA, 1035 bp, Homo sapiens
cctggcgtggtggcgggcacctgtagtcccagctaccagggaggcagaggcaggagaacccgggaggcgtaacttgcagtcagcggagatcacgccactgcactccatcctgggtgacagagcgaaactgcgtctgaaaaaaaaaaaagttcccagatgctgctatttgattagattatcatattttgcatacttttagaatctttagcaaacataacctaaaatcaaagtacacagtacacatatcacaaaatttgtgataatttttggctgtttttccaaacagattgaagctgcacgtgatagtttccttgtttatctctattgttccttccacacacccatgtgacatttattttctttgtggttgactgagaaaaaaagttaactttcccatgtccttccccggtcagctatcctgtttgccttaaattctattgctcttcacttgtgttggtactttcaggcctttttcactaaacactgtctctcttcaaataccttctcggctgccatcattcatgttgaatctttcttcagttaaaaaagttcagcatggacttttatgttttacttcattgttaaatgtatattatgggttaaatgtatttatttttttgaaaatattatatgggtataggtacagaattttaaaaagtttcctttacatctctgtcctccagttatccagttccccctttgagcaatatctattattgcatttattgtcagtctccttcttgagggagcccatgtattcatgtatgcatgtatatgtgaatatacacagacacacagacacacatacttacagacacacacataattgtattttttgtatgcagatgttggcatattaggtacatcctactgatatctcttagcaaaagccaagagttggagaccagcttgggcaacatagcaagacaccctctccgctaaaaaaaaaaaaatttagctgggcatcatagtatgcatgcctgtagtcccagctacttgggaggccgaggtgggagggtcacttgagcctgggag

SEQ ID NO: 42259 - DNA, 1006 bp, Homo sapiens
cctatatggtaaaatatacaactgacacagaaattcacataaaacatgtatgggttgatgaaatactaaaggcaaacaattttatattgaccattcagttcaagaaataaagctcggccagctgtttatttgctgcatcccaagcccttttcatcctcctcttgtaagatttgtaaacactatcctgacttttatcataaccccttccttgcttttgtttatagttttatcaccaaagcatgtacccctacagtttaattttggctgtgtaggttttaaaaataatttttgcctgggcacagtggctcacgcctgtaattccagcactttgggaggccgaagcagggggatcacgacgtcaggagatcgagaccatcatggctaacacggtgaaaccccgtctctactaaaaatacaaaaaattagctgggcgtggtggcatgcacctgtaatcccagctactcaggaggctgaggcaggagaatcgcttgaactcaggagttggaggttgcagtgagctgagattgcgccactgcactccagcctgggcgacagagcaagactctgtctcaaaaataaaataaaataataatgttttaaaaattatctttctcttttgtcccccccttgcaatttatttgttgaagaaaccagattgtttatcctatgtaatttcctacaatctggattttgatgttgattgcaattttgtatttagtgtaaaaacagacacattttggtgattgttccttaacataatgatttgtgttatctgcagggacatcatcagcctcattgaaatcagtttatcttgttcatgtagctgtgcataattctgatataaaagttatattaaaacttaaaaagaatttttttcaaaggttacaaaaataaagtctttatgcaagaaaagaaagatactttttattcctttaatgggacatattaatctttcacttacgtttattttcaatccatttaaaaattaaattcttaatttactcat

SEQ ID NO: 42260 - DNA, 1030 bp, Homo sapiens
taaggtgtggccactataaaatcagaaaaggtaataaagaccagagaatatatactattggtattgagtggtttgagtgtttacagcctttttgaaggaggataattgatcagtgctacatttgatgttttttgttttgttttgtttctttttttctttctttttgttgttgttgtttgtttgttttgagacagggtctcactctatctcccaggctggagtgcagtggcgcagtcttggctcgctgcagactcagagtcccaggctcaagtgattttgccacctgagtcctaaaagtagctgggactacaggtgcatgtcatcatgcccggctaatttttgtatttttagtggagatggggtttcaccacgttacccaggctggtctcaaattcaagtgatctacctgcctcagtctcccaaagtgttgagattacaggcatgagccactgcatctggccacatttgatattttatcataacactattttctttgcacctatgaggtagaaaaagagcagatggacttgattttccccatagccactcataaaaactcaggcatgtggagtttaagtggctggaaagctgacatgagagatttacagtggaatagaaaaaaagccataattctcagatactcaatgtgtgttctcaaccctcatttattcaatagacatgagttgagtgcttgccaggggccagtgacagggatatagctataaacaacagatgatgcatttcttgccctcatgaagcttgtcctttagtaggagagacaggcatgatgcaggcaactactgagaactctttgtaaatgatagaaatgataagtgttgaaaagaattacatgttgctctgagggcacttgctgggagacctgacctcatctggttggtcagggaagactttcttgaggaaatgatattatttccaaagttcaaaaaataacaggtgaatgaaatgggagcagaacaacttttcaggtagtcaaatcagcatgtgcaaaggccagaggccttgatgcagg

SEQ ID NO: 42261 - DNA, 1040 bp, Homo sapiens
ttccattactgtaggctttggcttctctgtgaaggcatttttcttctcattggatgttgctctggtgctgagagaatacaggagagaataggaggggttgggcaatggttcatcacctctctaaacccaggagaatgcataggcaagctgtggttcttttaagggtctccagctatgtttgcctaaggctggagataatcctgttgtacatgcttaatcactgttgcttgtgtcatttcaggaggatttccattttcattcagtttacaaatccagactgtttgaattttccttggatgatcttccatctggtatgatgttcatatagtgactttttatctaaaagacaacttcagtaatttatttaatgccttagaactaatctatatttggaatatcattagcccacatctgcttttgacatttttagagggagagccaagtcacgtcaagagggagaataaaatgcaaactgtcctcacagatgagtttggaaagatgtggaggaaaactttaaaaaattttaaaattaaaaataaggcactaaaggagaaacaagattagagcaagaattggtctgtgagacaaagtacatacaaattcactctttgtgaaatactggtcttgtaaacatagggatgaactcttaatcatttccctatttattgttttccttgtctcttttttgctctagcattttaagaaagaactattatgggttaacttttattatcattatgtgttatttgtgaaattagtcatttcttctcatctatacctaaatggatctaggttaattttaagagtgtttgtctcccaagattacttatgatttactataataagttagaagaaaacaagaaatagacaaatgtcaaaaatacaaatttagtgaaatattttcaaaagtaagctaatttattttaggttgaataaatggacctagcaacctatgttgctttgagagtcgcttccaagtcttcacatgacaggaagggcagtgcatgcatactttgccctccttagtggagcagtgatta

SEQ ID NO: 42262 - DNA, 1035 bp, Homo sapiens
tgaatatatattttcaatgcttaccgaggttttaaaaaacatttctaaataatatatgcaggtttgctatattgaatagtgatatacaatagtttagtcattctcaaatgtaattggtacatatgcaatctttttgggtcagccaacttatcaaattacatactagtaataatgccttacttaccttttgcttggtagcccaggtgaaatgataaacctgtttcaattcaggccccagttatagtaattacattcaaatcctaaactttatcaatttctccaaaaggaattagatcaaaagattcaatagctttctctgagattgaactggcttatgctactggtctttaataagtaataaatagaatagaggaagcaatattgcctgcttttaagtttttgagcatattttcaaaatgaaggtgaattaatagattcattttttgctctcaatttgtttttagtggtgggcatgttaagcttgaagaagatgtagatcttggctatgtggaagatgggacaccttgtggtccccaaatgatgtgcttagaacacaggtgtcttcctgtggcttctttcaactttagtacttgcttgagcagtaaagaaggcactatttgctcaggaaatggagtaagtatccagtaccttgtcagaatctatttcttttatatcacagaaatagacaggaccctaaactatttatttttcttaattatggaaaaaaatgatttttcatatttctagttggtatataaatactaattcaattatagttatttgaatatttctgttgtataatctgagaaagcctggggataaggaaatgaataatctttctaaccaaattctcccatccttcttttctgtgttactatgatctcatataatataatgccaactttttacaagtgaactaggagataaattttaacaaactataatgggattttaagaaagagaataaaaattggatgtgatggccacagtatttaaaaacgatgtggtctgggcactgacaaatctcaacagact

SEQ ID NO: 42263 - DNA, 1022 bp, Homo sapiens
ttaggagtgtgggcttgcaatcatatagcctgggtttgaatcccaactctgctttttattagctgggtaacattgggcaaatttcttcgcctttgtgactcaatttcttcctctgtaaaatggagataataatagtgcccactttaaagaattgtgcgaagaaggagttaacttgtaaaacacttaaaacaagactgggatatggcaagtgttcaataaatgtaagctatgctatttattatgattactgtatactgggcatcattgtctgttcttgtcactatatcgctgatacctgacatatgatatagcaactgatgcttgaagaagccaggcgacctgattaaggtcccttagtaagacaggagtgatatggtgaatcaaatccaggccttttgattttaagcctaaacctttttcgttctgcctatttgttaatctgtagctctgattgaggctgtgttatagttacatttagatgtggatgtatgttatgttcctgaaaattagatcagacaagacagaaacccctgtagtaaaaacctgtctcaggaggaactttgctcatcttcaacctaacttaactctctcctgcttctctactcaaggttgttttgaattagatttaggtgtatattctgtttcctgagtggactaatgaagagagattattttcctataatataaaaaaaaatggtgtcaattttatatgaatcttttttctatactcaattcgtgggagttcttagttcccctgaccctgacatagctagtatctacagcatgggttgaagtgctaaggttgtatagccttgtggaactttcttctcagcccactgcaaaacatcaggtctcccctcttcatcagacttttatttcattttgcttcctaaaaaatgaataacatttttgcatgaagacccttactatggaaggaaggaaacctttgtattagataattgacagatgattatatttctgcttagctttttaaatcttccttataaaatttaagttagtga

SEQ ID NO: 42264 - DNA, 1046 bp, Homo sapiens
tctaaacctggaggatggataggtgtcctcttcagtccacactatcacttctagaccatttgctttcaccattcctaacactcctaggctttagcttaggcataatatctgcctcccctcctctttcaatcatctacatccccactgccaggtactactcagctgttttctctccttcataaaaagttttctcaaatttattcatactcactctcaccattttctctcctctcattctgtcttgaacccacagcaatcaagctttcatccccactattctgctgaaagaggtgttattagaatcacgtgtgtgttccatgttgccaaattcagtggtcaactttcagcctttatcttactgggcatattggaagccctcattccttcctgcttgactgtcttcatatgacctgtaggtcaccactctttccaggttcccttacttcctcgctggtcacttcttctcatctcctttgctagatcttcctcatctttctactctttaaggttaggctgctctgtgtttcagtcattagatctgatttattctctatctatactcatgcctcagatgatttgttcaatcccatggcttcaaatacagatctgtgtattgaggactcccaaatttacatctccagcctgtttctcatgcatatatatctgcctatgtacttgacatttccacccatatgtctaatagacttcttccatttgacctgtccaatatgaaattttctcacctcaaaactgtttcctcaaaacctgggatcatgttttacaatttatactgctaaaacaccagtccaaagtactgcattttcattcctggatcattgtcttctaatttccccattcttactcctcttgcccctacacagtctattctatattcagcaaagtgagcaatccttttgaaacatgtcacttccagcctagccaacatggtgaaaccttgtctttactaaaaatacaaaaattagccaagcgtagtggcacatgcctgtaatcccagctactcaggaggctgaggcaggagaattgct

SEQ ID NO: 42265 - DNA, 1075 bp, Homo sapiens
accttacacagataaaattcccactttcttcagcactaatcttgcacaaccaggaatatcagaatgagtccagaggtgaaattccacgtggaaaagagaagagggttatgggtagtattactgactgctacatgcactatcataattcttagtcccaaaataactatggcattaaaatataaaatacaatgaaaggcatgcccttcagtgtttcccaagctgtgttctactgatatctactctctcaagatgctttattggttacaaatggaggcttatgattttggtaaattttacattatacatatatatgtaggtatcatgtgtatatttatttcaaagggttttagagacagtaagatattaaaaggctgaacacatgtgcagtaaagaaatatttttaattagtttattccagagagtaatcccacttgaaaatggaactttattttgttttacttttttaacttaacatctactaatagtccacagagtttcattccatggaagagactcaaaaacaaaaatgtattaaaacaatattctgaacatgggacttgttggatatggtgcatatgtaatttggaggtaaattctatagttctcacattactctctagtgagtagttgtggtacaatgcaaaacatatatttggtctttgtccctggttcctggtgcacagctggagtatcttttgtgggttgatgagatgattggtggctggggtctttagctggtttctttctggtgaccaggataggagctggtcaccagaaagaccatgtaattagaaggttggaacttccagcatgacctcctgacctctggtataacgagagcaaccacagattgagttcaatcaccaatggtgaatgatttaatcaatcatgcctatgtaatgaaacctccatgaaaactactaaacagtggagtccagagagcttctagattggtgaacacatggaggttctgggagggtggtggcattctaggagagggcatggaagctctgcaccatcctgccttccactcccaaatatcgtcctttgcaccttattcatttggttgttcctg

SEQ ID NO: 42266 - DNA, 1023 bp, Homo sapiens
taaccactgcttgttctgaagttagtaaaagtggttgagtagagtgcaaactgaagcaggaactagttaaagatttcaagctggaaataataaatcagttaataaaattataatttatttggttgattcttttggtattgacttctctcactctaaataacatacttttattgatattttattgttttaaaaaagttcaggcattatctattgactttctaataaagacttagctttgttttaccaaatccttctctgctgactactgagaaacacactttccgtagctccagtttcccaaatacatttctattgtcactttgactatattagtattcatattaactttcttaagcaatgcaaattatttataacggagccatgtagtaaactataattattctttcttgcttgctcgattggagttaataattatattgtttctgtttagttttaaaatatatgtatcactaatataacctcacttattctgtgatattaatgactgtgccgtattccttgatttttgaaaaatatatttatcagtaattttatctctcattttctgttagatatgtaaacttcttttcaagatgatgtatattcccttcaagcattttaccagcatcacctgcttaagaagtgtctttatcaaagccttctgacttgcttctgcctagattggctgcccctctataagagggcacagttgaattttagagatctatcaggcctgaaaaagacattagtttaccctcatatttgattaataatttggctggatgtagaattctaggctggacaacattttctttcatgctgttaaaagccttggttttttatatgtaagtatctagagttgttgagaagtcttatgacataatttttgagactttttaagcacttttttccccttctacaagcttgtagtattttccctttgttcctagtgctataaatatgctttggtctctttttgatccattttttctgctataatttttaaatggacaagtcttcata

SEQ ID NO: 42267 - DNA, 1029 bp, Homo sapiens
aatctacattttaacgagattccgaagtgatctgtgtgcacattaaaatttgagaagccccactttagcacctcacctttgtgacagttaattttcctattgagatgcttttttaaaagccaaaagatttatgaagagaaaccagaatagtgatccttttttagcttacaaattgtgtcttactgtgctgtatgttaaagtgtggtgaaatattttacctctagaaagacaggacattacaatgtctagaagtgttttaatgttcagtaataggtaactgatgaccattttattttctctcccctaggatattcttggtgatcttggaagtgtccgtatcatggaatcaatctctatgatgggaagccctaagagccttagtgaaacttttttacctaatggcataaatggtatcaaagatgcaaggaaggtcactgtaggtgtgattggaagtggagattttgccaaatccttgaccattcgacttattagatgcggctatcatgtggtcataggaagtagaaatcctaagtttgcttctgaattttttcctcatgtggtagatgtcactcatcatgaagatgctctcacaaaaacaaatataatatttgttgctatacacagagaacattatacctccctgtgggacctgagacatctgcttgtgggtaaaatcctgattgatgtgagcaataacatgaggataaaccagtacccagaatccaatgctgaatatttggcttcattattcccagattctttgattgtcaaaggatttaatgttgtctcagcttgggcacttcagttaggacctaaggatgccagccggcaggtatgtattttacatttttattcttatgtatctggtattttgtagttaaacaactaagcaaatatcaaacattttaataccaaactctgacactttccaatgattatcatttgaaaattaattatgagcacctgaagattaatgtcctgaccttgtaagggcacattcccattcccaacatgatgtggaaaactggg

SEQ ID NO: 42268 - DNA, 1058 bp, Homo sapiens
ctacgactctttactctctggagagggccagtggtggtagctataagcttggccacattttttttcctttattcctttgtcagagatgtgattcatccatatgctagaaaccaacagagtgacttttacaaaattcctatagagattgtgaataaaaccttacctatagttgccattactttgctctccctagtatacctcgcaggtcttctggcagctgcttatcaactttattacggcaccaagtataggagatttccaccttggttggaaacctggttacagtgtagaaaacagcttggattactaagttttttcttcgctatggtccatgttgcctacagcctctgcttaccgatgagaaggtcagagagatatttgtttctcaacatggcttatcagcaggtactgaatgtgcttgttatttatctgatgctagtaaaatactttttattagtataaattgtaaaacataaaattttacatgccctgtaatggaaatttgattttggtatactgcgggaggggaaagaattgttctttaaacaatgtttttgcaaaataattaggtggctaattcaaaattatttaagtaaaggctgctaccatccttttccatacagaataaaagcagaaaaatagagggttgggttctccccctttttcaatgttataattgcaatgagtgctttcagtattcaacaattcattattttaatgttttataattggctgtgctccacaaaatgatgaggcaattctcagtaaatatatacaataaaattagaaccagtaaaaatacaaaacagaacaggaagacaagatcaggagaaaaaagtcgaatacacctctgctaagagtgtctccacagcttctcttttggctttgagattttcaatacaatgagaagggagaccctattatttacaaagctcttgttatcaaaaaccagaaaagataatagttccacaggtgaagcttttctagcacttagctctaaaaaaaaaaatctcagggagcacttcatggaaggggtttgattatgaggtagactatgg

SEQ ID NO: 42269 - DNA, 1029 bp, Homo sapiens
atttatattgtgaaatgagacaccctaccttcaattgttcatcagtgggtaaaacaaattctgatgtacattcaggacaaatgattagccctaaatgaaactgtaataatttcagtggaaactcaatctgtttttacctttaaacagtgaattttacatgaatgaatgggttcttcactttttttttagtatgagaaaattatacagtgcttaattttcagagattctttccatatgttactaaaaaatgttttgttcagcctaacatactgagttttttttaactttctaaattattgaatttccatcatgcattcatccaaaattaaggcagactgtttggattcttccagtggccagatgagctaaattaaatcacaaaagcagatgcttttgtatgatctccaaattgccaactttaaggaaatattctcttgaaattgtctttaaagatcttttgcagctttgcagatacccagactgagctggaactggaatttgtcttcctattgactctacttctttaaaagcggctgcccattacattcctcagctgtccttgcagttaggtgtacatgtgactgagtgttggccagtgagatgaagtctcctcaaaggaaggcagcatgtgtcctttttcatcccttcatcttgctgctgggattgtggatataacaggagccctggcagctgtctccagaggatcaaagccacacccaaagagtaaggcagattagagaccagaaagaccttgactacttccctacttccactgctttttcctgcatttaagccattgtaaatctgggtgtgttacatgaagtgaaaattaattctttctgcccttcagttctttatcctgataccatttaacactgtctgaattaactagactgcaataattctttcttttgaaagcttttaaaggataatgtgcaattcacattaaaattgattttccattgtcaattagttatactcattttcctgccttgatctttcattagatattttgtatctgcttggaat

SEQ ID NO: 42270 - DNA, 1045 bp, Homo sapiens
gggattacaggcgtgagccagcaggatttttaaatagataaaataaaagatgcttttatctgaatatctagaaagtccatattttgctttcatattagtttcagataaaatcctaaccaatttaagccttaaacacaggaaaatgcatctcagtttaatattaataaaatagtggagtaaagtaatgtttaggttgcttattctgagacagcatatgtttgtgtgggcaggggtagggggtgaagatgaagggtataattgagcctaatcagtaagttaatgttttcaatgtgctattactcattgccagtgggaagttattgatcaactgaatctgtgttgtagcagttggtaatccaattctaaagttgtgagaggaaaaaaattttgagtaggcatttactgaggcaaaaatgaaatggtttttttaaaaatatggttctaaatttccttttttagacttcaaaataagaataattaaaacagtatctaccacatttggcaaaatagttggaattctatagactttcttcacagaaatactataaagaatatgttaataaagatattaatctgaattttatttcttaactaaaaatattaaagccattaagggatttagcacagatatttaaaattctgaatctgtgttcaggaaaaataaaaaaccagcctcgttttatagaatctgcatatgatatcataaaactgtgtgggtaagttatctttctttaactttattttgtagtaacatggagtattttattatgtttcttatatcacaaacatactatgcattatagtgtagcagattgctacagaactcagaaaacttcagttcatcacttgattccagcagttggcatttcaggtaatcagtttgctgtggtctgagattgctagccacaagagattaaattctaagtatattgaaatgctttcttgtaattagttactctgaagtaaatgctaaatattagatgtaaccaaggaattatagtattttcagaaaatctttgagtgaacttatggatatgcttataat

SEQ ID NO: 42271 - DNA, 2016 bp, Homo sapiens
agtgatttattagtgccaaaagaaaaaatgctctgactggcgaaaaggcagctgaaggcagcctcacaggagcaaaagtcaggaaggagtaaatgcctaaataaaaataagaatgctgttcttataaaaagggcaagtaggtcccaggaggcaaagcaacaaatatctactattaatacaagggaacctaactcagagttggagaattaataactgcttcctaatgaactcaagtctagtaactgaatgacaaacaggacttggtaacagaaaagttttgcatgcggagagcatcctagacagggaaaacaagtgaaaatataattagcaaaatcagaaaactaaaattcagtatgatgagagcagaaggaacaggctacaatggtgagagatgaggctaacaatgttatcagggaccataacatgaaaggtctaataagccttgttaaggaggtaggacttaatcctaagaacaaagaatagtctttaaatggttttacaaaggaaaatgacatgattgaatgtgttatagagctgtcactttgaccaccatgtgtaatagactggtttagtggattcttatctggtacatagaggattagaggcagatttggaagtgtaaaaaatattagaaatatgttcaaatgaatagtataatataaaaagggagattttgttgatagacattcaggaagtattttcataaaagtgtgtgttttagtttgagctgctataataaagtaccgtaaactgggtggtttataaacaacagaaagttatttttcagtttgggaggctagaattctgatatcagggtgccagtgtggttgggttctgatgagggtgctcttctgggttgcatactgctgatctcttgtattcttacatggaggaaagagagcaagacagctctctggagtcccttttataagggcactaattccattcatgagggctcattacctccctaaggcctcactcctaaaaccatcacattgggggttaggatttaaatatatgaattttggagggacgcaaacatttagtgtataacaatatagtttttaaaatatgattttactttctagggctttgaaggaagtatttaaaaatctgtttatgagaggtttcagtcattatgaccgtcagcttagaaatgacatattagtgatcactacaattatagctcaaaatcctgaagcaccaatgattgtaagtatgaatcaaattgcattaattttaattgtggaagtggtgggcttgggtgaaagaagtcctatattatgttggaatatttgtgtattttcttgtaatgctaagttatgctgtaatatcttgatggtcaccagtgtgcttatcactctgccaattcttctttgcaatcctttggaaatttggaatcttcctcatattgtgtgatttatacatgtatttaccacttatgatgcttttctttccttcctgatgatttgagtttccatctggcatcatttctctttcactggaagaactttgtttacaatttcttgtggtgcaaatctactggctgctggcaacaagttatcttagttttcttttatctgaaaatatatttaattcatcttaattcttaaagtctatgctcattgaatatagaactctaggctgaaaaatgtttttgtttagcatttcaaagataaagttctgctgtcttatggagtctgttgtttctgatgagaaatattcattgtgaggttccatggtgtaatggtgagcaccctggactctgatgagaagtatccattatttcaaatcgttattcccctatgtataatatatcatccttttctctcactgttttcaagattttaactctatctttggttcctagcagtttcgaaatgatgtgctaaggtgagatctcctttgtatttgttctgcttaggtttcatagagcttcttggatatataaatttaagtctttgagaagatttggagaactcttggccattatttcttcaaatattttttcagccc

SEQ ID NO: 42272 - DNA, 1058 bp, Homo sapiens
cctatacgtcatcaattagacacttaatgagtatctcataaaataagtacacataaactcagtgtaaaattcagaacccctaaacaaaagctgctttgccttttgttatttaaaaaataaatagttctctagatccttgactttgaaaagagctatttcagtcgttcgtattcagtgattgcttcactagtcaattatataatctgctagatgtcaattaattataaatgcctactcaaaaaatcttctacttgttaaattaaggtggttactcttccatcactagtggagtggagtggtgctctccaataataataataataatataggaaatagcaggaaatcaaagtatattgaaaaggagctaggtgaaaacatttacctttttgcccagtttgtttgggatgaacaaacctgaaagtacagtttatcattcctgtgcacattctgttgcacaaaactcagtctaactagaggaaatccaggaaacgtaatctttcatatgtctaggaagaattcttaatcctgcctgcactagggaatagggtagggaaaagggaaaacaaatagcaatggtttttttcttcttagaaccttttccctttaaccggaaagaagctgatctttatgttaagttcttagaggcagggaccttgtcttattgagtctaacatggctgtgtagtagtaacgtgctcaataagtagtaactagattttaaatgtaaatgtttatacacttcctgggtacagtgtacactgcttggtgacaggtgcaccaaaatctcagaaaccaccaataaagaacttatccatgtaaccaaaaaccacctattccccaaaaactattgaaataaaatataaatgtttatatacttcctgtgtagacactggggttacaaacatgtatagagcaggacaccaaggaccttttccttaatgagaaaatagaaactacatgtatcatagaaagatagcatgtgttagcctacacgtcatcaattagacacttaatgagtaggacagagtaaatgttacagaaactaagaggcttgggtag

SEQ ID NO: 42273 - DNA, 1137 bp, Homo sapiens
ggagtagataacatgcatcagcttatcagtgagctttgttctctcctgaatccctttctctagtctaccaccttcaagaagatattagaaggcataatttgtttctttccttcacagggaaccctaagcatgggtaggagcatacaacgagatgcccatacaaaaaataccagatacatcttaggtacacttgaattgatgtgaagtgtccatggctaacaatgaatctttgctccattttgtagactataagctctctaagaacaaggtagagaccatatctcattaattattgtacttagtatctccggaaataaattattagataatgtgatggtggcctcagctactggcagtctttcccttgagctctgcaaatgcagcaaagtactgagctcaaagggaagattcagccaacaaaatactacacaagtaatgctcaacacagacaacatgttagtttaaatgtatttacttcataacatgatagattttctccaaaatggtgaggcataaatactactacatgaatataaccaaggtgtggaaatagtattacttgcttgagtatcatttttgtatgtagtacaactaaatgtctcagattgattaggactgtaatctagacaatttctgatgtctgtgaacctttcttcttccatgtattttgcccatcagcaagaagaaaggtaaaacagggcagattattatgtagcagctatttaatagacaaataagtgtaagttgatggaaagcagtaatgttccttaatacagacacttgcacttggtagacagattcacccaagtttgcatattataattccagccaccacacagtgagtgagtgactctttctcacaatatcactaactctaagtctctgtctctcatcacatcctatattctcacaccacccctgagccctaggggacatgatgcctacccgatcctgccggctgagagaaggatggtatattttcttacattagtcaggtgagacaaaatttgaagctttcaaactgaaacttttactaaccaactgaatgaaaaggaagtcaaaagaataaaagtgtggaattcagtgagcacagataaaagtagcttcaacaatctcagtaatgagacttttaccaca

SEQ ID NO: 42274 - DNA, 1087 bp, Homo sapiens
ttaactttttgactcagtataatgaaagacattaatttgaaacatctacaattgcaattgcctctagtaaactttaataacaatgtatttatcaaagtgcgattcaatcaccttggggagaaagaaagcaggaaatgaagttgaaacaagtaagtacccttcagagaaaacaagcacttgttgacagctgactaattgaagagaaagaaggcattcttttttcaggaacacaggagacaaagatgaacaaaagactgtctcagagacaggaaaaaaatagttcaggagggaagtgaaaaagagatcactagtccttacctcttccaaaagggatgattagtagaaaatattttgttattgtttaagaacaagaaatacaaatttatcttaggacataaagacaaacacaaaggcatataaacattgtgtattttaggatcctcgttttccttttttgcataattttttagtggttgttctaagcattgcaatatatatccttaatatttcagactacttagagttaatattgaatcaattcatttaaaatgtagaaatcttgcaaggtatgagttcatttactcaccttttcatcctttttgctatagttgtcaaatgcattacgttataaatcctatgatgcaatgttatcattttcagtgctctttattttttgccgctgaagacctgattttccatctggttgtatttctcttcaacctgaagaacttctttggtatttcttatagtacgtgttcactggctacatatacttttagttttctttatctggaaatgtattttacttcaccatcattcttttagaattattttcactggatatagaatttaatgtagttttgagttttgttttattctttaaagatgttgttccactgtcttctggtctccattatttttctgatgagaagacatcaatcattcaaatcacaattcccttatatgtaatgtgtcatttttctctgacagctttcaaaatatctttagttttctgcaacttgctgacaatgtgccaggtgtgtgcaatgcaattctgacattacctagagtgaggtcaaatttcaca

SEQ ID NO: 42275 - DNA, 1558 bp, Homo sapiens
atcaaagatgtgtgcaaagagaagtcttagccagaacaatcaggcaagagaaaaaaagggcattcaaattggaaagaaggaagtcaaactatctgtttgcccaccatatgatcttataccttgaaaaccctagagactccttcaaaagactcctagatttgataaatgaattcagtatactctcaggttacaaaatcagtatacacaaatcaatagcactgctatacaccaacaacaaccaagctgagaattaaatcaagaactcaatcccttttacaatagctacaaaaaataaaataccaaagaatatacgtaaccaaggtcgagaaagatctctacaaggagaactacagaacactgctgaaagaaatcatagatgacacaaacaaatggaaatacatccaaagcaatcctaagcaaaatgaacaaatctagaggaatcatattacctgacttcaaattatattacaaggttatagtaaccaaaacagcatggtattgacagagaagtaggtacttagaccaatggaacagaatagagaacccagaaataaaaccaaatacttaagaccaactgatcgtcaacaaagcacacaaaaacataaactggggaaaggataccctattcaaaaaatgatgctgagaaaattggatatccaaatgtagaataatgaaactgcattcatatctctcattatatacgaaaattaagatagattaaagattttaatctaagacctgaaattataaaaattctacaacacttaggaaaaacccttctggacattggcctagacaaagaatctgtgactaagatctcaaaccaaatgcaacaaaaatacataagtgggacctaattaaagtaaaagtcttgtgcacagcaaaagaaagaatcaacagagtaaacagcctacagaatgggagaaagtatttgcaaactacgcatctaacagaggactaatatactgagtctgcaaggaactcagatcagcaaggaaaaaacaattccgttaaaaagtggacaaatgacatggacatttctcaaaagaagatatgcatacaaatggccaatacgcatataagaaaatgttcaacatcactaatactcagggaaatgcatattaaaaccacaatgatttaccaacttagctagaatggtcattatggaaaagtcaaaaaacaatacgtgctgacatagatgtggggaaaagagaactcatactttttttttttctttaacttaaaaaaattttttttattatgctttaagttctagggtatgcacaacatgcagctttcttacataggtatacatgcgccatgtcggtttgctgcacccatcaactcgtcatttacattaggcatatctcctaatgctatccctcccccagacccccaccccctgacaggccctggtgtgatgttccccaccatgtgtccatgtgttccttgttcagctcccacttaagagtgagaacatgcaatgtttggttttctttccttatggtagtttgctgagaatgatggtttccagcttcatccatgtccctgcaaagga

SEQ ID NO: 42276 - DNA, 1001 bp, Homo sapiens
agatgactgctctaggcttccttaaggatgtgtgatttttggactgggatatgaggaataattatgaggtaattagtaaaatagagtggagggtgaagggtctttaatcagaggaaatagtatgtacacaaagccttagtggtggcagggagtagatttgtgtgtctagagaacatgaaataagggaaagaatcgagatgagcctggagatgtaagagagcatgtcacatagaccatttaggctgtatttgatttttatatcttaagagcaattggaagcatttaagcaagggataaaatgcttaggtttgctcctcacagagatctcggcctgtaatgtagaaaatggattggtgtgggacatgaagggtctgagacaaccagttagtaggctcttgtggtagctagatgagatataaaagaagctttggttaaaagtagtgagtatgataagatctctgccatcattaaaaggacacagaatgccattaacttggaaaataaaatcaagccattctaaaattagactgtgacgaagtagagtgaagtttggactaagtgctataaatcacaaggccaatatttgttataatatatgtaggacttgagaaggaagagcaaaaagtcataggaaagaggctagcgtaggattgatgaggcttaaggataacaatgagaaggaactagaggataactgaatgagaaggaactagaaaaatttcagccacagatccagtgatagaaacttaatatctgaccctcctgaacatctatcactcaccttaaagtgcaatagaagaacgttgaggttcagtaattacattaggcctatacagattataaaaatctgtgtttgtctttttccaaatactatttattcatttattttagagacagggtctagctatgtcacccaggcaggagtacagtggcatgatcatacctcactgtaactttgaactcctgggctcaagcaatcctcccacctcagcctctggagt

SEQ ID NO: 42277 - DNA, 1064 bp, Homo sapiens
ttctactcatacttagtttggtttaaaatatatttatctaacaagtatgttatgtgccaagaaccttaccataatcaatggtaaaatccaaaggctctgagaacttattagaaaaggtgaaaaaaggcatgaaaaatgctggtgttggttccctgcttcacaaatcaaaccattaacatggttttaactaactttcgaaaacaatggaaatcagctttgtttgtgctctttcttttagattttctgcatttatttgaaaaaaacatgattccagagaggactgtagagttccaacatatcatccccatatctgcagttactggagaaggaatcgaagaattaaagaattgtataagaaagtcactggatgaacaggccaaccaggaaaatgatgcacttcataagaaacagttgcttaatttgtggatttctgatacaatgtcttctactgagccaccatcaaagcatgctgttactacttccaaaatggatataatttaaatatattaaaaatggtattgatggaacagtatttaatgcttaaaaacaaggaaatcctttcatctgtgacaacctggaggacatgttaagtaaaataagccaggcttagaaagacaaatgctgcataatctcactgtggaatcttaagttgaactcatagaaggagagaatagaatggtggttatcaagggctggtggggcagtggaggattgaggagatattggtcaaaatttacaaaatttcagttagacaaggcaactgagttcaagagatctgttgtacagcttggtgactgtaattaacaacaatgtattttgaaagtcactgagtaaattttaagtggtttttccaaaaaagcacataaggtaatgcacgttaattagctatattgagccattccacaatgtatagatatttcaaaacatgttacacatgataaatccagtttttctacgtcattttttaaaattatatttaatttttttattttgaaagttttttcacagatcttttttttagtattattaccttctgatatatgtgtcattattgaagaaccata

SEQ ID NO: 42278 - DNA, 1046 bp, Homo sapiens
acttttcggaggccgaggagggcagatcacttgaggtcaggagttcaagaccagcctggccaacatggcgaaaccccgtctctactaaaaatataaaaaattagccaggcatagtggcgcatgcctgttgtagccccagctactcaagaggctgaggcaggagaattgcttgaacgcgggaggtggaggatacaatgaacccgaggtcgcgccactgcacttcagcctgggtgacagagctagactccatctcaaaaaaaaaaaagagctaaaaaattacattttacaagtttatggccagcccacctgtaataacattctctgatattcctttacttaggatgtccctattgagatcattttttaaatttatgtggaaggattctctagattattattagaatgagcaattcagttttgtttgtttttgagcctgtcttgtacctggttgcactaaatatataatagttatcttttgtggagaccttaaaaccctaaatttgaatacatgttcaatgatagtaaagatatgacagaaactagaagatagctgtttatgatttgagcttttggaaaattttcgtttcttgaatgtaatagtattttttcctgaattggaggagactgatctatattgtttcatttttcttttgtcctagtctatttcactttcttttgtcataatctatttaatttcccactttcttattttagtaaagagagaataaatagcaagtgcaggccaggcatggtggtgcaggccagacatagcggtacatgcctgtaatcctagcactttgggatgccaaggcgggaggattgcttgagcccaggagttcatgcctgagcaacatagcaagaccctggctctctataaaacagaaaacgcaaactttaatattatcaacaatcaatatattataagagattgcaatttctaagtttctacctgagtgtttcacaaatacaaactggacattttccctttaaatgagttttattataaaatgtacatattgattgtaaaaacaaaaaattcaaatagt

SEQ ID NO: 42279 - DNA, 1090 bp, Homo sapiens
aactcctgtgatgtgccaagcagtgagctgggtcactgaatgctaagaagtagttaacacttggcatagcatttgttgtgttctagacatgttttaagcacttgacattatattatctcattgaacccatagaacaaccctgcaaggttggcactgttattttttccatttcacagatgaagaaaacgaggcacagggaagttctgaatctggcccaaggtcagtgagctagtaagtgaggagatggggattagaattcaagcaaccttgctaagagttgactctcaaccattcccctgtcctgtactgcttctttccctacacctttgctttttatgagccaccttcacccctgctgcatgagcatttgaggctgaatttgtggtgtttgtagctaactgatgattgatgagtgggcccttgctgtgtgagtgcctgacacatacagagtgcttgatgtatatgtgttgaaagaacgattattgacaaaaagaagattgaaggtgtgattgtaagagactttaacattatcttggttgtttttttaattgtgaagaaaaataccgatggctaaagattttagttgctctatgacccagtcagtaataaccaaatgtgtgtgcacctgtgctctgaggtcacacacacctgcatgtatatacatttgtactgtacagagaggaaacaagggagagactttccctctttgcattgacatttcatcattagatgtgttgccagttggcaccacccttcctgctctgttctgctattgtcccctcatgatttgtcctcttgtgtgtcaccccctagtctgactgacagtactccacaagcttgcctgccatgggctgtcgggatgtccacgcagccacagtcctttccttcctgtgtggaatcgcctcagtagcaggcctctttgcagggactctgcttcccaactggagaaaattacgattgatcacattcaacagaaacgagaagaacctgactgtttacacaggcctgtgggtgaaatgtgcccggtatgacgggagcagtgactgcctgatgtacgacactacttggtactcatcagttgaccagctgg

SEQ ID NO: 42280 - DNA, 1057 bp, Homo sapiens
ttctctttcagacataatttagtaggggacaagaagtctgttcttcagtgagtacactagagatttactctggtgactgccttttgagttatgggtgaagtaaggtatggctttaccataaccttgattcattcacccttgattcatttctcgcccccgtcactgattatttccttgagcatatatctctgcctaacactttagtaggtgctatagaggatacatgaaaagtatgagatctggttccatccagtaagacattttaatagagaagatcaaaatgttacctggcagttggggaataatctgacttcgttggcagttggccttaacttcttaatcattgatccaggaatatttcaaccagagacacaactttctggcagacagacaaattgtacaacaccaacaatatcctggaccttgaaattctgtttacttcagtccattgtatcctttaaggcacctgtgctagcctagattttgtaataacactgatttatgagaatggacaaaagtggtagggaaattgttccctctccacttctgaaagtatgatgatgtattaaggatggaggagttattaaaaatgtctcttctgatgaggtaacaattagatgaaaccatgttaaagctgagatgaacacttagaaattcagggatattgggtctttagccttatgaatttgagctgcttatttaattggtgtaatttactacatattagtactatattcgtaaggattttttattaaccattacagattttacaaacagctagttatatggtaaacagattattatgcctttttgcaattctgaatatgattctagtatttgtgtagatgtatttggtactttttcccctaattccaacactagtttatatatatagcgaataaatctagttgtataaatttttaaatgccgtcagtagaaagcacacaaggttatgatttttttaattactggcttctgatttctttcacttctgatccttttcctttttctcagatgtagctgagtcttgatcattttaagacaacgatgggtagaa

SEQ ID NO: 42281 - DNA, 1034 bp, Homo sapiens
gtataatccccaattcaactaccctctgtttgggcatttgacttattaatttcatatcctttgtaaaatagagataataatagtatctttcctttaagggttaagataattaaataaggtaatgcatatgaaggtttcagaataatggctcacaaaaagtgaatagctcataattggtgttatcatcttcattgccttcatcatcaccatcatcatcgtcattgatgctttcactttgacatccaccttctgtagttggaagggctacagagtagatagaaggattaaaaatgaagaattacagctatgaggagagttaatttcagatattcctctaacatttcacctaaagcttcatgtgatgacttgcatattaaaactgagaaaatattatctaaaacccaccattgtttagattccgtatgggggtgattggattcactttttaatccctgagtgtgttgctcgtagttaactttcagtacgtatctattgaatgtgagtaaatatctattgtagaggagtagagagagtgatgaattaggtgttaggcaatgtggattctcatctgccactttctagttatttgggcaggtcgtttaacttaccccggccatgacattctcatttgtaaaatcagttgaactatgatcttcaagttgcctcttagctctaaatgtaggattctaaataatgtaacaaccaacataagattacaattttttttcatgttttatgtcagacaggtaatgtactgaccttgtagtaaggtttgagggaggcacatcttacacatgaggtgaaaccccaatcatcacgcttatgaactatacaaaaggatcaaaatgacaattttatcacatcagaaaagagcactaaaactctgcttatgtacataggaactgagttcttctgtgatcattttcagattataatagtagaaatttttttgaacgcttgttttttaccttctctctcctggagctggggaactctacagtccattggaatcaattcagattttagtcttaaaa

SEQ ID NO: 42282 - DNA, 1050 bp, Homo sapiens
ttaacttgcttactttacatttagtataacaattctgttaggtggagactgtgcacaatgatattggcttctagtccatgtccctctttgttattttatataaagatataataccagagataataaaggtggcagttattattattatttttttgagacttggtgtcccttggtcatccagtttggagtacagtggtgccatcgcggctcactgcagcctccacctccaaggcccaacctatcctcccacctcagccttctaagtagctgggaccacaggcatccaccaccacctggctaatttttgtattttttgtagagatggagtctcaccatattgttcatgctggtctcgaactcctggtctcaggtgatcctcccatctcagcctcctaaagtgttgggattacaggtgtgagccatcacatacagccatgcagtgatttttatgagaaccagaatctagggatgatatggtttggatcgtgtccctgccaaatctcgtgttggaaggggggcctggtgggaggtgattggattgtgggggtggatccttcttgaatgatttagaaccatccccttggtgctgttctggtgatagtgagggaattcttgtgagagctggttgtttaaaagtgtgtagcacctcccccttcgctgtcttgctcttagcttctgccatgtaagaagctggctctccctttgcctactgccaggattggaagcttcctgaggcctccttggaagcagaagtcactaggattcctgtacatcctgcatatccgtgagccaattcagcctcctttctttataaattacctggtctcaggaatttctttatagcaatgtgaaaatggactaatacaagtggttagatacaaatatgatttgtggatatttctggtcattcttttccatttattgagcatggtggaagctggttcagtcttttctctaccctgactatcaccattaagggctgtctcagtgtccatatggatgatgtatacgctgtcatacaacattctagcatccctgactttctcgtct

SEQ ID NO: 42283 - DNA, 2020 bp, Homo sapiens
agtctcactctgtcacccaggctggagtgcagtggcgcaatctcggctcactgcaacctccacctccagggttcaagtgattctcctgcctcagcctcccaggtagctgggattacagacgcccaccaccacacccagctaatttttgtatttttagtagagacggggtttcaccaggttggctaggttggtcataaactccagacctcaggtgatccacccgtcttggcctcccaaagtgctgggattacaggggtgagccagcacacctggcttcaaacagttatcttttattttcgtgacttcattatcattgcagctgctgccatctcagttcagaaccttttcacttttacctattttagttcaataaactcttcattggtatcactgctccatcttattcctccactcagccttcccaaaacatctttcttgtcatagtactcccctgttcaaagattcatgcatcaaatgacgtttgttttatgtcaggctggatatggtctcagcctgactcttgatctagttcagcctcacaggcatttatgggttgaccatctctcagcatcttacagggctgggcctgggtggagattcaatctcactctctcttatagtaagattttataggccaggcacggtggctcacgcctgtaatcccaacactatgggaggtcgaggcaggtggatcacttgaggtcaggagttcgagaccagcctggccaacgtggtgaaaccctgtctctaccaaaaatataaaaattagctgggtgtggtggtgggtacctgtaatcccagctactcgggaggctgaggcaggaaaatcgcctgaacccgggaggcggaggttgcagtgagccgagattgtgccactgcactccagcccgggtgacagagagagactctgtctcaaaaaaaaaaaaaaaaaaaaaagattttatattactttctgtactgttttattttcactgtggtcatatctgccagtcctagatgctatgaaccttccatgcaagaggtctaaaagttagactgttctttaattatgccagtaatccagaaagtcattatatttcaaattcagcatttaagatagctgaaaaagaacatcactacctccttaattctctcattggaaatttagttttaattttctgatgcttaaaactttctgtgcttcagtttttcctttttataaatgtttgatcatatttaccatctccctaattatggtagacataattatcataattaggtctagtcccagacagtggctcaaatgtctgcgtagtgctgtaaagattcagagaggaagtacatgtcacaaagtgcaagatgtatgacatttgggagaattagtcactttcaatttgtaattctcaaaaggcagaatattacagaaatggaaaacatgagtagtgtcctctttccgttgtgagcaccctgcatcctggtggcaggctgtatagcctgtaggaagtctctgctgtaagggtggttagtgttccctcctgggcagtgctctgatttgcatgtttgaattcatttgttgaaagctgacctttgggccgggcctggtggcaatcccagcaccttgggagggatcacttgaggtcaggagtttgagaccagcctggccaacgtagtgaaaccctgtgtctactaaaaatacaaaaattagccaggcgtggtggcaggtgcccgtaatcccagctacttgggaggccgaggcaagagaattgcttgaacctgggagtcagagtttgcagtgagctgagatcgtgccactgcacaccagcctgggtgacagagcgagactctgtctcaaaaataaaaaaaaaataaaaaaagacgctgacctttgacgtaggaagtctttctgtacagcctaactactctattttcttcaacaagtgcaaaatgggctcagctgcagtacattatgcctattttccttctgactggaatttgagtcatcaatttagaaatttttatattgctgggttgtgattgggat

SEQ ID NO: 42284 - DNA, 1026 bp, Homo sapiens
agttccaaacactcttaactcttattattcttgtcataaaacttataaaaggcataattacaagatattggaaccagcagtttgctttcagttttgcaagcttaatttctttaggtctcatcagcgtcttaaaggagctttcatcattttaagggaataattgaagtaatgttcactttcccttctgaatctattttattttcaatgtgtaaagttctggttatttttccaacttactatttattttttaagttttccttctttcttagcaacttagttttcttaaatttctttttaaaattaatttttttaaaaaaataataaaaaagatggcatctcattgtattgcccagactggtcttgaactcctgggctcaagcagtccaccagtttcagcctctcaaaatgctggaattacagacatgagccactgtacctggctgtcttttagttttattttattaactcttttgaaatgaactgttgtttcttttaggcatatgagcctgggaattttcttaaaattaattaatttatttatttattttgccttggtaagtttattgtgacctgggtgttccacgagcatcctaaacttaggctggggatatggaaaattattttacagtggttttaggaaaaagccaggtattagcaaaaaattataagattctgaaatcatctgcaagtatggcatgtcttatagtgcaacattatatgattaattttttaataatgaaattaatagttttcctgtttttcaatagctactctaaattctatgataatgatgaatcttatgtgtatgagtaaggaatgtgttgaaaaaaaattttaaggtttttatgacccatgtagttataatacgatagaaaaaaagttttcaatatgcacttttatacctagatgaaaatgcatcaggcaagtacttattcgacctttcactgattaagaatatctttctccaatcttgcaagttacaatttaaaagacatttggaattgcttagagaacccagggagtcct

SEQ ID NO: 42285 - DNA, 1082 bp, Homo sapiens
cacaagtagactacaaactcctgcacaaatatgtttgggaaactcacatcctcttcttagtggatatgcgtttaatattcaagactctgtgaaatcctacacggaagaaacctgtttaactttactttatcagaatacttctaggggcacctctggtgataccatgggtaacaatgtttcttggacatcagtttgggaagtgcagcccagagtggtcattagattcctgcactcgccaccataggcctattcaatttgaaacatacttaaatgttgatgagcatgcatgcttattacaatttattgaactaaaaaatgtaatgagaatatacatatatgttacttcaagaaattcagtcgaatttagcttttctttttgcataaagattagacaaaaccttaaggtagatggttatgaattttagacatcttaccgctaagaaaagaaagtagatggctctataaaagtaagcttttttattattattttagtgagcaccaaatgtggtagacatttctgtagggcagaaaggatgagagttccagtctcatggaatttacattgtatagagatgtggagattaagggttacatgtgttcttctcaacatgtttatatatgtatatatattttacacattattgtagttggaaggttttttgcacattgtggccttggccactcataaatacatcctcagtttttttcaggtattaatattttgattatggaaacggactttgggcctatgcttggcttacaatgtttcagtccacaaatgaatcttatttttaattattgaatgaatgatttctctttaaataaccttaaaatgatttaaaatctctaaagagacttgttagttttatccttttttttcccccgtaactcaaaagcagttttaaaaaatctacacatttgccaggcttgaattgaaaacatttgagcatctgagtgaaggtgttggtgaagttggttgacggtttttttctttaatctcatgataacatcacttaaataatttataagaaaaatcctgggtattttcctcctttttttttagagatgagatctcactctgt

SEQ ID NO: 42286 - DNA, 1028 bp, Homo sapiens
gtctgtcattgttggacatttgggttggttccaagtctttgctgttgtgaatagttggtatgcagaaattcttgtaaggcatgccttcctttcttcttccctttcccactcctgtcctttcttagtatgttcaaccttgaggataagaaatagctaaagcatggtccctaccctgaggaatttataataaaggttaacatttaattaataataatggaaatgaaaactagtaatgtacttgagaagcagagtgacagagagagaatctagcaaatgaaattagctgattactcagtggaaaatgcagacaacaattcacaaatcagttgctaattctttctaccatgtatattaactttgtcccttggccagaattttgaagttattttctttatttagcttaatgaaacaacatcaaggagagtgtaaagtctttttcaatgtaaagtgactgaaactttgctttttagaactcatcatttcactaaaaaataagttcaccgtaagaactctccatcagatagaattcctgatggatgttccaggatttaagatgcatacaaagtttgggaaggcctgtcagttttttaaaaaaattaataggctttttttgggtgggagggggctcaactttcagtttacaggaaaattgaacagaaagtacagagttcccatgttacttctcattccctattccagtttcccctgttattaatattttgcgtgaatatggtacatttagtataattcatgaaccaagattgactcactattattaactaaagttcatagtttacattagggttcactctgtgttgtgccgttctctgggttttgacaaatgaatgacatgtatttaccattactgtatcacacagtatagtttcagtaccctaaaaaattccctgtgcttcacctgttattcatttctccttctctgccctgagctcctgccaaccactgatccttttactgtctccatagttttgccttttccagatgttatatggttgaagtcaaatagtctg

SEQ ID NO: 42287 - DNA, 1049 bp, Homo sapiens
ttcttttgatattctcctgatttcccctgttttgtcaagcttatacaaataatgatataaggtagaaatgaaggaaagtgtccaagaatggtacaaagggcggtgggaaagttccaagtaattcagaaagagctcagcagtctggggtttttggaggggatggaatcctggagccagggaatgcttctctctctctctctctctctctctctctctctctctctgtgtgtgtgtgtgtgtgtgtgtgtgcacgcacgtgctcatgggtgcagattttttggattgactccaacagtaaaagcacgaccttattaatttggactccactaattagaaaattactgtgaaatggataaggattgagcttaaagttaaatagcattttctgagaaattaatggcatagatataaagtaaatgtttgacctattttggagaagataatggtttacagtgcttctgtaatgaaggatccatgcataatcattttagtaacagttattgaacgtgtagaatgttgagaaagagtagtgtgatggctaagagcatagattggagcatcacaccccctggggtcaaatattggctctaccatttactaattctacaatttgctaaatcaaatactggctaactcaaatatctatttactaactcaagtatctatttactaactcaaatattggctctaccatttactaacctgggcaagttacttaatttctctcagccccagtttcttcctctgtaagatgggaataataatattgcctacctcttagctttgctgtagagattgaatgtattaatataaaaatgcttagctctatactcggtacctgataaatgtaacattaagtggtaactattattactgtgttcctggcaccctgctaagtgcagtgagaagataaaagagaatttctggtgtcaaaatgtgacgaactaacagataaaataatgtgtattgatatatacatacaatatcagtgtcatacagtacaaataggtacatattttctgtgtagtttactgtttataaactgtatt

SEQ ID NO: 42288 - DNA, 1033 bp, Homo sapiens
atgctgtcatagatcatgtagagctttttttcttgaaatataaatttggtaattgcaaagtatcatcaacagttaactttggctattttaaagttgataggacggaatgtgctctataacttttaaataaccagccaactctataagactttataaaactttaaaacaccactttcttgaatctcctttagaaatagaaacaatttaatacatctatgtattaataatttgttctcttttctgtatatatgcaaacagatatacaaatgggctgctttctaaatcagttaagtattggcctcctttccatgatcttagagtaatatgattcaaggatagcagaaacatgcaaaactgagagaaaacctttcatggcaactaaaatcttgcttctgcttattgatttgtttatattttgcttacttttacaagttatttcagattgcttataaaagtccattttaataagacctaaaacagtcaaggcaggaaagaagaaaactattatagaagaggaggggatggcaaagagccttcaaggtggagttagcaaactacagttcatcaagaaggcagtcgggagaccatcctaagaataatcattatgtagattcattcatttgttcagtaaatatttattgagcacatactatatgcctgtaatctcttaagcagtgaaaatgcagtaatgagcaaatcagacacaaatccctgctttcacaatcatagaggttgcattttagtggagacagtaagcaaaatgtttagtctaaatagtatgttacatagtaatagttgctaaggagaacacattaaagcaggaaaaggagataggaggtattgagggaggctttacattcttcatggagttgtcaggaagggcgtccctgagaaactcactttggaaaatggccggaaggctgtgagggagctgtaagggtgtcaagggaagagtgtacctggcagaaggaatagcaaatgcaaagaccctggtgcacttataggaggaagttgctggggagaggttgggtgg

SEQ ID NO: 42289 - DNA, 1054 bp, Homo sapiens
gatcatcaagattaaagagaggcattacatgatgataaagagcttagttctccaagaagacaaccaactttattgtatacacaccaaacaacagagtgtcaaaatacgtgaggcaaaaattgatagaactgaaaggtgaaatggacaaatccactatggtggttgtgacttcaacaccactttgtcggtaattgacagattaagcaggcagagatatcactaaggattcgatgatctgatcagtactgccaaagtaaacaaagtggaagctgccaatatttcaaggcctggacccagaactggcacagtgctcctttcacctactcttgatcaagtgttcaaagagaccagatccaagcgtaggggccatagaccacacctctcaatgaggagtgtcaatgaatttgggggccgtgttttaaaaccccgtatagagtttggtttttattctaggctgaattaaatctttggtctcatctttgtacacagttctctcagctatctgttctgaacatatatttgctgactcctttttgggttaatttcattagattttagatctctccttgagaacaataaagacacagggtggggaacatcacacactggggcctgtcgtggggtggggggatgggggagggatagcattaggagaaatacctaatgtgaacgatgagttaatgggtgcagcaaaccaacacagcacatgtatacatatgtaacaaacctgcatgttgtgcacatgtaccttagaacttaaagtatacatttaaaaaaaggttctgtttagtataaatggctttgtatagagggggcccttctgtcctagtgtacctggcacagttctggtttatgcttgtcattttcatgattattaatagtgctctttttactctgaatactgtcccatttggatgataaattatatgatcatattatataatttttatttttctggaacttggtaaaatattttgccaaaaaccgaaatttgattggaatatgttattgtgggatccaactgagtatttagagccattaatgtcagtgaatc

SEQ ID NO: 42290 - DNA, 1032 bp, Homo sapiens
aggctgcagtgagccatgatcatgccactgcacttcagcctggacaacagagtgagaccctgtctccaaaaaaaaaaaaaaaaaaaggtttaaaatatacatgaacaaaaggtagactattaaaaaatttcttaacgttattttttccacagctgtcttttctaaaagtagacccagtgacttaacatttttaccaggctttagaactgagagactcagtagttgttgagtgttgagacacgtagataaaaagtaattaagaaaggagaaagtcacaatgactcttaggttaaagagcaatttgataatcagtgtaattcttaatgagaaaccaatgaagcagtcgtagaaaagggagatgctgattagtggtctttgctcagattattaaagattagtaaggttagtgagtgttttgaaacatgtctgctggatgcaaaaaggttaattaacaaagcattctacaaattcttaaggaatataaaaacttaaaggaaataaaaacttttctatatgtagatgcagtaaacataaagagaccacaccttttatttataaaaagaaaataaacatttaaacctaacatgaaagatgttgaaaactttataaaatgttggtatttttgaaatttttggaaataatacttttagtaatttattctggacttattttgcaggtatgatgaggaaaatgttagtatactattataacagcattaatattcacccagtgaaatctactctgtgccaagaaggtcctagatactgagcacatatcagttgataaaacaggaaaagtccccttcatttctggaacttatggtgtagtatatattttaaggaaattttagtttgaagtgatgtaatacataaaatctcagtgtcatgaactgttgagatgatcataacttattaaaaacaaacacttggaggttcaattcatggagaattcagaatatgaattccatgaacctaggtcttgtttttttatgcagttaccatagaaaatattttcaaagacctttttcactat

SEQ ID NO: 42291 - DNA, 1026 bp, Homo sapiens
agaagcaagtaggatcacattgaagttgttgatgatcttcttattcactttggctgggtgtgaggcaagctcctgaggcacattaaaggttagcttctgggaaacacagagaagcggggaatgcaatgaatccttagcacactgagacctggctttgactggcaacataatttcattttaagccttgagatgagcttaggaactggccctcagttgcggttgtgttgtagaatgcagggctgtgtaggtgggatcttgttctgtgggttagagagcctctgaagactttagagttgggcatattagggacaaaaatctgatattcagataggatatcaattagaaaaagaagaaactggaagctgataagtcagtcattcagtgtgttgcagatttgaaattatgggtttattagatgttagtaacaaaaaataatattctatagaaagagatgtcagagctaggtgaagtattgattacagattgagaggaaaatgtcaatggttttgagtttgactgagtgaaaaaatagggccagagatagaaatagttggtgattgcatggagaattgcttttaagactttacagtttaaaaggctgttatccgatataatcttcatatgctagccctttgaaaaagttttaaatttttattttgtagaatttatattgtttatagaacctgtattataaatatggaattaaggctcagaggggttagatgacttgtctaaggagcaggatcttgtacctagaccttgttagatttcaacagggtcattactgacattttggagtaatcaatttgggttttagggattttgagctcatgagacatctgtatgaaaatgtcttgttgggaatgtgggagtgcagctcacaagagtttagcgtaagtagtatatatgtaccatggtcgttaagaagttgaaccatgtataacatttttgtggaagcgaatgttgagtgaaaacagagtcagttacaaggcaaggtagaaactcccatgggaagctggaggtgat

SEQ ID NO: 42292 - DNA, 1034 bp, Homo sapiens
ttttcatttcatacagagggttgtgttattgccattaagtcaaggttagcaaaaaagatagggattttgaggggggacatgggaaaaaatttatttataaaagtgataacacatttttcaataaagaaaggaaggcagcatccacataggacaagaaagggtctaaaagaggaaaggaacaaatagattcaacacaatataactcagagacagtagaaacatgtagaggaaaaggggacctctcatggtaaactctgtagtattgaactttttgtttgggtacattctttttaatacatgtctgagtattcccatgtgctttatccaccttctctctcttcctttctccacccttctttatgtatttttttcattattcattctattagaattctatggaaacattttagatttttaatacaaaatgtggtaccaggaaggcagaggtagatataaactgaaaaagagataaaggaaaaagaacaacttcttttatttcaaatatttggaattagttaacctgcttgtaaaatgaataattttatgatttaattgtaaaatttgtactgtataattaaaatattctaatagtacaataaatgttatatgaattattgatattacttttacaaattttttaaagttataaattggaaaataagactgattttaattgagtcattaaaattttggtgtttgactgatacttgattctctaccttacatttttcttttttaatgttatagcctatctgtttttgttgtttttcattaaccataccatttttccttgtaactgtatggtacaattgcttgtgaagtttgtatatgtaattgagttataattcaattgataattaaccagtctagatttcatttcttgcatttcatgtttggggtgttgtattgcttttctagggcttctgtgataaattaccacaaatttgctggcttattcttttgtagtgctggagagtagaagtccaaaatcaggatattggccagttcatgcttcttttagaggctatagggaa

SEQ ID NO: 42293 - DNA, 1024 bp, Homo sapiens
attccaactctaaatattagtattataacatgaacataatttttttaacattaaaatctcaaattctctcatttatacatccacatgttctcagggtttattggctttgaaatcaatagtacaatacatcttcattcttgtttcccactctatccctgagaatgtgttgatcacccagctagtgagaccactggccccggggagctcagaagtctaccagccacagtggaaatgagcagatcctctgagctaactttgacttcctgactttcacattcagtgatacaattgagattaaataactgattgaatctttcccacagtcatgacatcactgggcttttattatccctgtttagtttctcaccaatcatgtatgtgtcattagttatcagcaactgttggtggaaaattttgttgatgaaaaaaagaaaacctctttccacaaagcattgctgtgttctctgtcctcaggccactgacattgatgaattttgtcccatttttactatacgttctgcttcttccattacattttattttcccttatctcctaatggtcatggagaaatgggtctcaaggttactgtttctcagtaactgggctgtacctctagaaactgtctcaccagctcttattcaagctttgtgtgcttttctttcatcacatggtcattcatcatacttcaaatacttactgtttgctcctcattccgagtccaggttgcaccatggtgataaacaaggtttaacactgcaggacttggtgcctcctaggacgtggtgagaaacttaatgatgagtgaaatgtgtagtcagtgtagaaataatgtcacagaaattatatgtgacacttacagtgagcctgggtatttatatacagcaggaacttttcctacttggaagttgtttaacatggtcaccgatagatgacttactacatttttgtttctaaaaaaaatgtgatgtgatttacctcttcttattttttaaaataccttaaaagcagcaaaatgtattcatc

SEQ ID NO: 42294 - DNA, 1025 bp, Homo sapiens
tccacttcctttcaattttattttattcaatatgtataaattcccacacacaaatgttaacatgattataaaaatagtgtatttttataatggaaaattcctacagtgtcaaaatgaaaaaaagctgaaaaatcaccctttgtcctactacccagagaaaaccacatctagtatttggacatatatcttctatagagtttttctatatgtatttgaaaaaattgaatcatatcttgtatattcttttggaaccagctatttccactaaacaatttgtaattaacacctttcaatgaaaaataaattcagaaacctatcattcttaatgactgggaagtgtttcattatatggatgagacattatttacttaaccagccccatattgatagcttgttttcagtttttcattataataaaatgctgccagaaactttcattgcacaatcatcctgttagttaagaataattattagaataagaagtccttatttcaataaaatttaatttttatagatgtagactatttgttcatatccatcccttcatttaaactcatgaaacctactcccaagaaaatctcttattcactttattgagattgtactgagtctatggaaataatacaaaattgtactttcctatccacgattaaattattcaattttatggctgttagcataaatgtacagtttgtataaacatgtttggttttttgttctactcaagactttacttttattcaattattttaaataactttttcacaataagtttcttaaaaatataaactgttccatatattttgtattgacaaaaatggccaagagagaactttaatgggctgtagtttatataaatttttatgcaaagacatatctccaaatatttagcatttttatttacataaagctcatgtataatgataataatagtataaccaaattatattctgataattttctgaactttagactccacttttcagcctctgatagctgttgaacaacaataatgtaacttgtca

SEQ ID NO: 42295 - DNA, 1019 bp, Homo sapiens
ttttgacttaccatcccctgtaggcctgcagcccaagaatggagtttgacaaatgccaggaatctagcctataatttgtgtttagtgttcaaaaccctatacttaagtaaaaagaactacaaaccagtcttctgtaggctacttccaattcactgctcaatattttgccatctctttttatgtgatcctgtggctatggcttactttttgccaaaaaacagctgtggcttactttttgctgatgtacacacttattccagattgtttccaccaatagccaggcctgacatgccacaccatatgtttataacattgggataggattcaagaaagtaatagaaggatatagccgagattcgtgttagtataagtagtttattaaggtgttgctacaatgacagagagtactctttattccctccacataacccaggctgctctttgagaactttttttgcttcagggctacctgtgacaatatgtaggacaagttttagaaaacagaaagacaaagatgagaatttgttttaagaggctctttcccaaagtcttaagaaaggagattatctaagtgaggtcttcacatttaatgacattctcaaaacagcagtttgtgaagcgaatcatctagaatgtttatgctttgggaagttcaggaggtcaacagagtaactaagaggattacacatttaaaactcagtgcatttctaaatgcctttattcatatttgtatggtcttcgctggaataaaatttatgggagcaagctattcatgtcaggttagtttttggaaatacataactaaattcagaaatagcaactacagatcagcaggcaaaaatattagttttttgttattgttactgttttttttgtcttaaactctgaaaactcttaaaattaatctttacctttgtgctctgaagcagcttttggttagagatgctttcttttcttttgttctagtccatctgtttatgaaaaaatgttatcccaatgaaataggcttttaaatattg

SEQ ID NO: 42296 - DNA, 1003 bp, Homo sapiens
ctgggtcactttgattgattcagttgatttttcttctcattatgggttgtattttctttctactttgtatgcctggtaattttttattcaatgccatatatcgtgaattttttcttgccagattctagatatttttatattcctaaaaatattcttcagcttgttctgtgacatgttcaagttacttgaaactgtttcagccttttggtcttgcttttagactttgatgggcaagattatcaaagctgctgcatttagcctaggataaatttttctgcactactgaaacaagatcctttttagccctgtaaacaatgcctgtgaattttgagatttcctactctggccatgggaataggcaccattgtcatccctgtgtgagctctgtgcactattccctcaatattttgggtagtcctttccctaactttgagtagtttcctcaactttatgcactgacattacttaactgaatcatcaaggggactttctgcagatcttcatagttttctcttggtacagatttctcctctttgatcctctgctttgcatattatagtagccttagccttcctggacttccagctatgtgtcttcaactcagggagtttttcagacttcctctgggtttctcctgtctgcagattttcttcaggcagcaaattggagcaatcatagattcaacttgtttgttacctgtctctagaatcacttttctttattaccctatatttaagtgcttgagggccattattttatatgttttctatggtgttgagttgcttcaggcaggaaggtaagttcaatgtctcttacttatcttgactggaaggggaagttgtgactgattctttatgtcccctagcatttaacatgatgctagatatatagtaaatactcctcaaagggtaaagatagagagtcatttacatagattcatatacaaataaaggggtagtgtgtaagtgaaagaaaaatatgtaattttttgagagggcgtaac

SEQ ID NO: 42297 - DNA, 1050 bp, Homo sapiens
accttatttggaaaaatgggtctttgcaggtgggattaagttgagggtcgtgaaatggggtaattatcgttgagtatccaggtaagccataagttcagtcattgatgttcttataaaagagaggcagaaggagatttgacacagaagagaaagcagtgtgaagagggaggcagaaattggagtgatgcatccacaagccaagtaatgccagcacccaccagaagctggaggaggcaagaaactgcttctcccctaaaccccccagaggggacaaggccctactaacatcttagtttcagcccattgaaaacaagtttggcttcaggctccagaactgtgagagagcacatttctcgttttaagccaccaagtttgtgttgttacagcagtcacgggaaatcaatacattcatattaacatatttttgaagataatataattttctaaaacacaattgaggatgtcaagcttttgaagtgttctgaatcaattcaataactttgtcgtatttaattttgatgtaactgaaatgaatatttaaattaaaattttaaagcactacatttttcagggtaaaggttgacaatcagcacacattacagaacaacaagatggtgagcaatttgggcatgcctatgtatcattttgacatacgcgtgaggattttcattggcctcaagtttgcagctgaagtaaaagcatcgtggatgaattgagcatttttattattatgtcctgccagcttccagaaatgattcaaaacctcttggagctacctaatctataaggctgttaaaggtagaagagcaggtgcctagaggtgagctgtgacttgcagagtgccaagccagttttccatgcagtctttatcatcagtggtagctcctgacaccacagaacttgaaattgccctcaacccttcctttacaaatgctattttaaagaataatcttacataggcactccagatgaaggtggacctgtgaccataacttcctctcctctattcgtgctttttaggtcgaaaagtccaattagaatgcatctttt

SEQ ID NO: 42298 - DNA, 1029 bp, Homo sapiens
atacacgtatgtatgtgcatgtgtatgtgtgcgcgcgcatgtgtgtgttgaatgtgagggagagagagcatgaaaaaaacctcattctgatactcaaaacctccttctagggtgtggtcaggtggatatgaattgtttaacaacatctgagccacatttctcagccagcttctcctagaagcagatagtatagctcttcaaagcatggtctctctagtcacaccaacctgatacaggattccagctgccccactttctagctgtgcaaccttgaacaaccagtttgtcagtaaactggttataaacctgatattgcacacatgatatcaataaaggatagcttattttcttgatgcctggctaaaatcgacatatgctggaagagcaaaggttactgcccagacgctcttctctgaattcaggatgttgacaagttttgtttgacccatcttatttagtttttgttttaaatttgaattaagtaattttttgtagaaatttgaattaggtcataggattaaggtactttcacaggaaatccaggtattctccagttcccttagtgaaatgaaagctacagcaatactggggtcctgcactgtgcatggcagcctctggcagaagctgagcagtcgctgctctctgtggacagggccttgtcacattcagtcctgccttctttctccccagccctctccctcagtcacctgcctgactgcttctagaagaattttaatttgcattaccattctgctccaggaaggtagagtaaggtaggaggaaaagcagaaatcttgaaactgaagacgactctcttctactttttaaaaaggttagtttaacatgactttttatttaatgaagtcatgataatttgtcatttacaaggatccttcaggtctatatagttaattaaacaaatatgtaaggagtgcctactttatgtactttgataaaaggaatataaagtaaacaaaaattttaaaaaagacatgacctctttacttattaacacttagagtccaatga

SEQ ID NO: 42299 - DNA, 1073 bp, Homo sapiens
gggtgcatatctggtgccgggcacatggtgcactaagtatccagagatcaacatcatccactctgaggaccacaatgcgtagacagatgagtaatctagcaattaccgggtagtggttaggttctaaatagaagtttgcataaagcactcagacatcacaaaaaggtagcatgtaacttggaccagagagtccagaaggtctttcaggaaaaagtgacccttgtactgaagctacaaatagaggtaggagttcagctggcaaaattagggcagagcgttagggaagagaattcactatgagaagacacgggggctgagcatcgtgttaatttggagagctgaaagtgttctgatataagcctctccttataaccgtatactctactgtcactcccaccctttctttacttggcaaaccatgactcagtgttccctctcccactaaaccaccctctcccggtagcatttctccctgcacccagggagactcaagcctcccttctttaggctctgacctcactctcccataccatcagctttgttttgttgaaggccattcatcaccacccctgttcatctgcatcactagaccaggagcacttcaaggcagagtccaagtccttacatcttctgtgaggagtacaataagtgttagccaaataaagagctgaaccaataaaagaaacaggagatggacaagccacagacacaagtttagggtaaatctgcttaaatggatgtgtagaagacttttcagtatatcacagatggaaaggggcttcaagtgtcatgaacctgcttatttacagagctggggaccacattttaagtgttcgtggcacctcagttgcaattttctttttgtttcatttgcaaaagataatttttgacttttagaaaacattctttttcttctaacttaaatgtgtcttgttaatggaacttgttagtgaattaatagaaatgaaaatctggcatcagagaccatacatactctccttagtgcacaggtagccagtcattgctaatcatacattaaacccaaacaattttttccaaaatggcttttacag

SEQ ID NO: 42300 - DNA, 1046 bp, Homo sapiens
ggtagatgaattatctctcaaaacacaatgaataaaggctgggagcatggccatgccatatctgttgtggtgaggaaaatgggaaggggattctgaaagtaactggcctttttcttttagacactgagccacatccataccctaaggcacagatcccatgttaaacggttatttccatcatggcagtgacatttactttaacaacagatttcattatgtctttaacaacaacaaaaatgcactgaaaagcctgaaacacacacatacacaactcccaacacaattatttttctgtcttctctgaaagaatattttaaaatcatttcaacatctttgggatttcagaaaaatctagtattggtttacaatggaagtctcatagagtttatatatatgtgtgtgtgtgtgtgtgtgtgtggttattattactcagactataaatgagacaaatgaatagaaatattaaagggatcaatattctggccctcattatattgttatacagcatatctttgtgtatctctatgtgaattctctgctagtcctcagctgtatttaatccctcaagacttgatatacaaacataatgccaaatagagaacttcccttaaattattcaaatctccccataagtgatttcccactcttcctgcaatagaaaacatttgatcataaattcaattaaatcagccatcatctttgtgatgtttgtccagctaaatcctttagtgactaaaccaataaacataccagctgtgagtgtgcatgtgtgtgtgtgagtgtgtgtttatggcacaactattgcaaaagaatcgatttgaagtaaagatgaagggtagttctcatttcttaggccagattttaactacttcactgaagccagggcttaaaagattaaacttttagggataaaatcatgtgtacttctttaaatgctttggcttttatttgctaatttagaactgagttttaataagttttagatcaaaactgatgtactttggagatgttaggaaaaggcatcaaaccacgtcaaccattcttcc

SEQ ID NO: 42301 - DNA, 1027 bp, Homo sapiens
tcttcactttccagtatggtaaccactagccacgtgtggctattgagtaatttaaaatgtggctagtgcaattgaggaactgaatttttaatttcatttaatttttattagtttaaatttaaataaccacatgtggctagagactaccaaattgcgtggtgcaagatagaacataacttctgatcagcttgaagcaagtgttttaccataatgtgttgtgaggtgaattaggattttcagctaaaaacctcctgcccaagtttttatttttgcacttatttctttattatatagctataggcttaaatccaaatcctatgactctgccccaggatttgctttctctcagaacatccgagagattttccattttcaaattcttcgattttgttgaatattgaatgtctctctcttgggtatccagaatggagtttcaaagcatggcatttcggcagcactgattctgtaggcgctggccatttcacagtctaagctctgtcactcgtcacctgtttgtatctagtgttcctaaatatagaaacacaacttagtaaatgtgctaaaatgtgtcgggctacatagaagcttgacacccagctcattaactaagttggttttgtttgtgtgtgtgtgtgtgtgtgtgtgtatgagcagctgtttacattgactacaaataaagcgtaggtttgtatcatcctttttgaaatgacctcaatattattttgaaaatgttcttgtcgccaggtgtggtggcttaagcctgtaatcccagcactttgagaggccaaggtggacagatcacttgagtccaggagtttgggatgagactaggtgacatgacaagaccctatctgtaaaaaatttatctgtaaaaaaaatattttatttatttatttatataaatatatatgtatatatttttatatatacatatataatttatgtatacacatatgtgtatacatatatgtgtatataaattatatatacatatatacatatataatttatatacacatatgtatat

SEQ ID NO: 42302 - DNA, 1047 bp, Homo sapiens
ttttaggctcagctatgtgaaccatgcagaggacctggcctccaagctcctacaatgttccccaaagaacagactgtcggcacaggctgccttgagccacgagtattttagtgacctgccgccacggctatgggaactcaccgacagtgagtatgacaaatccacaacatccagtccaagcagacacatcattttattttggcatctgtatgtaacgtgtatgcagagattcacatatttgtgtgtccacaaacataagataatgtatgtttgtatgtgcattacaggtgtgtgtgtgtgtgtgtgtgtgtatgtgtggagagagagagagagagagagagaacaggggaaggggggccatgtgtatatatatttagtggaatcctgccattcatttgctagcttaccagacacaggaagaaaatggattccttttttgctatctctgctctgcagtctgcagctgtgcatctttgtatttgattatgtgtgtgtccaaaaaaatgatctgaacagtcataaaggaaaaggaaaatatgatttacatatttagtgctttatgcatacagtactttttaactggctgcagtacacagaggagccgatgattcatttctgtttgattctcagagaccatcttggttgtaacaataaccttaaaaagggctgctatgcagcgagctgaggagcagagttggcaattggctaatgcactgaattgacatgtacagactgaagacatgtaattcattttaactgcaaatgctcttggtatttgtacagacagctcttctctgaatcttttaaaacacattcctgggtgggttttgttttgtttttataaaagtctacatatttatacagccttttaaaattacattttaaatatttgggggaggatttatggctgggaggatctcagatttcttccagagtgtgaaacagaattcttgtgaaattttgtaaaaactattgccgtcagaatatttttgttcaatggtgatatgttctttccaaagaacaattagagatatttcttctatactc

SEQ ID NO: 42303 - DNA, 1044 bp, Homo sapiens
aaataagcaactctagcaatattgccttcacattcctaccagaagtgtttgcgtgtaactgaatcattgctgcctcctttggaggggatgtagactccccagtttagtttagctcccatctgggccacttcacctatttctgattcctgtctggctcctggtacggaccttatcatgatgaagcttttctctttcactatcaaattctttgtcctctactattgtgcagataggaagcataatctaaacttggcaacctctagccatgtcagcctggcccagtcatcacatcacgtgtgctacgtagtgaccagcctgggatggcaacttctgaaaaggccatctttcttgattgccagatggaaatgcctagtatttttggaaaatttttagtgtgtgtgtgtatatatatatacatacatacatatatatacatatacattcttaatgtaacacaagtctctgaaacaaatagagaacaaatgttactgtggagaaggctttttatgtgctgatttgtagagaaaagtgtgtctttgttctgatattcagtaattaagtgttcaggccagacatggtggcacatacctgtaatcccagcactttgggaggccgaggcaggcagattgcttgagctcaggagttcgagaacagcctggacaacatggtgaaagcgtatctctacaaaaaatacaaaaattacctgggcgtggtggtggcatgtgcctatagtcccagctacttgggaggctgaggtgggaggatggcttgagcctgggaggctgaggttgcagtgagctgagattgcaccactgcactccagcctgagtgacagagccagaccctgtctcaaaaagtaaataaataaaataaaaagtgttcaagtaactcaaaggatatatgcagcattgcagtagttcctcttccttcctccctctcttagtttgaaatatgttaacaggctaaattgatagcatggtaaagagagcaaattttaaactgtacacattgtcttgtgggtaatctgccagtatcttgagctac

SEQ ID NO: 42304 - DNA, 1029 bp, Homo sapiens
tgattattttcaacttagcatattatctttttcctcttcgtcattttacttcatcattaatgctttgaataaatatcattacaaaaaaatcaacaaaataatttaatttggatgtagtgtgaagcatggagcttattttacttcttctttcctttatgaataattttatcttaaacataagaatatcaaagcattaaataatgctcatcaactaagccaagtgcccagtaagtctagcttttcattacgagtaccaaatattactatctcacaagtccacaattaaggggtcagcagttcttcatcacatttagtgtgtgtgttcattatacaaataataaatgcattcatattgtaaagtatgcagataatatataagaatatctagtaaaagttaaagttctcaccctgcagaaaatcttgatctcttcactattgatagtttatgtgtatcttttcagatcatttttgatatgcatgacaattaccacttaaaatttcaaagaatgttattacttgaattttactcagattctaattatatgaaattcagttcacccaatctgaaagtgatattcatatgagaatcccaatttttttttcaccagatatttggaaactttcctattgctagaagaaataaacacaaaagtagaatgctgtaaagagtgtcgatgtatccagtactactattgatttttcaacatgaaagcatgaattttcttgtatggcttgtggtatttttctcactaccttatcaaaaatgttctactgtgtttcaaaaacaaacctgtccttctgcctacatagcgtaagagttaactgccatcacaataccatagaaagagtatgggttttggagtaataaaacctgagtgttagtttcaacttcaccctttaatagctgtgagtcgttaggtaaattatgtgtattctcatcactttcctcatttcctcatcactgaataaggaatagcaaaactagccatctccttaggattgttttcaagaacagatacattgcagttt

SEQ ID NO: 42305 - DNA, 1117 bp, Homo sapiens
gcctgcagtgtgtgcagtactgtgccatttcacaggcatcacatttgccttcagtgaatgtgccatagggaactctacatatgagaacatatttcaccaccaagtcttctgattctacaatttcccctttattcattcaacaactgtatattgagtgcctgagccgggcctgggctgtgctctggggacacagcagtctacaaaatcaagcttaatcaagaacatactgatgccacctgtcccctgacttgctccttcacaggaagtgtcttcacacctctggagggactaaatgaagtctctggttcaggaagtcattgtgggtaccaggtctccattctgttgattaaaatggtaaaagaggagagagccaggaaagactacatcatttggatatagttgtaggaacttcatgcctgggcaagcagatatcaggacagacctaaagctcccatttagctggagtgggcaggcttccaggaagagctggaatctcaactgctgtttaaagtacatggaagaaaaaggacagttttgtcatctgcttaataaaaatgtgaaggctgatagtggggttgaggattggctgaggatgcctgtggacaaatgtgcttgaagtactatgaggatgagtgctttctcttcttgatgtcatggtcctcaaaaagatgccagtgcctagatcagaatgcatagttacatggagcagcatgtagagcacgttcttcgtttccctgaaagaacaagggtaggctggggacaaaggagtttgttcccatgtaattatttttgctagggtggtgacttctttaagaagaggtttgataaaggtatatctgcacaatcaagcaaggatgaggagtggtcaagtgagccttatggagaactgcccacaagcagcaaggatttgagataataactgttgggatgtagaggtagcaaagggcctatgtgtggtatccatttacccccaggcctctcctggaaacttaaggcttttgtttttgaggacagagaactctcaagaatagaaggttacccctacctcataccatatacaaaacttcactcaaaatggaccaaagatctaaatgcaagggctaaaactataagactc

SEQ ID NO: 42306 - DNA, 1061 bp, Homo sapiens
aagttcccggtgcacggcgccggcgagctgtgcgtgggccagaacacgtccgacaagggcaccccgacgccctcgctgcttccagagttctggaccagcaaccctcagcacggcggcggagggcaccgtggcggcttcccggggggcgccggcgcgtcggagcgaggcaagttctcctgcccgcgcgccctcaaggtgccctcctacctcaactaccacttcctgggggagaaggactgcggcgcaccttgtgagccgaccaaggtgtatgggctcatgtacttcgggcccgaggagctgcgcttctcgcgcacctggattggcatttggtcagtgctgtgctgcgcctccacgctcttcacggtgcttacgtacctggtggacatgcggcgcttcagctacccggagcggcccatcatcttcttgtccggctgttacacggccgtggccgtggcctacatcgccggcttcctcctggaagaccgagtggtgtgtaatgacaagttcgccgaggacggggcacgcactgtggcgcagggcaccaagaaggagggctgcaccatcctcttcatgatgctctacttcttcagcatggccagctccatctggtgggtgatcctgtcgctcacctggttcctggcggctggcatgaagtggggccacgaggccatcgaagccaactcacagtattttcacctggccgcctgggctgtgccggccatcaagaccatcaccatcctggcgctgggccaggtggacggcgatgtgctgagcggagtgtgcttcgtggggcttaacaacgtggacgcgctgcgtggcttcgtgctggcgcccctcttcgtgtacctgtttatcggcacgtcctttctgctggccggctttgtgtcgctcttccgcatccgcaccatcatgaagcacgatggcaccaagaccgagaagctggagaagctcatggtgcgcattggcgtcttcagcgtgctgtacactgtgccagccaccatcgtcatcgcctgctacttctacgagcaggccttccgggaccagtgggaacgcagctgggt

SEQ ID NO: 42307 - DNA, 1048 bp, Homo sapiens
tagtgtctaaaacctggtatgggtttggccagcgtcatggaaagatgtggttactgagatttgggaagaagcatgaagctttgtgtgggttggaagagactgaagatatgggttataaaatgttaattctaattgcatacggatgcctggcaaccttgcctttgagaatgagacagcctgcgcttagattttaccggtctgtaaaatggaaatgttgaggtcacctggaaagctttgttaaggagttgatgtttgctttccttaacaagacagcaaaacgtaaacagaaattgaaaacttgaaggatatttcagtgtcatggacttcctcaaaatgaagtgctattttcttatttttaatcaaataactagacatatatcagaaactttaaaatgtaaaagttgtacactttcaacattttattacgattattattcagcagcacattctgaggggggaacaattcacaccaccaataataacctggtaagatttcaggaggtaaagaaggtggaataattgacggggagatagcgcctgaaataaacaaaatatgggcatgcatgctaaagggaaaatgtgtgcaggtctactgcattaaatcctgtgtgctcctcttttggatttacagaaatgtgtcaaatgtaaatctttcaaagccatttaaaaatattcactttagttctctgtgaagaagaggagaaaagcaatcctcctgattgtattgttttaaactttaagaatttatcaaaatgccggtacttaggacctaaatttatctatgtctgtcatacgctaaaatgatattggtctttgaatttggtatacatttattctgttcactatcacaaaatcatctatatttatagaggaatagaagtttatatatatataataccatatttttaatttcacaaataaaaaattcaaagttttgtacaaaattatatggattttgtgcctgaaaataatagagcttgagctgtctgaactattttacattttatggtgtctcatagccaatcccacagtgtaaaaattcaggaat

SEQ ID NO: 42308 - DNA, 1050 bp, Homo sapiens
aatgaagcaaaacatggtgtttagagagagaatgtggaggaaggaacgtgatgccctgtcagtgaaactgaaagttgaatgatagctcatggaaagaggaagtgaaaaaggtaggatacatccaagtgattgaaatatgacaagaatggaacaaaaattttttcaaacaaaaacatctcttattttataaataaaaaggttcatagtaaaagctaaactatgtctacaaaatatctattataggctactgaatattgaaatgtaaatgaatttcttctaatatagctagaaaaggttatggtaaattgctaaacaataagggacattatttatattcatttcttagtaagattccactaaaattaagattagtcactttatgtaattgcttaacatccatttaaaaactataatttggaaaagctacggaatttttcaaaacttatttataaaagtggtttggtgtctggggtgtgtgtgtgtgtgtgcgtgtgtgtgtgtgtgtgtgtgctggagagagggagaaagagaatttataatactgctatctggtctggtagaaatggcactaggactttggagacatttatgtgttcatttgttcaaccaacatttttgaatgcctacgactgcagctatgaacttttacttagcaagcatttttttttccccccgagatggagtctcactctgtcacccaggctggagtgcagtggcacgatctcggctcactgcaacctccacctcctgggttctagctattctcctgcctcagcctcccgagtagctgggactacaggcgcccaccaccacacccggctaggtttttatttttagtagagacagggtttcaccatattggccaggctggtctcaaactcctgaccttgtgatccgtccaccttggcctcccaaagtgctgggattacaggcgtgagcaaccgcgcccggccgcaaacatttatttaaatgatcacaaattctgtgccttattgtctgttggaataatcttatgatgtgtacctcaacaggtgttttgaaggataaatg

SEQ ID NO: 42309 - DNA, 1049 bp, Homo sapiens
attgtacttcagcgcttttttcttcattactttctgtgtatatagacagcatatttttttttgtagaacattaacccagattgctaatagcttcatgttatggcattcttccacacagtccagattgatttaaggaaaagcagaaatggaagtcaaagtgtgttataaattgagactgaaaaacgtgctctaaaaaaatagatttaatttcttacactgtgaatagccattgtattgttttgtttctgataaatcagttgttttgggcttctatttttgaactgttaaaaaattttgatgctttttgtggataaaagtagtgcctctctttatacaactgatggggttttgaaaagtatgtaagttgccttttttgttaaacttattttaaatgctttagtatttaaagggtatatgtttttaattaatctgcatatttaaaaactttttgtaacgcgaataactacttcctgatttacatctcaatatattctcctttcatttgcccaattaaaaaaatatgtagtctctattattgctgtttactaatagttttagatcccaatgtgtattagaattatagctacaaaaagttgcaagtaaaatttaacaatttcctattgaaacaggatctcattattatgtttttaaatgtgtagaattaacactttaaataaacaggtgtgaaaattgtaaaggaatatatatgacaactattttctgtacattaacgtccaaacattatacttgtttttcataataaaaaacattttgaaacaaaatttgctgagtttagcataaaagcatctttgaattatttctgagtttcctaaaatatgcaacattttaatcttggcatatctaatcctatgtgctgttctataagaggtacactggacttctaaccactatatgtatttagtagaataatggaatcacaaaggaacaagaattccagacttatagtttgaaatgtatcataaacaaccctttcatattttaggttagtagctttggatagctatttaacacagatgagtacagttagc

SEQ ID NO: 42310 - DNA, 1061 bp, Homo sapiens
tttgagtcagatattgttgttccattttattttgctgcttactgcttatgatcttgggcagataacccatattcatctttaaatcttggtttccacattctttcaacatttcctgacttctccccacacgaccccatttaaattaaattttttctgtgtgaggctctcctaatacctttttcttcaaagcactttttatcacttgagatgatatatttctgtgtttatctatatttaatttgtttttcccacctgtattacaattcatgagagtagggtttatacctcttttattcctcactacatgtcttactttagcacaaagttgcatgcatgatgggcagtcaataaatatctgttgaataaataaactacttactacctgacatatgccaagttattttcttcacaggtaaaactctacaaccacatctcttttggaaagacttatatgaagaaatcaggacaagggaggttcccataccacctccttaaatatatataggactgctgagtttatgaaattgtgtattaacttttatctcatttatttctcacaacttgatgaaatgagagactgttattaaataatagtagactaaagggtcctactgttaagatcatatattttgacacatgtctagcacagtgcctggcacataatgaacaatgaacactcaagaaactgaagagattccaaatagttgatttttttgaattgacattataaaaacttggctttttttttttgagacggagtctcactctgttgcccaggctggagtgcagtggtgccatctcagctcactgtgacctccgcctcccgggttcaagtgattttactgcctcagtaaaatcccgagtagctgtaatcccgagtagctgggattacaggcgcctaccagcacacccagctaatttttgtattttagtagagacggggtttcaccatgttggtcaggctggtctctatctcctgacctcaggggatccacccgcctcagcctcccgaactgcagggattacaggtgtgagtcaccacacctggccaaaacttggca

SEQ ID NO: 42311 - DNA, 1025 bp, Homo sapiens
ttcttttatttagacatgacattttcagttcttacccctcaatatttcagtaggtttattcagaaatgtttctttgcattccagtagttacattaaagactgtaataattgttctttattttttcatttttatttagtgatagtttgatctttaaaagagagactcccaaagctgcttttttcttggtggcaataaagaaaaattatctttgacaataacggttattttcttttttcttagcttgcccagtttcgacaaagaaaagctcagtcggatgggcagagtccttccaagaagcagaaaaaaaagagaaaaacgtcaagcagtaaacatgatgtgtcagcacaccatgatttgaatattgatcaatcacagtgtaatgaaatgtacataaatagttctcagagagtagaatcaactgtgattcctgaatctacaataatgagaactctacatagtggagaaataaccagtcatgagcagggcttctctgtggaagtaagtattctcccagatttttaatcattatggttctcgatggaaagtagtcataacaacagtcattagcaactgtgcgcaatttgatcatgatttttatgtcctcttgaaagttttagtagtatggtaactaaacagtcataactaaaatatttgatcatctcagagagggagttttgtgagtttaatttaatatatgttgaacaactgcagtacaccaaagactgagcaccagagttacaaagatggatatgactatctctgccctttaggaaaattattctagtggagaaggcagacttaaaggtatgcagtgtgctatgattagacctttgctagtatgagagatagatgtccaacttcattttttttgtttgtggctatccagttgtaccaataccatttgttgaaaagactattcttttcccaatgaactgtcaatgaatataaaggtgagggtttatatttatcccctcaattatattctgtagatctgtatgtttagcctttgctactatgcccccaa

SEQ ID NO: 42312 - DNA, 1066 bp, Homo sapiens
aaccaagtgcttatatggtttatgacatttattttaacctcgttaattacttgactgcaactccataagtcatttaggcacattgaactcttataattttcatgaacttttatgagccatcagatttttattttttatgaaaatattcaatattaatgtttttaatttatatatttccaaattaagtacaagaataaggtattaatcataaataaggatgagttgttcttttatatttcatcaacctaatgttcaccacaaggatgagtttttatgtgaaggccattttatagtcacatagtgaaagttacctttcctctgattctttctgaatagcaatgttgttatgatgtgatacctctataaaacattttaaaatttaaaatgtacctcacttgtactttcccagatctttaagttatctgtacagatagagtaaatttttctgtgaatgcagaaagaatacattaacatagtctgtaggttaaataacttcaacaaatgccacaataaaaaaggacattgagagaagttgagcttttttcagttgaaggagtctgttaatctaatcttcatgtttcaagtcatttatttactttcatatgaaggtttacttagtgttagaagactaatgttagaagaggagataaatactctaccctttagttatcaataaaataattatctaaatttaaaaacagaataatttattgttaactattaatgatcctgatattctgttaagtgttcctgttctaactttggaatatagtgtgttttagtttagttctggtgaataatcttttatagccaatttgtatgatgttaaacttttcagatttattaatattgataagttttacatttattataacataaatatgttttgaaacagtcatgtattaatggtattttaagaattcaatacatatgagttcaagtataacatttgcttatctgaattagagaaaaattaaacagcagtggctaaataaagtactagatgaaactataaacataattattataaaatggtaactgataactgattcatgtaatactgaca

SEQ ID NO: 42313 - DNA, 1057 bp, Homo sapiens
tatgttggcatttataaatatgtaaacatatttctctttgcatctttaagttcacggtagtgagtataattatttggtagaattatttactagaattatttttaattgagagaattaaaatttattttttgctgaaagtatgtagaacttttctaaaaatactgatactttggggagattttgaggtagaagtttaaaaataagtggtgtataattaatgtaaataaatgtcatattttgcttttaaatgtagttttctggtgaatttggagtgaaagaggaaacaaatatcgttaagttgcttgaaaaacaataccaagaacaattagaagaagaagtagctaaggtaggcttatagcttatctggaagattatcttggtttatattccctttgagccttcaaaaagaacatagattttatcgatggtatgtactttataagtttcatatatagttcatctttaagtgattggataatatcaattatagttgcctttaaacaaaatatcttgtgaatttttatttgagaagagcattgttcttgatgtagactagtaattagaagcttttcagaatgccaaaacaagtctatgtatttgttgccttgtgaagaagtttggtcttccttaaaagttgggaagaagataggaaaagaaagagaaagtggttggtcctctgtatatattatctgtatctatttccaatcagagaagttttgttaggtaatgactacagatactaagggaggattatcactgagtattaattagctcctggctaagtgaaggagtttatcaatgtgagttttgctcatctctgtatgcttatccactgtgtccagagtcattctttaatattagccatataccctagtgtaacattatggttccatttgttttgtctttgtattccttttcaaaacgtgtatacctgattggcttttaatattggaactggccgggtgcagtggctcacgcctgtaatcccaccgctttgggaggccgaggcgggcaggtcacctgaggtcaggagtttgagaccagcttgaccaacgtg

SEQ ID NO: 42314 - DNA, 1078 bp, Homo sapiens
gcctgacttatgaagtgacattagaggaaaatcctaaaggaagtgagggagtgaatcaggaagatatcaggttgaggaccttttaaagaaatatgaaagggaaagtcaagagagcaagagaaaaagaaaggtcaaaaattactctaacaggtgtctttaagacacggtcaggagacttgactagagtttgtggaggctgcttgcccagctgctacctctggtgagttggaggacaattcagtttaatcctgcaactcccatattcatggtgaaatattgtgaaatcctggcacagatttgtcttttctgcagatgtaactggatacaggaggaagaaatcagggaaagacagcaagggctcacacttccggtgaatttatataggtagagttgtattgtagtgtatatatctatatatatatatatatatttttttttttttttttttttgagatggagtttcactcttgtcgccaggctggagtgcagtggcacaatctcagctcactgcaacctctgcctctggattcaagtgattctcctgcctcagcctctcaagtagctgggattgcaggcacgcaccaccacacccagctaatttttgtgggtttttttttttagtagagatggggtttcatcatgttggctgtaactcctgacctcaagtgatccacccacctcggcctcccaaagtactgggattacaggtgttagccaccatgccctgcctgtagtattcttttatcatttaatgtctgtggcatctgtagtgttatccctatttctcacctttttgtcagattggctagaggtttattgattgtattgataatattaaggattcagctttttgtttcattgttgtttttattgtttttgtttttattttcaattgctacccatatctttttgatatcctttttctgcgtgctttggacttaatttgctcttcttctgcttttctaaaaggaatttcttttctaatgtatgcatttaatgctatactcgaaagcatagcgttacagctttaaacattatagcttgtaagtatagcaatgcttcctcgtaagcaatgttt

SEQ ID NO: 42315 - DNA, 1033 bp, Homo sapiens
gaggtactgccctaaaataaagtaaaattttcaaaatgtaaatacatatatattatgtatgttacctttttcattaattattaggttattgaagaaaaaaatgaactgataagggatcttgaaacccaaatagaatgtttgatgagtgatcaagaatgtgtgaagagaaatagagaagaagaaatagagcagctcaatgaagtgattgaaaaacttcaacaggaattggcaaatattggacagaagacatcaatgaatgctcattccctctcagaagaagcagacagtttaaaacatcaattggatgtggttatagctgaaaagctggccttggaacagcaagtagaaaccgctaatgaagaaatgaccttcatgaaaaatgtacttaaagaaaccaattttaaaatgaatcagctaacacaggaattattcagcttaaagagagaacgtgaaagtgtggaaaagattcaaagcataccagagaatagtgttaacgtggctatagatcatctgagcaaagacaaacctgaactagaagtagtccttacagaggatgctcttaaatccctagaaaatcagacatacttcaaatcttttgaagaaaatggcaaaggttccataattaatttggaaacaaggttgctacaacttgagagcactgttagtgcaaaggacttagaacttacccagtgttataaacaaataaaagacatgcaagaacaaggccagtttgaaacagaaatgcttcaaaagaagattgtaaacctacagaaaatagttgaagaaaaagtggctgctgctcttgtcagtcaaatccaacttgaggcagttcaggaatatgcaaaattctgtcaagataatcaaacaatttcatcagaacctgaaagaacaaatattcagaatttaaatcaactaagagaagatgagttggggtcagatatatcagcattaaccttgagaatatcagaattagaaagccaggttgttgaaatgcatactagtttgattttagaaaaagaacaagtagaaattg

SEQ ID NO: 42316 - DNA, 1017 bp, Homo sapiens
actccatctctactgaaaatacaaaaattagctgggcgtggttgcgggcacctgtagtcccagctacccgggaggctgaggcaggagaattgctttaacccgggaggtggaggttgcagtgagccgagatggcgctactgcactccagcctggcgacagagcgagactccgtctcgaaacaaaacaacaaaaaaaagaaagagttaatttgaaatgaaccccagtcaagaatctttaatagtttatattttcctcttagctagtttattatatgcctcaacttatcagtagaagctgtttttctctctctcattatatgcttcgtcaacatagctttatggaaattcatttgtctttctgacttaggttggaagttaaagataagacagatgaagtacatttgcttaatgacacattagcaagtgaacagaaaaaatcaagagagctccagtgggctttggagaaagagaaagccaagttgggacgcagtgaagaacgggataaagaagaacttgaggtactgttatctttgtctttaaatgtctggaaaatccagaatgatagaagagggtcttaaggctttcctccatctaaaatgtcaaccttagacttcttaataagatatggtaagttgttcactgtgcattgaatactacataaaccgtattatgaggaaatgctaatggagtggtgattggttttttttgtttgtttgtttgttttgctacatccaaagatgcatatagactgctctgctgcaacatgttttgggcatgtgaattggtacacacagataaatatggcaatcctgtcagtttaatacagaggtagttttggttcctgttttctcctagggaagaggaacagggatacttttctggagccctcactgcttaagaacatttaaagtgaacattggcccctttcagagagacacacccctgctttgcaaggctctcagctcaaggcaggctgctttgagtatctgcttttaatagaggtggagtatacatgaag

SEQ ID NO: 42317 - DNA, 1028 bp, Homo sapiens
ccttcttttatttatatttcatgattatgcactaactactgaacatttaagttaataaactaaataatcagttctattttctaataaagatactaccaacatagtattaataaaggcatggttgtatacttctgaagttttttttgtttttttttttttttttgagtcaaaagtctcactctgttgctcacgctggagggcagtggtgcaatctaggctcactgcaacctccacctcccgggttcaagcaattcgcctgcctcagcctcccaagtagctgggactacaggcacgtgccattgcacccagctaatttttttgtatttttagtagagacagggtttcaccatgttggccaggctgggcttgaactcttgacctcaggtgatctgcccgcctcggcctcccaaagtgctgggattacaggcgtgagccaccacgcccggccaagtatttttaataatattaacaagttcttaaatttgattttctcgtaccaggatctgaagttttcacttgagagtcagaaacaaaggaatcttcagctaaatctacttttggaacaacagaaacaactactgaacgaatcccagcaaaaaatagaatcacagagaatgctatatgatgcccagttgtcagaagaacaaggtcgaaacttagagcttcaggtacttcttgaatctgagaaagttcgaattcgggaaatgagtagtaccctagatagggagcgggaattgcacgcacagctgcagagcagtgatggtactggacagtctcggccacccttgccctcagaggacctactgaaagagctgcagaaacagctagaggaaaaacacagtcgcatagtagaattgttaaatgagactgaaaaatataaactggattctttgcaaacacgacagcaaatggaaaaagataggcaggttcacaggaaaacactgcagacagaacaggaggccaacactgagggacagaaaaaaatgcatgagctccagtccaaagtggaagatcttcagcgccagctg

SEQ ID NO: 42318 - DNA, 1031 bp, Homo sapiens
atttccaagggtatagcaaacaagctgaccaagtgttatttagtgtatgctatggttagatattgggaaaagtattgactaaaattgatactctgatcattatgaaaagcttaacagtcttcatgacaagatacatttatacatacccaatttattgagacctctgccacaagcattgtattggacattcttatgttgacttagtagcatctttgaattcattggagagttgtctctttctcatcccaagctccaaagctgaagcttggaggagatacattatgtgtgtacaagtgacccacctttttggggaagggagtggaggcaggttggtaacttatatgcatatttctggataacttgattcatgtacatatttttaatcctttaggtacccaggcactccagctgatttcaatcctggttctttagcatgttctcagcttcagaattacgatcctgacagagccctaacagattatatcactcggctagaggcactgcaaagacgacttggaactatacagtcaggtgctctgagtttaaccacatcttggcagcaccacagtgcgagacccacagctcccctttctttgaaattctttcacactcattaggataatcaaagcttccagtttagtgcatgagctaattattaagttagccaaagcttaaactcttgtaaccagcagagaaactgactttaaataatttaagtgaaaatatgatttatcaccccagatcccactcctcccaaaaatgatttcctactatgttcattcagcggactgatgacacaaaatgcacaatgagcaccagtgtgcaaggtactctgagtctacagagcctaactggagaacgtattcctaagtagcgcatggcagaaagtggtaaggccgtgccgcagcactccagcctgggcagcagagcgagaccctgtctcaaagaaaaaaaaaaaaaaaagaaagtggtaaggcatgcaaatcgggtggagttaaggaggaagcacttactttaagcacttaatgtaa

SEQ ID NO: 42319 - DNA, 1007 bp, Homo sapiens
ttcaaaatctcttaaaagtcagcttaagtatatgggctgggcgcggtggctcatgcctgtaatcccagcactttgggcggccgaggcaggcggatcactaggtcaggagttcaagaccaaccagttcgagactagcctggccaacatggtgaaaccccgtctccactaaaaatacaaaaatttgctggacatggtggcatgtgtggatagtcccagctactcaggaggctgaggcaggagaatcacttgaacccaggaggcgggggttgcagtgagccaagatcacaccactgaattccagcctgggcaacagagtaacactccaccttgggggtagtggggagagactcagtttaagtatgaagaggacattttaaggaaaaaaagggctttaaaaaaatggagaataataataatttcctttgtgtgaactctggtgggtctgatacaggtagcaatgtaatttgaaatcagttgaatttcctgtttttctctcataggttcaactactcaatttcatgctggcatgagaagataatcctttgaaacatcattaattgaagtgattttaaatagatttccttttgtaaatcaatggttcttttgtgcttttgtattgtgaatattcaatgggaccaatatgaacacagcttatgattgtatacaaatcccttgccagcacatgaaaacaaactggaatttgtatatataagcattgtgtatgtattcatgcacaataattattgaattacctgtatatttgtggaatgctaatttaaaacattaaattataaaccttgtgtatttatcaaatgggtgaaaagattaaacttttacgcattacaatactgctgaatgtgtagctcgaggtgtcctgcacttttcttataaggctactgaagttacatgttttgcctaatatattctactggtgatgaagacagataatatcacttgtagagacctatttttgtataatggtagaagttttgaattttatggggtat

SEQ ID NO: 42320 - DNA, 1049 bp, Homo sapiens
tgtttcagattatcttaaaaccagagttcactgatctcacattttaaaaagaaaaaagtttgttaactgttttaatcaatatgagtagtaacaaacatccctaattggattctagagaggaagcagggaaggccaggtgcggtggctcatgcctgtaatcccagcactttgggaggccaaggcgggtggatcacgaggtcaggagttcaagaccagcctagccaacatagtgaaacccccgtctctactaaaaatacaaaaaattagccaggcatggtggcaggtgcctgtaatcccaactacttgggaggctgaggcagagaattgcttgaacccgggaggcagaggatgcagtgagctgagatcgcaccactgcactccagcctgggcaacagagcgagactccatctcaaaaaaaaaaaaaaaaaaaggaagcagggaacaactgagccaaaacaaaattatcccctaaggacttgactttggacttccacataaatgtgaccttgtagaactagatacatatttatcaggtaaataaatatgtaattatttagtaattagatcaagatacatgagcagtctttagcattaataattacattatttttaggaactcttatcaaatatggtcctggatctcttaatttcccatatgcagtgattttagttaaaattccaaaggatttctttttcctataatatctccatttctgagtatcatcataccaaaacaattagtattctcttattcaaggctttagatgttcgattattccctacccttccatcctcacacacacaataattgcccagataaataataataaactgtggtttccaagtatctcactgggatttttattctttataccttgcaggactagtccaagatttgaataccctgaacttatttggcaagagcgatgagtactcttaaaattactatctggaaattatattatttagaatctgccaattacctagatcccccctcaacaattgtttcaccaaggaacttcctgaaagcacatgtataagtatcataa

SEQ ID NO: 42321 - DNA, 1030 bp, Homo sapiens
tgaccctttagctgaacgcacaggaaccagagatgaaaacagcagagaaactgctagccaacctacagagttgtgaaaaataacatactgttttgagatactaagtttgggatggtttgttctgtagcagtagatatctgaaaccttaactgtgttcattttggacatatggatggtctctagtattctattatgaataatattgtaattaatatctttgtgcatagtatataccaatttaattttaatacttaatgctaaattatttttcagaaatattgacacaattctaattgtcaccattaatgtctgagagtaattattttctctataaactgtcactgaatgcttttcttttacaataaaatgagttttaaaaaaaagtttcctatggtgcatttccctaactacttatgaggctagctacttatgaggctagccatctttcaatatatttgttgggcattttgattttcagttctgtgaattgcttattcatatctttactcattttttcttgttggattttttcccttactaatatgttggtgttctttgatatccttattatggatataaacctttaacttaatttacaaataagttttgtaagtttgcttttgttttagtttatggtatcacttattataaatttttcttttggcatttcatgtaatcattgctatggtttggctatgtccccacccaaatctcatcttaaattcccacatgttgtgggagggacccagtgggaggtaattgaatcatagcatgagggcaggtctttcccgtgctgttctcatgatagtgagtaagtcacacaagatctgatggttttaaaaaggggagttttccttcacaagctctcttctctttgcctgctgccatccatgtaagatgtgacttgctcctccttgccttctgccatgattgtgaggccccagccatgtggaaccataggtctattaaatctctttttcttccctgtcttgggtatgtctttatcagcaatgtgaaaatggactaatag

SEQ ID NO: 42322 - DNA, 1057 bp, Homo sapiens
acctgtaatcccaacactttgggaggctgaagcaggagaattcacttgagtccaggaattcaagactagcctgggcaacatgatgagacctcccctctacaaaaggtaaactaaattagctgggcgtggtggtacatggcggtagtcccagctgctcaggaggaggctaaagtaggagaatcacttgagcctgggaggctgagggtgcaatgagtcatgattgtgccactttactccagcatgagtcacaaagcgagaccctgtctcaaaaaaaaaaaaaaagtcattttggtaaggcttttgctggctacccttttagacattgcagcaccacaaaactctccttgctggctttatttgagaaagaaacaaaaagcagtgattttagtttattttgttcctgctgcattccccttcgcctacaataatgcctagcacatgataggtggttgataaatagttgttgcaggagtttattattttagctgtgaagaagagtattcctttcctctgagaagtacacttgaaaaaatcctgtaactctagcgtagactaccagttattgacttccaacatttactctgctttcctttttctaaaattgataaagtccaaacctctcttgtttggatttgaaattactatgttttttggccgggcgcggtggctcacgcctgtaatcccagcactttgggaggccgaggcgggcggatcacgaggtcaggagatcgagaccatcctggctaacacggtgaaaccccgtctctactaaaaatacaaaaaattagccaggcgtggtagcgggcgcctgtagtcccagctactcgggaggctgaggcaggagaatggcgtgaacccgggaggcggagcttgcagtgagccgagatcgcgccactgcactccagcctgggcgacagagcgagactccgtctcaaaaaaaaaaaaaaaaaagaaaagaaattactatgttttttgtttgttttgttttgttttgttttgttttgttttgtttggcaacatactacacctggcataaatcctttcattctctctaagg

SEQ ID NO: 42323 - DNA, 1049 bp, Homo sapiens
aaagacttaaaaactttaagtagcttgtaagctagtaagttgtagagccaggattcaaaccaagatttgtgttcataattttctcaatatactataaggtctttccaaaatgattaaacttccaaaatctgtgatttcttattgtaaaatgtaggcaggattgtatgggaatgaaatgacaggaggtacataaaccacaggattaggtttttacacatgtattcttcaagctttattattaaatatgttcatttaacaacattatctaagatttaattctgtaatattaaacctgtaagttgcatttcttcaaagaagagcaatgttaatccattggttaacattttgtcctgtttttgtgtttacacagtacagttttacagtcagtttttgaaaggttggatttcataaagataaatgatactgtgttaaaagaggtaaagcttatatttcccactttccttaaaacatgtcttaacaaacctgatattttgctgggatttgaagggacctctgttccttacttgagttctgaaccatgtgagtagccaaaacagtaagcatatccagttttttcttcccagatttggtaatatctctggggtagctaaggtcaggaatattattgcaaatggaaaagaagtattactgtcaatacctctctcaagtttcatacttttgtttagaagttagtgtaaaaaagttgctgaaacaccgaagtatgatagattgggttctggctgatagttaccattatagtcatcaaaatacatacatacatacatgtatagatatagtttacttactcttatgttcagtgttacactgttgcttatgggtataatgagcacacttcccagaatatccaggacaagtatgatttcaagtattacttaatatagttggtctctgttaattatgtgtcttaatttgggatttggaaaatatggacggtattatctgtgggaaatataaagaggtataaaaccattgcccacaagtttacaatttgactggacaaataaaatattccttaagacagtgaacgt

SEQ ID NO: 42324 - DNA, 1056 bp, Homo sapiens
tgagatgtagtttggtcagtagaactctgaagttccccaggttattatacagccaaggttgagaactaccctacacaaagcctatgtcgaacactgtgcatattattttcacctgtgtttgttgttgttattgttgttgtttgttttgagatgagatctggctctgttgcccaaactggtttcaaactcctgggttcaagtgatcctcctgcctcaccctcccgaataactggtattataggcatgtgccaccacacccttcacctgttttttaaagctatgttttagtgtccagcctcccactgaattaatagagtaacatgaaagactgttgtattctctgcctctaagttttcctccctctattctatcttctacattgtcacaataattttctaaagcatgaaataattatatcattgccctgcataaaagcctttaattatctgttcttttcaggttaaagtgtaagttccttatctggtcccaacctattttttcttttatctcttgttaatctaatgctagagactctgaactctattcatacttaactgttccttgtgtaggcctttttttcatacctgcctttgcatatgctgttttctttgtcactaattttcatcatagctcaagaatagatccagaaacaacgtttattggaatagaatgaaactagcatttattggactcattaactaaggactgcagtaggtactttaagtaactcttataatcctcacagccatacctaagaaatggtcattttccatgctgtacagatgggaatctgaggcttttaggggatgaataacttgcttaaaattacataactagttgtaggcaaatacggtattttgaacttcatgtccagtgtttgtttctatgaccttcccccacccacttcacattgcttcagtagtaaataaattagcaatcacattgcccatgtgatgattatcataacctctttccagacatagtatgcataaacatttgatgttttcagacttaaattctgtatagcagaaagaaataaatttaatggtcttaaat

SEQ ID NO: 42325 - DNA, 1050 bp, Homo sapiens
acaattaacagacattagaaagtaaggtgaaatggagaaattggttgaaaggaagagagaatatattgagttttcatttagaaggctagatattgacatcctagcttatccacatgaaatggtaggcaggctgttgataattacaactaaagtgttagggaataaagaatatagacactcatttagaatttagaattgagtgttatctacatagagttgacagctaaaagcaagataatgtatagatgagagatgcaaggaaaagactttaggttatagataaaataacagagttaaagtcacagcatcaatttgaagaatgcctgtgttcaaagagatgagaacaagaagtagtgcctatgagggaaacacaaaaaatagagaaataaaagaaccaagatgatacaatgtcaaagatgcaagagaagaatttcaaggagaggagctgtttaatcatgtaatgtgctgcagaaagctaaaggaattggggggactgagaaacgctgatagatttgagagttaggaggtattaatgactttctggaatattgtttcattaaaatagtccaggtagaagtcatattcctgggcataattgagtcatttgctgaggaaattgagagacagttggtatcaataactaatttgagaaatgtgaaggccaagaaagatagaaaatttttaggaaagtaactagaaggatagcaggattaagttataatcctgagtaagtcaatccagagtcaccacccatttagagggtgatcaaagggatggggtagggtttgtcttgaatagtaggggttacctctcttaaagccccctacccctcttcctctggaattgtgaagggaaagaaaggcagaatagaagaacagatgtgctgcgatcatgataatttggtttcttttaaggtagaacattttatgtgccaccaagataggcttaaaaccatatttaagtaaaatattcagtcctcctattaagccctccttagctaatttgagactgggaaagcagatacttagttgagatgctttggttgaagca

SEQ ID NO: 42326 - DNA, 1022 bp, Homo sapiens
cttccatgccaaagataacatgcaggtggattttcatagccaagtctaatgctacaaacatggatccttccatttcataattgattatgagtttctctacaggtgccaaatggcagcaatgagatacaggtctttatggttccctcaccccaactgcagtcaaactcattagggagcaccttgcaaagatagtttaccaatcattctcacccaggttctaataatggtcagcagttaccttcaacgatgacttctcacacatcccctcttcacacacatttttttaaccccccaatgaatgaagtccacattctggcatatccttttaataaggttccccttaccaagattctgttagggtacagcttcttaaattttgttgtctttgcttttgttaaggaagactagggcattaagttaaagatgatttgtcttgttttctaaaatttaatattttttgtgtggtaatatctgttgcaaagtaaaccaaatcctgattttgaaagttatcccagcatgcattttagaaataattttctgggactctgaataaagaactcaagaataaagtcagctctttagttctgcagcagtcaggagcagatagtctattttgtgtttaggtgttggtaacctgtgaaacagagagggtagaaatagtaatagatcctgctatggatatgataagtctctggatttactataagttccccgtattgaataaattaggtaatataaatttatcagtttccacagccacattggttgtactttaggctcattgcttctcaaacatttttgtgcaaaaagaatctcttggagatcagaatgacattttgattcagaggcctgggcttggaggggtttggggatgaggctgagattcttcatttctaacaaattcccaggagatactactggtccccagaccacacttgcagtaaaaaggttctaggtggtaaatagcagctgctaagaccttgccctcggaatctagaaggtggctgccagaatgacaactt

SEQ ID NO: 42327 - DNA, 1296 bp, Homo sapiens
gcaaacatatatgtatattgaatttttaatgcaaaagtaagatcatgtcatatattgtattctatattttttcaacttaacaatatatcatgaacatctctcctaagtcagaacatacaatctacatattttaaacatttacctattgctaaacttctaagtaatttatatatttttacctttaaaaacaaggctgcagtgaatatttgtctgatatatatcttctttatccaattgtgccattattgtagttaaaaatacagattctagagccagactgagttcatatctttgcctgatggctgacttactatgtgaccttgagcagattatttaaactctctgcctcagtctcttcttaaaatgaagttaacagtccctacctcataaggttatagtgatccttaatgagttaatatatgtataagctttgaccagtgcctggctcattttcaacattagctaattgtctgctgctataatcatgattattacttcgtagtcgtcattattgcattgtttacacattttaaaagtatagttcctatatgtctttagaaattgatttgatgggccataagattttaaactttgtcagatgctcttaagctgtccggaaagattatattgatttacttttatttcattagtatattagagaatctttttctccacattcttgctagcattgaatattatcagtgttattatttacccagtttggacaaataaatggtaccttgtttatttctctgattatcgtgtaaattgactgttcagttgtgcattttctatgaagtttgttttcttaatgctttctaagagaactttgtgtatttttccatatcctaagttttttacttatatggtattcagagttataactttttttcctttttgtcttctgaatttgtgacttgctaatactatgatcacatgtccctgtatttttctagttttgtagattttttcaacccatattggatttgttttgtctactattttcacaatgtaaagagtaatactttcatactcaagtaaatacctatattacctggatgtttataacagtactatttgtaatagccaaaaggtgaaaacaactcaaacgtttatcaactaatgaatgggtaaacaagatgtgagatatacacacaatagaatattactcagccataaaaaggaatgaactactaatacacactatatataatatggatcaacctcagaaacattatgctaagtgcgagaagccagacacaaaaggtcacatttgaatgattccatttatatgaa

SEQ ID NO: 42328 - DNA, 1135 bp, Homo sapiens
ctgaaccattaggaagatttatagattgtatccttgaaaacattcattcatttttatacaggaaaatagttttgagtattatactgtgttatcaaatataatcccaaggtaatgaagttgatgtagattaagcagacggcataaatatttagcagtatttattaaatggagttgaattttaagaaggactatgttaggaatacaaaggtcattttctgagtatttccccagtaataaaagtaacttatgtaattgaatattacctaatgaaaaaatgaatataatttacaaaatatgtgacaggctaatttgcttgtgcttagaataaaattatattgaagcattatttttaactcctttggaggttcatcatcttccaagcaattaaacattcctgttcccacatcttctcttctcattctgttctcttcctgggaaatgttaccttctcccaagacttttggaaataatacatttctcccccctggactagacctctcttctgagctccatatttcatactgtatgtaattgcctatgtgaaaatccttccagtctatctcaaagctaccttaaactcatcgtgtttaaaactaagatcatgttcttggaactgaacctggttctctggtgttccctaactccatagatggcagcaccagccaaccaactgggtattcgaggcagaaacctggaacaccaacttcgacatttcctctcccatcctgtcatcacttaattgtcagtttcacctccccaatcttaaacttctccctttttcttcatttccactagctgctatcacctctcaactacactacagaagaaagtcagaataatcttatcaaatctaatcatgacaacctattcttcctatctctagtcccgatttttcattgactgcctatcactcctaaactgaaaatggaagtgtttatttttttaaaatcctgcatgactgagcccctgcctgtttctctagccttatctcatacagtgcttcccctctagtcccatgctatagctacactgacctttttaatttcacaagggtgttaccctccctcctgccacaggcctttgaacatgctgtattctatctttctagaatgtctttcccttccccttttatctg

SEQ ID NO: 42329 - DNA, 1029 bp, Homo sapiens
ttggtttcaaatctctgtgtgagcttggacaagttatataacttccttcagtcttgatttcttcgcctaaataataattgaaaagtttgctgggaggaataaatgaaattatgtaaaacacctagcaaagtaattgaatgtattagtttgttgtttttaaagggttaggtttttatggctctagacattatagtatgttttacttggcaatttttaaaatgttcacagtaggaagataattttttttagttaagccaggttcaagatcacttaatatagaatttatacctaattcactaaaactttatttataactctaatttcttcggaagtttcttctgctttcaagctgtttattaaatgatttttaggacctgtaattggcattttgacatatctatagtgaactatgtaatcattttacaacttgatgccagtgaggacagttaaaaaattatatatacttttggaaagagtaaagaagctaaattaaacctatgccagcgaaaatgtagtgaattccaagagtgatttgtgagtgacctgttttgattgttagtagaaagtactggaaattttgaccatactgctagatcttgacatggttgtaagccatgatcaattatgaaagcttaaattttgtgtaaaaacgctaataacaagaacatacctagacattcatttgcagttactacttttatatacttttttctttagatgaccaaaatttgtaattctcatatttttgttattatatagcttttataacattaccatattttcttttttgagagctatccattccatttttctttaagactgggacagggagaaattacttgaagcttggatgtccaacccggagaactgctgccaacgatcaggtgttcaaatgccaactccaccaccaagtgggtataatgcctgggacacgctcccatctccaagaactccaaggactacacgctcttctgtcacctccccagatgaaatcagcttatctcctggggatttagacaccagtttggt

SEQ ID NO: 42330 - DNA, 1050 bp, Homo sapiens
tgaattccaactctgctatttattagttgttgatttaggtaattggtagcctgcctgttcctcagtttcctaatctataaagtggtgataatagtatgtgcttcctaggattatcatcagttttttaaatttcttaacgtatgtaaagtgcttaaaacaggatcttgcatatagtaatcgttcaataaatattacttattatcatattcctaagcattgtaataagcagagagagcctacctatgatatcatctgtgaattttacctgcaagataaaaatataggtaaggtttgccccagatttctctcttttagtgacacttatcaactccatgttctgctcataaatttttattaaattgtgtcttgatgagaaataataatatggccaacagaactgatcctgtcttcaatgaggtcttctcagttctgtaatttaattccccagagatgattaaatcttctctgatatatttaaaatatgtaaaattcaaaacatcatcatgtagtaactatgtctaagcaaactgtgaactttgacaagggactatacaacttcccagggaatctcttcatagctaaaaagaggagaatcttgttatgtgaaaaaggaactctacagttaacagttctctacttttagtctttaagacttttttttttttttttttgagttggagtctcgctccgtcacccaggcaggagtgcagtggcaccatctcagctcactgtgacctctgcctcccgggttcaagtgattctcctgcctcaacctcctgaggagctgggattacagacacccggcaccatgccaagctaatttttgtatttttagtagagatgaggtttcaccacgttggtcaggctggtcttgaacccctgaccttgtgatccgcctacctcggcctcccaaagcgctaggattataggcgtgagccaccgtgccaggccacaatataccttatataccttgtatatcgctgcttagcacaggagtgaaaatggcacttgtgaaaaaatggataaggatctaccagaggttgaagaatg

SEQ ID NO: 42331 - DNA, 1018 bp, Homo sapiens
agggaaattctgctagggataatctgaaaaagtaaagcctagaaccttttggttgacctaaagctagatttgcttaccaatggagtgagaccagaatccaagatgagtatgtgcattcctttatgactaccatcagtgttcctgggctgctggggcatatgcttcttttataaacacatacatgtcacacatgagtattttatgtaggtttttagtttggttcaaataagtattttcatacagttacttaaaacagtttttgtcctaatgatccttctttttccttttttgagaaaaaaaatcattgtttaattaatattataaatggcatatttgcaaaaacaaattcactgtgcctcaattactttttagctgaaggaggctgtccagataccactttcattgaagatgcagttcatgtgctcttaaaaactcggcgcattctcaagtgttcttatccatatggatttttcttggaacctaaaagcacaaagaaagaaatttttgaactaatgcaagtaagatttttttaattacatttaaatggcagcagttattatgaaatacagaatttttcatttttgaaaccacttgttttatttaatgtggacatgattactaaaacaattttcttttcattttttaaatggtttttaaataaaggaaaagttaccagtaacaaattgaaattttctttttgtttaaatttgtcactctgcaggtctgaatgagttatgagtggtgcaaacatttcctgtagcatttatgtctttgttttaaactggttgaagtttgaaatcaggcatatttctgattatataattaaggattttatcatgaaagatgaaaacaacccacattacctataagatgagaaagttgctgtttaccagtttatttttgaaatacaactgaaaaagttacagtatttaaaaaacaaaaacacctaagccaattggcatcactatagccaaataacttcattgtgcatttcttttcttttgaagccactaaactt

SEQ ID NO: 42332 - DNA, 2037 bp, Homo sapiens
tatatcctacatttctgtcaaggatcagtattcattttctccgtaaagccttccacacttgaccccaatcactgtcgtcttgccttaattcaaattccttcagcacttttatatagtctgcactatggcatcatgcatttgcttgtatggtgcattgaaatgtattagtttttttcacatagacaaattataaattccttgtaaacagctgctatactcactacttctttgtaatctataccaatttcatttctataaatgcctatcaaatgagcgcttttttaaaaattcacatgattttatatacagtcctttctctttcataatctagaaaacatgtacaaaatagaaaatatattacataggaagttatttcaaaattttaactagtttcttacttcaaaagagttagatttaactgagaaaccacatagaccctggatttgctattgattaacctatgaagcctgtgattttttttttttctctgcttactatagacagacctagaaatggtcactgaagaccttgcccagaaagtcaataggccttaccttcgcacaccccgccacaagatcatcaaagcagcatgccttgtacagcagaagaggcaagaattcctggcatctgtggctcggggagtagctcctgcagactcaccagaagctccaaggcgcaggtaaaaaggacgtacactgtggaaatcatcctagctccagccacaaataccagcagttttgttttttatccaactagggttcatattcctggaaattatttacacctaaaatatggatagctcataaaagtatgttgactttttttggtgattttttttttcctccatgctatttctgtttttcttgttattttttgtttatttatcattgtgtagctccttagactaaattaacctaggttaatttcacatttcaggtgaactcataaataagagtattctaatgtatcatttcaaatatgtaatatatatagtgatttgatagttataaacatcttacgatgtagaatttggaaactttgccagcttgttatggtcatatttgtatttttgtattaagaagttgtgaaggaaagagaaatttgatatttgtagttatttaagtgataaacccatccactaaagatcagttgagttgtagttgttttattttacatactcatactacttctgtaaattgaagcatactttcctatttataataactataagcattaaacattcctttggcactattttacataaattcctttgatcctatttttacataatatttatgagtaaatatttacttgtaaaatacaaatagaagcattataaaatactttgttataacatggtaatttttattttttgatcattttacacaaacataaaaacttagaatttggaagaaaggaaaattatcattttaattctgttttaatagttgatctactttagttaagcaagttccaacagaggaattcaaagtaatgttcaaagggcaaggatctgattgtatatactttgtagtattgatattaaatcaaatggtatgtctaatttctttgtagctttgctggtggaacatgggattgggaatatttaggatttgcatcaccagaggtaattgttttatggggtttttgtttttgtattttttcttagtgcagtcgtgcttgcatttgcatccttatctattctaaatccttctgagattatcagcagtgctgtctctttcttttgtaacaaaaatgccttgacagagcctacatttagctatttatgtggtattgctatatcgtcacattgttaaatgcattactcttttattgtttttaattactgaatagtcagaattaaggcaaatttacaatatacatttttggaaaatatcttctaatttgttaatagagagaatttattagaaatgcatttctagtcataatattgttttaatctgaaactattaaaaatataaaagaacaatccattttttaaggttaatgcaacaacctgagggaactgatttataa

SEQ ID NO: 42333 - DNA, 1110 bp, Homo sapiens
attcttaccaaatcagcatgattttcaagacagtacagagaaaagactgctgagctgatgtaggagctttggctgcagtctctatggctttcagcaagccgtttaaccttactactgcttcatgactgtggctaacaaagtagggatagtacggagcacagaggatttttagggcggtgaaactattaatactctctttgtatgatactataatggtgggtacatgtcattatacatttgcccaaccccacagaatacacagcaccaagagtgaaccctaatgtgaactctggtctttgatgatgctatgtcagtgtacgttcatccgtgtaacaagtgtaccactctagtggtgggaggggttattgataataggggaggatgtgcatgtgtgggggcaggaagtatatgggaaatctctctacttctgctcaattttgctgtaaacctaaaacctctgtaaaaaataaagtctattttttaaaaagtggggatggtattacggcaatataaaatcaaaatactttatgaacaaatcttttctccagatgtaaactgtcatatatgcaccctcgtatgtgtatgtataattttcattcaaacgtgaaacaactttagaattggcaccaaacatataaacactgatacattagactatctcgaacaccttttactgaccactttgaaaacttgcttacctattaaggttcattcatagctgtgatgttctatttttattttcaatgtgggattatcttctgtttcccccagggagtatattaccaaattggtgatgttgtttctgtgattgatgaacaagatggaaagccctactatgctcaaatcagaggttttatccaggaccagtattgcgagaagagtgcagcactgacgtggctcattcctaccctctctagccccagagaccaatttgatcccgcctcctatatcataggtaagtttgacaaatggcacaggtttttttttaacttagttaactctccaatattatgtaaaagagtgtgttagtcagcttgggctgtcaggacaaaatatcacagactgagtggcttaaacaacagaaagtcactttctcacagttgtggaggc

SEQ ID NO: 42334 - DNA, 1068 bp, Homo sapiens
ctaacaaacacaagccaaggagcatgatacatccagatagtggaatactctgaaattgtaaaaaaaaaaaaaaaaaaaaaacctttctatataatgatgaaaaacctctgtaagatctacagtgaaatggaaaatgcagaggtgcagagaaatgcgtattacaggttatcttaaagtggggagaaaatgggaggaaggaggtggcaaagtgagacatattgaacagataaataaaaaacaatagtgattacttatggggatgaaaccagacccatggagagcaaggaaagggtgacacttgatgctatatatctttttatccgttttaggttttaaaccatgtgaatatatacccttctcaagaaatgatttttttggagtagaatttgttaacatttttaagtgatttttttaaattatatgattctgaatgatgaaaacaataaaccacttctgtttccctttccctcaacttttaaattgtaatataaagaccattacgtgacaaagaagaaattggttacagagcataaagacacagaggattttagacaagacttccactcagagatgtctggattttgtaaagctgctttgaacacttctgcagggaactcaaatccttatcttccgtattcctgtgaattgcctttatgttatttctcctcaaaatgtatgtgttcatccgggggacctgtagacagagcaccagactcctctaaggatggtagaaaccatcataaaacaatggggcattataaccacaatgactctttgcggaaaacacagataaactctttgaaaaactcagtggcctgccctggtgcacaaaaggctattacgtcttcagaggcagttgacagatttatgcctaggacaacacaactgcaggagcgcaaaagaagaagagaagatgatcgtaaacttggaacttttcttcaaacaaacccaactggtaatgagattatgattggacctctgttaccagacatctctaaagtggatatgcacgatgactcattgaatacaacggcgaatttaattcggcataaacttaaagaggtaagg

SEQ ID NO: 42335 - DNA, 1026 bp, Homo sapiens
tcttcttaggcaacataaaggatctaaaggatacaagcaagttctttttcccagatattgtcgccataaattcagttgattaaaaatctgcttaacaatttcatctttttcaatcaaatcctattcccttaaaatggttacactttttggttaatgttacttaaatcagataatgatacacatattattaacaataataatgaccatttattgagtttctgttaaggaccaggacctgtgctatgtgctttattatattacctcttttactaatttcatagcccagggaaatgtgtatggccatagtatgccaatatctgctcccaaagttattggggagatctatggaatattcttttaaaaattcaaatataaaatatcatagaaagcatgaagtttgttcttttatttcctttgtttgattacatcttcttataggtatctaaaaaagtggcagatttaatccttgaaaaacagcctgcttatgtaaaggtaggataatatttgttattttttgtagtagaatttttaaatgtttgagtgatttacacttgaaactgttaaaatattgtattttttgtcaataattctgtagcagcatattgactgtttttgggtgtgtttgtgtatatgtatgtatgtatatttttctttttcttttggggtaatttaccaaactgaagaagcgaagggtttttatatatgattctaaagtgatctcttgggtttttcaaactttagaagagccagtgaaaattgctcccattaacatttaaacaaatagattcaccaatattgaccactcattggcaatataacaatctggctttaaaatatgataaaattggtactgtctaactgaatctgtgttttcatcggaaaatcagagccttcaaaatccattgaaatgtctaccaatgttcagatgacgactttcattgtcaaagcatcttagtaaacagaaatcatatttgtcatatcctttaattaccttgtgaagttctcttgggtaggaatttaaacaga

SEQ ID NO: 42336 - DNA, 1049 bp, Homo sapiens
aaaacttttaactatttattgttcacttttgcagacacttgaatattgcaaaggaaggttttactcaagctagtttaggccttcttgcaaatcaaaggaaacgtcagttgctgattggacttctgaaatctctgagaactataaaaacattggtatatatgggtcatttaaaaaaattaaaactgaattttgtggttgaaacagattttacctttgatttttgttttttcagcaaagaacagatgtacggttaagtgaaatgctggaggtaagttaacaagttttggaaatttagggtcctactgatatatagaaacagtaaagcagacaaaattcagaagtgcatttttctcaaatgggtttatgatataaagaatatttttagacatgtaagatttttagacgtcaaagattcttgctctggagcctttttctattgacatgatattacttcatttagaaaagcaaatgtatttgggaaaacatttatcttctgataacattggaatgttaacttgtttgtattgcgtccaaatagcaataaaaattaacatctttttcatctaacatatagtagtaatttaaggaatgtgtgatactttagttttgttcagtatcatgtattaattgcttttctgagtgagccatatgttttttctttgatgcattcttagcattttctgtctacttctgtcataaggttcaccaaagcataatgtaatatgtgtgtctcctcataatacttgagctccttggggtaggtactttgtcattatcagcatcaccagtggtttgaattgcatctgttgaatttagaattgagcatagggaaaagtttttgtggttttctgtataattgttttattacttctcaactattactgctaactagggtttcagaaacccatatgaaaaattcattgggcattaaattactgttaggtgataaaaatactctgagtttattaattagtgttttttttctaaatttatttctttagaactatttattgatttcttggtggtaaattgttgactatcaattacaa

SEQ ID NO: 42337 - DNA, 1091 bp, Homo sapiens
ttctttttcagttacctgtttattaagtctttgtatcttacaatttttctaaaatatttcagttaattgaaatgcgatgaaaaattctctaggtaggttagaggtatgtgtaagataagttagtaccagtttcacatttatacaatatttttgtacttagttgtttcataggtctttaccatcttctgtcaggcagagtgaatagtgactttctggcattttcagacacaagggatttacaagctaaatgttcagattataggaaatgttgtttttgtaacagataagacctttattgatgattttgtagaaggcaaacaatatgaagaaatgatattttaaatattcaggttttaggatgatgtggatttttttaaaatcagtatttcaacatcttgtatgcttttagcctttgtatctcacaaataagtctatgtatttgacaaataagttatagagatgtcttctcctattaaacttcattgttccaagcaggaattttagtggttttccataaaaatctctatattctatctatggagatggtatttacctattgcctagtttgattaaccttagctctgttgaaatagtctgtgttctttaagataattcttaaatttaattaatgaataggataaaatgtacagaatgctttttaggagtcacggtttctctagaaagagcaaaaaatattactgaattgagaagaacagaaaggtataccttttcatgatgctcagaaaaaaggatagattctaaaaagctattctgtggctaattattgccagggagctaagcttttcttcttcttccaagagaactgactgaacatagtgtcagaaataactctcgagaatttgtagaatcagaattgggagagtgctgagtggtcattggtgtaagttgccatgaagtcggttgtctttctgtaatgtctctcatacatggtagctgtctagcttctgtttcatgactcccagtcattggaaacacagtggtttgcaagactactcattctatcattagactgatctcattagtagaagtatcttccctaaggtaaaccaaaacctgtctctctgtgattc

SEQ ID NO: 42338 - DNA, 1091 bp, Homo sapiens
cttccatgtgtcacccttgacttcctctgacatgtcatggccaaagcaagtcaggcttggcaaagggaggggagaagtatgcttctgccgcaggaagcactgcaagtcaagggaagtgggcagggctgtatattgctcttacagggaattgggaaaaataatataatcaaacacatctaagcagttgtttatattttttaccttacctagttcaaaaggggctggaggtagtcatgttgctgtttacgctgaaggcatattttcattataatcaaataaaataaaatacaaggctaagacaaagttgaagagtgggcacatcatgctttatcatatcatatttaatgcagacatcaaatacaatgcttaacttcttggtaggcataagggaattgaagaaacaatatataccactatcctcgttatctgagaaaaagatacaggcctttataataatggtagaaatatgttcctggtgctgaattcagatgttagtaacaacaaatttttgtatgaggattactgatcaacatagtgggccttgcttttgaacagtgggtttgtaggaactgagaaaagccacattcaagaccctttaaagtaaagtaaagtatggcacagtcctgaataaagccttactctgtgaagagaatttgactattgcaatttcagctttctccactaccatatcttttactggacttgcaattaggaaacaatgccgagtatgacaatttaacttttatatcttctcatttaggactgggattaggtgctgccattatcaccccagttgggatccccagtagacttttatgcctatcattttctctctccctgggatgtttttatcttcagtttttagatatatacaaaacagaactttaaggaagccactgtctcagaggcctctgactagcaaatgcactattccatccgctgttgttattgcatagaagtgcctgaagattataaactggcagaggtcatgcttcttcctacaaagggagaagtacggttgtgtaaataagacagattaatttttggtgcttgagaagatgaaggaactaattattgagtatttgggaaac

SEQ ID NO: 42339 - DNA, 1027 bp, Homo sapiens
ctggctagacattcaagaccttcccaagatgtattctgacaatccctgtagctagtttctgcccagttttctctttatcctaacttatgttttggccaaactaggcttttcccccataagtagaaataactttaatttatgaggtacctaccatgtgctagatgctgtgtttagcattttcatgcagtgtcttatttggttttcaacctagcaaggatcatgttgttatccttactttatagacaattaaagcttagagtacttaagtaattttattacagtcacaaaataaataaggattccaactccagtatttagagtttactctttccaggatcatgtgctgtctctttagagctctcttgctcacctacttctgtgcctttgctcatggtgagcttccattctggaaagcactccttcctctatttgttctgtaaaatacttaacatcttttaagggtccaatcaaatagtactgactgcttgggtttgaattctagttgtgatattttggagaactttatctctgtgtgcttcaatttcttggctaaaagttagaaatgataataattgtatttgtatgatagagttgatatgaggaataaatatacacagattcttataatagatgctatacacatgtaaacacgtgtgcacacacacatatatacattcaatctttatctatagctgtacctgtgaagaagttagaacagttcatgtaccaagtattatgtcagtgtttgttataaaagcagaagttatcttagatatctgagaaaatcctcttaattggaaaaatgataaatctgaaactcagagaaggtttgtaaacctgtcctaggtcacatagttggtgggacagccaactctggaattcagaattttcacttcctgtaacagaatgtttctttacatttttacactagactattctgccttgtaaaacctttctatcttgcctctgaacattcttgttctttgtttctctcttacgaggaacattgcattataactatttgaat

SEQ ID NO: 42340 - DNA, 1028 bp, Homo sapiens
tctctgggaactaacagactagtggtagaatgaggattagaaatgtaagtaccatacagtagataaatgttttaatagaggtgtgctacaaatgctttaagagtaccaaggagagagagaattcattctgataggaaggacacagatggtaccacagatatacacatatagataacataaacaggcagagagggaagtagagaaggcatctcatacagaggaaagagcacaaggaaagtcatccaggcacaaagtgcataccttgtttgaagaaatgtgaatttcttcatcttgccagaatgcaagtttatgggaaataaatgaccagaggtgaaaatataaaggtggttagggacagattttcatcgaaggcttttaaggaagaagttaagtatggtcagatctgggtttttgaaaacagatcatcatcagttgaaggggaagtaaaagggaaggatgaaaagggtgaagacctttacaaggatatccaatggtcagggtgagagacgggagtcaggatggctgatttaaatcattagcaaagacaatgaaaaagatggtatacataaaaggaaacttgcagaagtaaatccatttggtgatgaccaggagaaagacagaaagagagacacatacacacacacacacacaaacacacacacacacacacacatacacagagagagagagagacagagagagagagagagagagagagagagagagagagagagagagagagagaaaatgggtattgacattaccaaggtagagagcatgtgaattaggaacaggtaaggggaagatacaggtatttatttttcatgtttgatgtctttgggttattcatgctgatttgacattcatgtgaggataatagcattcaggtctagaattcagggcagaagtgaggccaagagatggacatttgtgattcatttgtaaataagtgatgactgaggctgtggagttaggtaaattattcaataataaagcataaaacaagataaaatgagcatatatgtaaa

SEQ ID NO: 42341 - DNA, 1854 bp, Homo sapiens
ggcttttattggcctatagttacccaggtagttaaggaagccaaattatagcaaacttttgggaagaccttctagcatgacccttccacaatctgttatttcttttattactaattttatgtgtaacagagtatcataagaatcatgttacttttaaatagcacattttctttaacaatataacagtagaaaagtatatatatttcagtgaaatgggagattaaaatcaattcctgcatttctgttgcattttaacattttcctttttattataggacattaattatgtatggaaatggttcaacaactttgttgtcttagttgcctactttctgtgaaatactagaaatgtgggaaaaattcgacaatttttacctgttaccatctaactctgactaattcctcctaaatcagtgttcaaataattatcatatttgatacttatggacctaacttagctaaaacttcatgtataaatttttaattatttgaattatttatttgataaatagatacatttacatctattttaatttaagaatatctagcatttaacaacatcctaaggcaatgatcattcaatccaaatagtcctgtattggttaggatcagatttgactaaataaaatgggaaaacccaaagtaaaaagttaacacacaaggaaagtcttcactcactcctagaggtaggatcagatttgaccaaataaaatgggaaaacccaagtaatgtgttaacacacaaggaaagtcttcactcactcctagggaagtccagaggtaggcagtctttggtgttgatggctccagggttatcagagatgccatctccctttatcttgctgctctaccatctttagagttttcaaaggcaacctatcctttcttagaactcttacacaaatcttctgttcacatctcattgactgaagctgtgcctttacacaagaaaatctgcgaaatgtagtcttttagctagcatccctcacccaaataaaattgagttttgttatgatggtgaatgaagagaatggatttgggggaagacagtaagttatcctattacagtcagtacaatgtcacaatgttgttttaatataaaatattttaaacttactaggttaatatctaagcccagtgatggaaatttataacattctcttttccaactcatccttttagatttaaatttataaaataatatagattctggtttcccaatggcagaaactcagtgtagtataatctataaggccatttaattcagaaaatagggcatttattaaatgtcacgtggtgagaaatctctcttttgatgtcagacgttgagaaaattaattcctctttcaaatctcactattaacttatgaaaccatctgctaagcctgactgcctgtattgattttttctttttaaaatttttaatttttaaaatagatttagggggtaaaagtgcaattttattacatgatacattgtgtagtgatgaagtctgggctttattgtacccattgcctgaatagtggacattgtacccaataggtaattcttcacttttcaccctcctcccaacctaattaatttttcctgattacatactccaccttctttcacacagacccatccctgatccctgtgcttttaataactagtacttgacccacctctgctgacttacatgacaactgcggcctttatcctctggattttcattatctatttcctaatctcctgctattgtcaatttcttatctcttcagttccaaagttctcagtcttcactctacagaggtttgtattcacctgaatgtgttttagaatttgtgatctcatttccaacatctcaaactctgga

SEQ ID NO: 42342 - DNA, 1112 bp, Homo sapiens
aagcacaaagaaggcaaagtacatttcattttgggattgaatttttactctggaacccagtataaagctctaacaggtaggctgatcttcaaggaaaggctctttttctgtgtatatggtaggctacttcccttcaagacccctatgtgaatctagaatctaaaccatggatggcgggatggcgacacctgtgctaatgtttgagaaaaagtagtaaaagaaggagagagatagagagataaagatacagatctatttatctgtatctatctacatctatcagaaagagataaagatacagatatagatacagatctgtctaactatctatgagagagagagagagagagagataatttgcctctattgcccaaaatggaactgtattaagttgtatgctccaaaagtctagtcctagctcccaggaaggagaagagaagagagaaagaaacagccagtgtttttttgagaaaacaaattctgggcttttctagcagacttgtggatagaagaggaaaaaggtaggaaaaaagaagatcatatagacttactttatagtgggaacctcagagtctttaccatctaggcttcatgagagttgctaaatgtgaccagacttgttaacccatagctcctccccaagaaatttaatgtagtgtatgctcttccttggtgttagaatgtttttcaccagattcttgttcctccttgaggtatagtaagagggagaggagttgaaggaaggagttttagtttctttctccatagaccaaaattggactaattttgttctctcttctcttgattaagtcaggtctatgatcagctaagggtgaggctgttccttctgagggaagatgtctgcagacatcagtaagtcctccctgcaccactggagtggttttcttgggcactttcagcactctgttttgtacatctggtattaatgataccagcagttcagctcctctgttcttgctatctattacagggtaacacattactctaaaacttagcaacttaaaacaacaaatgtttattatctagaaatggctattctgggtggttctggttctgagtttctcatgaggtggtccataaggtgtcagctg

SEQ ID NO: 42343 - DNA, 1058 bp, Homo sapiens
cgggagcggtggcgggcgcctgtagtcccagctactccggaggctgaggcaggagaatggcatgaacccaggaggcgtagcttgcagtgagccgacatcgtgccactgcactccatcctgggtgacagagcaagactccgtctcaagaaaaaaaacaaaacaaaacaaaactatagaccaattaatgcaattaaacccctttaattatcaataaaatgtttatttccactgaaaaaggcaacttacttttcttaattggctcacaaatgggtcactcttttttccttatagtggaattaaaattcaaaagtttactctttaacatttcttcttattctgtttggccctgcctaaaaagtttcactcagtgacagagtgcctttgtgtgtgcgtgtgtgtgtttagcccatgctattttgtacagaactaatatagattttggtattactacagagggattattctcaccacaactgtgacatattatgttaatgattccagtgaaatatgaccctctgatgggccccagtgtgtgtttttcccctctatgtgtccatgtgttctcatcatttagctcctactcataagtgagaacatgtggtatttggttttctgttcctgtattagtttgctaaagataatgtcctccagctccatccgtgttcctgtaaaggacataatctttttatttttttatggctgcatagtattccatggtatatgtgtaccatattttctttatccagtctatcattgatggacatttaggttgattcctaatcaacctaatgtgtttggtattgtaaaaagtgctgcagtgaacatatgtgtgcatgtgactttatgatagaacaatttatattcctttgagtatatactcagtaataggattgctgggtcaaatggtatttctgtcttccacaatggttaaactaatttacgctcccaccaacagtgcataagcattcctttttctctgcaacctcaacagtagttgttactttatgactttttaaattaatagctattctgactggtgtgagatggtatctcattgt

SEQ ID NO: 42344 - DNA, 1025 bp, Homo sapiens
ccatggaagcagattacctgccccaatcgtaacttcaaatgactctatctcaaccaacactttggctgaaacctcaaagaggccctaattcagaatcaaataattaagctgcttctggatttctgactctcagaagttatgtgagataacaaatgtttgctgtttaaaatggctaatattttggaataatttgttttactgaagtagataaccaattcacattgtctggagattatctctgacacatcagtggtatgataactctcttgttagcatgaaggtgtactgaagccaggtgcaaaatagagtcatatggtcaagcctagctgacagtggattcagtgggtctatggattaatgagcttatttctttaatacctatgtgcttaaaaggatggatatatttagccagtaatggaactcacgtagattccttgacctttggaataatagccattatagtgggaaaggccatcagaaagcccctcaagcttcattgcaccatgcaagatagtacatcagaggcatcataggtagaatggtagagattgaatggctacattcaaaaactaaagaatgttgatattgcccctgcaaaaacaagatgtgccatggtgggtaatggtgcacttctgaaaattttaaaaattggtagctccagttacaacttctgtgccatatgtgatatctttactagaacagataatatagtttctggcacatggcatgaggctattgatatgacatgagtgtttctttcaattctcatcagaaaaggaggtaagaagcagttcaccttcatttgggatgacaaaaagcagacattcatggcgttgtgccaggaatatgttgtcaagttatataatgtatagagtctctagagaacctcaatagaaccacttcattgcagaatcttagcattgtggagtaaggtcatgctatactagcagggagctgtttttcattcaaaatcagttcctgatatagagcaatgaaaaagaccatcatctccaatcctaacaaca

SEQ ID NO: 42345 - DNA, 1033 bp, Homo sapiens
tctcaccatcaaaatagtaaatccagtggggaattggatccaactaaaaattcaataaagccaagacagagtatacaactctaggcaatactcactcagcagcccaatctagtggtctgaggaagaagcatgttatttcctagggtaattttatctacattaatttactctctgctgtccttttagacacagtatttgtcattttgcagggtaattgcagagcatataaagatgccggataagtcacccacattcagagaagaaagagttagtggaagcagacttacagataacatagatgttggaattagctgaaaagatctttaaaagaactatgataaatatattagataatttaaagttaaaagtggtatggttatttggaaacatagtcctccaattccttgacactctttgttgagaggtgatatttattttacctccccttaaatatagataggcttttatctgcaatctaatatgactttcatctgtgatcctgtatgtcttctgggcctttatttaaagatatcatgcagctttttttcttgtcttattgggatgtttcctctgagagaagccagatgtcagataagaagtttgactcctttcagattgccattctggagaggacatatgtagatacttggaccaatagccctagctgagtttccaggtgacagccagtgtcaatggtctactatgggttgagacaacttgatattcagatgagttaagccttcagatgactgtagccccagcttacatcttactgcaacgacatgaaagacaacaaagtgcgagtctttcctgaattaccacaaaatcatgagcaatagaatggctattttcaactgttaagaatgtgagtaatttattgtgcctcaatggtaaccagaacaagtagagaacagatggtggatttcagcagagaaattaaactataaaaaacaatcaggtggaaattctagaagtgaaaaattgaatatcagaaataagaactcagtgatcatttgactgaacaagagaaatg

SEQ ID NO: 42346 - DNA, 1034 bp, Homo sapiens
agttcatgagatttctctatcataactactttcatccccatgttggaaggacaagaagatgtataaatgtttatggctgtgttaaacttgtcatgtacagcttcacacgttgtgcattgcactattccaggggtgccattcacttagattacaatatgaataactctcttgacataatgtacagcacaactgctacaataatacacaatgactctgctcattgaggtccactgagatcttaggatcactaaagaatggacaattacagctatttaaattgtagttattggattaatcccaatttatagttgtactatttaattaaaacataacaaaatcaaatgcaaatgaaaacaaaaaacaaagatgtatctgtgtgggataaagagataaagagacctttgcctattaaatgtgttttacactttcataagaatcttagcagttacgattctcgattttgtcattctgccaaacatattaacttattttaataaaaagtaaaatggactgtcaatattagctaaagagaataaacaaacctagtggggaaaataaaatatttcccccagactcaagtgacataaaagtaagaataaattacaatgaaatgcaaggtatttatgtaaaactaacattttcttatgaaatggcagttgctattactgatgctccacaagcattatctaattttatactcacaattttctattagtagaaaaagttattatacttactctacaggccaaaaaatggaagggaagttatttagtaatttgctggaacaacgcatataggtagtaagtgacagagctagacttaaacctacatgacacaaatccagagttccttaacagttcatacaatacctcttaaaatgttgtttaattaaacatacaaaatgccaaaggtagttatgagagaacactttaatgatagcaggcttgagtatctggtaccaggccacaggatcactgtatgcttctgacactggaatgagagagtaggtggcagaacacttatagctaaagtaa

SEQ ID NO: 42347 - DNA, 1101 bp, Homo sapiens
taaaagagctggtaatacagcatttataaatttatgttcccctaagaagttattctcttgtgtcctcttatgttaaaagaatgactcctagtccatcctgggctacattacaaaagaccctcttcataatcttggtctctgtattgtaggttttcctttattaatctagccattgtaggtgccatgatatgtataaaaaaagaagagctgagtaagggtgacataggtgtttggatttgctggggtaaccactgatcatcttgtctattctgaagtagtcaaaaagaaagctgcaggggacagaggtttctgagaggtggccagagaggcaatgtcctctatctagccatgcttcaaaccccagagcctgactggatttccaaacttcccattggtgtgaattaatacataatccacttttctttccaaggtaacatgagttggtcttctactactggcaatctaatgagctaaatttgatgttgtaaacacaaatcaaatcatttacaatgttattctatctgagaccaggaaattgccttgctttagataaaagcttaatataggagacaggaagacaggaatttacatctgaactgataagataaaggcatcaacatagcaacaaggtgaataggaaaatattttttcaagagacccaaaccacaaccacaaaaagatatatttctatatatactattctggtgacttactcatttcacagataaatggaagaatgaatttcatttaccagggcagactggaaggggaaggatcttttagagctagctattcagacttcagtgggcagtgaggtagagaaatacaaggaaaaggaaatgtggacccagttggatactggtaagaaattccagtctattaaatataataataatggtggccatttttattggctattatggcttttaatgccttctatgtgctaggcatgcctcgtgccttattttcattccttgtaacaagtctacaagtactaataacttttttacaagaaggaaactttaagctcaaaaagttggtgaaaaccacagagttaaaggggaagggtagagtttgtactcaaatcatctgaattccaaa

SEQ ID NO: 42348 - DNA, 1057 bp, Homo sapiens
cagggagaccaaggcaagcagtgattggcaatacgttgacttcctggatttctggcagaagacaccaatatgggcaaggaaattattgaaatgtcaatcctactttggatatttccctggattaaaagaataggtatactaaaaggcaaattgtatagtttcatagtttatggaataagccatggagctagttttcctgggttcaaattacagcttctccacttgctagttttgacatcttgcctaagctatttaacctctttgttcaccattttaaaaatgggcctattaataatatagacctcttagagctgttacgagaatcacatgtgttaatgtttttaaagctcttagaagagcaatgaacatatagtaaggattacataaccctttatcaaataaataagtgccagaaggtataagtgttgtagcttaactttagtattgtgtatttttagctttgaattgtttcctttaggccagcatttctcaggtttgacacgattttcattttgggccatactgtacttcatgatgaaggctgtactgtacactgtaggatgtttagcagcacccctggtctctacccactagatgtcagtagcacctccccagttgtgacaactaaaaatgtctccagacaaagccaaatttccgctcgggttggggcaaaattgtaccccttctgcttataaagcttggatttatgtgcaattattatttgcttcaaacttataaagtggagctaattgcttcatgtcactactaccacagacatttcaaaatcaaaataagaaatgtgttagcaaagttcttggaagaatgagatgtcatcagcttgctctcaagtctactcgttttcattcactcatttctaaatactgtatttctctattccatgtactctggcttttctgtttctttgtgtatttcccctctgtgcccttctctgtgtagcaacgccgcatggctaccagcaggtggtatccatgaataatgtgatctacatcttttccctggcaagcgtcatcagatcacctctcccacgctgctgtgt

SEQ ID NO: 42349 - DNA, 1047 bp, Homo sapiens
cataatcatatgaaaataaatcaacatttcatatgccacatggtatttaaaggcatccattcattatttcacatttcaggaagatgtatattagataataatattataatttataaaatttcaacaaatttcaatatattacaatcttgtctcttctcatgcagcaatctgagtttaccagttttccttctctggattttacattctgacttttaatttggcatagggggagccctagccccactattgttttgtcaaaatattgaaaacagctctttggaaaatgggtacaggaaatcttcagaaataatgtagtcatttctgagcccctttccaggaagtaaagttgagaactgataaccaaagcaaagttgaagggtagaattctaaattagtttaattcatctgatacattggaagccttttgctgtttcactttccctgggccacttctatactggctatagaattaggtacagccaatcctttcctggagcgtcacaatccatatctggccttgtagaccaatcaatattgtagtgatctgtattgatctttaagagagttagcatgactggttccaccgtttgatcaattcttgggtatagatccagtctaaaagttctggtcctcatgaaaatttgatcaaacaaattaccccaaatagaactttgacagcttagtaatagattatcctaaatcagtaaaataaggtgaggctttattactcaatatgtaacagataattttagatacatttctattgaagaattattattagtagaagttgggaagatatatttgcataacatttcacctttttttacattatgaaaaatttgtgctgcattcatctattatctatctatctatctatctatctatctatctatctatctatctatctatctatctatcaccacatacattcttccctcaggtttgtcgatcataacattttgtcatattgctttgatccttgttatttttcagaagaaatcattgctggaaatccctacatgtatcatcctgatcacatttctattt

SEQ ID NO: 42350 - DNA, 1013 bp, Homo sapiens
tatttggtgattttttttttatttggcccatgacttatttaaatgtaagttgtttaattcccagatatatgggtcttttctagacatattatttttgctatttgtaattaaattcccttttaaattccataacatattatgtaaaatttcatttcaaatttttaagatttattttccatcctatgttctatcttcatgtaccttttatgatcacttgaaaaacatatgcttcttcacttgttgagtgtagtgctgatataattggcaattaggttaatgtaattaatgtcagtccaatcgtctatatctttacttacatatatttacacctttgccattttttactgttttatatttctttctgtagattgaaatttccctctagagtgtttttttttctttaacatttcttgtagtgcagatctttggacaatacaatttctcagtttttgtttatataaaaatttattcatttcacttttatctttggagttttcttcactggatgtagaattcttagttgacaacttttttcttttagccttataaatacatcatttcttgtcttctggtttgcagagtttctgataagaagtcatctgttatttaatcattgttattctgtatatcacatgccatttttctctagctgcttttcagattttctgtctatctttgactttcagcaattttagtatgatgtgtctagaagagttattttttatttttatcttgcttggagtttgttgatgttcttggatctggcactcagccaagaagagcatccaactcacagatctggttccatattactctatcttgcaagagtagatttcctcgtggtctctgttagcctttcctttttgttcactcggatctccctcatacatttatcatgtagttgtcagcagtgagttgagctgttcatactctgaattttggtcactcttttttttttttcttttgtttcttgcactgccacaacttctcccttatattcccagcttttttct

SEQ ID NO: 42351 - DNA, 2555 bp, Homo sapiens
gtctttaaatattttttcaattatacaattgttatcattgttaactgtgggaaattagtgtgcaacgaaaattatcctttataggtactggaagttaggtctcgacttttctaaacttgctttttgtacccccaaattattaaatatttttcttattattttatataatcgtttttgttcttacctccttagaatttacatctgtttttttctgagttgtatcttctagtagttctttcagtgaggatttattattattacaatctcttactttttttcttaaaatgttactattttgttgtcacattgaatggtaaagttaggtcaatataggattttaggttgactgttattttcttcaggtagtatagctctggttgcttttaagttctcttctttagcattctgtataatgtgctctttttttttactatattgtaatatttactatattatagatttactatattgtagattaattataatttattctgttcagaacctgttcatgatttctgaagctgattctgagtactcgtggtttttataaattctggaaattctaagttattcttttcaagtattttttcttcacatctttgtctctccggaatgcctattaacttacaatggtttttaaaatatattctatatttcttaattcttcttttctatttttgtgactaatttaatatttagcttccaatttaataactcttatttcagttgtatgtattggtggtttaactttacattatatttttaacttttgttactttttttctctttccctgtttcaatttctattttctacctttagtataccttaaatatttatttttgtaatctcaactaaactgttacaatgtctgatggactaggtagcgaggatcttatctcaatgtttttgtgacacatgacttgtgtattcagggccctcatttctaatgtccatttttgcatggtgcaaaagccttatccctcatgagttattgaaccacaagcctcttggtaacaaaatgcagcatcggtcctttttgtaaaagaatatgagtaatcttaaagagacgcaaagtaggactttccttgttttaaccacacatacaatcaaggataaatataatatacatatagtacatgttttacattatattactggtagtgacagatgctttgatcaaatctatactaaatagtcatacttaagtgattattacttttaatcagagtttaacagaagcaaatgacaatctcattgatagccagagcaaaagaaaggaaactaactcctcatctaagactttaggaaatgaagccaagtaattattgtgggaataaggatgaagtgcctgtcctgtattgtccaatagttcttcttctgtataattattctgacctagaatgatcaatgagctacaagcacaaatacttattgaagaaaacaagttttaatttgcttgttttttatttgggctcccagtcttggaaaggaaaatatttcaatttgtatttttaagtttcaaatcgaacttatctgtatataaattacaatcaatataggctttatattctttataatttgtcttttctgtacaatcaacatcaaaacttgcctttaacttattcaataaatcaccaattaaaattttcatatatgtattagaaaaaaaatgcactgtaaaaaatctttttaatgagatttcctttaatttaatggattggataaagcaatgtactaagatttaagatacctgggtcatactttcagttatattgcttggtaacccttattttaacttctctggttttgatttctcatgcaaagagaagaatcactaatataaatagaaaatcgctagcatctccactaattttaacattgtattggacacctactcagacctactgattgtaaaacacttaccatttttctcagctccagtctagctccccacacactttctaattctttctcaatgccccggagacccaaactgtgcttattctttttctgagctgtgggccacttcgcccagtgactctcaaattatgtacttcaaacctttgagaacccatggagttgttgcagttataaagacactgtaagttcttatatatatcaaatattttctggagactaaaagtgattcatatgtatggacttcactttttcaaatatatgttaatgctcctgtgatcagcaaaattaaaataattaatttttaatgtttttaagttcagaaaagattttgtcattctgagttttccaatcaatgtacaattaaagtctaactactcttaaatagaaatacctggaaatttcgacttttgataatattaggaataactaaccttaagctgtttacttccatttctttcatttcagtataagatccctttgaaaataaatccagatatcaagttttagcaaggcttcttggaaaattactataggaaaaaatagagtaacaatttgataccagctctgccctatggggcacctatgctatggcatattatatgtacttttgataacatatatttaactttcagta

SEQ ID NO: 42352 - DNA, 1430 bp, Homo sapiens
aatctaggtctcctgtgaaaataatttgcagatgagattaaggtggcaaatctgttaatgtaaacataggcagataatttatgtggatccgacttgacctaatcacatgagccacttaagagtagagaattttcttttctttttttttaaattatactttaagttctgggatacatgtgcagaacttgcaggtttgttacataggtatatatgtgccatggtggtttgctgcacccatcaacctgtcatctacgttaggtatttctcctaatgctatccctccccttgccctccacccactgacaagccccagtgtgtgatgttcccatccctgtgcccatatgttctcattgttgaactcccactttagcagatcacagaagaggaggtcagaaatctgaagcacaagaaggatttgttgcaccaatgatgacttgagtgaggggagatacatggaaaggaatgcgggcagcctttgggagctgagagcaattcctggctggcagacagcaaggaaatggggatctcagtcctacagctgcaagaaacttaatttgtccaacagcagggatgaccttacaaatgaatttttcttcagagcctactgataagaactcagtttatgtgaaaacttggttttagctttgtgatgccctgagtagagaatctagctatgccatgctccatgcaagacttttaactttcagaactgtgagataatacactggtgttgttttaagccactaagtttgtggcaatttgttacttggtagtagaaaactaatacagaggacactgcagttattggaatgagggacaatggcagcttggactatggctatggatatggaaatagaaaaaaaacagaactgagatattcagggataaaattgatatgactatgtgacagatggggggataaaggagatagattagttaaaacatgtgtctggtttttcaccatgcatagtttttcacatcagaagactactgtgctaagtgaattattgggtagtggtaagagttggagaatattaattgggtttagatacgtagagattgaagtgccttgagacacttaacaggagccatcaattggcagttggatatgagtcattggtattataaatcaaaaaatatctgggagaagtctcaattaatttagaagtttatttcaccaaggttagggacctgcctgtgacacagcctcaggaggtcctgagaatgtgtccccaaggtggctggactacagcttggttttatatgttttagggagacagaagacatcagtcaatacgtgtaagatggacactgattcagtccataaaggcaggacaacttgaagtggaaaacttccaggtagtaggtggattcaaagatttccttattggcaattggttgaaagagtttataggaagacctgaaatcaa

SEQ ID NO: 42353 - DNA, 1061 bp, Homo sapiens
caggggggttagtaaaatggtgtttactggttaccttagtaaaagtcgtttccatgaagggatgtggacagaaaccagactggaatgagataaagagtgaaggtgaggaaatgaaaacaaaatacttaagtacagacaactctaaagaagtttgcttataaagaggagaagaccaggaagtagctggagatgtatattagtctgttctcatactgctgtaaagaactgcctgaaactgggtaattcataaaggaaagaggtttaattgacacacagttcagcatggctggggaggcctcaggaaacttataatcatggtgaaaggcacctctttgcagggcagcaggagagagaattagtgccaagtgaagggggaaagcccttataaaaccatcacatcttgtgagtactcactcactatcatgagaacagtctggtggaaactgcctttatgattcaattatctcccaccaggttcctctcatgacacatggggattatgggaactacaattcaagatgagatttgggtgcggacacagagccaaaccatatcaaagtggtttttttattttattttctgtgggagacaacatatttaaaagccaactagaaggaatcagttcagaagttgttaaatatacaagagaggaggaggaagaaataacaaagttttctgagaaggtgaaggagataagatccaaagtacacatagagatttaagttcctttagtataacaggaacaaaaggacattgatgggtatacctatcttgtacaaataggtttacatattaggaaaaaatgaaattaatagaggtccagtctgatggcttctttttcttccaaaacttgtttgaaaagcactgtcacctgttaagagtatggggaggagagtgggcattataaatgtgaagaggggtggataaagtctgaaatagtccttgtggaaaatgggggactcaactgaattgacctagacaggctatgaggaagcctaaatgtcataacattaatgaagattttcttgtcatctttccagcagctgtcagcctttaccttc

SEQ ID NO: 42354 - DNA, 2604 bp, Homo sapiens
tttttactttcttatttgtaatttaattttgtccatcctaatttgtttatttaatagattaggaaactaaagcttaaagggatgaaatatctccatggtgacactactactaactggaaactttttttgaactgatgacactactactaactggaaactttttttgctctgtggcctcattctttcttcaatagaataaggaagaaaattttgaaatattgagtaaaaacttcttctgaaagatgaaagttgttttgaccactgtcttctctctgtaatactaattaaatatttatttagcaagattctcatcagaattcatctttcagaagaagtttttactcaatatttcaaaattttcttccttattctattgaagaaagaatgaggccacagagcaaaatcaattatttattttgcatagatggaatttatgtagatagcgctatcataaaggtactgcaaaaggaaattcatgtgcaaatatcctcatcaactgaattagaactcaacatcatcattgctacatcatgcaagaagactatacagcaacttagtttagacaggcatgagtatctgcttagtctattcattaataaaaaagtctattcattaataaataatcaactttggtttcaggacataaaatgatcccaaagttggccagataaaaatagggtcacctcagaaagcggttctcagattagtttgaaaagtgatttaacacattgctgaaatgtaagcgggtatccaatccaaaagaaataacaaaacagaagcctttttactatcccccagagtatggtttttttaggaaaacatgcagagaaagaaaggcaaggataatgtgcacaatttagaaataaatggaaatcctttatgtgttaatcatttctggaatacttatgcaatctgtgttttatggtccattttatatatttctttaagctgtccattgatagaaaagaatacacaaaagtctgaaaagttagagagctttagtaattacattttgtcacttactaacaaccaagaaagagaaaaaaactataatgatatttagtaacccatgaatgtgacttttctaatttctaatatgataaattagcactcctcaaatttagaatgaacttactgtaaatatctgtccatctctatgtcatttatttaccccaaatatcttacatattggaaattttttaaaaatgtattttaaatatttatattttaatctaatctgtgttatataatttcagatctaaatgtcataaaattcatgatatatttttatatgtatgtatatttgaatgaaacatttaataatatttacataaaagcaaatttcatatatatcatgtaacaactatgaattttagtttagcttaaatttcattttgggggaaaaacataatactgacatgtatgatttttggtagggaactaaatatatgttcaaatgtagattaaaagataactatagtagaaactatgaaaatatatgaaaactagttttataacctatgtcaggcctctgagcccaagctatgccatcatatcccctgtgacctgcacatacacatccagatggtcggttcctgccttaactgatgacattccaccacaaaagaagtgaaaatggccgttcctgccttaactgatgacattgtcttgtgaaattccttctcctggctcattctggctcaaaagctcccctactgagcaccttgtgacccccactctgcccgccagagaacaacccccctttaactgtaattttcctttacctacccaaatcctataaaatggccccacccctatgtcccttcgctgactctcttttcggactcagcccacctgcacccaggtgaaataaacagttttattgctgactcaaagcctgtttggtggtctcttcacacgaacgcgagtgaaatttggtgccgtgacttggatcgggggacctcccttgggagatcaatcccctgtcctcctgctctttgctccatgagaaagatccacctatgacctcaggtcctcagaccaaccagccaagaaacatctccccaatttcaaatccggtaagcagcctctttttactctcttctccaacctccctcactatccttcaacctctttctcctttcaatcttggagccacacttcaatctctcccttcttttaatttcaattcctttcattttctggtagagacaaaggagacacgttctatccgtggacccaaaactccggcgccggtcacagactgggaagacagacttcccttgatgtttaatcattgcagggacacctctctgattatttacccacgtttcagaggtgtcacaccattcagggatgcctgcctcggtccttcacccttagcagcaagtcctacttttctgtgggaggggcaagtaccccaaccccttctctccatgtttctaccccttctccacctttctagggggcaaggaacccccaaccccttctccttcacccttagcagcaagtcccgcttttctaggggaggggcaagtaccccaacctcttatatctctgtgccccaatcccttatttccatgccccgacctcgtatctctgtgc

SEQ ID NO: 42355 - DNA, 1102 bp, Homo sapiens
agctaggttccaattcttcctcagcctgtctccaccctataatctttttatcacctcccctcctcacacctggtccggcttacagtttcgttcggtgactagccctcccccacctggccaggaatttactcttaaaaaggtggctggagctaaaggcatagtcaaggttaatagtcctttttctttatcccaaatcagacagcatttaggctctttttcatcaaatataaaaatccagcccagttcatgactcgtttggcagcaaccctgagacactttacagccctagaccctaaaagttcaaaaggccatcttagtctcaaaatacattttattacccaatctgctcccgacattaaatgaaactccaaaaattaaattctgaccctccaaccccacaacaggatttaattaaccttgccttcaaggtgtacaataatagaaaaaagttgcaattccttacctccactgtgagacaaaccccagccacatctccagcacataagaacttccaaacgcctgaatcgcagtggccaggcattcctccagaacctcctcccccaggagcttgctgcaagtgccagaaatctggccactgggctaaggaatgcctgcagcccaggattcctcctaagccatgtcccatctgtgtgggaccccactgaaaattggactgttcaactcacctggcagccacttccagagcccctgggactctggtccaaggctgtctgactgactcctgcccagatcttctcggcttagcagctgaagactgacactgcccgatcgcctcagaagcctacaggaccatcacagatgctctaggtaactcttacagtggagggtaagtccgtccccttcttaatcaatacggaggctactcactccacattaccttcttttcaagggcctgtttcccttgcttccataactgttgtgggtattgacggccaggcttctaaacctcttaaaactccccaactctggtgccaacttagacaatactcttttaagcactcctttttagttatccccacctgcccagttcccttattaggccgagacactttaactaaattatctgcttccctgactattc

SEQ ID NO: 42356 - DNA, 1058 bp, Homo sapiens
tttgcccctgcccaggactggcaaattagctttactcaacatgccccaagtcacaaaaactaaaatacctcttagtctaagtagacactttcactagacaggtagaggcctttcctacagggtctgagaaggccaccgcagtcatttcttcccttctgtcagacataattcctcagtttagccttcccacctctatacagtctgataacagaccagcctttattagtgaaatcagccaagcagtttttcaggctcttagtattcagtgaaacctttatatcccttacagtcctccatcttcaggaaaggtagaacggactaaaggtcttttaaaaacacacctcaccaagctcagccaccaacttaaaaatggactggacaatattttaccactttcccttctcagaagtcagacctgtcctcagaatgctacagggtacagcccatttgagctcctgaatagatgctcctttttattaggccccagtttcatttgacaccagaccatcttagactgtgccccaaaaaacttgtcttccctactatctctgtctagtcatactcttattcaccgttctcaactactcatacatgccgtgctcttgtttacactgccagtttacactgtttctccaagccatcacagctgatatctcctggtgctatccccagactgccactcttaactcttgaagtaaataaataatctttgctgacaggactatgctgaatttccttaggcactcttatagatgtcctaggtcctcccaattcttagacctttaatacctgtttttctccttctcttactcggtttagtttttcaattcatacaaaaccgtatccaggccatcaccaataattctaaatgacaaatgtttcttctaacagtcccataatatcaccccttaccacaaaatcttccttcagcttaatctctcccactctaggttcccatgccgcccctaatcctgctagaagcagccctgagaaacattgcccattgtctctccataccacccccaaaaatttttaccgtcccaacactttaccactat

SEQ ID NO: 42357 - DNA, 1067 bp, Homo sapiens
gcgccatactttaacagtttgtctagatttctcacaaataatgtgatttatattgagcaccaacaggtaattttgaaattagatagaggaaatagtggtgtattgtgaaagtactaaatgctttaaaatgattttactgtgttgtacactttaaaatgattaatttcgtgttatatgagttttaccttaataaaaaacagtaacaattttaaaaatcagaaaagggggccgggcatgttggctcacgcctataatcccagcactttgggaggccgaggcgggtggattgcctgaggtcaggagttcaagaccagcctgaccaacatagtgaaaccccatctctactaaaaataaaagaattagctgggcatggtggtgggtgtctgtaatcccagctactcaggaggctgaaaggaggctgaagcaggagaatcgcttgaacccaggagacggaggttgcagtgagctgagattgtgccagtgcactccagcctgggcaacaaaagcgaaactccgtgtcaaaaaaaaaaaaaaaagaaaagaaaaggatttgaatagacgtttctccaaagaagatgtgtaaatggctaagcatattaaaagatattatcagcatcagtagtcattaggggaatgcaaatcaaaaacagaatgtgatactactttacacacactagggtatctacaataaaaaagacagatattaacagttggaggggatgtaaataatttgcaacccttatgcattgctggtggaatataaaacagggcagttgctgaggaggtcaatttgacacttcctcaaaaagttaaaaataaagttaaccagaaaccccagcaattctgctcctaggtatttgcctcagagaaataaaatttttgtgtccacttgagcccaatgcacaatgttcacagtagcattattcataatagccaaatagtgaaaacaacccaaatattcatcaactgatgaatggataaatatagtattgtatatgcattaaatagaatattattctgcaataaaaagaaatgaaatactgatacaagttacaagatggttggat

SEQ ID NO: 42358 - DNA, 1034 bp, Homo sapiens
actttagcagggttgtgaaaatcaaattaggcaatgtatgtaaatccttacataagtattcaatattatgacaactattattattattaatgcttttgttgctatttttattattttgatgatcatgtctaggattaataattcctgaccccaaaagactatctagtgctctaaactttcggaagcagattctaaaaggatgagtttttttcccttctttattcggagttggtagattggtcaggagataggggagtctgtggtgggaagaacatacatgattctatataatgctcatatggtctttgtgatcatatgcggtgaggacacacaatttactaatgaaaccttgaagctctattttattatcaaagtactgagctctccatttgtgtacaaaaaaaaaaaaaaaactggattacctgtcttaacctatgataagttataaaacctccaaactctgtgggcaaccagttctgaaaacacacaaaagacagattaaactttgagtttatattggaaaattggggagctatttgatttttttcattacactccttgtgattatatgcattgacaaccatattgagcaactcaattttccttcactactacaaagcaaattcttgtccaaacacagaaatatgtctctattatgtgatattctttcacccgttacatctcaaatactcaagaataaattgttcatagagtaaaaatgcacaaagatacctacttgacttgataaactgtttcctgtttttaaatgaaactgcatcacagaatggactttccttttgtttaatttccagttacctgagaatgaggtaaaatgaaaaatgaaagaaaaagaagttagaaatttttttagagattctctctgtcagatgcttaagtaattcctttcttctaggccaaaaagaaaatgcttcctagctcagggtatatacctatcaaattgtaaagggagcatttccacattgtttgtgctactctaagttttggtttaaaagatcattgttttatgtacatgt

SEQ ID NO: 42359 - DNA, 1043 bp, Homo sapiens
ttttatgttttcttgatgacttgtttgttttgacataacacacactcttttctttctagtagtactcttgtcttgaaatcttctttgtctgacattagtatagctatgcaagttttcttatgcttactgttttcacaagaatattttctacacttttaatttgaatccatctgtgtctttatatcaaggatgctttttgtaaacagcatatatttgggtcttgttttgttattcggtatagtaagctcttttaattggaatggttatcccatttacatagtatgtaattattgacatgtttgtttcggtgttccattttggtattaattatttgtcctctttatactttttttttttcctgttcttcctttcatgtcttctgtttggtaaatcacatttttttgcaggggatggggagtattttattttatctcttgtattgacattttagttatatctctttttaaattggttgctttagaaattacaataaaaattatgaagtcattacagtctacctttaaataaaaataacatatgacctcagagtctgcataagaaccttataaaagttataacactataattccatttatttttccctattctttgtttcttgggttatcataatttacttacagatatgctctattttttttactattttttaaataaaaaacaagtcccttaaaatttataaatgtaacaaaatataaaaaacataatcaaggtaattttaagtcttttatgtttacttagttatttactttttctgatagcttcgtgcatttgtaaagaatttggtttcctctggtccacctttctttcaacttaaataacttatttttctatttatttatttactctgtattaatttattgaagtgtagatttgttggagacaaactcttaacttttggctatctgataatatctctactgcttccatagtttaaagatattttcactggagatagcacgctagatttgacagtatttatttatttatgcttagcactttaaagttattctatatgcatctgg

SEQ ID NO: 42360 - DNA, 1041 bp, Homo sapiens
ccttcgtatgttggattcctaggtattttattctctttgaagcagttgtgaatgggagttcactcatgatttggctctctgtctgttgttggtgtataagaatgcttgtgatttttgcacattgattttgcatcctgagactttgctgaagttgcttatcagcttaaggagattttgggctgagatgatggggttttctaaatatacaatcatgtcatctgcaaacagggacaatttgacttcctcttttgctaattgaataccctttatttctttctcctgcctgattgccctggccagaacttccaacactatgttgaataagagtggtgagagagggcatccttgtcttgtgccagttttcaaagggaatgcttccaggttttgtccattcagtatgatattggctgtgggtttgtcataaatacctcttattattttgagatacgttacatcaataccttgtttattaagagtttttagcatgaagggctgttgaattttgtcaaagaccttttctgcatctattgagatgatcatgtggtttttgtctttggttctgtttacatggtggattatgtttattgatttgcctatgttgaaccagccttgcatcccggggatgaagccaacttgatcttggtggataagctttttgatgtgctgctgattttggtttgccagtattttattgaggatttttgcatcaatgttcatcagggatattggtctaaaattctcttttttttgttgtgtctctgccaggctttggtatcaggatgatgctggcctcataaaatgagttagggaggattccctctttttctattgattggaatagtttcagaaggaatggtaccagcttctctttgtatctgttatagaattcagctgtgaatccatctggtcctggactttttttggttggtaggctattaattattgcctcaatttcagagcctgttattggtctattcagcaattcaacttgttcctggtttagtcttggaagggtgtttgtgtccaggaatttatccattt

SEQ ID NO: 42361 - DNA, 1055 bp, Homo sapiens
ttggggcatttagcccatttacatttaaggttaatattgttatgtgtgaatttgatcctgtcattatgatgttagctggttattttgcccattagttgatgcagtttcttcctagcgtcgatggtctttacaatttggcatgtttttgcagtggctggtaccgattgttcctttccatgtttagtgcttcctttaggagctcttgtaaggcaggcctggtggtgacaaaatctctgtgtttccttgtctctaaaggattttatttctccttcacttatgaagcttaatttggctggatatgaaactctgggttgaaaattcctttccttaagaatgttgaatattggcccccaatctcttctggcttgcagggtttctgctgagagatctgctgttagtctgatgggctttcctttgtgggtaacccgacctttctctctggctgcccttagcattttttccttcatttcaaccttggtgaatctgacaattatgtgtcttggagttgctcttctcggggcatatctttgtgttgttttctgtatttcctgaatttgaatgttggcctgccttgctatgttggggaggttctcttggataatatcctgaagagtgttttccagcttggttccattctccccgtcactttcaggtacaccaatcatacctagatttggtcttttcacatagtcccatatttcttggaggctttgttcatttctttttactcttttttctctaaacttctcttcttgcttcatttcattaatttgatcttcaatcactgataccctttcttctagttgattgaatcagctacagaagcttgtgcattcatcacatagttctcgtgccatggttttcagcttcatcaggacatttaagttcttctctacactgtttattctagttagacttttgtctaatctttttttcaaggtttttagcttccttgcgatgagttcaaacatcctcctttagcttggagacgtttgttattaccgactttctgaagcctacttctgtcaactcgtcaaagtcgttctctgtcctgc

SEQ ID NO: 42362 - DNA, 1046 bp, Homo sapiens
acagattaagtgatttgcccatagaaatgttattaaatgttaaggtgaggattctaacaaagttgacattatgcttgatttagggatatttccccacttcacatcactgttctctcattaccagaaaagtgtataaatattttgtcagacagcgtgatgcctccagctttgttctttttgcttaggatagtcttggcaatgcgggctcgtttttggttccatgtgaactttaaagtagttttttccaattatgtgaagaaagtcattggtagcttgatggggatggcattgaatctataaattaccttgggcagtatggccattttcatgatattgattcttcctatccatgagcatggaatgttcttccatttgtttgtgtcctcttttatttcgttgagcagtggtttgtagttctccttgaagaggtccttcacatcccttgtaagttggattcctagatattttattctctttgaagcaattgtgaatgggagttcactcgtgatttggctctctgtctgttattggagtgtagaaatgcttgtgatttttgcacttgattttgtatcctgagactttgctgaagttgcttatcagcttaaggagattttgggctgagacgatggggttttctaaatacgcaatcatgtcatctgcaaacagggacaatttgacttcctcttttcctaattgaataccctttatttctttctcctgcctgattgccctggccagaacttccaacactatgttgaataggagtggtgagagagggcatccttgtcttgtgccagttttcaaagggaatgcttccagtttttacccattcagtatgatattggctgtgggtttgtcataaatagctcttattattttgagatacattccatcaatatctagtttattaagagtttttagcatgaagggctgtcgaattttgtcaaaggccttttctgcatctattgagatgatcatgtggtttttgtctttggttctgtttatgtgatgcattacatttattgatttgcctatgttgaaccagc

SEQ ID NO: 42363 - DNA, 1001 bp, Homo sapiens
agtagagacgtggtttcaccatgttggccaggcttgtcttgaactcctgatctcgtgatctgcccgccttggcctcccaaagtgctgggattacaggcgtgagccaccacgcctggccaacatttttttaatatgtaagagttttcttgtatttccaaataaaggccattgctttttatctattcttatatttttttctaaaatgacttgttttccctttataatatttagagctagacatttttaattttaatggagttaaatttattggttactctttatggtggatgctttttgcagccagttgacaagtggagtgaatttattcacatgtttggcaactgattggctgttagctaagatgagggaaagaggttttcttttcaaaatttaggctggcccaggccaaattgcttgaagactggccgggttatgagaacacaatagatgtgtgcagagtctctaaagactgggcttagaagtgccataacattacatctacggcattccattgggcagagaaagccacaagacaagcccagagttaaacagaggagtaatagatcacctctgtggtggaagtgctacaaaggcacattgaaattatatgggtactaaaacgagaagaattcttgcaatataccagagatctttgtacaagatctcagaggccagcagaagcaaaccacctggtgccaaaatctctgtaagcgccatcatcactgtagtgtttaaatgcaataaccacttgatctctcatcgctttgcacttcatcaggatttcatcccgtgcctccttggtgtttattggagtaattaggatgccactggaagccataggataacagtgctacattttcccacccctgtaaaaaggttagcatactcatccaacatgagagcaacccaattacagaattaccttttgaaggtctttttcaggcactagacctaatataaattactgtatcagacagaaaatcagcaagaaaaagatagca

SEQ ID NO: 42364 - DNA, 1072 bp, Homo sapiens
aacaaattaaaatccacaaatacaatagatgcttctctcttaccaattctacccccacttccactctcagatgctagatcagtgagaggagattgcagttctaatgatggtctgaatgcagatatgctacctgaacaacctaatgtagccattgtaaagaaagtaaatacaaagttcctgaggagccttaagggagaaagatcccttcctggtagtcagcccctaatctgaggtctcaacagtgatgtggttccaagttctctgaggaaagcagttttgttgtctgcgataaatgaaatgaattggataagagttggtataaaatgcctaagtcttcccggaatgagggttggcagttatcagattcctcgtggaagttggtgctttatgaaactagcagcagtagtttgggacttattttattatacatatcaaagactgcagaaaagagagctatcatgggcccagatttattttcttgaccagatctgagctcacctggaaatgattcatttcagactggaatttaagtgaaggtaaaaaaaaaaaaaaaaaaactatcctcacctaacatcagcttttacttggccacactagtgagaaagagttctcaataaaatccataggaaaggaaaatgcatggaacggccttctgccttcatgttacacaaagagtaggaactaagaacaattgatctttcatgatgcttttatgaattatataatctcttcagccacttactctgttcttctttatctattgtgtcttacactaattcaggagcacttgctctttggaaaacaaaacagcctttttcagttgaaggtaatcaggacctaggaagcatgagagattgatcatattctatgcattctgtgagttcagattttgtattcagtttttgtggcaggaataaattacccagtaatggtcaggtaggcaacttttcattcaccatattaagtcttatataatgattcaagtgttctaatttagccccccatgagttattttttagtgaagaactataattaagctaagtttgatggacttgcccaaggtcacttatta

SEQ ID NO: 42365 - DNA, 1024 bp, Homo sapiens
ttttaatttctatgggtacatagtaggtatatctatttatggggcacatgtgatattttgatataggcatacggtgtgtaataatcacatcagggtaaatgtggtatccatttatcctcattgttatagctttttttctttaccaccagttttgagaaatttgtttatgatatattggggttaattttctctatgtttcttgggctttgggtttgttgaactacttgaatctatgggtttattattttcatttggttgaatgcagataatttgaactacgatcatgaatgctagataatttttgtttcctataaatattcttaaaattgttttctggagtgaagttaactgatcatttgggtcttgcttttaaagatcatgtagaaaagtagatcttaatatatcagtttactttcatttttttttctatcctagatctatattccttcagttctagcaggttactcatagcttcacatggatagtttttgtattttgtctttcccttctagctgtttctgataattactgctctgccaaccacaagctacttcatttaagtagcttaaatggtgccaaaaatcaaataaataaaataaaatttataatttcttaatttaatgatgctatcaataaaatattttaaaatgaaaaatatgcttcctctaccttgtcctctaaaacctcctgaagaaaaaattgtgacatagcaggtctctgggccaacctataactcctgtatctttaatgtgtttctaaattccaggagaagccatggtttaatcagaagaggcttgagataggagaggattacagtttacaacatgagataatcagggacatggaaagtcagtcacttcataggtgatgataatggttgacaaatatactccataaggtactatgctacctgctggacataaagagttgtgagttataagatttctttaggtaccttatagtaaaacaatttttagacaaaaattagtgacccatcaagttgaattacaataacacttttagc

SEQ ID NO: 42366 - DNA, 2115 bp, Homo sapiens
agtgtgtcacaaaggcactagtcattcccagggtaacaggtgataagaagcataagttttgaatgcaatggaagaaagtaatacctccttaatagttaagttgtgaagtttctgtactgaaagagggctttggggaagtacctaagcaatgattaaaaacttaattcagatggtattggtatcagatataaaaagacaatattctaagataaactcagcagagaaaatgggggggtatcagtagtgtctacatgaacaagaattcttaatttttcagaaaagttactatacttttaaaatacaggggttttaccattccctggtaagaaagaatagaaagtttatatcaagacatcattttaaatacaaaacatagttgtgcaaaatgtagagaaaagtaattataattcttttttcagagtgtgggttcagtgatgcagactgtaagaattccagggaaagagcctctccatatattattatatacggagatttccgaatttggcagataaattctgcctctgtaggtcaaaattaggcataggtgctcatattaggcataaagtgtaagtgtcatcccttaataaatgttaatttgtctgggtgaatgacatgacaatagtatagttaacaattccattaatgtgaactcagtgtatattatccccttctattactacacagataacacacgcagtgaaatgatatatttaaaagctacttatatttttagatgggattgtagataattaattttcaaattctctaaaatagctatactttttatagtagggaggaaaagcaacacttagaaaaacactcttagactcttcatgaataacattagtgaaataatgcaaggaaagcactactttcctaaggagaacttactaccaagctacatttttttttcttaaaggtggcattggccatatttctcaacacagtttctaggtgtgaattcattggctttgtttccaataaatttcaagcctgaacattcagaaagaatagaaaaggctgcagatttttctctgggaatgtatatatgcagctatgtctgtatgtgtgttagcacacacttatgtgtgtgggtcttttataacaatgaaaatagataagataacacaagaaattagttcttcacctacagatacaaatcaaataggaattagtcaattcactgaagaaatagtgagaagatacagacaccttcaaaaagaagcacaagggtaaaacagaatattttttaaaatgattcatatgttattgtattctttaagaactctgagaggttaggtaagagagtattatgagatggaaaaggaacactctcagaatttctaaggtcaggcagccctggcctgcactattttatctgaagagagaaattgagggaacttttttgttgttgttgtttaccccagatatacaggagataaagaataaaggaaatataaaatgttttgaaaataaccagcatcctcaaaattagataattatttataaaataataaagttgtgaaacttattagtaatcataagcaatggaatgatgagtgaaagaaacaagtaagttagaacatatgtgactacccatagtcatgaagtcacacactggctgtcaacctgatttttttttctttctttctttcttttttctgattatccatgtgaggaaaataagtattcctcttattgtcaagtaccatagcttcctttgagtattcctcttattgccaagtaccatccaacatgtcaccattgtgtgctgattaatgaggctcagataatatcagtatccaatatcaattaaaagagtcatttggcaaaagcaaaaggaaaacctcagttttcgggaggcttttctacggagaaagcacaagcagatcacatgtggtttcatcttgcttgacagttttgatttgactgtcaatgctctgaggcacttcaagcagtataattttggtcttgctttcttgcttttctctgaccctcaggagtaaggtgccttccatcccttcctcttagtaagtgagtgtgctgaatatcttttcttgcctctccaatatgccattgtcttctagactcagattaagcattggattgggccat

SEQ ID NO: 42367 - DNA, 2042 bp, Homo sapiens
gtggtgttatgactcagtttccctacattactttttttgagatggagtctccctctgttgcctgggccaaagtgcagtagcatgatctgagctcattgcaatcgctgccaagtgattctcacatcgcagcctccccagtagctgggcttacaggcgtgcaccaacactcctggctaaatttttgtatttttagcagagacattttagtatttctagctacattggctaggttgatcccaaactcctgacctcaagtgatccaccagcctgattctgcccttttgtctcttagtacacatgctactcacccaactcctgagatctaattgggaagatgctgatcaccagtttcaggtgcttctatctgttgggggaccgccttcccctgaagccagctgtgactaattattattattttattgtgagcattattattttagagagatagtttaataactgcctgaccatcacctgatggttgcccgacatttcttgtggtagtgaggtccagggacctctcctgccctgctcatgtctgactagctacctactgtaacaagaaaatctttgaggccaagccatattgcttgaaggagcaaaactttttatgcccactgacaagggaaggcagagttacaccaacggttttcctgtttctgccaatttgaagaggattcagtttctttatgattttaaaagagcaccttgtggatgttttaaagtgaccagaacattttagaaccctctgactcctgctttcttctaatttcctaagagcacattagaaagagtctgctgattatttaaaaatatatagaggtcaggggaggagtgttggatattaatcatctctagagcagaaatttagacttatttcgcataagcctcaagctgttcatgtgaggacaatcccacatgtgtacgctatctgacttttgagtaactctctcaaaatgtgactcccacacgtacctccgcctgccctattctctgcttctcctctcccgtcatgtgagaggaggtacctgtgactaacgccatcacttgtgctctgacttccacatcaccttgtccttcccaggagcctttagctatccaatacctcttatttctgcttcttttccaatattccttttacacagggtctatttaatgaatatgaatatgctcaaatctttcccatctaaaacaacaaaccaagcttccctggtatcttcctcctcccagtgattctcctctcctttgtgcttccagttgccatcccctctcacatcagtcttcagttagttctcatctagtttcaaaccccaccattagctcccatgtaggatctcccagtgacctctatgttgaaatgtaaacctcaccttgacttgatcagcaacacttgatgctcttaactttgccctgttttcttaaatacgttctcttcttggtttccatgacactatattgtttttttctcgtttctttcctatttgtctttctattccttaagcacttctcctcttctgtagggttctttttatctacctgacctctaaatatcagagatctcaaacttgagttctagggccatttctcatcactattttaactatctatctctttgtatactattatccacacacataacttaagtgatcactatacatcaatgaataccaaatttatgtgtctgtgtcagagctcccctttgagctctagtagtcactctagctgacatcctggctaagtggtcatgggcatctgcatattgcctgtaacttattctccaattttcctatcacctctttccaaaattgccctagataatctattatggagaaagaggaaatgcttttgtgtttctggaggagtggggccttctaaataaatttagttgagtttcagagctatgtattgaaccgcatacttgtcactgtgtggagatttcaaatatgtagccacctaagattggctaacactgagcacatgttcttccactcaagcacgatccttatacagcatttcttaactcagtgagtagcatcacatgcccc

SEQ ID NO: 42368 - DNA, 1020 bp, Homo sapiens
atatttaatgtgctcacaatgcccttagctgatttggccacatgtcttactaccctcaatctaagttcctaccactgacctgctcatactgaactccctttatctctcagccttcagtcagactgacctctctggagtactcttacctctcactgactcctgcatctatttgagtcctattcatcttttacatttcagcaaaaacaccactactttaaggaagccttttctgattcactagatttaatcaggacccccattatatactttcttttcacagcatttaatttaactataatttaaaaagtttaagtgtgaccctatgttaatgtgtatataatctactagactgtaaactccgtaagaacagctccttgtggtgtagaaattttataaggaacatcttagtgtctgtgttagtagtggatcttagatatgatgggtgggtggcaatcactggtagataaaaatcactgataagctcaggcagataaaaaggtatgtgttgaatagaagaactaaaaggaatggaaggtactgaaagagaaaagattagagaatgagaattcaacaggcacgaacccctaaatcggggatgccaaccagatttcagctcatatattatctttgatctgctgctcttgccttccagaagtgatatattgagaaggattctgagcctgcattagaactgttggaaaagaagtgctgtcattgattaatgatgtttttcctggagtgggagagtgaagtggtggcatgtgtgctataggtttgccatgtctattaaaagatattgccaagtaattgtggtccaaatttcaatttgccaaggaaactgggtaaagctagactactttaagaaaatacattgaagaaaaaccaatttactaaaaacaagaaaacaaaagagacaaaacccgcaaatacaaacacaaaaaccaaaactcaaatcaattagaggaaagcttattagtataacaactgatttcaccaaaaagctgttacgtgtggtaaaac

SEQ ID NO: 42369 - DNA, 1050 bp, Homo sapiens
ttaattgatggtttgtttaattattctttgaagcatccaagtaaaactaatcagtatgatattttaagagtcatcacttttcattctttgacaaatgggtactaagtatgatttttccaatattaaaatggtcttaggcttttatatgaattcttgaaaatgataacatagccataataaattatgtaaattatcggtgtgccctttggtttagattaaatcaagatccctaaaaataatctacataatgaagctttcctggaccagcctgggcaaccacacctctttataaaaattaaaaaataaaaattagccaggcattgtggtgcacgcctgtagtcctagataatcaggaggctgagtctagaggcagattacttgctccccagagtttgaggctgcagtaaactttgattgtgccactacatttcagcctgggtgacagagtgagacctggtctctaaacaaaacaaaaaacaacaaaaaagccctcctgaagaaataactgtagttgatacaaatgtgtcattgccccaaaaggtaaaaaatctttgatttcgtatcttgcctattatgaataatactgcaataaacctgtgagtgcaaatatctcctcaacatactgatttcatttcctttggatatatctccagaagtgggattgctagatcatatggtagctctcattttaattttctgaggaacctccatattgttttctacaatgactatattaactttcccaaccaatggtgtccaagggttcccttttctccacaccctcaccaacacttgttatcttttatctttttgataatagccattctgacagatatgaggtaatatttcatagtggttttaacttcatctttgtaaaaggaaacacattgataataagagcttcatagcctcggataagctatttatttcttaaaataaaaacagagcagcctccgagactatcagcctcatatctttcataagcatgagatttaattttaaaataacaagggaaaagcctaggcttggtatgatgattatgtctgacac

SEQ ID NO: 42370 - DNA, 1033 bp, Homo sapiens
aacaagtgatcattggtcttatgtttggaatctgaaaaggctttgaaatattaaacaatgggtaaaattctcttccctctcctcccctctcctttctatttcttatctcaaccaatattttaaaatcccatacttaggatttaaaaatattatacaaattatactaattatttcatatgaattttcatttaattaatgtttactttttcattattctttttgaattgcatctcaaattcttctgctgataacatcttccgtcttcaggcaatattttttagactctttaagtgcgagtataatggcagtaattttttttttaggttttcgctgtctaaagcagtggttctcaaagtatagatagactatagaaccttgggggtcctgaggtactttcagaggattcataaaaactattttgatatatatactatccagagcaaaatcagggaagaggagcatggagatgtcccaccagacagttacacaacaggtctggaggtataagaagccatgtagatttcactgaattacaagaatatccaggacatagagtacaaggtgggattgataaaggatggggctggagaggtagacagggatcagaccacaaataacattttgggcatccactgtagttcaggtaaccttcagtcacaccaggaaaactcaaataacctcctagtttgttactttatctcaaatgttgcccctctttatttaccataccattggcagaatgatcaccgtttaatgtagttcatgtttatacactacttaaaccccgtcaatagctactcattgctctcagaagtatttctaaccacttaataggacctcaaatacccatcatgatctgaccctaactacatttccagcctcatcttttgtcagctccttctttatgctggctgttattttacgtagctcttttggaatgtcttccagaagtgttttataataccattgttaggtttactactaggtacttgagacaccttgtagcctttgctgctattgaacatgatatctt

SEQ ID NO: 42371 - DNA, 1073 bp, Homo sapiens
gtttgggaggccaaggctggcagatcacgaggtcaagagatggagaccatcctggccaacctcgtgaaaccccatctctactaaaaatataaaaattagctgggcatggtggcgcacacctgtagtcccagctactcgggaggctgaggcaggacaatcacttgaacccaggaggcggaggttgcagggagccgaggttgcgccactgcacttcagcctggcgacagagtgagactccttctcaaaaaaaaaaaaaaaaaaaagtcaatatgcaaatgttcctattgcacaagtaaggtactgtcctattctaactgacaggcagaagaaaattaaatcacctctgggcaaagatggcaacaaacagataatctactacatcacatacattgttttcagtattcaaataaaaatacaaaaatgatcaaaaacaaagcagaaagcagataatagaaacaggtccacagatgaactagattttggaagcattatatgtggacattaaaacaattgttattcatagggtcaagaaaatcaatgtcaaagtatagaatttcacaagagaactgtttctcagcttttaaatctcttatctcaccccacatacgatttagaaaatgtgtcaagagaaaaagcaattcagactattggacttattctctgtggatcttggtccctccagctcttgctctctctctctttctctttttttttttttttttttccagatggagtctcactctgtcacagattttgctctcttgatagcttttaactctgatatttctttccacagtgttgtgagaatgagaatcaagactgctgctttctgctacatctctaggttaataacaatgttattagcaaatgcttcaaggagaaaaggggcagagaatgacatggtcacctcactgaattttcattctctcaggaatctaggcttctcaagctctgcttgcatctgctgctctttgatgtattcaggtgtttgttgattcatttttgtacaaccagcaattattctcaatggaaggctagtattttacaaactaccgttatcacacacaaaggtg

SEQ ID NO: 42372 - DNA, 1068 bp, Homo sapiens
tttagtttcttttgaaatggccaagcatagagcacagccaaatttctatataaaagacacactgatggtgattaatttcctcttatctagagcctggcttatggaacaaagtagattgtctatcttccttattaatctagtaaatgatttagccttgttcctagtgtccagaaagttttagtaatgaagaaggcaaagcagatacaaatacatctatctgaaattgctgcccattggtatttgttccaaaagtttgattataaatcagttgttcagaagttggaagacattttcctttgggataaaatattatataggatcttgtgtctcttggtgattccatcaaatccaaatatacctgaggtatagtattgtattaatataactatactatagtgtttgtctgggagacatatatttatagttgtatttcaaagaaacagtttattctattagagaaatattagactcctttccattaacaaaccacgttctgagtagttaaagcagagactccttgagatctaagcctctgataatgatctgatacagggaaattgaacttgataggggatggggacaagattacgggacatgaggggaggagatggctactatggaataagcaggaggctggggaaattccagaagtagagacaaaggagttgtttactggagtttcctactagagtgacattgtagaaaacactggccactcaatctccccatttatttttttctaaaggtctcaaggattaacctgttttcccatttcatggtcattgtctcttatatttccctcctgtgttgtccacacacctttcattcctgatctctggatcctaaacactgacactcattgtaaacattggttttttaatatatctggggcacagctcagtaaattgagcagaggaagaaagtggtatgttgtttaagttttaataaatcctcgtatttattcatcaacagttaatttagagatcaacacttagacactcagaaaattattcaaattagaacatttgtcttttttctttagagaacttctgtttaaatggggagatg

SEQ ID NO: 42373 - DNA, 1022 bp, Homo sapiens
tctcgctgtggttttgatttgcatttctctgatgaccagtgatgatgagcattttttcatgtgtctgttggctgcataaatgtcttcttttgtaaagtgtctgttcatatcctttgcccactttttgatggggttgtttttttcttgtaaatttgtttaagttctttatagattctggatattagccctttgtcagatgggtagattgcaaaaattttccccccttctgtacgttgcctgttcactctgctggtagtttcttttgctgtgcagaagctctttagtttaattagatgccatgtttctattttggcatttgttgccgttgctttttgtgttttagtcatgaagtatttgccatccctatatcctgaatggtattgcctaggttttcttctagggtttttatggttttaggttttacatttaagtctttaatccatcttgagttaaatgatttataaatggttttataggattgaatcaagctgatcccacaacgctacatccatatttcccaccaaaacaaataaacaaaaacaaacacaaaaacctatatgttatttgtgaaagtttatttttcattactatgcagttcttgcaaacaataaagtggagatagagaaaatgagtcacacaatatgtgtcttttgctcagtttattcatagagcctatatttttcactattaataaagacagtagcctcctgtgttttcatgctcattaatcagtcagtggcttcatggattcttgctgtcagacaattctatttggaaaactaccaagatagcaactcccttacttatagaacaaccatagatgtaggagcaattatctgtcaaagagcatattttctcttcctttttacctcccatccctttgacagagcattttagcaacactactgagtatattgatgtccttataataggaaggcaacaattctattctttactttggtaagatgaaatgttaggataatgaagagagctaaagatagtgaatttttcattctctttta

SEQ ID NO: 42374 - DNA, 1044 bp, Homo sapiens
attatcttgtctggggtttgcctagcttcttgagtctgtaaatttatatattttataaaataatttctatggaagagtttaaaaaaaaactgtgcataaatttattcctcttatcaggtaaagtaagggctcacttactcacccctgaactggatatcattaagtgatctcagaccccttttcattaagcttcagtgaggcttcagaattgtttccactacagtcaatagccaatcaaatactgtgcaaaagtgtactaaagatgtctttgaagatgctgttcattacaactcagggacctcttcagtcctgctatcggagaaattgctctctcactttagatactttaaaaaatcttagggaaactgttgagctcctctctgtgatatgtttgccaatgcttacgtacagatttgtgggtccttccactaagtatgcagaatcagttggagtgcattttgtgtattgacctcacttataattacagtttatgttttattttctcctcttaccctattttcttcatctacatattgaagattttataatttgtgagttgataaaatctactaaagtcctattggaaaaattagagatgtaaataaataaattatggcatcttctttagtaaaaacactgaatagcctaaaggtattaattcttcccaagtaatttatagttttaatgaaattataatcaaagacctattttggatgtagacaacataattccaaatctattttgtagaataaagtgatgaaaagacctaagaaaatgttaaaaatgaagaatgattagtcaacttcctcgacaatagatttaaacatttgtagaattaaaagttttaaaagaatatgagctttacacaattctgggcagggaaattaataaacagacacatgttgacttatggcaacaacttaatgtggaatgaataaattagttaccaaatggtttgaaggaaatacttaatctcatgccttacaacaaaataaattccagatgcattaagggattaatttttaaagaatagcgtacaaatct

SEQ ID NO: 42375 - DNA, 1056 bp, Homo sapiens
atgtgaagtgcttagaatagtgctaggtacatagtaattgctagataagtgttattatttttattagacttgagatattagataaagacttaaagcaatgctaacattagaaaatacttagaatttaaagtgtaaagtgttaggtgaaaattttctggttaaaaagaacaaaaaaagtagcataattctaattgtgtattgaaagttatttatacatattttaaaagaaatctagaagaaaatatcctgaaatatttccagtggatagatctagagaaaaatgcaagcataccttttttcattgtcctttgctttattgtactttgcagatattgcatttttcacaaattgaaggtctgtggtaacactgtgtcaagcatgcctataggtgctgttttttcaacagcatgtgctcactttgtgtctgtgtcacatttgttaattctcacacatttcaaactttattattattattatatctgctatgatgatccaagattaatgatctttgatgttactcttgtaattgttttgggacagcacaaattgtgtccataatgatggcacacaatctataaatgttgtgtgtgttctgactgttccactgagcagccattcctccatctctctccttcttcccaggcctccttattccctgagaaacaatattgaaattaagccgattagtaactctacaatggcctctaagtgttcaagtgaaaggaagaatgacacatctctcactttaaataaaaaagctagaaatgatggagcttagtgaaaaaggcatatcaaaagctgagataggctgaaggacttcttgtatcaaacagttagccaagttgtgaatccaaaggaaaagttcttgaaggaaaataaaagtgctactccagtgaacacatgaataatgaaatgaaacaggcttattgcagatatggagaaagcttaagtggtctggataaattaaaccagcaacaacattttcttaagccaaagtctaatccagagcaaagtcctaagtctcctcaattccctgaaggctgagagtggggaagc

SEQ ID NO: 42376 - DNA, 1074 bp, Homo sapiens
ttttggggggtgagaacacctaaaatctactctgctactaattttcaagaatataatacattgtgattaactataatcatcaaattatacaataaatctcttgaacttatttcccctatctactcagaagtagaaagtagaattgtggttataagggactggactgtgggtggttggggagatgttatgaacaagggttaaaaacctattgaatactatgctcattacctgggtgataggatcaatcataccccaaacgtcagcatcacacaatatacccaggtaacaaacctgtacatgtaccccgtgaatctaaaagaaaagttgaaattatttaaaaaaagaaaagaaaaatgatctcagtcatactagcaacaaaaattactagcattaccagaaataaacctaataaaaactacaatttggttatataagaaattataaaactttttgttgaagaagataaaagaagacatgattaaaaagaaatatatattatatttgtggaagggaaacacaacatctaaaacgtggcaattctcagactgatacatatattcaatgcaatttcaatccagacatatttattcaaggtatttgtttgctttatattcagacaaccttcctattcattatgctaggtgtctttctataatttgaaatactaaacaagcaagcttttttttttttaagagaaatagagagagggtcttgctatgttgcctaggttggaatgccgtggctatttaaggttgtgattatagtgcactggagccttgaattcctgggctcaagtgatccctctgcctcagctgcaactacaggtgtgtgccaccatggtaggctaatttttaaagtcattaatttaagtatgtaatcaaaataaatttaaataacatcgtttctcaagtgtgaagttggggccttttttttttatctagtatctctagaaacaatagttttcccatctacatctttcttcctacttgtctcgtatagttattttacaaaaaaaaaaaaattcaattcaccttccttctgttctgctctcctaaaatgctagaataaaaatag

SEQ ID NO: 42377 - DNA, 1054 bp, Homo sapiens
tcagagtctgctctctcgtgtgtgagtgcagttcagtgaacagcagcacctctggaggggtcctcctatcacaaagagcagagagacagagaggaggccagcactctggagggctccctgccaataccaagttgccttccaaggctttagggaggtaattaaggttaaagaggtcataaggatgaagccctcgtccagtaggactggtgtcttctaagtagtggaatacatgtcagggcttgctgtctccccttcaagggtacagagggaaggctgcacgaagagagagagagaagacagccatctgtatgtcaggaaaacaagcctcaccagaaaacaaatttgtgttttttaagccacccagcctgtggtactttttgtgtgtggcagtcctagctgagtaatacagggatatatgggaatcatctgtgttgtctacctagattttttgtaaacttacaactcctctaaaaatagtctattataattttttacattgaaaaaaaaagtacaggaaaggaaaattctttaagtaggcaaaacatcaagcagaacacttgcttgttcacactgtacagaagaagaaattttcataggtgtgattctgtatcagtctcaggatatggtttggaagaaacaagatttgaaaacttaagtcagagatagatagatagatagatagatagatagatagatattatatctaatatgtgaatggacttctcagaataagtagagtgtgaagatatttgtattttatatgcatactcaccaaagtcattcaattcacagggagctccaaataattaggtagacataatgatgcattttctctgctcttccagagggcaggatgcagacttgttagtggtaatcttgctgatctttactcttcaacctttcaattctctgtaagtctacaattctttttattatgatgatttatacttgaaatacagagtagtttctgtttttctgagtaaactctgacaaacacaacatgtcataaagacagcaagcatgaaatcttacactcagaggcataactccattt

SEQ ID NO: 42378 - DNA, 1033 bp, Homo sapiens
tgactctgtacctggggtgattcggcactatcttgatacatatttggttgttgcaactgggatggtgctactgggatctaataggtagaggtcaggaaactgttcagcattttacaatgtacaggacacctccctaccgcaaagaactgtccagcacaaaatgtcaataattccagggttgagaaaccctggcttatttgtcacttcctcaatgttttcagtcaacataaaattaattcactttctctctctcaaaccatgctgttcttttccgcagtaattcatcgaaattttcaattgtgtattcagttctgcatctaattgtttaatgcctatttcccccactagactgttctgtgagaatagaaatgtgtctattttgtttcgccactgtttattcagtgtgtggcataatatctggcatacagcagaaaataaataataattgcttaatgaataatttaataagctttattattgagtaggacattattttagaaaccgagtagaaacagtcatttgtcacactgtcattcaaatccaggaaaaaatgtagtgcaaaactaagacatacaaataacaaattacagtacagggcagttgaaataatatcctaaacagggttaaaaataatattttgggtaaattcagaggaaggaatgaataattcttatgaatttggagttatggagcatcattattgtcattaccttcttcactaccatttttgaaaaataattaattgactcacaaaataggggttatctctgagatgtaagttgacacatgcttaacttactatgtcactcaccacattaccagatggtaaatttttagtgactctgcactattaatttgttttctacattacaaacaaattggtctgagtggaagcttgagttgcctgagctcaaaataataattctatcttgcaatgatctttctgaatatgctcaagaaaccaattttggtgttgtgagaagcccagaatggtttcatttattctggaccccaattctactgacagggtaca

SEQ ID NO: 42379 - DNA, 1052 bp, Homo sapiens
ttttaaggattctatggctatttgggatcgtttgagattccatatgaattttggaaagtttcatctatttctgaaagaaaagccactgggattttgttagcaattgcattgaatctctatattactttgaggagtatgcacatttttaacaatattaagccttccaatccatgaacaaagatgtcttcccatttatctgtgcctttttaaatttttttccacaatgttttataattttcagtgtacaagtcttccacttccttggttaagtttattcctaagtattttttgatgccattataatggatttttatttcttttttcttgtctaatttctctatctgggacattcagtgctacactgaatagaagtggtgaagatcaggaggaaggaaggaatgctcattctcaccacttctattcaaccattgagtattatgttaaccagcggtttgtaatatatggcctttattacgctgaagtacattcctttttttacctaatttgctgagactttatatcacaaaagagtgttgaattttgtgaaattctctttctacattgagaggttcacgtgatttttgtgtttcattttgttattatggtgtattacattgattgacttttgtatattgaaacattcttgcaacccaggaataaatccaacttggtcatagtatataacccttttaatgtgctgttgatttaataacctagaattttgttgaagatttttgcaccaatattcatcaggtatattagtctacagttttcttttcttgtagtatctttttctggctttggtatcagggtaatgctgacttcatgagtttgaagtgttcctcactcttctattttttgaaagagtttgagaaggatttgggtataatgtgtgaagcaacttttgctgacagtgttgcagcagttctccaaaattgaattgtacagtaaccaaaacagcatggtactagtaccaaaacagagatatagaccaatggaacagaactgagccctcagaaataatgccgcatatctacaaccgtctgatcttt

SEQ ID NO: 42380 - DNA, 1034 bp, Homo sapiens
gaaggcttatttttttaacagaaatctggatattaagctcaatttgttattaatatattatttgtacaacccatagagagattaagggaatgttacagtatatggctttcaaatgtgtaatggctttctatgtgtaatggggagcatgttaaatgatcatgcaaggaactatttcctgccattcatcagaaaacatacaataaagaagaaatatcttacaaatgaggccttttgataacaggtaatgcagccaggaaacttcatagtgctatcaattgtggtgaaaatatctccctattagttgatatttgtgaaactgcctaattgcagccaatcaaccaaatatttatggcaaatttcaagcattttgcatgtattgatgatgatgtatctcatgctaaggctgagaccaatgacactacctcaatggtggattaatgtaagagatttgacatcaagaaatcaaattcaccagtcagttttgaaaaaaaaatatgatgacaggctaagaacaaaatgtggaacaaatgtattcctctaactcacaatgacattcaagatttcaaggcaaggattaatcaacacaaagcaaattacatctcactcaggaaactggaatttttgttgtggacaataaaaatattgaagtttaggaccactttgcaaagaactcctaacaaacaaatttctcaatttgatgcttattgtttgctatagaggaaaatagagtagacaaaaatatttaatgccaagtttttaaaataaatttgaaatgaagaattcaaaaattgctgttgcataagagaataattatagcacaaacagtcacatcacattaaaaaaatgctgtctcattattaggagctgtgtaagcataagcagagtcccaacacatctgttttgaatttttatttgcttttaatctcattgcttttttttatgtctttcgacaatgtttgacagccttccatattcagagactaatactaaaagaaaagacaattcacaatttgttggatttgaacacgttcgga

SEQ ID NO: 42381 - DNA, 1009 bp, Homo sapiens
ttttatgtgtatcagaaaatatattaggatttatgagtatgagaggtcagaaaaatttttttgtgttgttttatgttgatgttcccagagtgattataactagactccttaaagtaaatagtctattttatgccctgccgagtgaggagagtggatgggaaagacgtggactagaaagagagtgtcaggcaggtttgttctgaggaagtaataatgcagtttctcataacagttgctatggtctgaatgtgttccctaaaattcatgtgttaggaacttgattctcactgcagcagcattgggaagtggagccttttgggggtgtttaggccatgagaatgccctcatggatagattagtgctctcataaaaaggggcttttgtgagtgggtttgctttcttctgttcttgtctgccatgtgagaactcaggcttctccccttgggaggaaccatcttggaagtagtgagcagccctcaccagacaccatatcttggtattggatttcctagacctcagaactgcgagaaaatacatttctgtcctttataaattacccggtcttatgtattctgttatagcagcacaaacagattaagacaagagtgttacaagctaaaacaaaaatgttaacaattgttataattactttttaggaaaactctcaatttacttgacataaatgagagggaaaaatattgacttcctttaaattagaattgtgtgtgattaacacagatgttcaatggaggtcatgattctctccatgtgtattgtgactcactgtgtgcaaatactgaatattcaccaagttcactaagtttgcaaactataggccatgggtccaatgtagtctactactgtttttctaagtaaagtcttattgaaacacagtgacactcatttatttatgtatctatgacttctcttggactccgatggcagagttggtaattgcaactgaatgcttatgcctcacaactagaatatttactagttagcccttcac

SEQ ID NO: 42382 - DNA, 1032 bp, Homo sapiens
gtctagccctagaactttatttttcctttccagtgagagccaatatttccacatcagaacaaaggagaatagctaaactacttgatatttatgaaaatgttctccacactgttgtgtacattgtagaaccctaaaatacaaatttagacagatgattttaaaacgtgcttatgaagaggttcttagtgacttatctcagaactggaaacttacccagaaatttcaaatgatgttaacaacaaggagtgtgaccaggatttcctggttcccacagagtaccatgatcttcccacaaatagaatgtagacaatcaatctgcttttgaaattacatttactcagctgtatgtataataactctagatactggtatattacattaatttctgaatctgatgtcatgaataagtatttgagagcatgctaagttctaggccttgataaaggctccaaagaagtatcttcaaatatcacctgagttcaaagagcttaaaattttgtctaatatctaagaagatggcacatgctgagtcacctgatcattaaaatgtaagtgactaatcagaaatacctctcttaataaaatttcaagggacaaggagggagtgaaacagaatgatgctgagaataattaggttaaatcacaattttgtccaaagaagaccaggaataacacaaaaccaaatggcagtcagatacaaaaccagaactctaatagccatttgtattagaaaaagtgacagaaaaatctaatgtgtaatgacaattaaggaaaatttggcggaaaaaataggcaataaataaaagtacaacattacaagttaaagggaaaggaaacacaataaaacaggacagtgattataagctcttttccaaaaatttacttctaacagaacagtcaagtttctctgaaaagtaactagaagtcatagaaaatatcctgaacctcggaggagcattagagacattacagaacagtgtttttgttgaagactgaagtacctcagcaagatgtatcagagactacattttg

SEQ ID NO: 42383 - DNA, 1022 bp, Homo sapiens
gcatgttttgaggaatgggtcaatatattttcttctgtagtgatcttcaattgatttggcatcattttggaaaagcccatcctctttccattccgcagatgggttttcatcatatatttgtgaatccttttctgtattggtatttttgtttacctgttcactaatacaacactgtcttggacattagagcattacaatagttctcgttggatttttcccattatctgtaaactttctttggttattattggccttttgaatttctgtacatactttagaattagcttgttcattttatatatatatatatgtatatatatgtgtatatatatatatgtgtgtgtatatatatatatatactttatattaattctaccatatatatttggatagatttttggatgggtttacattgagcttatattctaatctaaggagacttggtatttttagagcatcactttgtgaaagccctcaagcaaagagatccagatattagcagctgaaaggactggaagtcagctggagttcactgtaatggtaaagccagagtgaaatgaatcaggcactggcagtatgggctagagtccacacttttcatattcagattcatacatatcctatgttaaggtgattatgtcctgttattatttctctaaagcagtgaccaataacaatttataaaaaagaggatctagtgggacaagctgtgtgtggttgtttctgaaccgaaaactgttattcatcatcttcctcctgaactactcctacattcccctcaaccctcagtcagtactttgttggcctggtggggagactcagaccttcatcactcaaaggtctgaactcatatggttattacacccttttcaggccatgattgctataaatgcctatttctgactatcattggatgtggaagcaaatagacaccccagtgaatccctcaagcttcagacatgtttctctctccctccattatgaagtagatttgaagagcatcagatgactatgtaaatgta

SEQ ID NO: 42384 - DNA, 1148 bp, Homo sapiens
tacagttagtctacactaaatttataaaaaaaaaataattgccctacaaagtcactatggctacaaggccaatagacaataggaatttttcaattccattataatcttatggagtcaccacagtgcatgcagtccaccataaagcaaaatttgttatgtgatgcatgacatatatatatatatacacgcatgcatacatacacacacatatacatatatatgtacaaataaaagcagtaacaattgttctttgtgtactccatttgactgtaatgcttttaaaaccaaaaaacataatatattatacagttaagtcacaaaatattagttaaatatttttgctcaaggttcagttgcagagactggaatgctcttgaatgaatttgagcagagatagatttattacagcatatttaaagacttacaaaatcattgcagttgctgatgaaatagtcttagtgtaaatcaatacttcaggccaattctcctcctatgaattgtggacaagcagaacaactaaaatgatttatttcattgctgtcattcaagccaacactgaagaactctgttatgtgaaagccatcaggttttggctgatgccagaatatcatgcagagaaaaccccctgtatggtaaacacacctcaatgcagttcagagttctgaactaaggaatctgggaggggctgacctggaaattcattattcatctatgaagaacatctgagtcccctaacccccatcctttgtctgatcctctcagatacacgggttcaaggtcctttgttatgggttgaagttttccaggtggaaactgctaatggtaggatgataagtgaaaatgatgtataaactgcatgctttttgcaagctgtgtggttctcctgtccagcccaccgccagtggactcctcccctctatgtaatcccccagtaaaacgccatgccttgtttgctggttctgggtctcttcctcggcttcttaaacctgatgccatccccactggagtcaataggggctcagcatgacaccccacttctacctctgttaactataagacagaccacattgttttcctcactggataactggtcatagggaactttctataaagccgtaggtgtggataagttcaagacaaataagcaa

SEQ ID NO: 42385 - DNA, 1052 bp, Homo sapiens
tcacagtgatctgagaccgcaccactacactccaggctgggtgacagagtgagactctgtctcaaaaaacataaaaaaataaaaatagaaataaaaatttatgatgagcagtttgggtagtgtagtccttttgtattcctgggttcaatatttgctatttactgacgttcagaggtaggccaggagctgaattttcaaactgagactagtcctgagcagaggaaggaatggtcttactacaaaccttagaggtaattctatactgtggttgttctttgggactggcaaaagctactatatgaaatattgatgtgttgcacattcattaccactgaatctgcttggatataagctcaagtggtagtacagcttatgtcatattgtgcagagcttctcttgctttgaatcaaacttaaatcttgcaatcttgtgggttccctttaaatgagtggaatagtaaactacggaataatacatgttgcatccaaatttcaaagtctgataaatactgtgattctttacacagtgtaatgtgctgcaacttttctctaattctagaggagacacctgagatgcctcagactaaaggactcctaggtattttctgatatggtaaaaatttcataggatttattgtatgtcctctcttatgcttgtgttttaaggcatttatggctcctcttattttatgctcacttggtctaacaaacacatgacatcaacataatgggtggtataatattctgtaagatatccaaatgatctggacaatataatattagagaacaagagagctgacatcactctgaggtaggacaatgaaagtatgctgctcttcctgctatattggcattcttttgattatttttaattattgggataagacaaaaaagcattttctaagtcagtatctacataagaactgctggccgggcacagtggctcatgcctataatcccagcactttgggaggctgaggccggtggatcacctgaggtcaggagttcaagaccagcctgtccaatatggtgaaaccccatctctactaaaaa

SEQ ID NO: 42386 - DNA, 1029 bp, Homo sapiens
gacttcatcacaaatttgtgtgggtctaaaacaccttgattatcattcagtcttgggctaattaaggaaattgtactcaactgtctcttaaacactgtcaccagatcccttccacttatggaacttatctatagagcacaactattgcagtgtttttcaaagtgaatgcttccctcaacaatgaatctcttaatttcttaatgaaagatgtgtcttttagatcctcccaggagccatagttaggggctgatcattagattgcacacagtagatctaccccaccgtttccattttccagaccttacaaacccctttcattacatcaggactcagcaaacgttttctataaagggccagatagtgattattttaggctttgtgagccagtcagtctccgtcacagttgttcaactcactattgtagtgttgccataggcagtgctataaaagcagccatagacaattggcgtggctttcaataacactattcacaacaggtagtatgttggatctggcctgtggaccatagtttgccaactcctgctctacactgcatcaaggaagttctagcatttcaacctcaccaaatgtaggctattggaaagcttaatcctccattaatcaaactagcatatataatacttcaaggtactcaaggcaaaacattaagtctcatgtcaacaaatcgggcctagtctacctacaatctgttctaatatttcaagaatttgttctattctcatacatgtttcttcactgctaacataaattgaaaaaaaaaaaacaaacaaacacctatcatgtcttttgtgtgtaagctataatgtgcttaagcatgccttccacttctttggtccgtaatgagaactcggtcttatttgggacctagacaaaataagaatgtctaggagtcatgtagagatttggcattcctttatgaggcaacattcctagggcaatatcattggatgtttttcatgcaattgaatgtttcttccattggagaacaggaaagcctgcttctacttt

SEQ ID NO: 42387 - DNA, 1050 bp, Homo sapiens
acataaatgtaagactggcttctttttaaatcagtattctgtatctcgtctctttgtttttgtcccttcaacttttattttaagttccagggtacatgtgcagggtgtgcaggtttgttacataggtaaacatgtgccatggtggtttactgcacctatcaacccatcacctaggtattaagcccagcatccattagctattcttcctgaagctctccctccaactgcccacccctacaggtcccagtgtgtgttgtttcctgccatatgtctgcgtgttctcatcattcagcttccacttataagtgattttctgctcctgtcttagtttgctgaagttaacggcttacagttccgtccacctccttgcaaaggacatgatctcattcttttttatgactgcatagcattctatggtgtatatgtaccacatttttcttatccagtctatcattgatgggcatttgggtagattccaagtctttgctattgtgaatagtgctgcaatgaacacatgcatgccatatgcagaaaactgaaactggaccccttccttacaccttatacaaattaactcaagattgattaaagacttcaatgtaaaacccaaaactataaaaaccctagaagaaaatctaggcaataccattcaggacgtaggcacaggcaaagatttcatgatgaaaatgcctaaagcaattgcaacaaaagccaaaattgacaaatgggatataactaaagagcttctgcacagcaaaagaaaccatcatcagagtgaacagataatctacagaatgggagaaattttttgcaatctatccatctgacaaaggtctaatatccagtctgcaaggaacttaaacaaatgtacaagagtaaaacaaacaaccccatttaaaagtgggcaaaggacttggacagacacttctcaaaagaagacattcatttggccaacaaacgacccactatatcaagttaccaaggctgattgtgtgcctagatgctttatagcacacatcattgttttgaaatttctctcaaaggagtaga

SEQ ID NO: 42388 - DNA, 1054 bp, Homo sapiens
cccaaagtatgaaatagatattcctgagtccatcctgatataaataaatgatttaattaataaattagtataagaaacaagtatctggtgctgaagaatttcaagttacatagatagatagatggatagatactctgctctccaagcgttgagctccctattctctaagtgtgcattgaccacagtgacttccttccaaacagtatagtatagaaacgggagaaaaacagaaagtttataatggagaaacctgacaaaaactacctcagtcaggtgaccaaggttcatatcaacattgacaggcaatgggaagtatgtatcattataggatgtgatgaaaatggcactttacttgtgtggacttaacctcagatatccccagtctaatcatgggaaaacatcagacaaatcccaactgagggatattctactcctcaaaagtgtctgggtgatcaaagacatacacctttctggtatgtctcattctttcttgcattactatacttccttcaagggaccatttgtcttctaactgaagaacttctgttagtattattcttttatagtcattttgctgacattgaatcttttgatttttgctttatgaaaaaaaccttttatttcatttttgaaagattttttttttgctgggcagttattttctttttgccttctggcttctaacatcttgagaatttttgaaaataatgtgtcttttcttccagctactcttattattttctttttatcctttgttttcagcaattttgctatacgcacccaaatatgtttgtttttatatttatcctttcttaggtttatatcaatgtttgcttctgtagtttgatttttaaaattaattttgggaaattcttggccattagattttctggcattttcttctattctctctttcttcttctggaattccagttgcatatatgtcagatactttttttcacttcccatatgcctatagactcttttcagtatttcttatctatttttgccttttttttttcttttttttttttttttttttgagacggagtct

SEQ ID NO: 42389 - DNA, 1034 bp, Homo sapiens
aattttgatatctccttaagctttacgccaacattttgttttatccattcctggacttatacacaaaacccaattttttcctggctaacagagaaaccccgtctctactaaaaatacaaaaaaaattagccaggcatggtggtgggcacctgtagtcccagctactcgggaggctgaggcaggagaatggcgtgaacctgggaggtagagcttgcagtgagctgagatcgcgccaccgcactccagcctgggcgacagagcgagactccatcgaaaacaacaacaacaacaacaaaaaaaaaaaaacaatttttaatcttctccctattgaacttgttctcacctgtgatccatgtttgggatatattctctaatccaggtcacagcaacttggctgagtcccttactgaaagtcacagggcctgtcaaacagccctcatcaggtctcagaaactcccaatttcccttgctacttcaggcttaagagggtggaaacagcttagagttggtgctggtgctggaaatggaaataccaaatattgtttcctaaacattcatgcaattctattaataatcgctttattaaatttcccatttgatcatgtcaattaattctttccaggatcctgactgatacagtgcctatatttatgaattctttcagaatttaaatatctcatctttgattttcagaaaccacccacagtctaaagattatgtctatgactttgcttatgccactgcttctatctgacacttacctgacttctatttgcccagttcctagcatcttccagttcttccatgaatgccacctcttctctatgactttccctccaagatgaattatatgtcctggtttgcctgtgacggccccggctagcaactattttcctggcataattatcaattgcttccctttcatttttaaaaaagtactagttatagatgaaaaaattatactgtcaccttatctatgcatccttcaaccagaataaatttctcctgattcttatctccacattattttattt

SEQ ID NO: 42390 - DNA, 1027 bp, Homo sapiens
tttctcctttgtgaaaggtcagttggctatatttacatgggtctattttaaagccttctcttctgtttctttatatatatatatatatatatatatataattggtgtattattggtgtatatatattatataactataatatattcatatagattacactgtgttacaaacaacataaaacaatacaaaacagttgaaatgttaaggagaaaaaaggtgactgagagcattgggcaaatacttacttgaccataagcagtgtcactattctcaggtaagaatgaggcatccacaacagtcacccgcggtgacagccatgcccagctgagtaccaggttcatgagagttaccagcatcatgagagaacacagaaatgagaactgtacaaactgacagatttgtttcagaacaaatgtgtggcttagaaactctaaaaactgggataaattttaggaatctaatttcacacaaacaagtcataataatctgcatgtgaaaattgaattaaacttttgtttaggtatagttttaccaggatggggacatttagatttccttttttatcttcccattaatatggcatttatttatttatttatttattatttattttaatgatttttttttttctaagagatagggtctcactctgtggcccaggctggagtgctgtggcacaatcatagttcactataacctcaaactcctgagctcaagccatccccccaccatagccttccaaaattctggaattacaggcatgtttcatttactttttttaaatttacttttatttttctaatatttattccactaacaatatattattgagttaatggtgccttcaagcattgatcttttgtcttaaaagtatcatatgtataatttcatatgtgtacatttacataaacaaatttaaatgctgaattacatctacattttaaatttacgcacccatttaattgttacttaaaaaacagtttagtatgaaattaatgttatagaaaataaatgctatcaaaatatc

SEQ ID NO: 42391 - DNA, 1973 bp, Homo sapiens
ttttatgagtttcctttttgtttgtttgtttatacaaacagtaagttattatcagcttaaaataataagatagtatttgcgagccccacagtaatttcaaattaaaaaacatacaacagatacacaaaaaaattaaaagcaagaaattaaaacataccaccatacaaaatcaattttactgaaaataaaatagaaaataaggaagaaaagaccacaaaataaccagaaaacaaacaactaaatggtaagagtaagtccttagttatcagtaattatattgaatgtaaatggactaaactctttaatcaaaagacatagagtgactgaatgtaaaataaaagaaaacaagatgcaataagctgttgcatacatgaaaagaaatatatttcatctataaagatacatgtaggctaaaaataaagagataagtaaagatattccatgcaaatggaaaccaaaaaagagcagaagtagttatactaatagcagacaaaatagatttgaagacaaaacctataagaagagacaaatattgtcactatataatgataaatggatcaattcagcaaggggatataacaacttaaaacatatatgcacccaacactggagcatctggatatataaagcaaatattgctagagctacagagagggatagaccccaatacaataagagctggacttcaacaactcactttcagcattggccaggtcttccagaaaaaaaaaatcaacaaagaaacactggacttaatctgcactataaaccaaatggacctaatagattacttatagaacatttcatctaatggctacagaatacacattcttttcctcagcatatggatcattctcaaggataaaccacatgttaggtcacaaaacaagtcttaaaacatttgaaaaaactgaaataatattaagcatcttctccaaccacaatggaaaataactagaaatcaataacaagagaaattttgtaaactatacaagtacatggaaattaaacaatatgctccttaatgaccagtgggtcaataaagaaattaagaagaaaatttaaaaatttcttgacataaatgatagtggaaacacaatacaccaaaacctatggaatacagcataaacagtactaagaggtaagtacctacatcaaaaaagaactttaaataagcaatctaatgatacatcctaaagacctggaaaattaagaacaaaccaaacacataattcatagaagaaaatatataataaaaaacagagtagaaataaatgaatttgaaatgtagaatacaataaaaaaatcaataaaacataaagcaggttttttgagaagttaaacaaaactgacaaacttttagctataccaagaaaaaacagagaaaatgcccaaaaaaattaaataaaagatgaaaaaggaggcattacaaccaataccacagaaatgcaaaggatttttagtgactactacgagcaattatattccaataaattggaaaatccagaagaaatggacaaatttcgagacacatacaacttaccaagattgaaccatgaagaaatctaatacttgaacagaccaataacaagtaataagattgaggctgtaacaaattcttccagcaaagaaaaacccaagacccaaaggctaaattgctgaattctagcaaacatttaaaggagaaacaatgccagtcctactcaaactattatgaaaaataaagaaagaggaaatactttcaaactcattctatgagggcagtattacactgataccaaaaccagacaaagacatatccaaaaaagaaaactacaggccagtatctctgatgaatattgatacaaaaccctcaacaaaatactagcaaactgaattcaacagtacattagaaagatcattcatcatgaccaagtgagatttggcccagagatgcaaggatggttcaacatatgcaaatcaatcagttgata

SEQ ID NO: 42392 - DNA, 1005 bp, Homo sapiens
acaaataaaattaaatatctacgcattaaacaaagaagtgaaaaatctctatggtgaaaactatacaacacggatgcaagaaatagaagaggacacagaaaaaaacagaaagataatccacatttatggattggaaaaatcaatatttttaaaatggcgatattacccaaagcaatgtacagatttaatgcaattcctataaaaataccaatgacattcttcacagaaatagaaaaaataatctcaaaatttatacagaatcacaaaagacccagagtagccaaagctatcctgagcaaaaccaaaccaaaacaaaacaaaactggaagaatcacattatttgacttcaaattatactacagagctatagtaaccaaaaacaggatggtactggcataaaaacagaaacagaccaatggaacaaaacagagaacacacctccttgagaagctgaggcggaaggatcacttgaactcaggagttaaaaactgcagtgagccacaattgtgccactgcactccagcctgggtgacagagcgagaccctgtctctaaaaaaaacagtaaataaattaataatgttgatatcaacaatagtaatcactatcacatactttcataggcagacatgcatgcacatataaattaatgctcggactcttactgccaacatcagaatctacctttgtcttcaaggcatgagacagaatattatctggcccagaagcctatacgttcagttgctcaagcgtactggccagatagtctcacaggaattctaaatgggacttctatgcatagaggcaggcacaggatataggaggagaaattgaaggtgggtggtggcaagtggaagggagagaacatggtgcaaatgtgtcactagcactcaacacttctgagacataaatagaacgaagtattagaactgagagggaagagaaggtagaagatgcttgttcaagacagggccacttttttttaataccaatctgcactctaggta

SEQ ID NO: 42393 - DNA, 1046 bp, Homo sapiens
aaatactaatataaactatatagttattttataagatcatgaaggatatttgatgtaatctagacatttccttaacaagataatatatgtaacataatatgtataaatattatttggtatgtgtctatatgtttctacatattttgagtcaaaaccaaaaatcttgatgaaataatagaaaaatttccattatagacaagaataaaagtgcttgtacactgtgcctgatattactaagcagtgcttgggaaaaatgtatagctgtgatacagacgtaaaaatgttctatgttaaaatacaaaagttttctcaaactaatgatctaaactttcattttaagaaactaaaaaaaaagagcaaactaaattcaaagtaaataatggaaataataaaggtcagagtgaaaataaatgaaacagaaatgagaaaaacaatagagaatatcgatgaaaccaaaagttagttctctgaaaagatcaacaaaattgacaaaactttagctggactgaacaagaaaaaaggaagaaagatttaaattacccaaatcaggaatcaaatagaggacaccaccactgaccttatagaaacaaaaaagtattatagaagataaaatgaacaatcatatgccaacaatttgtataactaggatgaaatggaaaaattcccagaaaaaaaaagatgaaaagaaaaacatcaagaaaaacaagcctgtgaaacacgatggaagaagaaatacaaaatctgaatagacctgtaagtaaagtgattgaattaatacatttaaaactttacacaaagaaaagcctttacttgtgaatctatcaaacatttaaagaatcaatactattcctgaaaaaatagaagatgagggaaaacattccaacttattttatgaggtcaaatatcaccctaatagcaaaagcagaaaaaagtcagtgtaaaaaggaaaactgcagaatgacatctgttataaatcttaggacaaaaatcgttaacaaaatgctagcaaactaaatccaacaacatgtaagaaggattacacacca

SEQ ID NO: 42394 - DNA, 1073 bp, Homo sapiens
agtaaaaacagccagtctcaaacggtcgcaaaaaaccaaggcataattccacatatatagaacatttgtgaaatgacaaaattataaaatggaagacacattttttttccattatttaagaaggaatggggtcgtgtctataaaaggtcagcatgagggatccttgtggtgatggaaatgttgtatatcttgaatatattaatgttaatatcctggttgtaataccatatcagtttttcaaaatgttaccactgaggaagactggcttaagggaagactgatctctctgtactatttcttacaactatatgcttatctcaatcgcaaaataaaaattgtaattaatcaatgtgtgtgctggattccattatttctgtttaaaagttacactatcttatacattgagctttttttaatgtagtaagtaaacagtttttcttgcccagtttttcttgcccagttttttcttgactcagtatgtcaaaaaaaaaaaggctgagagcaaacatatgactgttttgtagtaagtactctggaaaatgtctgaatgataagtgtggatacacatgaggaattaaattacattttccagactaacaaaaatataatcttgggcttgaatgataaattcactggccagagaaagaataagagacaggctagcttaagcaatgggagttggcatgtgtcaagtttcctgggatcttcaagggttccctaaaagactatgggcaagatactgagtgggtttctagaaatgattgaaaaaataaaaaaaaaacagggcaagaacccaaaataatatgagtcacaatgtgaatataaaaatggccttaataaggaagatcctatttttaaaagggaagaaagaaagagagaaaagaaagaaagagagagagagagagaaagaaagagagagagagaaagaaagagagagaaaggaaggaagaaagagaaaaagaaaaaaagaaaaaagaaagagagaaagaaagagtagaagtgactaagtagtaaatgaaacagaactagaactggaatttagattttcttaatgctactaataaagcctattt

SEQ ID NO: 42395 - DNA, 1012 bp, Homo sapiens
aatttctaactgctaattttataaccttctccttcactaagttcccatagataaaaacaatttttttcatagattctcttggatttttgaaaagttcaatcatatcataacagctgttaataatactagttttatctcttgcttttcactatttgtcctttaacggatttctctaattgcattggataatagcttcaatgccatgttaagcagatgtgctgatagtgggctctcttgtcttttgttggaaagtctctagtatttccccataaagtaatatgctggattctgaattgcgtgtaaaatttgtagaaaatgtcgtctgagatttttttttttctgttacttatagttaatcaattttgttttaaggagatttttaaaaacaactactaccagagtcatatcacagaaattcctcaaaggttaatatcacagaaattcctcaaaggttaaataaatgatttagtaagagaagcagaggaacacacacacacacacgcacacagagagaaaagcgtgcacgcgcgcgagagatatattagtgaggagatagcttgcaggaaggaaacagaaaaagaggggttattccgtctattaatcaaagataataacaaatggagtactgttaatgtgtgcaccatcagttaatgctggaagaagcagcatgagagggaaatttccaaaccaaatatgaagaacttcattgggaaaatcaaataagaactaatattcaaagttctgtatttagattagtctaagagcccgtttgatgcactaggtaacctagagataaaattgaccatatgtgagggggaactccagtctttcatccttggagacatattctaggctcagttgaaacttgataatgaataagttattttaaatcaactaagaagagactacaaatattaattttctatttgttcaactctgcagctattcaatctggataattttgccatctcacactcaatacctcaaacttagtagaaatgctttcttcttc

SEQ ID NO: 42396 - DNA, 1022 bp, Homo sapiens
tctaataagatggatgttgttatcaaggaaaccattgtattcttactattttactcactgcatccctactcaggtccctgcattctttgacttccacaacagaaataagtgtgggctcacacattattttctataatttaaaagacccaataaaagttatatatttagctgtcataggacaacacaaactactgtctagcaaatgcagtttgttgtgccaaaaaaaacccctcttaaagcacaagtttatgagagaaacaaataatggtaaaagggtacttttttggaggaaaagcttgggaaaacaacattttatgctatttaaaattcatgctaacaaacaaaaatcaatagcttgacagactcaaagttcaaatcaacaggagaggtgatttaagttacatctatctacatttagggcatttggcaatttagtatctctgtttccaataaaggtcagtaaaattccttttccaaattaaaaaacaagattaggaaagaaaagagactattgactgaactataaactcttgcacatgtttctaagaaatggggaattaataaaaccttcttaaaatttaatgaaatattatatttaatagagaaaagggcactaactcaaaattcaaccagtctcttttcctgaattcaattcacacatagaaactaaataatatgagactgtgcattaaggaaagatcatgtgaaatgctttgaaaaggtacattgcccgatgtatacattttttacactatttatctatatttcttgtcttccattagcaagcaggacaggatgtacaaacataaagatatattaatatgttctgatcaccatcagtgcaggtaactaataactatctgtccttggacaaaaaatgactctgattatacatcaaagataactgaatatctgttgatctaacagtagatctctcaattgtattccactcctggtgaaaggtgagatttacctaaacagaaataaccataaaagctgaatttggtctattcttcctaatg

SEQ ID NO: 42397 - DNA, 1026 bp, Homo sapiens
ataatataaatgtccatcaacaagggagcggaaaaataaattgtagaatattcatatgatggaatagtactcaacaatgaaaaatgactcatatacactatctcacagatactatgttaagtaaaagaagctggacacaaaagagtgcatactgtatggctccatttcatgaagttctagaaaaaggaaactagaggggaaaatatcacatcactggtatactagggagggtgtaatcatgtggtaaggtctagaaaaataacatttttggatgataaaaatattttcatcttcatagaggtatgaattacatgattcaactgatttatcaaaacttattacattatactctatagagttatgcatttcattttatatgaaccttacctgaaaaaaactggaaacaaaaataaatgaataaatacaagagtaggtcttacatcgtgaagacaataaatatacatctgtgaatgattaaaactgtcatgatgctatgcaaatggatacctgtagcttaggataagctattcaatgaccacactacccatggattaactgtgctacttctcaaactggacagaagtggaaatgatgcaatatgaccaatgtaattgattcaaaacatgcttcctagaaagacaccaattttgtagatgtgaagagtttgaagaattgtttcatgagatataagtagaaaaaaatatttgcaagcatctatataaacttattcaccctgcatcttcttaaataagaaaataattcaaatgtttctagaaagggtaaggctgtgtgctgcaattatccaattttatgacaggtcaaccttgagtattcattttcctaagaatctatctttagagacatttcccaggagaaaaattttaaaagtgggatttttttttctctgatcttcagtctctttcttctccagtcatactggcatgagagatggaggcagagctcatcccttccccacttctgatgttttcccttcctgctagagcaatgatgtttcagcatgtttca

SEQ ID NO: 42398 - DNA, 1500 bp, Homo sapiens
ttgagtgtgaacagaatctgtaagtgtcatttctgagccaaagtggtgatcttctgtgtcttcttcaggatgtcttccaaggttactataacaccaagtgctgaggattttagcagcacaatttgtggcaatctgtccaagagaatcaattaaccaggaatattcacatggggtttgcagtgagttagaagcaatgtttgtagcgttaagttagtgagattttgcaatagtttctatcagcagctgatctaccctaagatacactgagcaattccattcttagctttgcctctgagaagctcttgtgtatgtgaaggagaagacatgttgaagaatatttatagtaatattgtttgtaatagccaaaatatgaaaaaaatttaaatgctctttataagaaaatagataaataattgtcatgtatttatataaaattctatacggtagtggaaatacatgaattcattcaaatgcatcaccttggatgaaaaaagaagataaatgttgagcgaaaaactttgttgaagaatagatacagtataattccatttaaaaaacattcaaaaacatgcaaaactaaacaaaatttagaggtacatccaaatgtagtgaattataaagaaaaaaggtagaataatgaacacaacattatgaaagtagttataactgagaggagagaaaatgaacagaattgggaagaggcacacaaaggacttgggagtcaatggtaacattctttctgaattccctctgtaatcaggtcatagaacttaatcttagcatcttggagttcacctaactttttctcaggttgtatccaagctgctggaggctcatatcatcccagagtcttagaaggggcacctctgatctccatggttatgaacagctatgcattgccctgctgagatttccttattcttcggtggttcccaactgccagccacatggatccctttgaatcattcctcattgctactgcaaggtgtcagattgggctctgttcctcacattttagtcccattcctcggtgcagtgaaatcattagctgttcccgtaagatatgaggctatctaaagttttgtgtttcttttaggagttggaagtctaactctgcctcactgcattctttttctatagttatgagttatctcagggcccagacttttgaaacaataaaactctttttctcattttttgttgtaacacctattcctgaaaatgtcacacaatctagctcctgtgaatggggagaaagatcaaggtaaaagaatgtgtgaatatttccaaatagtatcccatcagagttgtttcgatggtgtgattgtattaatgagacaatactccttgtgaggaacaaacatttccccaagccacattctggagatgaacggtgaagggccatgtgaagacacattgacagtaactgaaaaggaaaagatgtttaagtttctaagcagctctgcagatgggatttttatcaatctctctatcttgcct

SEQ ID NO: 42399 - DNA, 1060 bp, Homo sapiens
aaatagagaagacagaaatataaccctaactgtatcctttgtattattaatttcttacattagagataatgatcattttgtgaaggaaacatagatattatacacatccatttagtgggatgttattgtttttaacttgaaaacagatcataaagtaaacctgaatgaatgtttccatatggttaagaaattactcttaaagagaaataaaacactgtaatattgcaaaaatcaatacaaatcctagaaaaagaaagtcaataaataaccatttgcttatttttcaaaaagggaaaatacctgttattagcagttaaatgtttgttttaacatttgttaggactattaacttaataattttgaaatatccttattttaaacataattgcctccttggagcataacacttaagcttgaggttaaactaccgtgattattaattatgagaaatgacattttcccacaaaagtcagattcagaaaaaaatattttacattttattatagacagaaatattgttaaaaagtgataaattgcttactcacttaaaactgtagactgtattcgaaacacatttgtttttactatgtaataattaaactgatgatatactaacatttatctacctttaatggactcaataaataaaaaaggactgagactatatttttaaaatgaaaacctatagctaagaactctatgtgaaaaaagaatttgtattttacaagtaaaaataaagttatcctaaaagattaattttttttttttttttgagacggagtcttgctctttcgcccaggctggactgcagtggcgctatctcggcttactggaaactccgcctcccaggttcatgccattctcctgcctcggcctcccgagtagctgggactacaggtgcccgccaccgcccccggctaatttttttttttgtatttttagtagagaaggggtttcaccgtgttagccaggatggtctcgatctcctgacctcgtgatccacctccctcggcctcccaaagtgctgggattacaggcttgagccaccacgcccagctga

SEQ ID NO: 42400 - DNA, 1028 bp, Homo sapiens
cttatccatacccacaaaaattatggaatactgttataaacaagctgacatattttcatgagggcccctagggggcagtattgcccccattgagaaccagggatctatggatgggatacaactcagaaatacttcccccactcccaccctcctcctgccttttattggaccttagatactctgatggtagtgcaggatggaggaagaagtgaaagggcaaacatctccttaactagggtatgctttcccccaggctggctgtaatagcagtcttagcttgtttgtctatagatcttcactcttccccttaaattttgactaaagttggggtggggatgtttggcaatagggataataatctgacctagtctcttaggacttttttgtggagaagtggaccaacctgaaagcttagaatatgaggggcagctttagtgctatttgtcatcaactccggactttctatgtaattctggggtatgaagaaagaaatccactcctttacactagtttgagagagacgtgctggaatgaaaaacacctcagttcagacatgctggaatgaaaaacaaacacctgtattgtaacctcagctccactgcctctcattgtttaatttagggcattcaaactccctggaatgcctttgcctcatctgcaaaatggaatagggagtaaagtagatgatattaaatttgaattatttgaaccattgacttcaatataacactaaacatttggaatctccatgcagacaatattcactgttcttctttgtgtccttgaaataagtgaaaattttggtcctctttttttctcatataagacctgtgccatcaaatttggtaagaattctagaatcttctaataatatgtttgccctaaataaagtgttttaaatgtttaatattattgagcatggtgaatcacagcattttagagttaagaaatcatttattgataaaatgaagttagaaaaattggatgtttttctatgtttaggtaaatgcatatgacataggttaggt

SEQ ID NO: 42401 - DNA, 1055 bp, Homo sapiens
gtttgaaacaccctgaactagctgttacagatggaatgaataccattatttgcatgatttgggaaatggtagcaaaagatacgaaagcattctggtttcagtgctaaaaactcagtagtattcacaggagaaaatttaatgtgaaatacatcactgacaagataataaccaaataacttgatttgttcacagactgcaatgattcttatgaatgtgtattgcaataagattttgaagcctgtagatgggtcctgttgtcaacctcggcctcctgttactctcatacagaagctagctgcttgttttttcactttatctattatcggatatttaattttttacataattcatcgtaatgctcatcggaagaataagccgtgtactgatttggaaagtggagaggaaaagaaaaatattatcaatacccctgtgtcttcattagaaatacttttacaatctttctgcaaacttggcctgattatggcatatttctatatgtgtgaccgtgcaaatctgttcatgaaggaaaacaaattttatacacattcatctttctttattccaattatctacattttggttttgggagtattttataatgaaaatactaaagaggtaagagtcattttctttttaactcatgttacccttcttgtctcattacatactctgtgttaaagaactaatatcatttatcatgacaaaatacacaaacaggtatagagatgaagatgaaggaagattgtagttacacttcacttagtggactcttaactgttcctttttcggaacagtttggagaaaggtcagagtcacgtgaaaattgttgaaaagttgggaaatatgacctgtgaaaaagatttcatgacttagtgttattttgcctgcttgttgacagagaatgttgaagtacttctgattttataatggtcttcaagcatgagatactattatcttttataaagtaaaagaatataattaacaaatgcctatgcacacaaacatattttatatttatatatttatcagtcagacatatatacataccaatcaga

SEQ ID NO: 42402 - DNA, 1050 bp, Homo sapiens
ttttgatgtgaagtctttggtcacaaacataacaccagtcacaacaatgattctttgggcaaagtcaatttacttttaagaattactttacaatgtgatttccaggaatgaattttaataactaagacaaatgtctataggggaaaaaattattactgctattaatggcaacacttattcactaggctacaaagataactaagtacagatgcagaaaaacttactatatgagggcatgagggacatactacacaatacctggctatagctcctcatgactgtcgaggtcatgggacacaagaaaggtctaagaaaatgcccagacctgaggagactaaggagacatagtgattattgtgtcctagatggaatcctagaacagaaaaaggacattagtggaaaaacgaatgacatctgaaaaaagtctgaagtctaggtaacagtaaagtaccgaaactgggttcctcattgtgacaaatgtaccatggtactgtaagatgttaacaacgggagaaactggctgaggcgtatctgggaactctctattatctttgtaactttcctgtacctctacaatcattccaaaataaaaagtttattaaagaataaacacattagccaagatcaaattaagttggccttacatttctagactatgtgatagttttaacagcctatttatattgtctctgtaatttgaaaagcaaaagaaacacagtacaaaatgaaacacctcatttctaggcatgtgctacatctccaggttctgctccagcttccctgtccactgcctctttattcattttgcttataacctgaatcagagatccttctgaggtcaatgaccgacactatctatccctgcctagatatcaggataggtaaataatctaatctcagttctgacctaatttaactttgtctcttatcagtgtctcaaatttatcatctgcaaatgattaaacattttttcttactgactaatttatggtgccagtctggagctctgtgaaacattctaccaaaaagaaaatattactatgtaattga

SEQ ID NO: 42403 - DNA, 1024 bp, Homo sapiens
cacgtcgcgcgcaggccactaacctgtcagcaagaatgtgccagtggtcgcggggctcatcctgcgtgtcccccgaccctgtcccgtccaagcacaggggtctcccagctcccaccaccggggcaattgcattcttggcctggctaggccgtccgtcctcgattctcccctcccctccctttcttcttccctcccagcttggccagttcagcatcagcatcccgcaccccctcggtaatcccgtactccctctagcggcgggccactgcagcgtggccaccgcccccacccccatcccccatccccgcacccccctccaccccctagcccgcggagcacgctgggatttggcgcccccctcctcggtgcaacctatataaggctcacagtctgcgctcctggtacacgcgcttcaacttcggttggtgtgtgtcgaagaaacctgactgcgccctgaggagaacagcggagaaggtccaccgagcctggcgaaaggtccgctgagcgggctgtcgtccggagccactccgggctgcggagcacccagtggagaccgcgcctggctcaggtgtgggaccccatccttcctgtcttcgcagaggagtcctcgcgtggtgagtatgcggtgaggacgttttttttttaaagatcacgttcattccccgtgcttatcgggagctgcgggagatggagtagcaccccagaatgtctccacgcaaaacttgtcacgccttcactggctgtaccccaaaacaaatggggaaaccaagccttaaaggcttgggtttccaggaccaagtccagatacgggctgtagacagagatgagctgcggacagtgatgagctgcagacggtcaggagctatagatcgatttgcaatttgctcttcaaatgcgctaccaagtgccatgctttacaaacagataagcgcttcaaatgcgctacaaactggcgcttcagatgcgctacaagcacgcttcacgcgggcgacaaactgatgggagctacaactggcgcttcatt

SEQ ID NO: 42404 - DNA, 1026 bp, Homo sapiens
cctaagcctgcctctgccgggctggcctatagtcccacctccctcagagccggctagcacacatgcgcagtgtgaaccctcagcccctcccttcaggcgccggtcctctgcacctgcgcaccttccttgcctgagccctggctgtacagccccgcccccctgcggtttctctgctgtgttggttttgctttttggctactagagtctaatagaataataaataaaacaattaacaataataattataactggaatttatgagcacttttaatatgttctttgcatatattcaataacataatcccacaatttaaactcctgatagtggcttatgaagggaccttgtaaactgacatggctggtgcctctaaaggcaatttagccaaatgtttttactgcaaatgaaaaccaaaacttaacaatttatttttaaaaactttaaaaatattttcacatttaaggtttttttagaggcactagtggacctttgggaatcggatgttttggtggatacaaaattggtgctgttggtttggcctctgagtgaggataaggcttttatttgcgtgcctatgaagctgggtgttttccttgaatctctaggtgattaaccctagcctatttgcctatgtataataaattgtgcctgcacatggtaggcattcattaaatatgtgttaaatgaccagagtaaattggtttattcagtgtcttgcttggtgtctgtaggtctcttctgatttgctcctttcctatggtgctttgctgtcctgggttgccttgtttgcgttatctctcacatttaacagaataaaaaaaaagtgtatgtgtttttaaactccaatgatataagctgtaattataatacaaagcaactaaattaattttaattattccaaataattagcttttttcataaaaagctagttattccaaatattagcttttttcatgaaaagctagttattccaaataattagcttttttcataaaaagctagttattccaaataattagcttttttca

SEQ ID NO: 42405 - DNA, 1034 bp, Homo sapiens
attgtgattttaatactcccttcttgctttaatgagattctattagttgcagtattaactatttttggcctggcttctttaataacaaaagttattattttggctttaatttgcataattgattttgtatccatgtttgccttgaagtttcttgctgtgtttgaatacaaaactacttgtttagagggtttcaacattcttttatagtttataaaggtaagcatgctgttgataatgtattgttgaatcataatgaacaggtggcctttgaggaagacaaggtcatttgaacatcaaaaagtactttgctttttgttatatatggtgctgattactaactttctcttgagagtttattttctttgttcactaattattaatgtaagcacgtagagcaagggataatttaaataccaaatcctttgtgtctgcttttgctgctttgaatgtataagttggatttatacatacatttatctttatttacagaaataagcgggttttgaaaacaaaaaaaagaaggagtggaagagggggccaggatccaggcctccatccccacagaagtgaagctacagctgggaggtctcctcccaccccaaccgtcaccctgggtcccgactgcccacctcctcctcctccccctccccccaacaacaacaacaacaacaactccaagcacaccggccataagagtgcgtgtgtccccaacatgaccgaacgaagaagggacgagctctctgaagagatcaacaacttaagagagaaggtcatgaagcagtcggaggagaacaacaacctgcagagccaggtgcagaagctcacagaggagaacaccacccttcgagagcaagtggaacccacccctgaggatgaggatgatgacatcgagctccgcggtgctgcagcagctgctgccccaccccctccaatagaggaagagtgcccagaagacctcccagagaagttcgatggcaacccagacatgctggctcctttcatggcccagtgccagatcttcatggaaaagagca

SEQ ID NO: 42406 - DNA, 3495 bp, Homo sapiens
caaactccatttccatggttctgttaattctcaaggagcagcaactcgactggttctcccaggagcaggaaaaacccttgtgacatgaaacatctcaggcctgaaaagaaagtgctctctcagatggactcttgcatgttaagactatgtcttcacatcatggtgcaaatcacatgtacccaatgactccggctttgacacaacaccttaccatcatcatgccatgatggcttccacaaagcattaaacctggtaaccagagattactggtggctccagcgttgttagatgttcatgaaatgtgaccacctctcaatcacctttgagggctaaagagtagcacatcaaaaggactccaaaatcccatacccaactcttaagagatttgtcctggtacttcagaaagaattttcatgagtgttcttaattggctggaaaagcaccagctgacgttttggaagaatctatccatgtgtctgcctccatatgcatctgggcatttcatcttcagtcccctcattagactgtagcattaggatgtgtggagagaggagaaatgatttagcacccagattcacactcctatgcctggaagggggacatctttgaagaagaggaattagggctgtggacactgtcttgaggatgtggacttccttagtgagctccacattacttgatggtaaccacttcaaaaggatcagaatccacgtaatgaaaaaggtccctctagaggatggagctgatgtgaagctgccaatggatgaaaagcctcagaaagcaactcaaaggactcaaagcaacggacaacacaagagttgtcttcagcccagtgacacctctgatgtcccctggaagctttgtgctaacctgggactgcctgacttcctttagcctggtcccttgctactaccttgaactgttttatctaacctctctttttctgtttaattctttgctactgccattgaccctgctgcaggatttgtgtcattttcctgcctggttgctgagactccattttgctgccacacacagagatgtaagaggcaggctttaattgccaaagcacagtttgagcagtagaaaacaacatggtgtatatctcaaattgcctgacatgaagaggagtctaacggtgaagtttcacttttcatcagcatcatctttcacatgttcattatcatctgctcttattcttgcatgtttaaacacttaaaatttttagtataatttttagtgtgttttgaagtggtgactaggctttcaaaaacttccattgaattacaaagcactatccagttcttattgttaaactaagtaaaaatgataagtaacatagtgtaaaatattcctttactgtgaacttcttacaatgctgtgaatgagaggctcctcagaactggagcatttgtataataattcatcctgttcatcttcaattttaacatcatatataatttcaattctatcaattgggcctttaaaaatcatataaaaggatataaaatttgaaaagagaaacctaattggctatttaatccaaaacaactttttttttccttcaatggaatcagaaagcttgtcaatcactcatgtgttttagagtaattacttttaaaatggtgcatttgtgcttctgaactattttgaagagtcacttctgtttacctcaagtatcaattcatcctccatacatttgaattcaagttgtttttttgtcaaatttacagttgtcaattgatcttcaagctgcagggtgcctagaaatgggccgttgtctgtagccctggcatgtgcacacggacatttgccaccactgcaagcaaaagtctggagaagttcaccaacgacaagaacgattagggaaaatatgctgctgtgggttaacaactcagaaagtccctgatccacatttggctgtttactaaagcttgtgattaactttttggcagtgtgtactatgctctattgctatatatgctatctataaatgtagatgttaaggataagtaattctaaatttattattctatagttttgaagtttggttaagtttcctttcactcaattgatttattttgttgttaatcaaatttatgttaattggatcctttaaattttttttggcattttccaacaaaaatggctttattcataagaaaggaaaaaaatcaatggaatttgatatctaaagaagttagaaagggagcaaaataaaaaacataaaggagatagatgaattagtaagcaaatcagtagtcgagtttttcaaactggcaaaattaattaattgacttttagcccaaatttacattgttaattaaatcaagaaggaagaagatctaagagctcccattgataggcaagcctagagagaactagctaaatttatcatgctaggatattgaaacacagaaagtttacatacatttatgaagggtcaatttagtttggacagtgaggtatttgtcttagtggaaaaaaggagaattagtctgatcaaatcgtgaagtaatacagtgaacttgcaggtgcacaaaataagagggccacatctatatggtgcagtctggaattctgtttaagtttgtaggtacctcttggacttctgaattgatccagttgtcatccaccacagacatctcacatcagatacagacagttccaagattgacaacagagaacaacctgctggaaagacctgggcagaaatggagagccctgcgggaaccatgctacattttcatctaaagagagaatgcacatctgatgagactgaaagttctttgttgttttagattgtagaatggtattgaattggtctgtggaaaattgcattgcttttatttctttgtgtaatcaagtttaagtaataggggatatataatcataagcattttagggtgggagggactattaagtaattttaagtgggtggggttatttagaatgttagaataatattatgtattagatatcgctataagtggacatgcgtacttacttgtaaccctttaccctataattgctatccttaaagatttcaaataaactcggagggaactgcagggagaccaacttatttagagcgaattggacatggataaaaaccccagtgggagaaagttcaaaggtgattagattaataatttaatagaggatgagtgacctctgataaattactgctagaatgaacttgtcaatgatggatggtaaattttcatggaagttataaaagtgataaataaaaacccttgcttttacccctgtcagtagccctcctcctaccactgaaccccattgcccctacccctccttctaactttattgctgtattctcttcactctatatttctctctatttgctaatattgcattgctgttacaataaaaattcaataaagatttagtggttaagtgcaaactgtgtcctgatcatttcagcatctaccagcatcaagggaatggggtggggtagggtggggaaggctg

SEQ ID NO: 42407 - DNA, 1021 bp, Homo sapiens
tctgaaattggaagtttaaattattgctttttgtttaatgagatgagcagattactctgatcttacagttttaagcagttctgggattttataagttctggtgaagtcctaattaaattgccttacaatataatctggtgtttggattatcactttttgttaagtattcttaaaccttactacaatatggttgataaattctgttaatattttattgtatactgggtttctagtagtgatatatagatgattgtatataattataagaactatttaaagaaaaagaggcaacattaacagacaaaccatgtaaaattttgactcttttctataaaatggttacactggaaaaagaaaattggagttcaagaaaaaaataatttcactggttgtgattttgcatatttatgtaaatttgtgaatgatttgaggcagtgatatctttttttagttaatcatgtacccaatcaagtttgagacgaggcttatgtttttccatagagactatgacacttgtggaatttttatcttgctggctccttctctgtataacgagttctgtgagtagtagcattagtgaactggagctccctcaggagattgtcccatttgcagatgtggcaatcagaagagttttagtttgagttactgggttttgactcttattacctaatacaattctttatttatttagttttgagatggagtctaactctgactgcattattagcatttttttgagacggagtcttgctctgttgcccaggctggagtgctgtggtgtgatctcagcttactgcaacttccgtctcccgagttcaagcgattctcccacctcagcctcctgagtagctggaattacaggcacgcaccaccatgcctggcttaatttttctttttttcgtagagacggggtttcaccatgttggccaggctggtctcaaactcctgacctcaggtgatctacccacctcggcctcccaaagtgctgggattacaggagtgtgccactgcgtctggc

SEQ ID NO: 42408 - DNA, 1283 bp, Homo sapiens
tgataaagtagtttcacctttgagtaaaacttgttgattgcactaagtggaccatttttgccatttcattctggaaaccagagattgcggattttaaattttcttttaatctcctgaatcagcctggattataacatgctgtattttctgtctcatgataaccatattgctgtaaaatatgagaaaattataaacattgttttgtttaaataattgatagtagtaaagtaaatattttaggctatgtttacatttgtaaaagaagatttgagcagtaatttcatcccttagagaaagcccatttgggtaatcaagtctaaattaaagtaattttcctcaataattaggtttaagtgttgatgtctgggtaccagagaagacaatggacttggagtgtggatacttttagactttcctgtctgtgttttcttagtggtaattatttgttatgggtgatctttttcctctgggcgccagtttcctcttctctaaattgaaaaggttctattagatgatctaagatctgtttgagctcctaaaatcagtcttctttaattctgtatctaaacaataattctagttcttatttctgttttgcccaggaaagcttttaacattaaatcaggcttctgccagtagtagtctttgctctttagcaatactggaggtccagggataaaggacatctctgttttcatcttaccatttactatcttatgtcatgttctgtattccgtattctaaagggacttgagtattgtaaacaggaaaacctgagcaaagattgcatgaaagaaccttttaaggtactttgccttcaagtaatgttaaagttgtttaaacagtgtactaataaaacctttcactaagtatggggagactgtgtaggggtgtgtgtgtgtgtgtgtgtgtgtgtgtgtgtttgtgtatatattttttccctccaaaagtgatctaacaacttaaataattaagaattctaaacatactggtgggaaatgttaccaaatggtaaaacattaattctgtaatatgttttgtttagtaaatgaccagtccctggtcattaattgcttccttgactttgggcaagtaatttctctagttgttaaaagactctttagctcttgtatatacttagggtattctgaataaatttatacatattaaagcaaaaataggaggaattttttttgttttatccctctggcttttttcaattggtagtatgacagttgacaggcatgtaagaccattccatgtccatgtattagcatttttaa

SEQ ID NO: 42409 - DNA, 1034 bp, Homo sapiens
tagagagtttttattaggaataatgttagatttttaagttattaatttggttaattacattaattttttaaaaaactaattgctgggcgggtgtggtggctcatgcctgtaattccagcactttgggaggctgaggcagacggatcacgaggtcaagagattgagaccatcctggccaacatggtgaaaccccgtctttactaaaaatacaaaaattagctgggcatggtggtgtgcacctgtagtcccagctacttgggaggctgaggcaggagaatcacttgaacctgggaggcggaggttgcagagttgacatcgcgccaccacactctagcctggtgaccaaacgagactccgtctcaaaaaaaaaaaacacaaaaaacccacaaaacccaaattgctttttcaaggtaagccaaatttgcatttttgggataaaactcacatggtcataatatattatcctttcaacatactgtttaatgcagtttgctaatgtagtgatgaattcttccagcttttatgtatctgaaaaaaagtatttttcttgcctttatttttgaagatatttttactgattatacaattctaagttgatattttttttcattactttaaagaagttgctgcattatcttcttgctgtcattgtttttcaagagaaatggcctctcatcctcatctttggctgctcttaagagtttccttttattgctgattttgagtaatttggttatgatatgccttggtgcctttttctccatgtttctcatgcttgggttttgttgagcttcttggatctatgggtttagagtttttataaaacttggaaaaatttggccattttttccccccaatgttttctttcccttctttttcttttccttaggggactcaaatcacacatatgttaggttgcttgaagttgtcccatattttacttgatgctcttttaatttttttattataaatttttttttcctgtgtgtctcattttggatagtttccattatgtcttaaatttactacacttt

SEQ ID NO: 42410 - DNA, 1033 bp, Homo sapiens
ggttttatgtccatatttaccatttctaaaatttgtgcccattgtgtccattctatattgatttcaatgaattgatttttctcagcattattgttcaaactttcttgcttctttacatttctgagactctgtgattggataccattctgaaaattaccttattgagtactagatatttttgtatttctataaatattcttgagtttttttctgggatgcacttaagttatatagaaataattttatccttttggatcttgctttaaaaagttttgaacagtacaagaacagcatctggtccatggctcataattatttcactagtgagacaaagtccttctgaatacccagtctatttctccataaattacaatgttttccagtctggtagaaggactggatatatcttggggaaaaaaatgtaccttgacctctaacttatgctatacaaaagttaatatgtgatgaattgtagacctaaatagatagctgaaactttaacatctctaggaaaaaaacagaataacattttcatgtcctgaagataagaaatgatttattatacagaacatagaaaatatgcataaaagacgttgataaattgaacatgataaaaattaaaagctttttataaaaagtcactgttaataaatggataagaaaactagatactgggagaaaatatttgtcatgtatgtatctgacaaaaaaagtcctctttagactttttaaagaactcctacagatgagttaagattttctcttttttgctggtttttactaatgtgatactgatgtggctttggtgtggttttcattatgcatatcttacttgagcatctgtgagttattgttttcataaaaatttgggaaattattggccactgtttcctcaaattccttttgtgaccttctcttattcttggattcaaagtacacatatgtcacttgtttactattataggctacttaggctctattaattttttgcagtccattttttctcactcttccatttttgttagtttgtatt

SEQ ID NO: 42411 - DNA, 1037 bp, Homo sapiens
gtaacttctagctgtttaaacaatcttggaatagtttatattaaatccagtccaacatttggtttattctgttttctcacacttcagtatataagatttctgcttatccgttttacaaaaactgtatgaagatggctacatacttcttggtgtttttttgtttgtttttgagacagaatcttactctgtcacccaggttggggtacagtagtgtaaccatggctcactgcatccttgaccttggggctcaagtggtccttccatctcagcctcccaagtagcagggactacagatataagccactatgcctggcaaatgtttggtagagacagggtctcaccatgctgccaggctgatcttgaacccctgggctcaagtgattctccccgcttggcttcccaaagtcctgtgattacaggtgtgagccactgccatccatcttgttttattccttattcctcttcaattgttgtgtttatgtcatttaatctcctagaaactatttggactatattgtgatgaatgatgtactttgaactctaagtagtagatcatggattgtgactttgaattgttggggaagtttcatattgaaggaagcagggaatgtcaacagctttcactgtgttacttggcagaaatcttctttatgggcagtctgcagtctgaatctaagagctacagtttaattcttcctgaaagctgtcctgtgttcagtcactgcttcatcagtatggcctatggtatagaaatgggacagccactctagatggatgagaggtggacaggcaggatagatacagcactaggttcatctcttcagtctactggttatagctagactttaatattgaagaattatgttgctgctattctattatttcattttcttcttacttaaaaaagaaaatcaacagaaaacaccaaataatttagttatacatatgtcctcagatagtcttagaaaggtttcctttgaaatgcatctgtagtggctactagggactcaatgaatattcatccaatgaacagatga

SEQ ID NO: 42412 - DNA, 1044 bp, Homo sapiens
attatttggagcattttgtcagattatgctttcaatttccccattttagagtcattatctaattctactttataggtatttagtaactttgttctttcaagagtattatgaagtcattatatgtattctatcatatggaaagagaatattagtgaacaatgacttctactttgagactttgaacaccaagagaggcaggcctcagatgatcaaggtaatgttaattggctaaaaaaattgaggaatattttttgtgagaatatcaaggggaaaaagaggagacagggacatttatttatgattcatatcaaactggaaggtagttttcaattgtgactatacactaaagattgtcacttgattcacatgtattcagggcttataaaactaagtcatcatacttagaaatggtttcatgctatcacggtgtctgtcagaattagcaggcaatatctcattataggaaattttaagtatattagtgattttttaaaaaatgtaaaattttgagattttaggatttggagaataactacctgagcccatcctctttgttgtgaattagcaatgggacagaagtatttgtaatatagtgagagaaactaggaaacaagctcactagggtgatattgaggccatgtaatacagaataatctatttcgggagttccttgcaaaggtataatagtaccagatctttaggaatgttttagtttttaaattttacttttcctagatacaatatctagttgaaattttttttatgtggcagttctaggagtactgtggatgcgtgggaaaagaggaatgtgaaaagcttagctcaacttaccttccacttttatttcttttaaatgtcacaaaatagagtttacaaaaatgttagctatctggggtcattttgaatagctgattatctagtagttttaaaattaaaagaaaatgttttattataaaagaaagaatatgcttagtaaaatttaaatctgtattatttaatgttacattatgaaatacattaaggtaattattttaatataaaagc

SEQ ID NO: 42413 - DNA, 1047 bp, Homo sapiens
attcatacctttcttagcacacttatagtgttttttatagcttatcacactcctgtgtctctaatgcctgcaacacatatcctgtatatgcatatacacatatttacatgtatgtgtacatgtgcgtatttgtgtatgtgtatggtatccttaaacagagatcatgtcttatttaaatttgtatcccagtaactctctgtccttttgctatagtcaggatcaaattacttttgctaaattactaactggattattcaaccaaaccaatgaagcaagcatattattttccctatttatatttttccagcatttttgctatctttcttctgattagattacttagtcccttcagttgtacttatttcattgcattttatcagaattgacaggatgcttattttcagacattttttgatctagtttgttctttctttatttttgcccattaaggcaattatcaccttagttttcgttcacttctgatcattctatctattgatattgtacaaacctgtattttgcttttatttttttcttcccagtaaatactagctctgtacatatttgatttttaaaacttgttttcaaagtttttttataatctattatttagtattcctcttactcactcttaattttttgccctttaaaaaaatatttgccttctcaagtgctcttgccttattaaagttgcattattaatcctttcacttcatgaaagtatgtgacagtgattatctttctgtttgagagattaagctttcagctttactttttttttttttttttttttttttgctggaaagccacctctgttcatccttcaaatgccatggctcaactttaatttggctttcaaaatacaaagtatattataaattaaatatttgaaagataaagaatttcttcttgcctttatcttccgtatacgtccctaagtccaccaacttgtagtgccatgaaagttgcttggcaggattgccatttgtagtcatttgtcactcagaaacattgatgattattgctatcaaagaatatattgagtac

SEQ ID NO: 42414 - DNA, 1072 bp, Homo sapiens
agtttgggactatgttaaatgtccaaactaaaaataattagtgttcctgaggaaggagagaaatctaaaagtttggaaaacggatatttgagggaataattgaggaaaacctccccaaaacaaagagaaacaaatcctcgaaatacaccaaaatagaaccttcttcaagcataaatctcacaggacctttataacaatagcacaatagaaaaaaaggtattcaagcaataaatagcacaatgagtagaatagtacctcacatgtcaatactaacattgaatgtaaatggcctaaatactccacctaaaagatacagaatggcagaatggataagaattcaccaatcaagtttctgctgtcttcaggaaactcacctaacacgtaaggactcacataaacttaaggtaaaggggtggaaaaagataccgtatgcaaatggacaccaaaagcaagtaggagtagctattcttagacaaaacaaactaaagcaacagcagttaaaaaaagacaaagagagaaattatataatgataaaaggactagtccaacaagaaaatattacaattctaactatatttgcagctaacactggagctccgaaatttattactgttagacctaagaaatgagatagatggcaacacaataatagtgggggactttcatactctactgtcagcactagacaggtgggtcatcaagacagaaagtcaacaaagaaacaataggcttaaactataccctacaacaaatggacttcacagatatttgtggaacattctacccaacaattgcagaatatacattctattcatcggcacatggaacttctccaagatagaccttatgataggccacaaaacaagtctcagtaaatttaagaaaattgaaattatctcaagttctctaagaccacagtgaaataaaattggaaatcaactctgaaaggcaccctcaaaacaatgcaaatacatggtaattaaataaccctgctcctgaatgattgttgggtcaacaatcaagatggaaatttaaaagttattcgaactatatgataatagtgacacaacct

SEQ ID NO: 42415 - DNA, 1084 bp, Homo sapiens
cgtgtgattcaacttagtatgaaaagcactacactgaggtgggagacctgggtcatgtcttggatcttccactcacatttgtttctcatctgtagaatgaaatgggtgggactagattatctctaaattccccttcagctctagctttctattattaagcctttatgataatatataatgacttgaagaaaggatatctacatcacaaatgtggcagacggtgaaggccactgcgtggatataaaagggtctgtgggaacgttcaaaatgacctcttaaaaacagctggcaccaaagacagatgtcttaggaagttgccatagcattaacatgtagtagttacagggaaatagttgatggtacaccttggcttagctaagcttcttgttaataaaactaaatcactcatctaggggcagtgcattggataaggaattgttactactttttgctactcctttgcagatcaatcattagaaatgaagtattttctccagaacaacaaaccaagtccatgctatagcaaatgacccaaggttactaaatgagctaacaagcaagaacaaattagaatctaacattctgctcagttctgagcactgaacactccacagcatacatttcttcaattctattaaacataccattcagcaaccctaatagctaaaaactagcaaaaggcacaaagggttgccattaaacatgatcacaattgtcctgcaaacctagagataaaaggtaagagagccataatgtaaatggaaatacacatttgtttcttttttttttaacccaagagatacgggctttaacacttttttttttcctgttgggcaggtgaaatggactcttaaaactgagctttaacaatacacagcagtagacaaatatgtcaagatgatatcatatatatgatgtaagtaataagtatccttagtagatactgaaaactcagtaaatgtgcaaatacctatattgaagtaggttgcaaattcttacttgtacccaaaatagttcactgaataaagaccgtggacaaaaaatgggacctttgagtactgtaactaaggtggaagatgagatc

SEQ ID NO: 42416 - DNA, 1050 bp, Homo sapiens
gctgaagggtatgcaccttaactgaagggttttaagtcaggaagcagcatgactaggttttcgatatagaaagatctctctatggtctgaatgtgccccccaaaattgatgtgttggatacaatctctaatgcatcagtgttggaaggttgggtccttggggaggtattttcatcacaagggctctgccctcataaatggattaatgctgccataaaaagaggtttggggagtgggttcactctctcttgctcttctgctcttttgccatataagaacatagcattcctcacctttgaaggacacagcattcaaagagccatcttggaagcagagaaaccaggccgtaacctgccagcactttgatcttggacttcctagcgtctagaactgtgagaaatacatttccgtcctgttcttctagtctcaggaattcccttacagcaacacaaaatggactaaaacactgcttgcagtatggaggatgggttccaactgaactaccaggatgtccagacgagacaggctggggatgggctaggactagaggaatacatagaaggtaaaattagtggggttgggacggaaaaagggagttgtgccatattgcacatagacttgtggtatgggtgtctggaaaaacacctgagattggtaattcaagaggagtgttttgaggtgtgtgagtctgtctgtaaggagaatgtatgtccaacatacaaattatgttgtagaagcttaagaaagaagcattacagaaagaagcaactatttaacctactctcaaaaggttcaacaaagcccagaagacttgaccatgttcataggcagagaagaaagatcagcaaaaagtaaaaaaaaaaaaaagacaaaaggaaaaccaggagaattgttagagaaaattatgacaaggggacaagtctgaagctcctgtggaggatggccccagctgccacaaggggagtgtaaaaggaggtgagaaaatacaacctcatgtaaagaacaaaattacatcatgtaccacgtatttatttttaagggcatcattaaa

SEQ ID NO: 42417 - DNA, 1082 bp, Homo sapiens
tctcccagccgggccccttcccgccgccgcggaccctcagcttccgacgcgcagttcgggctgagtcccgggcccggcgcaggcttcgttcgacgagttagtccacactgcgctctccagcctcctgggtctgtgcgcccttttccttgctccttccctccaggctgtaacccacgtttgacccggctggggacatttctgggccggaactggggagcgtgttttgcttcccagcccacgctgggcaggcagtggcctactttgcgtggggcgccccgtgctcctcagtgactcggagggaagctggcctggctttcgctctggttaaactagtaacagtcaggctctttccagtgggctttaaagtgtccctcaccttcatccctgaccgggccccctatctagcttttcgctacagtgttggctgctcctttgttcgtggaggggaagcaaagaacctcgggctgatggttctcagcacccgagggggacaaagttgccgtgagaggcgcagcctgctcgtgggctggtctgagctgttggttgtgttttgtttgaggatttggtcctcctcaggagagtcatttcaaaacatgccgaggatgcttgatgcactgagcttggagctggtgacatcaagtcaactggccgcgtaaacacctgggtggctcaagcacagcttcaggtactgttaagccgggcacaggggccccgctccgcccggacagctgccgccttgctgcgctgcgcaccccagagagcctccggcaccgcctccgctgcggcaaagcgggctgtttgtctgagggcctctggcgctcccttggcccagacgctgcacattgttcgggccagggactgggtcaaggagattacgcagacgctgggagcacacgggcagagtggaccaagagaggtcggggcatcatagggatttttcgaggtaacccttattgggctttggggagactcgttgcatgccacgccaggagcagggagatggcagcagtagcctcccgggtgaccgctcctctgtattatttgcttacagatcaacaaaaaactacagtgattgaaaacgg

SEQ ID NO: 42418 - DNA, 1058 bp, Homo sapiens
cacctgttgtttgaatataacttaatggttacgtttacatcaaactaagagtaactgttgtggacttctaacttaatatgtagagtctggtctacacgatcccagtccctcacacacatctaaacttaattatggacttgaatggattctgaatttgttttacatcaggggcaacgttgggtatagttgccactggagaaaagaaagggatcaagaacactagaggccccatatttggaagagagttctctaattctcttcatttgtgatcctggaaaactggcaatataatagtagagagaattcagctgggggaagtttttgttcagggaccaagtggggcaacgtggaaggaaagtattttaagtatagaaatgtaaaagcatgtttacagagtaaatagtgaatttatgtaatttctcaccataagagaaaaaatttaagttcaggaagagtttttgggaatctatgaagggagaatgtacgataactggtttgtaaaatgtgcattgtaatctcaactcttaggaggtaactattagaagtgaaattgagactccatagatcgggggtcttactacggcattttaaaagttctgactgtgctcatttttgaggaatagttgtttaaggctttctatttttctctctgtgcctaccacttattttctaggaaatcagaataagcattgaagattaaatagataaaacatgttggtgagagaatatgagacaaagagcacagaagagtgtgctctcaggagctacctgaagagacttcatttatttttctttttctgtcccatgtatttttctgagttgtctcttgcctagttcctgttgtttttcttaagtacctgttctgtgtctgttgtggaatattttttaactgttttgtttctagaaaaaggcagaaacatttttcagatagttttgatcacttactatttccagacaatgtgctaggcatttaagacacaaaaatgaataataaatgtattttactttcacagtgttcaaagtttagtagaaaaggatagacaattgtaatatagtat

SEQ ID NO: 42419 - DNA, 1026 bp, Homo sapiens
acggttctgtcttgcctgggttccaggcaccactggagtaccgaaaaaaaaaaaaaaaaaccctgcagctagctcggtgtctgcccgaatagctgcccagctttgagcttgaaacccagggccttggtggtgtagacacacgagggaatctcctggtcttcggattacaaaaatcatgggaaaagcatagtatctgggccggatagcacagtccctcatggcttcccttggctgggaaagggagcccctcacctccccgcaactccttgcgcttcctgggtgaggcaacaccccatgctgcttctgctcgccctccatgggctgcacccactgcctaaccagtcccagtgagatgaacagggtaccttagttggaaatggagaaatcacctgccttatgtattggtcttgcttggagctgccaaccagagctgttcctatttggctatcttgccagatccaagagaatccattttctttttcttctcttcaagtaaaggcaatgatcccggtatcacggactgactgtaactgctcttcttgattatgttcaattctttatacttgtgtgataatttagttattataacattttctttcccattttattttgttgcatttgttcgagaggaggaaatgcttcagacttcaggtagccattcctttgtaactctcatgggatgtctttttcttatatatgattttgaagtggatcatcatttgtatgtatgtatcatatatacacatgtattattaagtggcatgtcacctatatttagagtttccttagtataattaggattggatgggtatttggctagtttttataaatgtatgcttctcttacctaatttgtggacctcattttgttactcttgaacatcttgatttatagttttagcttgcaggagaaaaggaatgaattgcttctctgtttagtgaatggattgtatgtgtcagggatacatttcccaagtatgagtgggtcagttgggtctcagtcaaattgttaattctgcattttact

SEQ ID NO: 42420 - DNA, 1034 bp, Homo sapiens
aagagagcttctgattgttttgttaagcccctgtttttcagttggtgcactttttttttcctttgagataggatcttgctctgttgcccagtctgctctcgaactcctaggctcaagtgatcctcctgcctcagcctccttagtagcagagattaacttttttcttaaattgaagtagtagatacatatggcttagaataattaattagtgtagaagggcttataataaaaagcagtgtactctttcctgtttatctcttcaaaggggacattttttgttttattttggtctctttcatgttccaaatgtcttgagaattttggttatctgtccatatttatgaataaaacaataagaaactaaccaagaactatacatatagataggcttgttgattgggaaattacttttaggttaatcttgcctgtatttgcttcctgctcctgatttcctacctacctggtgtttgagttcacttggttttggcagtttggctgtctctttaagtgtattctctgtttgtattcggaactgtggcctcctgtgtctgctttggttcattatttacactgttctgctttccatcttcagaaaatctgttgaaattgcttggctgctaatggctccattcttgttctctagtcattatggattattccttttaaaaattgctttactgctagtttagtctggctttggaagggagaggagataaaaaataagctctcgtgatatccccagtctgccatctttacttggaaatcctttcatgttaaagatgaagaaactaaggcctatagaagtaaaatgacttgtttgatactgatgcaggattttttcagtgccgctttgccagccagaaatctctggccggcagcacccctgcccaggcctcacttagttctgagctggccactagtctctatgctctgcccacccaggctggcaggctgcgctcagcttatgctaccagcctggatcccatgtctgctgagggcgagccaggcacagagcagcaaaggatatgtgagca

SEQ ID NO: 42421 - DNA, 1033 bp, Homo sapiens
tttcatatggtcatcggccttttgtatatcttcttttgagaattgtctacttacattctttactctttttgatgggattgtttgtttttttcttactgatttgtttgagttcattgttgattctggttattagacctttgtcagatgtatagattgtgaagattttctcccactcttgtgtgttgtctgtttgctgactgtccttttctcttcagtttaattaggtcccagctatttatctttgtttttattgcatttgcttttgggttcttggtcatgaaatcctaagccaatgtctagaaaggtttttccagtgttatcttctaggatttttatagtttcaggtcttaggtttaagtccttgatccatcttgagttgatttttgtattaggcaagagatgaggatccagtttcattctcttacatgtggctagccaattattctagcaccatttgttgaaaaagttgtcctttccctgctttacttttttgtttgctttgtcgaagatcagttggctgtaatatttgggtttatttctgggttccctattctgtcccattggtctatgtgcctgtttttataccagtatcatgctgttttggtgactgtggtctcacagtttgaaatcatagtgtgatgcctgcagatttgttctttttgcttagtttactttggctatgtgggctcttctttggtttcatatggattttagaattgttttttgtaattctgtgaagaatgatggtgatattttgatggggattgcacggaatttgtagattgcttttggcagtatggtcattttcacaatattgatgttacccatccatgtgcatggggtgtgtttccctttgtgtgatctgtgatttctctcagcagtgttttgtagttttctttgtagaggtctttcaactccttggttaggtatattcctaagtattttttgtttttttttttttgcagctattgtaaaaggagttgagttcttgatttgattctccacttggtcgctattggtgtattgaagagct

SEQ ID NO: 42422 - DNA, 1042 bp, Homo sapiens
ccacgaatatagaatatgaaagcttttacccatgaacctttttttgttgtttaatgtttccatttcttctgatcctataaacatcttagtttccccgtgtttttgtttgtttgtttgagacaaagtctcactctgttgcccaggctggagtgcagtggcacaatctcggctcattgcaacctctgtctcccgggttcaagcgattctcatgccccagcctcctgagtagctaggattacaggtgcctgccaccacgctagctaatttttgtatttttaatagagacggggtttcaccatgttggccaggctggtctcaaactcacctcaggtgatctacccgcctcagcctctcaaagtgctgggattacagatgtgagccactgcacccagcgagtttccccatgtttatgagtaattctttgaaatggaaagatgcatgaccagtgtcattggaaaaaataattaaaaaataatatagaccaggatcactataagaaacccagtgtatggactatgaccttaaactgtgataaaataggactaacaggagatttttaactttagctaactttttaggaacaaactatttcattctgtagttaatttaaaaatacttcaacttataaaaatttgattcatgaagctttaaaattgttacagtgtaaggctcaatgtaaattattgaaaaatgtatacacgtgtaaacaacctgtttttttcttttttctgtttactgttagcaattcaatggtataaggaaagtatacttgctgagattctaattgaacagaacatagtataaagttacacatttttatttaaataagttctctattattttccagcaaaatggcatacacgtcttttagattccttcaagtctgtattattcacataattagtgccagcctctataacaaataattccaaagtcttagtggcttaatatgataaaaatgtatgtcttgttcttaaaacatagtttgtagatgttcctgttgaggcagctctcctgggggtaatctcctctaagcagtgat

SEQ ID NO: 42423 - DNA, 1039 bp, Homo sapiens
gccatttagttgtaattttgttttagaaaacacagatgagcaaatactagatatgtgattaaacaaaataatgagaacttagattttcttttttaaagcttgtgttcaaattatattaattacaatctgcaaaattgctttgatctctgctgttaaggacaaatgaaatactggagctgtaatttccttatccccaaatttttcctatagctattccttcctttctttccctttcatttagttacttaaataatatttattataaaatatcaaaacagtacagggttgaggtgttcagaacaaaatatgaaaaactattcttcaaaagtttctggccatcctttcagcctctgtttaaatttgtacatgttttgtagcatattcaaatagcatatatccatgatattttgcaagttgattattttacttgggaagcttttcatgtcagtacatgtttgaccttgttctttttaactattgcatgctcttttgtagtctagatgaactatagttaatgtgaccaatcgttatacctctttctatatgcatgtattttttaagggatgaatgggtccagtagcttttctgccttcatagtcctgttactcagagtcctcaactctccaaaatccattgttttcttggttcttgtctttctgtgactcttatcacctttccatattcaaatccaattctcttccaacactgttcattattggaatcttaaattgtggcccatatttgtttattgaaccagtcagtctcaatctcaatttttgtatgtcagttatataaggaattttatgccactttggttctagcctgtggggaatttcaatgatttacattataaataaaaatattaatggtacacaaagtgaattattaaataaaggttcaccagctatgtgctaaagtgacagttctgaaatcccactgttttgatgaggaaattactgtgaaacctatttaaaaatgattttggtatgtcttacttggattttaaaaatgtatattgtaaaaaattattataataaga

SEQ ID NO: 42424 - DNA, 1058 bp, Homo sapiens
tggcctaccagaggatcagatcatgtggagcaaaggtgagtcatcctagaccagccagctctcagccaaccacatttatatgagtgagcttagccatgacagctaatcccagtccaaattgccaattacaagctaaattaatggcagttcttttaaatcagtacattctggggcagcttattatatagttagggctgatacactgtactgccttactgtctcaaaatcactcattcccccttttctgactattagtctgatactttagacttacaatttttttctgtagcaatctatatatggctttcttgtctccagcctgtttttttagtatgttacttgcagccagtcaccttagtgatatgcaaatcctatttccctgcttaacatttggagtggaggagggtgtttggattgtacttaatggtagtgatacatggcacaattggcttcttaccattgtacttggtggttgagaggaatctgatacagcttattgaaaataaattggaaatatatattaagaactttaagaacattggtactttttgaacccgtaaattttatttctaagattctatcctaaagaaaagatattcaggaatgtgcagtttttcacataatcatgttattaaaaatgatatttgagtgaatttggaacagcagaactcccccaaatacttaaaaggttaagtgagttgtgatgacatgtataacgaagtagtttaaatgtaggtttatgaagaatttttaatgacatggaacatttcctgacattgataggtgagaaaatgatgctatgaaatatatgggattttaaataaaattttagattttcttttcagtaatgtggcaaacaatgctaatctgagcagttctgctgaaaatgaaaacttttaggtagagtagaaaaagtattttttagaagcttctaggagctggcaataccctaagagattaattataaggccaatattgctaagtgaaactggcaaagcctcttttaccctaagatgaatttctactttggttttgatggtcctttgggacacagtggg

SEQ ID NO: 42425 - DNA, 1049 bp, Homo sapiens
gtcttgttctttagttaatggagagttatgaggctttcagaatctggtcatattgattaatccttttagtccacaccactacactatggaataagcaagaagttacacccttcagataggaactctcagtaagggtaacgggtttaccaaggttacagggttataaatgctggagtccttacaagaagccaagtcttattcataattcattctattccataacacttctctattgtatagtaagaatagcatagtctcttaaaagtcacttctacagctaaaattttatgattctgcccttcagttcccttatgtctataatggacataatacttaccatacttacttgactcagtattgcacatgataattcacaccaatggcttacttaggtagtcaatattccaagagggaagtgggacctaatagcctgcagtttccatgagacttggaaaagactcaggtgactggacctggcgggaaattttcagaactaactattcaagacactgagaaaaagtagagctctgatctctcaaaggttagaaaagacttaccatgttagcagtgataaagacttgcaatatgcagtaggtgggtagaaaagaatattctatgagggctttgtgtcaagttttggagttgggatagaaaggaaaaatgtcataactaaaaatatcagtctgattaaaattgtaacatgtgatatgttataaccatatttacaaatggtctagaccagtagtttggatgctaaaaaaattatctttccctgtgtcctttcatttttctttttctttttattttcctctcttttaatttttttctccctcattctcttcttcctttctcttcatcattggatgaaggaaagcccttcccctaactcatctgaacaatttttaaagcaaaagaagagttagaaccatactatctggggtgatgtgtcttgagacagctatagcaatagcatctacagcctttcaaatcaaagagttataattataagagggagattgtgctcagagttgggggcacaatttgagata

SEQ ID NO: 42426 - DNA, 1074 bp, Homo sapiens
cttagagaaagcatgcagttaactgaaattcagcttttaaactgaagatcatttatctatggtgtcttcatcatctagattcattgctagactcagaagctgaaaaagatattttcttattcagtcataataaagctatgtaaatatatagattgcacttgcccatcaggcaagaaggcatttcttggttgaactttattttgggcctcttctttgagctgggatgccgttttgccccctacgcccgccccgtctaggagcctcttttcctgagaatctgtgtttctgtaagggcccttgttgttatgtagactaagacttgttggtcctctctaggaagcttttatgtaaagggagaaagttcactgttttcacacccagttaaattgccaaactaagattacagttcagttcttttccccagatcatagttatcagatcattcttctcttagaaaacatggatgcgccttttctaagattctcaggattcacatcataaacggggactagaaataaagaaagatcttgtatatgtgaacgaatttctctaagctcacactttcttattaatattaggatagtggtgagacaaggaaacccagttctattgttctgcagcatattaggtcacagagtacagaggaagcttttagcagctccagataaaggacctcacggaagcccgtgaagccagtgggactcagctactgattaaacagcagcttgtgaaaccgagcctctcgttttagattaaacaaacagacttgtattttgaaaaagatttctaaagtaaaggaaatgctttctaaagtatgaattactgtgtttaacagcctctgggaaaattattttcaacaggctttctatgcaaattattttaggatttatagctataaatcttgaaatttgattttggttgggattgctgcaattacttttacttggtgatattttggggttaactaaatatgctcatttgaacagtaataggaagtccgtctgcagttttgtagctgattagcactgaagttatcaaatccttacagttttgctgataatcagtgtgctgagt

SEQ ID NO: 42427 - DNA, 1050 bp, Homo sapiens
attactgttttaaaactttgtatttactaaaatgagggaaggaatattctcggaggagatgctggacaaccatctctgatctagaagactgctccctctagggattttagattccattatcagcttttctttgaatcttcttatgaagatactgttgcagaaaactggggaagttatggtaaaattagcatgtctgcagagcaaaatattggattgatgtcttttaaaattgtagcaagtggctaattcggagccctgccttggcattacaattgtttgtcacaaagagcaggcatatcagaaaagtaacctcattattaaattcttttttttttttttgcaaaagttagctcagtgcagtgattccaaatgtcatttattgtattgtgattcaggtgggaaaagtgagcactatttatgccagatgtctcaggtacccgcagccacagcattgatcagtatctttcattttctctgcctttttttccttccccaaccacaaaagagtgactctgtattcctctgcccacctgggcctttggtaggagggggtggtggtggtaaaccttctgtttaatttttgacaatttggtaggtaggttttgcattttattatatgtgtttttttaaagttttttttttttttttttgagacagggtcttgttctgtcactcaggctggaatgcagtggtgcagtcatattcactgcagtctctacttcttgggctaaaacgatcctcccacctcagcctcctgaatagctgggactacaggtggataccaccatgcctgactgatgtaaaacatattttttctatagagatgggatctcactatattgcccaggctggtctcaaactcctggactcaagtgatcctcccacctcagcctcccaaagtgctgggattacaggcatgagccactgcacctgggtagttttaatattttaaaaggcttgagttaccatcaggtcaaattaggtgtgcaggaccttgtgctatggctaaagtagcccctgtctccctgcatctggtgaagggagacggtc

SEQ ID NO: 42428 - DNA, 1929 bp, Homo sapiens
aaacaaaaaaaacaagatctgggtgctgggtttgctcattgcttctgggcatttttaatagatttttgatcctctgcttcctgtacctaatctttggggttgtggggaggggaggagagagcaactttgggacctcttagagacagatgagctggaaggactctgtccatgttttctccctgtcacttaaactattaaataccaccataaacattctaaataccatgtttgtggtactaactgcattataatgatattggcagaatcttatttttctttttagagtaataaatatatgaaaaatagattcgatttacctcctccaagagcagcttaatctctgagaatatgaacgaaacctctttggcttaagaatttagttagagaggattattttggggggtctttcagtgttggaattgctgaaaaggtttataggcaactccttgaattggtaaaagttcagatgaaatttctactggcgagtctcttgaagagcatggggctgtagacttgctttgatctgtttactgagctttgctttgctttttttttctttttattatagaaaatttcaaacatacagaaaaatagagtgaagtggtatagtggaccctcgtgttcccgtcacccagcatccacagtattttcattcatgattcatcttgtttcacctttacccttccctctgccctagcctttgttgtattgatgtaaatctcagtgacggatcagtgcagctgaaaatgcttcaggaagaagtaagtgtgtttttataaaacaggatggcttgcgtgcagatcacctaggtatttgtagaaatgcagattttggccgggcgcagtggctcatgcctgtaatcccaacactttgggaaaccgaggcaggcagatcatgaggtcaggagatcgagaccgtcctggctaacatggtgaaaccgcgtctctactaaaaatacaaaaaattagccaggtgtggtggcgggtgcctgtagtcccagctactcaggaggctgaggcaagataatcgcttgaacctgggaggcggaggttgcagtgaaccaagatagtgccactgcactcccgcctgggtgacagagtgagaatccatctcaaaaaaaaaaaaaaaaaaagaaatgcagatttctgggtcccaaactaaccagctgaatcaaaatgctgaaggctgggctggaatcctgcatttataatagttttctggttatttctcccctcatcccctcactgccacaacacacatatttcatcttctactacgtacaaaataataccagttatttactggaaatctgttgacttgtgtaactagtgagaatcaaggaaaggaggaaaacattccatttgattaaaaacttgagattttaaaatgaatgccaacacctgaaatctgaagagctcactcatcctgagcaccacgtgtaaatatctccctgtgagtacatatgccatcaccacaaaggaattcaagcactccggggcagaacacagctaaagcttgaaataagtatttttttatttttttaaaaacttcactccttctctagatgtctgtatgaataatagcttctttacattttacgaatatcatgtataaatatcagggaaaacagcaggtagtccgacaatcagatgctggtaccgtgagctgagaatcttggtgccagtcctggaccaccaggcctcagctcactgcagctagagtcagggtggcaggtgactcgtagggaaattttgagagcaggtataaaaccgtgacattcttaattcccttggtgataaatgggtgtgctgtaacgtgagaacccctgattcgtaatctatacggtaacttgcagggtgttttgttttgctaggataatatgttgttagcatcttgcttttaaaaagtttatttttctaagctaactca

SEQ ID NO: 42429 - DNA, 1027 bp, Homo sapiens
ggcattcatacagtccttatccagttctgtaataaataagtagtttgtgatgcttaaaaaaacaaaacaaaaactctgggtgcaagagaggaaaaagtaagtcaagatcagctatgtggagtttgaggaagtataaactaccctaattaatgacagacttgggttcaaaggacagtgggctgtttttaagtgttaaaggttaaccacatagaggcagagcagtggggtttcaaggaaagcgagggagcttgcacccagcacacctaaactcagtctggcctgccactgtcccacctgggttcatgggcatatcagtttcttcatctgtgacgtggagctggtcgtattacctcagaggtattgtgacagccaaatgaaataatgctgtattttatcaaatgtcagatgaggttgatgataagtcacacccttagttttgtaccattaaaaagaagaaatgctgccagttaagctaacttgaagtgtgagatgcacctgaaattcagagatgcagtggacaaactgtgtgttattttttctttttattctcccttacaatccaaatgcgtctttaaaaacaatcaataaaaaacagtgtacgtgaaagcgctttgctttcctcaggagtcaaatttaatttttattatgtgcatcgggagtgaagcacagttcttcagaaataattccagcagtctggcgcagtggctcatgcctgtaatcccagcgctttgggaggctgaagtgggtggcgcacttgagcacaggagttcaagaccagcctggacaacatagtgagactcccatctctcaatagaaaaaaaaaaaaaagaagaagaaattccagtggggaagcacaggcttcttgtctggatgagtgaacagctcactgcaaggaggaagagaagaaaatcatccttcttggtcttcataagaattggctctcagtgcctcaagctcctcacttagtttaggttttccaaatggacacaagtgtgtctgtggttagggagttcttgttctcattgaa

SEQ ID NO: 42430 - DNA, 1025 bp, Homo sapiens
aatgttagccaatggtttttaatgcttgctctctttcattttaggaatttgaagataattttgatgatgagatagatttcacaccaccagcagaagacactccctctgttcagtccccagcagaggtcttcacactttcagtaccaaatatttcactcccagctccctcgcaattccagccttctgtaggtaagaccatacagcctaatgccacgttttcatgaattgtttctgagatctgagaatgggagcctagccatcataaatattggactgcccatctcctctttggtttatttctcttccttctgctcccagtgaagctgaattctagtggtcaggcccattgtattcctgcaatagctttgtcttctgctttctggaccctgggtctggtatgagaataaaacgaatctccttgattcattgacattgaacacctggccagaactcccaggctctgttctggaggtggtttctctgctagttctggccacggctgaccttgctgagtaggactctgctggcttccactgggatgccctgcatttgggtaggagaggaaagtttggatatgttaatcagattgacttttctaagcttcttcagacagaggtttggttctgtgttagttgatgtcttgtgaaaaaatagaatgtgactagaaaaatagaatgtgactatagtttttttttttagagtttgaaatttaagccctttttagagttagaactttttgtggtcttaagaaattcttattctgtgattaaaataataccttttaaaaaatattttaagcttttgctttgaccaaagaagtaggttcaagaagtagggttttctgagattgccgcaagaaggctgtgtaagtctgtagatgctaggactaccttttctggtgtgacacacgctgtgggctctgcctagggcagaataaacccccgaactgatgccactgcaggcaggcatgactataagaaaaagccagatggaacgtgacatagttggtgcatttcatttaaata

SEQ ID NO: 42431 - DNA, 1050 bp, Homo sapiens
gtatcattggatggagtgcgatgggtgtttaagtttcagggcaatgattgattgtaattagctttcgtcagtttactttctcatatgtatagcagactaaataacaaaacttagtggaagtgtttttgaggaacatttgagttatgttggaactgaacttataaattgcacttctgtaaagtcatagtgaatttccttgaagtagaatacatttttaaataaatcgacacaaataagtataaatacattttaaaataaatagaaaagaaatatgcataaatatgtgaatattgtaactatctggtgaatggtttaaaatggtccttttactgaagaaaaatatttgagttttccaagcttttggtgaggtggtaagtaaaagaatagaaggtcacctgcttattgcttaacttgttcacctgtgttccatttcccggtaaatgcagcagactcctttatcattttgatggaaatgacacaaaaaactgttctttgattttaggttctcttgggagagatttacacgggcactagcgtagcaagagtcatcgtgaaggagttaaaagcaagtgccaacccaaaggaacaagatacttttttgaaaaatggagaaccttactagtaagtaaaccttgtcatgtgttctgtaagactagtctgtggtctgttgaaggtcaggtgtttaaaactactgtgggatttctgcctgtaacatacatgattaagtaagttccaaggtctcataagacctaaaatgtccaggcgtcatctgaaaatcacttagcattccaagaaccaggagaactcagcctaaaccagaaaagacaacagattccaacacagatgacagagatgttagaattacctgacaagaattttaaagcactcatcataaaaatgctttgtgagcaattgcatcacgtttaaaacaaaaaaaatagtctcagcagagaaatagaagacataaagaagacataaatggaaacctcaggactaagaaatacaggaactcatcatttcagttacagcctcaggggcatggggaaatat

SEQ ID NO: 42432 - DNA, 1048 bp, Homo sapiens
ggagcctgggcacttggggaggagtggggcaggacccagtcctgccactgtttgcttcctcaccacctctgggtttcaggtcatgagaagcattgccttttcccctgggaacaccagttgcttgctttcgagttttataatgagagccaaggaccttctgcaggcgtaattgttcatcttttaccaagcctttgcatttcaagtatccaaagacctacgtggaatgttagtatggagagagaagaggagggagggactgggacagtcatcctgccatccaggaaatgcctgagctcgacatcgcccaagctagcctcaggctgctgcccctggcctagcaggatgcgtgcttgcccttgttgggatgctggcatccagctccttgttctggtctcaggagggagatgtcgggaaggttcacagggtctgtttatagaccctagaggtggtcgttggtggtgcccagtgacggagcctctgttggcaaaacctgtatctctgcagtcgcagctgttggcccagtggatagagcagccttacttaaagcattttcacttttctgtcctcatatggcatgttcctcctccctctctccctccttccctctctccctccctccctttctccctccctccctttctccctccctccctctctcccttgcttaattccaagaaatggggaccaacattcttcttacaattagaagattctttgttgttcataacagtggagtcacaggtgtcccaaggtttttcccaggcagttcagcaggcctgaaggcttctggatggagtgcagaaaatcacttgtaagcacaaagagtgtggcaagtgatgtgaggtagctaactggaatccacattgaggaccagctgcgtgcttggaacagcagctccaagtgtcactgcatcatcgttgagagttattgacggtgaaaacacaaacatattaccgaacactaccttgctagctttgtggccctagcgaagtcacttcaattctctgcctcagtgtccatatttgttaatgaggaaaataatagtacc

SEQ ID NO: 42433 - DNA, 1306 bp, Homo sapiens
tcatgcccggctaatttttgtatttttagtagagattgggtttcaccatgttggccaggaaggtctccatctcttgaccttgtgatctgcctgccttggcctcccaaagtgctgggattacagttgtgagccactgcacccagccggtcaaatgatttttaacaagagtaccaggactattcaatggagaaaggatagtgttttcaacaaatgctgctgggaaaatgggatatccacatgcaaaaaatgaagttgaacccttaactaacaccatatacaaaaattaactcaaaatggatcaaagacctaaatgtaagatgcaaaactataaaagtcttagaagaaaataaggaaaaaactttatgacagtgatttattcagcagttatttattgggtatgacatcaaaggcacaagcaacaacaacatagaagactacatgaaaatgtttaaactttgttaatcaaaagacactatcaatagggtgaaaagataaccaccaaatggagaaagtatttgcaaattatatatctgaaaagggttatataaagcatatatggagaattcgtgcaactcaacaacaaaacaaacagcttgattagaaaatgaaggaaagtgtgtatttccttctccaaaggaaatatacaaatggcaataggtacaccaaaagatgcccagcatcagtgatcattaggaaaatccaagtcaatttcccataatgaaataccaccttacacccattaggatggctactatcaacatcaaacaataatatgttttggtgaggacgtggaaaaattggaacccttgtgctctgttggtgggaaggtaaaatggtatagtcacagtgggaagcagtatggtggctcctcataaatattgaaaatagaatttccatgtgatgcagtgatgccacttatgggcatatccccaaaatggttgaaaacagggtcttaaagagataatttgtacacccatgttcataccagcatcattcacaatagctgaaatatggaagaaatgtaaactaaaaataaaactttaagctttccaattgtctgaatgaactcatcctctcagccaaggacatctcacagttcaggacatgatggggagggggcgatcagattccccattatactctccctttggaattcaggcacaactgaccagcattaacattaaaacagagatcttacgactttttgtagcaataagacaccatattccagcctgactaaagtaaagcatcacatgacagatagcaggccctgtaagaaattgaagtattttgcccccaaatatat

SEQ ID NO: 42434 - DNA, 1043 bp, Homo sapiens
ctctagtgtctcgagcacttgctagatgtcaggcacttagcacctgcctgtatcctgcatcatctcttttttttttttttctttttttgagatggggtctcgctgtcaccctggctggagtgcagtggcgcgatctcggctcactgcaacctccgcctcccgggttcaagcgattctcctgccttagccttccgagtaactgggactacagggtccctccaccacgcccagctaatttttgtatttttagtggagacgggtttcaccctgttggccaggctggtctcgaactcctgactttgtgatccgcccacctcagccttccaaagtgctgggattgcaggcgtgagccaccgagcccggcctgcatcatctcatttaatcctcaccgcagaggggaggtttgtgttctcctcacttcacagatcaggaaaaaacttcacaaagttgttgcttgcgtagaatcacatagctggtaaatggtagaatgaggacttcaaaccccggtctgtcagagtctaaagcctacagtcttgctccctaactggcttcactgttcagcgcataagtcccagtatatattgttttagtgttttgctcagagtctatgttatatgcatcagacacagcgtactttcttatccaagaaggatgacttagcaagcgttcatggctcgcagatgaggtcatgaagcccaggaggcttcagcaaaactccttacccactttctgcccagaaagtcactcttcatgcctgcttttttttctgacctggtttttggattgggtatatgttttctgagaataccatggatttaaattcttgaactcaccaaaagtataattctattcaaaattctgtgtgctttctaacaaaacaggaggattatattgaaacagatgataaaaaagttttccctctgcgatggactgctccagaattagtaaccagctttcaagacagactgctaactgcagatcagactaagtatagtaatatctggtacgtattggcttaccgttttattagtcatttctttggc

SEQ ID NO: 42435 - DNA, 1117 bp, Homo sapiens
gaggtgaagagggagacggctcttagctgcgttcaaggcggggccctcgggagcccaggtgcagagcgaggccgtgtccaggagccggcgtccctcagtgccccgtgcacccgcggccgcggcctcccaggcagtgctcatgcgctggccgtcgggggaggcaggggcacagcctccatgtgcgcgcgcgtgtggagctgtgtgcaccgcatgtgtgctttccacaggggcgtctctgcgtccacgcctgcacatcccggcgcacgtgtgggcaccacagaggacacgtgaggggaatggtcaccagtgagccatatttattatttctagagaaatcacgaactgctttctgtaattgcactgtggataaatgttccgagagtctccattgttgtacaggatcttcagttattcgaggggaatgaggcaggtcaagccgatgctagccactagtttgattttttttctgttttatagtttgcgctgcatggtacttgtgaagcttaaatattttgagtgttctactgtgtctaggattgttgggattgtacatatggtactctttcataaatgataaatgattctgaatgttagtgttttatgttcatataggaaatattttcattgagtccaaaataccactgttttgttgatggacttgaatgcatttttgtctcttcttgatgaagcggctttgccgcagcaaatgaggcttctctctgaggagctgagaggtcttgcagcctctccttgtcattctcccaccccacatcccattttttaaagcccttttggtaaaaaccaacaggttgtggccgcagacctcagatggacccggcccatccctggggacgtgctggcgtggcaggtccagagagctgcaccctgcacggggcaccgcaccgcttccctccgcgcagctcttctgcctggttttcggaggccaggctgctgggaagcttccgtgttcctgtcagtccttccttcaagaagccggggaactcaggcagactcatctccgcagagcataccagccgtgggggaccgttcgacttgatgatgtgtgcacacttcaggtggtggggacttgagctttaaaaaaacctccacagccgaa

SEQ ID NO: 42436 - DNA, 1074 bp, Homo sapiens
atagtgaaacctgtctctactaaaaaatacaaaattagctgggcatggtggtgcgggcctgtagtcccagctacttgggaggctgaggtgggaggatcacttgagcctgggaggtggagcaaatcacctaattttacatgaatgggataacttatcaagtgacagcatcacacgatttgtgtgtgtgtgtgtgtgtgtgtgtgatggggtctcgctctgtcacccaggctggagtgcagtggcataatcatagttcacagtagcctcaacctcctgggctcaagcaatcctccacccccagcctcttgaggagctgcgagtataggtctgcaccactatgcctggttaatcccagcctcttgagtagctgggagtataggtctgcaccaccatgcctggctaatttttttgttttttttttttgagatggagttttgctctcgttgcccagcctggagcgtggtggcctgatcttggctcactgcaaactccgccttccagtttcaagcgattctcctgcttcagcctcccgagtagctgagattacaggcgcacacaaccacgccttgataatttttgtatttttaatagagacagggtttcaccatgtgagccagactggtctcaaactcctgaccttgtgatctgccggcctcggcctcccaaagtgctgggattacaggcgtgaggcaccgcacccagccactaacttttttttttttttttttgagacggagtctcactctgtcgccaggctggagtgcagtggcgcgatctcatgattatttgagggagccttccttggagctcagcacatgtaagggcagacccagtagctgttatcagccccatctgtcaatggaaagagaaagtaacttgcctaagttcacacagctagtcagaattcttgggttgctgaggaaggatgaaccatcataggctggaaatgaaataggtcaaaactccttcaaataattttataaatgttggctcaacttcttgagaatgaaaataatacatgtctatttataacacttattaatttggttttacctacatttttcttttttcttt

SEQ ID NO: 42437 - DNA, 1894 bp, Homo sapiens
ttacaggcgtgagccaccatgcctggctatttatttttttgagacagagtctcactccgtcacccaggctggaatgcagtggcagaatctcggctcactgcaacctctgcctcttgagttcaagtgatgctcctgcctcagtctcccacatacctgggattacagcacccgccaccatgcccgggtaatttttgtatttttagtagagatggggtttcaccatgttggcgaggctagtcttgaacccctgacctcagttgatccgcccaccttggcctcccaaagtgttggaatcacagtcgtaagccactgcatccgccttttttttttttttttcttttgagacagagtctcgccctgtcactcaggctggagtgcagtggcgctatctcagctcactgcagcctccgcctctcaagttcaagtgtttctcatacctcagcctcccgagtagctgggactacaggcatacaccaccacacccagctattttttctctatttttagtaaagatggggttttaccatgttccccaggctggtctcgaactcctgaactgaagctatctgcttgctttggcctcccaaagtgctgggattacagccatgagccaccacgcccggccaggattacattttccatacgagcccagtgtatacattacagcaattttattggtgtagtttcagggaagataatttattactccctctgtagggatcgtaatctgtgagggtcttatctctggctctgtttagtcttcctaattatttatttattaaaaacaattttatagagacagggtctcactatgttgccctggctggtctggaactcctgggctctagccattgtcctgcctcagcctcccaaagcagtgggtataggcatgagccaccacacccagcctagtcgtcctaattatttacagaaaaaaaaaaaggcagaagttgccaggcacggtggctcatgcctataattccaacactttgggagtccgaggcgggtggatcacaaggtcgggagtgcgagaccagcctggccaacatggtgaaaccccgtctttactaaaaatacaaaaattagctgggcatggtggtgggcgcctgtaatcccagctacttgggaggctgaggcaggagaatcacttgaacccggggggcggaggttgcagtgagccgagattgtgccactgcactctagcctgggcaacagagcaagactctgtctcaaaaaaaaaaaaaaagctgtatgccatgtgtgagtcaagccacctagccacattcctctcaagggtcagaataatttaaaattccaacagctgtaaatttgaattctttcacgtactgaactgtcaaaaacccagtcattgtcccttcgagctcatcagctcagcagcagggctgggatggatgcctgggatgacatgaattcctcctgttccttctgtctttctttaaacaagtcaccaggggccatatccatgtcccatggtgggtaaatggtgttgtgtccctacaggcctcccgctcaaggctctctctggccaggaatgtggatttcttaatgcacagtttgaccagctccttcactgccaggcatagatctttaggtactgtaagtgttcagtaagcacccgtgaaaggtcagagatgggggcagacggtggaagtgattcagagaaacaagaaggagaatttgattgtggtatgaaaaggcttccacaagcagccaaagataaaatatgcctattgatctacaggatgtcaaattaagaaaaacggccaggtgtggtggctcacgcctgtaatcccagcactatgggaggctgagatgggcggatcacaaggtcaggagatcgagactgtcctggctaacacggtgaaaccccatc

SEQ ID NO: 42438 - DNA, 1085 bp, Homo sapiens
agagccttttgagaacgaatggacatagggactgtaggagaaaagtttcccaaaatcggctgaacaatcccccttttccaaatgcataccactgtgtctggctaattttaaatttttgtagggaggggtctttgttgcccaggctggttttgaactgctggctttaagcgatccgcctcagcttcccaaagtgctgcagttgcaggcgtgagccacggtgtcctactccactggagattgctgaagggacctccctgagtaggctagagggaggcaggtgggcatgaagtttttttcttttttctttttttttgagacggagttttgctcttgttgcccaggctagagtgcagtggcacgatctcagctcactgcaacctctgcctcccaggttcaagcaattctgtttcagcttcccgagtagctgggattacaggtacccaccactacgcccagctaatttctgtatttttagtagaaacgcggtttcaccatgttgaccaggctggtctcgaactcctgacctcaggtcatccacccacctcggcctcccaaagtgctgggatgacaagcatgagccactgcactttgcaactttttctttcagcagtggaaagcccgacttcagaatattctggtttatttttccataatccccggagaagcagggaacaggttctgtgggtggggtttgggctccccagcctgctttgcccagcaggggtgggggcagtggccctcatgagtccagacccccaggaagcagctggaaacatccagggggctgggatgggagtagggtcccccagatggccaagttttctccccttagcaaggcacaggtagtcatgcttccctgtcgcaggcaggcggctgcactgccttgctgtaggctccccttcccccctaagcaccaggtcccatcatctatcagacagccccaccctgttgtgtttttctgtccactcactccagcactggctggatggggggtttgggcccccaggaggcccagaaggagcccgttggggtctgcctgtctggtgggagcaaagcttttctcatttgggctgagctggctagtg

SEQ ID NO: 42439 - DNA, 1084 bp, Homo sapiens
tagagcgaggccaccaagcggctgactgcggccagggtggacacatcttgtgatcccccatctcccgcaagaatccaagaatccaaaatgtgtgtgtggacactggctgaccacccatcactcgatgcctggtccacacccccttcccgactgtacggagcttccagggtgcccaccacatagccatgcgcccaggttgggggactagttgacctggctttcagaggggtcccgggcagctcggagcaccgagcaccactttttcccttgggctgcagcagagaatgctggtggccctcactgcagagggcaggacagagtgaacagggccagtgcaggtggccttgctcctgagcagaatggaacagccctaaggaacatttccaagccagctggaggccagttactcgcaacaaaagtggccctcactgacacctgtcttcagtgtgaaaacccattccagtcctcgtctgtggcccggacttgtcttccagttcacttctgatctagttcaacccctttattctcaaaagggggacgctgaggcccaaacagggaaaagccaactgctccgagccactgggatctttttggaagccgaggcacccatgttgtgacgcaaacgaagatgcgtgcaggcctgcaccgggggcactggcggctctcaggaggggctcacgccacgtgagggcgcgctgtgaaatgcaggcttgcttttacaaaggagagctgtgtgcttatttaaaatgttgggagggagccaatacttcctcacttggaactgcagtagaaaatacgtaaattaaaaaaattcaggccgggcacagtggctcacgcctgtaatcccagcaccttgggaggccaaggcaggaggactgcctgaggtcaggagttcaagaccagcctgggcaacataacaggatcttatcattgttaataaaaacttaaagagatatcacgtgacctgtggcaaacccctagcttgagtcctggcaagtctcccctgcccccttgggagaagcccctgctctcagatcgtctaataagacgcgccgtcacaggacagctgtggggcttcccaggt

SEQ ID NO: 42440 - DNA, 1050 bp, Homo sapiens
tggaggtgctcagcaaagcccatcagtgtatttcaagccatgggagtggatgagatggcccagcacaggcaggaaggatggacccagggtgactcccaagaacactgatgtttaattgatgggcagaagaggggtgcaaagagctggtgaggcagaagacaaacagagcacaggtcaagcagccggggccagagaacattccagaaaaagcatacaacagcgttaagggctgtaagataagaacggtaagataagtgtaagataaggacggaaaacacatggcttgggtttagcgaccaggaggggcagggcacagggagggagtttcagagggctgcaggactgcgaggagtaggtggcctgggctgggtctcctcacagcagcaaagctcggggacaacagaaatcacggcagacagcactgtgagccgcggtctcatctctgactagtccacgagagctgaggcttagggcagggcctgcgacacagctagatggtggtgtgttacagaaacgacaaggcaggggtttctgtcaccgggagagctcagccacgttcagggctaccttggcgtgggcacggtcactgcttctgtctcattttcttccagcaacttcgtgtacgacgacgggaaccaacccctcctaccggcaaagagggagaaaagaccctatcagcagtagacatgtggacggcaacctccctgaacaacctggtgagagctcagggcagacaggtccactgctccagaaacgcccatgtgtggaggaaatgaaattaaggcttttaataggtaaatatggactttcacatacactgaacaatgtgtattgttaacaatttttttttaatagagacagggtctcgctctgttgcccaggctggagtgcagtggtgcgatcatagctcacagcagcctcgaactcatgggctcaagcaatccccctgcctcagcatccgagtagctgtgactagaagtgtgcaccaccatgcctagctaaaaagcaatatatgttgtatgtataacattaatttgatttggattaccc

SEQ ID NO: 42441 - DNA, 1188 bp, Homo sapiens
tgatgaaaaagtaccttcagtttgtggcagctctcacagatgtgaatacacgtgagttgatcctttttatcattaagaaatgcataaataaggccggatgcggtggctcacgtctgtaatcccagcactttgggaggccgaggcgggtggatcacctgatgtcaggagtttgggactagcctggccaacatggtgaaaccacgtctctactaaaatacaaaaattagccaggtgtggtggctcacgcctgtagtcccagctacttgggaggctgaggcaggaggatcgcttgaacccaggaggcagaggttgcagtgagctgagatcgcaccactgcactccagcctgggtgacagagcgagactccctctcaaaaaaaaaaaaaaaagagaaatgcataaatatgacacatttatctcagctcagatgttgtgtactttgagattaatcgtaacagtaacttttattctcattttccttttctctaccttgtagagaagcaaagtgatgagtaatactggctggagccccaaagaggcacgtgtgtgtgtttgtgtgtgtgtgtatatgcttgtcagtgcatgcacgtgtatgtctgggagtacaaatgggtgcgactggttgtagggaactagctatgtgccttctattaggccatgacagtcaaactgataagatctgattgcttctcttaaattactaaatccaagttttgcattaacataatttccttaacataatttcaattacctgatgcttgttttgccgttcacagctgatgaaacaaagttgaaaatgatgcaagaagttagtgaaaattttgaggtatgagcattatattttctatttttcattttgaggtaaatattcttattcactttcctgtcctgctttgtcagtctttttactagcaactcaaagatcattgtctttgttcaagtaatttagtatatttcgaaactgaaatctgaaactttgtacacagcgttttccatcttcacgctggtgatagcgaaccccataccatgttgaggattgtcagttttgttttggttggtttaaaaacattttttcattttaaaatatggtagctcttttaggctaccatgcctgttgggatgcactcagatttattcttgtacttttctttctttcttttctttcttttttttttttttttgagatgga

SEQ ID NO: 42442 - DNA, 1032 bp, Homo sapiens
gatagagatagatatagatatctagagagatatggatatctagagagatatagatatctagagagatagtatatagcagtatagttagggcttttccaagtaatgacttttgcaatctgtgtatcaacatttaccttaaatgaaattcagatgactgaattcttcaaagaattaaatactagaatgaccatcaagaagcagttctctaaattactaccacccagaaaaatgtttaaatgaagtgagtgaaatttaaaaactcccagtgatttcaggagtcttacagattcattattaaatgggccatctttcaagacaaaataaaccctcaggttaggaatcacatgaacaatttatctggatcaaaaaactggtggctgagttgagatagttgcagaataaccaggcagcttgttgaatgaatcttcttttaattataaaaaatttttttagagacaacgtcttgctatggagtatagtacctattcacaggcgccatcatagcacaccacagcattgaactcctgggctcaaatgatcttcctgcttcggcccccaagtagcagggactacaggcatgcaccaccatgctcagcttgagtgaatctttttaactggagaaattctcttttttttagacatggtcttgttatgttgccccagctggtcttgaactcctgggcccaagcaatagtcccaccttgtcttcctaaataaagtgctaggattacaggtgtgagtcactgtgcccagccctactagagacatttgaaatgcagatatttgaaagctgtataatcagtagttaatatggacttacatgcaaatatgtttgacttcttgataacctggcagttagttcagtgttgcagcatgaatcttctccctcttttccttgaatccttggttgtgggtgtttcataaaaagtcttaacctttaagggtgaaaggtgccaaacacagttcttctgccccacaaatgcactgtctgcttggagagaagctatttgattcctgcacagctcctggggc

SEQ ID NO: 42443 - DNA, 1118 bp, Homo sapiens
aactcatgcagtcttcacaatagtcctataaggaaggcgggaaataatatccccagagtttaggtaactgtccaaagtttctacttcctaagtgggacccagaaactgccctagtatcttcatgctgtagttttatttcctattctcctttttttttttttttttaaaaaaaatagagacaggatctcatgctgttgcctaggctggtgtgcagtggcatcatcatagctcactgctgccttgaactcccagtctgaagtgatccttttacttcagccctctgagtagctaagaccacagcataggcacgtgccacaatgcccagctttttaaaaaaaattttttgtagagatggagtcttgctctgttgcccaggctggtcttgaacttctgggctcaagggatcctcctgcctcggcctcccaaagtggtgggattaccggcatgagctacagtgcccagcccttcctattctacttttaaaatcagtactaggatcaataatggattagattagattataatataattagtatacatctaattagcacataatgaatatacatctaactaatacattggtttgctcaggctctttgttttccagatcaagaaactgagacctagaagctaaataacttcatagaggtttcatacttagatcgtggcagagacaagctagtacaggttccaggttcagcatttcccaaaggattggtatttctaattttaataggaaaagttagcatttagttttcctgaattggatttcagaaatacaatcatcctaatttaaaattatgttattactaaataatacaagtagcacaaatttgcttttggctaaaatgttttatattcctttgcagttattataatgtgtaaatttgaaatgaaaatacatacacataactgaatggggtcttttatttttgcacaattagaatgtcacgtcatctcctcagtattctacattcctagaacatatcatccctcgattccttacatttctccaagatggagaagttcagtttcttcaggagaaaccagcacaggtaatgtaaaaaaataacatgagaagacaagggtgctgtgggattgtgaccagttacgaatta

SEQ ID NO: 42444 - DNA, 1030 bp, Homo sapiens
gatggagtgctttctttcctgcctcactgtggtaggaatgtaatagggtttgtatttaatcatttattagccagggcaaaaagagtagaaaatacttttaggcaagctttgtcttctgttgttgaagatggagaacatggtccctgtcgtgttatctttatggtcctgtgggaagagtaaacgtctagtgtgtgttggtttaggctttaaggggcattggaaaatgaatggctgagcctaaatactgtggagttggtgcagcataaaaatgtagaacatactgtttttttccaccaaagagtcaagcgtctttttgttttgttttgttttgttttgtttttgaatgaatattgggtttgactttaggaaaaaatatttttatgacttttatgtagaaccgctactttgagaaccctcaagtgatccccgagaacacagtgcctcccccagaaatggttggtatgataacaacgattgctgtgaaagtcaacccggagcgtgaggacagtgagactcgaacagtaagtgtttcgctgagttatttctacccgtggctcctgtagtttcggatactggcctgttaaaccatttttttttctcttaaatacttggaggcatttaagacaaacgtgtgtgcctggcaaagcatcactggtccttctctgcagcctgggaggggtgaaagtgaccttttgggtgtcattgatgccaggctagaaagataaggttgttgttgaaacccagaatcaccctgctgggaagagcagcagaccaggtgtggggtgtctgttctgtcccttagctttgagtcttttgacattaataaagtcccttaaactatagataaaagcatatagctcagtgactgagagtgtgggctctaggacagagagctccagtacaatgtcctggccccactggggttttctgactccaagaaagttaatgaacctgcgttctgaccttatttttcctctcattatctgaaaaacctgtctcacggactttgtgaaggtaatgctggcatggt

SEQ ID NO: 42445 - DNA, 1044 bp, Homo sapiens
gtcttcatgcaccctcctgacttggagcccgtctggctgtgtcatttgagggcagcatctgaggaggaatcttctttggccatcgccacggccctagttggggtcttgcactgagcagatgttactcgaattctttctgcggattgagtagaacggcctggcactggctttgtgggattcacattgtaactgctatggaatgggctggagaactggttggtgtgtttccttaaaacttttatgttatttggaattgcacgaaaggtgtagacacctttgctattgttgctgtgttgtttgggtctgtgtggaaatcaatcttttgggtttagtaatggttacaggcttttaattaatactaacatcactcataattgagaggtaatatttttgttctcttcttattcaggcaacataagctttacaacaaggagttgtatgctgacttcattgctgctcagattaaaacattgtcatttttagcttacattatcaggatttaccaggtaaggtcattgacttttatgtcaggtttattgagatagtttacatacaataaaattcaccttttgtgggtgtacagttctaggaattgacaaatattggtaatcattactaacacatcaaaatacggtacatttccatcaacctccaaaattccattgttatatatttgttgtcagtttcttcccaccacctccattccttggcatacacaccgatttatttggtccccatagttttgtcctttctagaatgtcatctaaatggaaatgtccagtgtctagtctctgcaaccttttgagtctggcttctttcacttagcagtaatgtggagataggaccttgttttactgattactttttattgctgtgtagttgtctttgcttggcagccttaacaaaaaatcccataggctaggttgcttacacggtagcaattgtctcacagttctggaggctggaagtctgagatcaaggttctggtttctggtgagggctttcttcctgccttgcagacagctgccttctgctgtgtcctca

SEQ ID NO: 42446 - DNA, 1058 bp, Homo sapiens
aaagaaaattaggcatggtggtatgcacccttagtcccagctactgaggtgggaggatggcgtgagcccaggaagtcgagggtcacttgagtcaagcttagtcttaacggttttttttttggagacgagtctcactctttcatgctggagtgcagtggcttgatcttgcctcactgcaaccttctcctcccaggttcaagtgattgttctgcctcagcctcccaagtagctgggattacaggcatgtgccatcacacccagctaatttttgtatttttagtagagatggggtttcaccatgttggccaggctagtcttgatctcctgacctcatgtgacccacccacctcggcctcccaaaggtcttactgaatttttaagaagctgataacatttgaatttttcttaacactctcctatccctgtaactgtgtcatctcactctgttcttacaggagttggtgactaagtattctcagcagatggtgaaaggaatgctccagttactttcaaattgtccagcagagactgcacacctcagaaaggagcttctgattgctgccaaacacatcctcaccacagagctgagaaaccgtacgtccagcctgtcttgtcttgaatgctgatgctagtcctgtggccatctttggggactcggctgacattccatagttgtgctgtgaggtttccatgtatccttgcttccttcattgctgtcttgggttcattctttcccctcttttctctccctctctgcctccctgtattagtctgttttcacgctgctgataaagacatacccgagactgggcaatttacaagaaaaagaggttttatggacttacagttccacgtggctggggaggcctcacagtcatggcagaaggcaaggacgagcaagtcacatcttacgtggatggtggcccgcaaagagagagcttgtgcagggaaactcccctttttaaaaccatcagatcttagccgggcacggttctcgtgcctcagcctcccaagtagcagaaattacaggcatccaccaccacgcccggttaattttt

SEQ ID NO: 42447 - DNA, 1070 bp, Homo sapiens
gaagggcgctgccttcagggatgggcccttcccctccctcctcagcattgaatgggatttaggtgttagttgtcctggctagggcttggttgcatttttatagtgtttggtaagcaagtctagaaaatgatttctagtggtttagtaagatcagagatccctagactgaaagagaatcagaacaaaaaaagaaaaagcaggtgacaaagttgagacagagttgacttacagttagtttatattttcatttagcttctgatttacatagccagaatcctgtaattcctgtataattaggaatgctctcaaggtacatagttaacagggatctgggttcattgaatgcttttggggtgtgtgctgattggaaacactgtcccaggaattcattacacttcttggtatggtgagctcttggcaagggattgacccttctcatgtatttccttaacttccttagagaagtgacataggctacccaggaggcagcagggacatcctttactgttgactgaaatggtgatgaatctgccatgggagtggaccataacctggctccatgtccggatttaaccctgtctctagttaatccctgctggagcccctgttcacacagtctgatttcctgggctctcagctgtcccccaaggggtgttcctccctcccggtctcattcaagctgaccctgtgctgggaactcagccccttgccctcctctatcctcctcatcctttggatttgggacctggttctgctgccccgtgaggccatccctgatggcttctcttctccctgagttctcgtccttcatcctgccttcctgtgccgtgcaggacgtgccttttcttgggtccactgccacacgcctttctctttctagccagcctcagctctcagtggcactgtctcaggaatggggtcagtaaatccttaactgtcctcgtgagtggtggggagggggactttatcagaaagaggctcctcgccatttataatacaaaaaaattagttttaaaaactgtttagagaatagacctcaactgtggtttactaaagtctgatagtacaac

SEQ ID NO: 42448 - DNA, 1050 bp, Homo sapiens
caagggttgggtgggcctggtggagggtagatgaggtgagaggtcttagactacttttctgacaattattaagaagcctgtttgaatctacgggaacgtaagagaaattggaattttgcttggtttagagaaaagtaccaagattttatgttaaggagtattgctagacatgaatatttggcattgttaaatggaaggtgatttaagaaaatagatttatggccgggtgcggtggctcacgcctgtaatcccagcactttgggaggctgaggcgggtggatcactggaggtgaggagttcaagaccagcctggccaacaaggtgaaaccctatctgcactaaaaaaaattagctgggcatggtggtgcatgcctgtaatcttagctgctcaggaggctgaggtgggaggattgcttgcttggacctgggaagtagtggttgcagtgagccgagattgcaccactgcactccagcctggttgacagagcgagactccgtctccaaaaaaaaaaaaaagaaaagaaaatagacttacatagtgacctgtagtaatttttaggacctctgataattcagacaaaaaatggggggaaatttacagttttttgcgacagttgagtgcggatatttcttaaatgcggagtccacattaacttaattcttttccatagtcctgtaatggaggtgccttcgtgatctgtgtttttcctttgccaccctttctaatgtaagatttgaagtgtatgagacaatttatgtcatgtttgtaagttataaagcctaataaatagacttaaaaacctgagaagttgccatcccacccaggactggaacctcactgctaagtcgcatccacctgcgtgctcctccccacccatttttttttttgagatgaagtttcgctcttgttgcccaggctggagtgcagtggcgcaatcttggctcaccaaaacctccgcctcctgggttcaagtgattcttctgcctcagcctccccagtagctgggattacaggcatgtgccaccacgcccagctaattttgtgttttt

SEQ ID NO: 42449 - DNA, 1599 bp, Homo sapiens
gggtgagacctgggaatccactgtctgaaagcttcccaggtgatgctgtgtggctgtgttggggttttgttttgtagttgacttctctctctccatacctgcacgcatatatacacgcatgcccttatatgtgaggagagtatttttgaaggtcatacaaggccctagcaacagtggtttcctctgggcagtggaatggggtgggtggcttgaagtgcttttcactctgtatccttttctgctgttttaagtcttttaccaggttggaatcttttaagggggaaaaatgatattagcctatactagttttccaggatgtgaatgaagagaagggggaaatagtgatagagcacgatatctgttatttagataacagatagagaaatatctacttgtgtggtaaaatatctggaaggatagccactggaattcccagtgatgttcagcttcctactttatgcttttctgtacttgaaaaaaaaaagtgtgttcacttaaatatttgaattatagcccatctgtttcttgaacacttgtctgaggccctggggaggctgatctgaaccaggaagacacggccctgccatcatgggatttgcagttagataaagtaaccccctgttttgaggagaaaaaaaaacgtgatggtatcagagtgggtgagaaaaaaacatggtggtatcagagtgggtgagaaagtgtctaagaattctttccactaatgaagtaaactgagttttgccttaaagaggctcagtcatactttgatacttaaaatctttaggatttgagcttagtttgtcagttgttaattgtgttgcagtgtgtggaagattgctgtgttctgttatttgcaaggttattatgtcttcacaggaagagtgggctaaatgaaattgttttatcttttgcagctgttgaatttgtgtgaggctgaagattcagctttaacaaagctgccctgttataaaagccttccgtcactcgtacctttacgaattgcggcattaagtaagttaatgaaaatctacggggtataaaagtgaaaggagactgaccacaggaggtctatagaaaaaaaaagtggccttttgttgttgtctaatttttatgactttttgtagtctttttaagatgggatcaaaaaattatttttgtatgtttatcaaactgtgtaatgagatgccataaaattacatgtgttgttaggattgaagtaattttgtgctttatagtaaagtctgttgttgttttatgaatcagacgttctggtttaaaaggattgtcgtatcattcatatggtgccagaatcagagtgtatatatagtaagggacatgacagccttagaagcttttcaatgactcaagcatttgttaatcctgcagtctctagcttttcactgggaaacctcagttatcattgtcaagcacaggaatgatgcaaagtgtaggaaaatagactagatctgtattggctgagatagaaacaatcattttctttctagtggggagtgaaggtgaatacccaatacaaacttttttggttgactctctcctgctttgttgatttttatgctcttaataacatatttccagaat

SEQ ID NO: 42450 - DNA, 1043 bp, Homo sapiens
ccgagatggcatcactgcaccccagtctgggtgacagagcaagaccctgcctcaaaaaataaataaataaaaacaatgcattcagatggcttaaaattgaaaaggtgtaaaaggatgtactgcagaaagcctccctcccaccctgtcctccagctacccagtcccctccctgagacagccagggttaagactttgttgtgtatccttttagagatgttttatatatgtaagaggacatatgtgtatatattttttcctataaaagggggtacaatatatatatacacagtccttgcttttcccatttaacagccatcatttcatgtcagtacctgaagtacttcattctgctttatggctgcagaatacctcatgacatgaacttgccataatttatttaaccatggcctcactggtgaacatttagattgttcccagccttttcattatataccatgatgcactgaaagacttgttcataatttcacatgcttttatctgtggtgtacatttctagttgtagaatttctggatcaaaagaatgtatgcattttaatctttcaacaccttgtcaaattgctctccaaagaaatttttaccaatatacactcctacaaaatagataagtgtgccttctttcatacagtcttgggtgagaacattggaagtcctttgggtttttagaattaccagagaaataattatgcaggaaaaaacccatttgacagtgtttaaaattgaaatgtaagcggatggaggatttcatctgttagctttcttttgcattcaattttgcttctggtaaatggatttataaataataaacaggatttaatggtccaccactgcaaacatgaatgtatttttcatgcttatgtttcccaagtagcctttgaccatttgacgttttaagatactggagctacttttttatttttggtgtacctttcccccaactataaacaggagtttatatctactgatggacagataaggtagagattgcattatgtagagagagatattgcaggtatggatacatt

SEQ ID NO: 42451 - DNA, 1049 bp, Homo sapiens
atggcagcctggtaaggtcacctttaccacttgtgagcacgcatgacagcaaacagcacgatcacatcgggtgtacaccgtcggcccctccacacccctacaatggacaggaatgctgaaggccacgggcagtcagtttccttaggacacagcacagttagaacctaaggctagtaagttgtggcttttacatgtgaacccttcgcttcactgcctagccttgccaacatagttagactatagtagggtctgtagtgacgttgacctctgtcacttgcaaaattaatcgacctgtttataatttctggttttcttgatcaggaaatgaagatttgctcagcaattataaacctttttcatctgatcccggctgctcctcagacactggtgaagcctttgctagaggttgtcatgaaaacggagcgggcgatgctgatcgaggtaagggccatactgaaggctgcttctcgctctgccaccctccggtgcttatagcgtcctcacttgatcgtattttcaatggacggaacagcataaagacgttcgatgtcaacatttgcttgtgggtgttcatgcactccagtaacaagggaccttgttaggtagacagcctcaagctctgagaagaggaagttgtgagatgcagcattcccacatgttttgcaggcggggagtccattccgagagcccctgatcaagttcctgactcgacatccctcgcagacagtggagctgttcatgatggaagccacactgaacgatccccagtggagcagaatgtttatggtaagagctgtgagcagctggagtcaggggtcccttcaaatgcttgtgagctgtcgtgctctgaaatgttcagttcatatttcactattcagtgtcctggctgcttttttttcagatccatttgaatattggaaacagcattgctgtttggttgtgtctgtgaaatgtgcaggtctaggaaccactctttataggactttggtggtggtagcaaataaatgttctgccaggattataaaatcataaagtatgattattattta

SEQ ID NO: 42452 - DNA, 1035 bp, Homo sapiens
tcttctctgtgttcccatgacctcacatcggggcctcacctctcacttgagtgactgcagctgccgcttctcagcgcctctcttgttggccctgttcactttatttcccatcctgcagtcggagggagatgagccatgtacctccctaactcgctgctggttaggcgggacatgggatccctgcagggagcttggtcttacctgtctgcatgtcctggcctagttcagcacgggcacgtagtaggtgcattataaatactagaatgaatgtattcattggtcaaaacttaacagaaagcaactaagttgtttcctaataagaaagtcctaagaagtttttaaaaaattgttttggaaaagtagcatgtcttgacaccaagggattgtcttcttatttcttaaagccttccttctcatcctccataaacgtctcttccctgttttaggtttttcatagtctcctcaaggctcacgcaatggaagctcgagcgatcgtcagacaggcgatggccattctgaccccggcggtgccggccaggatggaggacgggcaccagatgctgacccactggacccggaagatcattgtggaggaggggcacaccgtcccgcagctggtccacattctgcacctgatagtgcaacacttcaaggtgtgtaggagggacggtgggctgcggggcgcgcgtcttcaggcattcactttgaacctttaccttgtcttgttctgcaataatcaggtggtcgttcatcttttagtaaggctacttctggttcattgattagtttgtgtatgtgtgtatggctttatcagcatggaaattgctgtaatatagagaatatgtcacaggtgtgtgtgtctttgcgtctgaggctacatttctgttgtaagtactgtgcccagttaacccttgtatgctgctaagtttgcaccttaaggtgggagatagtcctcattgactctagatttccatcacctgccttggaaagttattcatgttgctggcacctccttctctggccaaattacccttt

SEQ ID NO: 42453 - DNA, 1028 bp, Homo sapiens
gagaggcatgtcgggggtgtgtgtgtgcacgtgcgcacacgtgcatgcactgtgggaccaagctcccatgttccggcgtgatgctggccctgcgtccgcaggtgtactacccggtacggcaccacttggtgcagcacatggtgagcgccatgcagaggctgggcttcacgcccagtgtcaccatcgagcagaggcggctggccgtggacctgtctgaagtcgtcatcaagtgggagctgcagaggatcaaggaccagcaggtaggggtgtcagcctcaggggtgccccgatcgtcttcctttgacttctccctagaaatcagtcagtaaaaccaagcgcctgtgtgtttttaagccggattcagatatggacccaaattccagtggagaaggagtcaattctgtctcatcctccattaagagaggcctgtccgtggattctgcccaggaagtgaaacgctttaggacggccaccggagccatcagtgcagtaagatcatgtgcctctgtatgggtgctgcgcattctgctgggagttggttcgtttattccctatatttagaatgtgagctcggtgctcagctgcattcaggagaggaagctgggaacagccacggtcaccagattgaaactccaggacatgtcactcatgcaaggggttcccaggtcaccagacatgcttgcctcatgcgttcagttcataccattaaagttctgttgatgatggttgattacttgcagaaaggcatctagagaaactctttgaagtaaggagttgattaagaacatgtgcccatactgagatcagtttctgagaaggacatgtgttctgtttcacgaggcagccaccaagagggtcctgggtattgccccttgtggagtggtggccctaggagccctgagtctgaccccagctggtgtcatggacctgctggcttgtggacgcaggcctggccaccctacttctggcttcgtaggcctgaggctgagctcttctcccaccctcaccatcccccatcttatgtggca

SEQ ID NO: 42454 - DNA, 1151 bp, Homo sapiens
aagacctggtctcttaaaaaaaaaaaaaaaaaagaaaaagaaaagaaaagaaagaatggctttgggacttgagctttcatgctggccccaactacacgtaggagtgtttaaccttaatacagttctcttgcattttgtggactcgtttctaaaacttacctaccagttggcttgggataagcatttttaattgactgttgcaacaacctttaagatgagctttggatttttaaaacagatttaatgatggagctataatttgttatcaagtaccatgtagcacttaggtaacaaggagctagtcccaaaatgctaattatcttattttggtggctgtttttttgcttataaaaaccatgatcctgtgcttttctggtggcagcaaaagctattttcttgccttatccacatttggtttttctagttcttgacaggatttggaaacttttgctattgagattataaaacctattgcaagcacttgttattctggactgcaaaggccatgttgcttctatttgacctctgctatgaaccacgaactctgtcttctattttattctgtttctttggtttgtttttattaatttttagtgcttccatcatctgttagttgattccatgatacatagtttgaaagatgcttgtctttggaaggatatttgttttttgtttttgtttcgtttttttgagacagtctcactctgtcgcccaggctggattgcagtggcacagtcttggctcactgcaacctccacctcccgggttcaagcgattctcatgcctcaacctcccaagtagctgagactacaggcgtatgccaccatgcctggctttttgtgtgtgtgtgtgtgtgtgtgtgtgtgtgtatttttagtagagacggggtttcaccatgttgaccaggccagcctcaaattcctggcctcaagtgatccatccacttcagcctcccaaagtgctgggattacaggcgtaaccactgcgcctggcctggaaggatatttgtatttttgtatcttaagaaaatgggaagagaaaagcaaaattcattgcaggaacttttttagaattttaccaatttcaaaatattaatattgtttattatcgaatattaatattttagtaagtatttttaaaaaagagtttga

SEQ ID NO: 42455 - DNA, 1047 bp, Homo sapiens
cggctgggctagaccagacgtggctgaaatctcggcagatctcacagaaaatcttgcccacagatgtccccatggtcttctcttgatctgaggcttcatagcctgagtctcagggcccatctgtgtcaccctttgtaagaggattgctcaggccggagctgcagacgtcagccatactgttcccagatgcgtgtcacagaggagaccctcgaactcagtgcccagcacaggtgggcacaccatcacccctgagcctggtgtgccgcccacttgctgcatgtccttgggccgctctggcagacctgtgcccgcctcttagcagggtgtggttctcagggtacttgggtgtgatttaattcttcccttctccttgggttcttttgtgtcccattttcctcgttcaccttttacatttgatctcatttcatcatttcagcatctttttactgagagcctgctctgtgtcaggtgatgttctggacactggaaacacagtggtagctggtcctcagtagggtgtatgttctagtgaggggaaataatgaacagaaagaagtgctaatccctcaggaggcgagatgggtgccggggtaaagcagccagggctggtggggttggagagggtggtgtcgtgttatttcatcttctgtgtatttatgggagttgagatttttcatggagcaagatggggttacaaatcattgtgtttgttgtttccaccctgatgttctccttcctggagctcctctaccctgtgaagtggtcaggtgccaccagctcttcttagactcttggattctaaatgtggagagggcggtcctcaccccaggcacacaggctctttctctttcacctcatttcccaggtctggccattgttccctgtgggaattctgtggaggcagcaacccctcgctgggctcttttgacactgtggggccaccacggggtcctcacccctgcacctctttgggacagtgtgtacatcagaacaagccatggacttggggagcaggagcggactgtaatcctgagacacaaaaccctg

SEQ ID NO: 42456 - DNA, 1074 bp, Homo sapiens
cgcgtcctcaggaaaggaaggccacagttaaaacgttgagaaaaacatgtcggtgtttctgcgggattgaagacatcctcacagtgattctggttttgaattttgcctgagggattgttttcagtgcccactgtgccaccctcagttacagagtccatcgctctgttttcagcaagcttttggcgggagctggagggacagggttaggaaatgttttccgaaatctgaatgtaatgagttaaatttgaaatataaacagaaagcacagattgttctaggcaatttcaaaaattactgtcaaccaagatacagagtattgaactaagtgttatgtttaggagattaaaaaacattttaaaacaatagattctgcctcaaaggagcattgaacctgagacagcgggcatagccatagaaacaaatttacatttggagggagactgtgattcagagccatgctcatcagacagaaaatcaggataatgaggatcgagggaaggaagatatcgtgtgcgccatagaagccaaggacagaatttggataggctgaggattgtggccagggccttccaggtgagaaggtggtatcagaagtttggtgccaacagcgcatctggaatttaagggtagtctacctcccaggctcataggacggtgactcaaaaatgtgtttacattttatgggtccaaagaggtcatgagaaccacgtttgcaggtgcttagtgtggctgtggggtttagcaggcacgttgggaaaaggcacgcctgcagcagggatgccaggctgtcccgaccttaggcattgctggacaaagagccgggcagggagggtggcaaagggcatggacagcaggaggaggagttttgaggactgcccattagctaggtttggtgtctgtaccatcgttctcccagtctcctgtctctcaggagccacaagctgaggttttaaaattggagacaccataaggaaagtagtgtttggggtgaacagtaaatgaaatgtgggatctcaggtgtctgtggtgtaaatgagagtgcttcctttggtaattgcatcataagatctttgc

SEQ ID NO: 42457 - DNA, 1050 bp, Homo sapiens
tccattgatctgctatgtagagtctcatatttccatatgaattttaggttattttcatgtatttctgccaaaacagttggaattacgacagagattgcattgaatctgtagatcagtttgtgagcattttgccatctgaagcaagttttccagtttgtgaacacgagatgtctttccactagtttaggtcttctttagtttaattcaacaatgttttttagtttttagtgtacaagtcttgcacttatgttaaatttattcctcaatattgtcacgtgaatggagccattttcttcattttcacattgctcattgctaacatttggaaataccagggttttgtatattgatcttagatttctcaaccttgctgagtgtatttgctctaatagctttttggggattcttcttttctgtgtataagatcgtgtcaactgcaggtagagatggactgacatcttctcttccaataaggatgccttttatttctttttcttcccaattgccctgactagaacctcaagtacagtgctgaattaaagagatgagatccttgtctttttcttgatcttggggaaagccattcagtctttcagccttgagtatgatgttagctgtgggtgttctgtagatgccttttataagcttgaggaacttcccttctgttctaaatttgctgggtatttttatcatgagatgttgttggacttttttcaaatggctttttctgtgtcctctgagatgattgtgttttttttccttcattgttttaatgtggtatatcacattgattggttttatttatattgacttttttgttttctgtgttgaaccacccttattgctgggataaatcccacttggtcatgatggataatccttttaatccgctgctggagttgggttgctcatttttgtcgaggatgtttgcgtctgtatcataaagcacctgggtctgaagttcccttgctatgtctggtacattgctggtgtaatagtgaagcggtataactgctgtggaaacagtttgacggttccacaaaaagtaag

SEQ ID NO: 42458 - DNA, 2003 bp, Homo sapiens
acagcgtgagtgaccgactaggcagtttgttccagcttagcagctgccagggcctataggcagagggagatgcccacagcacagaggaatccagcttcagagccgcttcctcctcttgtttattttgttatttattctactccttcattcttctctttttttttttttttttttttttttagatagagtttcgctgttgttgcccaggctggagtgcaatggcgcgatctcggctcaccgcatcctccgcctcctgggttcaagcgattcttctgcctcagcctcctgagtagctgggattataggtgcctgtgaccacacctggctaatttttgtatttttaggagagatggggtttcaccatgttggccaggctggtcttgaactcctgacctcgtgatccacccacctcggcctcccaaagcgctgggattacaggcgtgagccaccacgcccagcccaggcttttttgttttgttttgttttttaactaaataaaaaagctcctccagactgttgtaagcctttaatttctagagttctgacaaagttgattttgatggttttgccagcattctcactgcttaaggagcagattttggaactcctttgcagtctcagaagtgcttcttcccatttgacggatgaggaaacaaacaaactgcatgtgtcgccggtggcctcccttgttcttgccggcagaagggcctgctttctcacagccattcccacagagcacgtgggtaggactaagctgggaaaagaccccgtagatggcctgtaccagatggtcgaacgggaagtccattaactgagtgaactcttactgagttggtgatgtctgcagtagtctatgagtctctagtacagagttcagtctctcgtgtggtgtgtgtggttagaccagctccttcagtttgtgaaacatctgtcattagtataaagtcttggttggaagtggtgctgctgttgtccagctgttgtgttctgttaattggcctgatatattccatagtcagcaagggtggaaatgttcagatatttacctgcattcttgtcaggtatcgcatattaggtaactgcagctttgacgcagaccagccgcattggtgctttagagcagacagtggcgaaccctggagggaaacagccatcttgtgcctcctcgccttcagtctcctaacaatgcgtgcgttaaatctgtcaccagaatttacagaatttgctcttggtgctaagttaaagaggaattgcaatttgagaatttttcttttccaaaaaaaatcagtgagtgagatgggagtgtcacggagcgctgtgtttcaggtcctccgcgacatcctcaaggaggttcagagtaacatggtgccgcgcagcatgctcaaggagtgggcgctgcacaccttccccaatgccacggactactggacgttccggaagatgttcaccatccagctggctctgataggcttcgcggaattcgtcctgcatttaaatagactcaaccccgagatgttacagatcgctcaggtaacctgctttgaacagccagatcctctcctcgtgacatcgcctttctgctgaagttcctaaagtgtctccttctgaaatttaggacactggcaaactgaatgttgcctactttcgatttgacataaacgacgcgactggagacctggatgccaaccgtcctgtcccatttcgactcacgcccaacatttctgagtttctgaccaccatcggggtctccggcccgttgacagcgtccatgattgcggtcgcccggtgcttcgcccagccaaactttaaggtgggtctccacgtcgtcctatcacaggcgcaggctagagccactcagatgcccgcgcgtcacggccttgcaggagctgctgatgtgcctcacgggctctgcgctctccacagtggccagcacccctgtgtgttatgtcctttgctgtgagggcaagggatggttttctctttggttcactcttgtctgtagt

SEQ ID NO: 42459 - DNA, 1054 bp, Homo sapiens
agccagacaaaaacactacaagaaaactatagaccaatatctgttatgaatatagatgtaaaaatcctcaacaaaatattagcaaattgaatccaacagcatttttttttttttggagacggagtcttgatctgtcacccaggctggagtacagtgccgcagtcttggctcactgcaacctccacctcccaggtttaagcgattctcctgccttagcctcctgagtagctgggactacagtcgtgtgccaccataccaggctaatttttgtatttttagtacagataaggtttcactgtgttggccaggctggtctcgaactcctgacctcgtgatccacccacctcggcctcccaaagtgctggggttacaggcatgagccacaacgcccggccccaagaccatattaaaagaattattcaccacaaccaagtggaatttatcccaggaagggaaaggtggcccaacataagaaaaatcaatcaatgtaacacatcacattaatagaacacagggaaaaaaacatgtacatctcaactgatacagaagggcattttacttataaacattccctctgagatcaggaacaagaaaaaaattcccacttttaccacagctattcaacattgtactggaaagtataagccagagctaatagataaaaaataaaaggcatccaagttggaaggaaaaggtaaagctatctcctacagatagaaaattgcaaagaattcacaagaaagccactagagccaggaaacgaatttttgcagttttagggtacaagattgacacacaaatgcagttatgtttctatatactagcaatgaatgtccacaaaagagcttaagaaagcaattatgtttataatagcatctaaaagaataaagctaaccatgcaggtgcaagacttgccagttgtctgccgaaaacaaaatattgtataaagaagttaaagaaaacttaagtaaattgaaaagacatcccatgttcatagattggaagacttaactttgttaagatgtcagtaatgccaggtgcagtggctcatgcc

SEQ ID NO: 42460 - DNA, 1035 bp, Homo sapiens
tccaccaccactccctcgatccagaacgaaaggaagagagggaaagagagggagggagggaagaaatgctaagggggagaaaaagaccacaggaaaatatgtatgagtaagccaaatcaaataacaatcctaggccgggcatggttgctcacgcctgtaatctcaacactttgggaggctgaggcaggcagatcacctgaggtcaggagttcgagaccagcctggccaacatggcaaaaccccatctctactaaaaatacaaaaactagctgggcctggtggcaggggtctgtgatcccagctactcgggaggctgaggcaggagaatcgcttgaacctgggaggcagaggttgcagtgagcagagatcatgccactgcactccagcctgggggacacagcgagactctctctcaaaaaaaagaaaagaaccattctagaaccagagccgttctggtcttaactcaggaaccacacgtctctactttcaggtttgaattatgttcacctcaaaaaatgaatcaaaactctgcttccatgttggtaaaaggttcttccacatttgaatgcacaagcggagcctgtcccgacttcgcctcagtggcctgtgcaggacgctggtgaaggccgtggtgccacaggaggagtcccctgctggccggctgcccacccttgagctgggcgtgcaaacactgcactgacttcttcatctctaaaaccagcacgctaagggtggcagcatttgtggcttaaaaagctagttctggaaagattccagttttgaccgggaggaggctggacttcggaacctactccttagaatgacaccattaacacatacgatcatcacaccagagttccctcaaatgatcacaaagtgtgagtgtatgaacagctcagtttcacccttcatctccttcaacacagcacacccagtgatcacgatctctgaaaatacaggattggaatcatccatcttaattcagttttcactttacctctccatgttttgcttaccactgtctttgattaagtc

SEQ ID NO: 42461 - DNA, 1034 bp, Homo sapiens
tttttggaatagtccaggccagttcttctatagaatggcacacaccctggctttaactgtttatttcctccttgtgttgcttgactagttcctttatcctttatttcttgtaaactgaaaattagatctgaatcttgattggatttagagtaaatatgtttggcatagagacttcattggtaggttgaccatattcccaggtttctccaggatagccctgtgacctgttgtgttggcataattattatttatttttgctctcagaagtgttctggtttggatggtacgttaagtcactatttataagtgacgatgtgtacttcatgtggactgccatcaggaggcccatccagttagattgatccactatttataacatggtgattacgtggtgattgccagatttcttcaacgtaaaggcatctttttctctttgtagttaataagcaatctgtgggatgataatttgagactaggaatatcctgtacccatggtttaagagtccattgacgaccctgaacagaataaattccacattagttgttacaatgctagatttattcagatggttaagttttgacaatgagatagatttttttttttttttttgagacagaatctcactgtgtcgcccaggctggagtgcagtagcgcgatgtcggctcactgcaagctccacctcccaggttcgccattctcctgtctcggcctcccaagtagctgggactacaggcgcccgctaccatgcccggctaattttttgtatttttagtagagacggggtttcaccgtgttagccaggatggtctggatctcctgacctcgtgacctgcctgccttggcctcccaaagaaagttctgggattagaggtgtgaccaccatgcccggcctttttttttttgagacagagtctcgctctgtcgcccaggctggagtgcagtggcatgatcttgattcactgcaacctctgcctcctggatgcaagcaattctcctgcctcagcctcccgagtagctggaactagaggcgtgt

SEQ ID NO: 42462 - DNA, 1047 bp, Homo sapiens
gggctaattttttttatttttagtagagatggggtttcaccatgttagccaggatggtctcaatctcctgacctcgtgatccgcccaccttggcctcctaaagtgctgggattacaggtgtgagccaccgtgcccggccgctcacttttaagagtaagagggggtggggcacgatggctcacgcctgtagtcccagcactttgggaggccaaggcgggtggttcacttgaggtcaggagttcaagaccagcctggccaacatggtgaaaccccgtctctactaaaaacacaaaaattagccaggcatggtggcagacgcctgtaatcccagctacttgggaggctgaggcaggagaattacttgaacccgggaagcagaggttgtggtgacctgagattgtgccactgcactctagccagggcaacagagcaagactcggtctcaaaaaaaaaaaaaaaaaagagtaagagaggcctgtcgtggtgaacactctgccaaggaggtgggcggtgggcagtgcatcctccagggactgactgagtcttgtttcagggccatgactgctgcccaatgctctttaactacgatgaccgcggctgcctgaccttcgtctccaagttagatattccaaaacagagcatccaacgcaacatgtctgccatggaacgcttccgcaacatggacaagagagccacaactgaggaccgcaacacggccttggagacgctgcaccagaatagcatcacgtaggtgccgtctgtagagaggtggtcaggtgacaaggtgccttcctgcccctcgctgtttccttactgggttcctacaaaagctctatgcccctcaggcccagacattctttcagggacaagtgcagcaagaagtctgtatcttcccgaccgccaggctctcatttccagctcgtggtagggagggagtcgccaccacctggtcattctgtccttcaaggtgcagattacaaggcagcagccagcaggagcagtgcagaccttgttgcaatctgaggtggtggggcctcagggcagctg

SEQ ID NO: 42463 - DNA, 1002 bp, Homo sapiens
agcaggacagggaacaccgtgagctgatttagaccactcagggccacttggggtcattccctgggcatctacaaagcggcagaagagtaggatggaagccagggaagcagcaacagggtcacctcagttaccctacacttgtccctgtgggaagagggctgccggtacagaccccttgaagctttgtatctgcttgaactaaaaccaccgcctgtgtttgctgaggttgccgacatctgtctgagaaaatacgcaggagcagcaaggttgggggggctcagaaaagttcgagcacttcctgtgtgcacactgtatgacccgattcacacacctggacacatttaatcctcccaactaccctagggggtcgaattcagtggaaaagagagcggcggctaagggcacctccaatggggagggtgtcggggcaaagcgacctgagacccccagccacatactgcaggacaaaccaatgtcggcaggtgaggacagggtgggaatagtgttccaggcagaaggaacagcgagtgtcaaagcctctaagcctgacagggtgggagtctggcctcggatctccagagatccaggaagaccctgcacaaatactagagagaggggtctgaaggagagaagaggagggaaggtttttgttgttgtttgagaggaagtctcgctctgttgccaggctggcgtgcaggggccccatcttggctcactgcagcctctgcccccggggttcaagcaattctcgtgcctcagcctcccgagtagctgggattacagcagcgctccatcacgccatggggctccttgcagctaattttttttttttttgaaacagagtctcactctgtcgcccaggctggagtgtaatggcgcgatctcggctcactgcaacctctgcctcctagattcaagcgattcttctacctcagcctcccgagtagctgggattacaggcatgcgccaccacgcctggctaatttttgtattgtttagtag

SEQ ID NO: 42464 - DNA, 1032 bp, Homo sapiens
ggtgctgccccccaaggggacagcccccatcagtagggagatgggaataattgctgggctcccatgggacaaagtgtcaggaatgaaccccctaagtagagtcagtggtgagggtcattagcttccttttgaggatcttcccaagcttgagattctgaactggagtggatgcccttcaggatgagatcggagggcctatttgcactgggttcctggaagagccaagtgctggaggaggggagggccctgcctggcaggaggctgggagagagactcggcctcccagaggccttcaaggtacacagaactggggagtaatgagaaaccaggcatgggagctagctagaggggagggagagggactcccgagtgggaagagcagatgcctcactacagagctgaggagataatacctggcgaaccgcagatcctagctcaggagggatgtgccacactcagaagcctctaagctgagcctcaggaatgatgactaaggcagcccaaagactctgcagggcccttcagtgaaagcaaaatgccaggcagggtgtctctgcaaccccaaaggacagaaggagggagcaacaggatcccttttactggagaggacactgatgcccagaaaggcacagccttatcgaaggctgcacagctgccaatggcagaataccacagtggcagaacacccaggttgctgggtttttgaagtcaatgccaagaggaagctactgaagggggacagaagggtccttagcagctgcaatcacacccaagctcatggccttccccacgaggctttcacagacacacccctcagccattatcctaaattcccagtcaggagagaaactagcaggcttcaacctcttgtaaggcccttgaggtcacctggtggctgccaaaagtcagggcaccagtcaaggactgatcctgtgccaggcacttcagtacatgatcttgatcctcatacgactcttgaggaagatatttacagcttcattttcacacaggacttgcagaggcctgggacag

SEQ ID NO: 42465 - DNA, 1047 bp, Homo sapiens
gacgggagtcttgctttgttgcctaggctggagtgcagtggtgtgatctcagctcactgcatcctccgcctctgggttcaaacgattctcccacctcagcctcccaagtaggtgggattacaggcatgcgccaccatgccctgctaattcttttgtatttttagtagagatggggtttcaccatgttgaccaagctggtctcagactcctgacctcaagtgacctgcccacctcagcctcccaaagtgctgggattacaggtgtgagccaccgattccggccagccctgtttaacttcttgaggagccacctaactcttctgcagtggctccaccattttacattcccaccaggaacgtaggagagttccaatttctccacatccttcccaacacttgttattgtgccataattttgattatagtcatctgtagggtccagccccacagggtcggtgggtttctccccgtgtgtggagacgagagagcgtagaaataaagacacaagacaaagagataaaagacagctgagcctgggaatcccaccaagacgcggagaccggtagtggccccaaatgccaggctgcactgatatttattggatacaagacaaaggggcaggataagcagtgtgaaccatctccaatgataggtaaggccacatgggtcacgtgtccactggaaagcgggcccttgcctgcctggcaccaaggcagagagagagagacagcttatgccattatttctgcttatcagagacttttagtactttcactaatttgctattgttatctaaaaggcagagccaggtgtacaggatggaacatgaaggcggactaggagcgtgaccaccaaagcacagcatcacagggagatagttaggcctctggataactgcgggcgggcctgactgatgtcaggccctccacaagaggtggaggagtagagtcttctctaaactcccccggggaaagggagattccctttcccggtctgctaagtagcgggtgtttttccttgacactaacgctactgctagaccaaggtc

SEQ ID NO: 42466 - DNA, 1017 bp, Homo sapiens
ccctaccccaggagccctggccctcctcctggtggggctccctagaggagggtcctctcagcccgagaacgcagctcagtgtgtcaggctccaactgtttttctgtgacttgctcgccgtgtaggctgctaaacatctggctgaaccaagcgttcatcctgacctgaagccagaacctcagaaaccaaagtaaggcctgatcatgccctcgccccactgccccagagacctcctcttgtctctttgatgttttgttttctattttatttttcgtttttgtgtgtctgcatggtgtttttcgggcagtggcttctgccatcatcaccacatgtttctctgctgcccactgtcctgaggtgggccgtcgtggaagccctgcttcctgccgtttgcgggacgagtcccgccctcttttttcctgtccccatcggtagtctgcgtgcacgtgttttccacagtaaaaccgtgttgtgtaactctttccagcaaagtaacaatccgccattacaaaggtcgtcctccttgatccagttaacgagtcagaactcttctcccaatcagcagagaaccccgcaggtcatcggggtcatgcagagtcaaaacagcagcgcgggcaaccggggaccccggccactggagcaggtcacctgttacaaggtgagtccctgggctgggggacagggtggggtcttcccttaccgtcagtggccattccctcatgccccatgtgtttggtgaaatgagaaaaatgaaaacattcatttttgctgattgtaagcataaagttacagtctagttaccatccactgtggtgggctagagactgtcctatttcctaccacactgcactgaggcacggtaaaggatggtgagaacgcctgcctagtgaatggacggggcctgcaggcaggtgagggaagcccccaagaggccgggaacaaaatagaaacactgatccagggaagggtgagcccttggagccgctggctgtcctgggggcatccttggatcctgcag

SEQ ID NO: 42467 - DNA, 1020 bp, Homo sapiens
cccgggaggcggagcttgcagtgagccgagatcgcgccactgcactccagcctgggcgacagagcgagactccacctcaaaaaaaaaaaaaagaaagtttacgaatttgtgttgggttggattcaaagtcgtcctgggccatatgcggtccacaggctgaggtttggacaagtttggtgtagagaatgaaagggatgaggcctttgctccagccttggagccattgatcaggatagtttttagagtgtacctctttgcttaaaaggcagagggtccaccctgggcaacatagcaaggccccacctacaaaagaactacaaacaactgggcgtggtggtgcactcttgcagtcccatctgcttaggagactgaggcaggagcattgcttaagcccaggagttggaagctacagtgagccatgattacaccactgcactccagcctgggtgatagagggagactcctcaaaaaaaaaaagaaaggcaaagggtcttctaaactgttttcagggaaggtgaactgtgtttgaggggcatccattaaaatgaaagtgaatttcattaaaattcatcctgagttagaaagcaagtctgtaggctgggcgcagtggctcacgcctgtaatcccagcactttgggaggctgaggtgggtggatcacctgagatcaggagttcaagaccagcctgaccaacatggtgaaaccccatctcaactaaaaatacaaaaaagtagctgggcatggcggcgggtgcctgtaatcccagctacttccggaggctgaggcaggagaatcgcttgaacccaggaggcggaggttgcagtgagcagagatcacaccattgtactccagcctgcacaacaagagtgaaactctgtttaaaaaaaaaaaaaaatcaagtctgtaattgttactgttgctgaatcctgctagcaaatcaccaggctagaggtgagggttgagtgacccctttagaacactttcagagggggcttgtcagcaggtggagctggctgtagga

SEQ ID NO: 42468 - DNA, 1062 bp, Homo sapiens
aggccgagacaggtggatcacctgaggtcaggagttcgagaccagttggccaacatggtgaaacctcgtctctattaaaaatgtaaaaattagctgggcgtggtggccacatgcctgtaattccagctacttgggaggccgaggcaagagaatcacttgaacccgggaggcggaggttgcagtgagcagagatggtgccagtgtactccagcctggatgacaggagtgaaactccgtctcaaaaataaataaataaataaaaataaaaatacaaaaattagccgggtgggggcgacagagcagagactccatctcaaaataaataaataaataaatttataaataaataaatagttggctaagtacagtggctcaagcctataatcccagcactttgggaggccaaggcgggtggatcacctgaggtcaggagttcgagaccagcctggccaacatggtgaaaccccatctctaataaaaatacaaaacttagcaaagcgtgggggcgctgtgcctgtagttccagctacttgggaggctgaggcagaagaattacttgatcctgggaggcagaggttgcagtgcgccaagactgtcactccagcctgggtgacagagcaagactctgtctcaaaaataaaaaaaataaacaattgaatacaaggatttttaatatctgcctaatacttatgccttcatcgcattaatgtgctacgcttgatttaattgttcccttttgatattcagtttatttccagtttgatgctgcaataccactgtgctgaacgtctctggcacattcatcttggttgcaattgtactttaggctatatttctaagagtgaaatgaccacagccaaaggtatgaacattgttcaggctttcaataaagactgccagatatttacaaagattgtgccaatctctattctcaccaccgcttttgattattgtccttatctctgcttgccactgagccccgggccatgtctctgtaactcactaacggccacatcccatttacttccccatgagtaggatttcagtttcccaaacctgaga

SEQ ID NO: 42469 - DNA, 1034 bp, Homo sapiens
agtagagacggggtttcaccgtgttagccagattggtcttgatcttctgacctagtgatccacctgcctcagcctcccaaagtgctgggattacaggcgtgagccaccccgtgcgcccagcccttctcaacctttaagtgtttgcttacgggacacttcctccagaaagccttccctggcctcccagtctaaaataggtctcctgtgttctgtctcatggaattagtttcttctcctttccaacatacagcccagtttgtaattatgtatttatttgtgttttgatgtgtttgatgaacgtcttctccaactagaagtaaaccatgtttattaagtaactgcataatcagtgcgtggctcattgtagatgcacattaaatatttggcaaaggaatgaatgaaagtccaccatgattctactgatttctttcgtggccttctctgtaactgtactgatcggttttggttgtggttgttagattgttgcctgccctgatgtgcttcctcggaagatggcaacacctggagcagtgcaggagtcctgcagcccccatcccctgaccgtggacacccagcctgagcaagcgccacagaagcctcgtctcctggaggaaaatggtgaggctcagtgattcagtggaactgatatagctcaagagtgggtgccttggccatgtggcaggcactatctgcgggagagagactctaggctgagcagcctctctacagcctgcagggtctagaagcagggaaaggccagggacctggagttgagtccctggtgttcaatgaaagccattcctagaatggctaggaattacaccagcttctttttttttcttttatttatttatttatttattattattatactttaagttgtagggtacatgtgcacaatgtgcaggttagttacatatgtatacatgtgccatgcttgtgtgctgcacccactaactcgtcatctagcattaggtatatctcccaatgctatccctcccccctccccccaccccacaacagtccccagagtg

SEQ ID NO: 42470 - DNA, 1106 bp, Homo sapiens
tttgtctctgcaaaccatattaaaacatcagtgttttgagtaaagtatcttgctgatacagttgaacaaaggaactaattatagccactgaaacatccacggttctatcagtgactgctgaacattaacctagctcttgaaagtagtaggttcttctcaggatatagaaagaatgtcttttttcttttagattaattcataccaaactgaaatcctttgggcattgagaaacctagaaagatcacctttcttttctaggctatgaattcacaggaagaggaaggtgaagatggggttagctgcataacctgctatccagttttattaagaatattgcccagtcgtgactgggcgcggtggctcatgtctgtaatcccagcactttgggaggccgaggcgggcagatcactaggtcaggagttcgagaccacctggccaatatggtgacaccctgtctctgctaaaattacaaaaattagctgggcgtggtgatgtgcgcctgtagtcccagtgacttgggaggctgaggcagaagaatcacttgaacccgggaggcagaggttgcagtcagccgagatcgcgccactgcactccagcctgggtggcagagtgagactccgtctcaaaagaaaaaaaaaaaagaatattgcccagtcgcgttggctcacgtctgtaatcccagcactttgggaagctgaggtgggaggatcacttgagctcaggagtttgaaaccagcatgggcaacataatgagaccctcatctctacaaaaatataaaaattagctgagcatggtggtgtgcaactgtagtcctagctacttgggaggctgaggtgggaggatcgcttgagcccaagaggttgaggatgcagtgagccatgattgccccactgcactccagcctgggtgacagagtgagaccctgtctcaaaacacacacatacacgcgcgcgcgcacacacacacacacaagagaacatttaacatgatacaggtatttgtaagtgccacactgagaggagaccctcttcgttcagtggaatgactgattttcagtctccttcctctgaacattttttgccagctcttccttccctaacctccc

SEQ ID NO: 42471 - DNA, 1098 bp, Homo sapiens
tggaataagaacatggtccctagagggaggaatgaaagagggggcagatgtgactcagttcagtcctagtctgagcccctttattaaggatagctcatctttctcaaataagcagagtgatggctgcttactcgctgtggtggtttttccttcaggcaaccttcacttcatcccagttctcacatccagaataatttctaagatatgctgcttttgccacatctcacagtcctttcctggctctcacttcctcttaggttcaggacctttctttcccctgttcccttcacttagtttttctttgctttgtcacctgccatccattctgttgtaactgcagtgttttgtgactagactaaatttggtcaaggaagcaaccatttaattccttggttgaacacaatgcctgtatgaatgtatatatactgtattttgactacgcagtcacactttgctgtatcgtataggtaggttggtctttttcttcctttgttttataagagctgtgtcttagattgcctgtggttaactctagtgcctgaaataacttgtgtgtcacccacacagatcaagtgccacaatgtgtagagtgctgtgggggattgtgggactgtggaaaagatttcgaggaaacagatgaccctttcttgttcttgggggccttacacactggttgagacagcacccattcacaagagaaacgctgatcaagtgtctagaacagtgcctggaaagggtcagaagtctgctaaataaccctagcccaggacaagtccccacaagtctttatgctttgctttgcccatctgcaaaacaggtatagtcttactcttctgtaagaggactgtcatgtgatgaagataaagtgaaatacaagctttcctaagaaaatcctgtatcacaggtcaaaacacgcataaggcatgcaagtactgagacgaagcagagtagacacacccaatacctgaaaaatgttcattggttttactagagtattgaggagggtcctgctgacaccccttgggctggagaggcctcctctgaaagggagccctgggaaagggctgctctcactcttcactcctttctcctccctca

SEQ ID NO: 42472 - DNA, 1035 bp, Homo sapiens
ctggtcttgaactcttggcctcatgtgttccacatccagccttaaaatcaaaaggttttaataacttaattttaaacggaaaaaatgtaaagcaagtgcatattttgaaagcatagagtcggccaggtgctgtggctcacacatgtaatcccagcactttgggaggccaaggcaggcggatcacctgaggttgggagttcgagaccagcctgaccaacatggagaaaccccgtctctactaaaaatacaaaattagccgggcatggtggcgcatgcctgtaatcccagctactctggaggctgaggcaggagaatcacttgaacccaggaggtggagttgaggtgagccgagatcgtgccattgcactccagcctgggtgacagagtgcaactccgtctcaaaaaaaaaaaaaaagcattcacgtcaatgtcaagagaacctgctactaatgctttctttgataggcagtatgataggttggaaagaatataaactgggatcaagcttgggttccacttaccagctgtagtatgttgagcaaattatttaatctgacactcattttcttggtttataaaacatgaaaaataatgtctaccttctgggtacaggattgaattagattatgcatataagtacctggcttgtgtcgggtgcggtggctcacgcctgtaatccagcactttgggagggtgaggtgggcggatcacaaggtcaggagttcgagaccagcctgaccaacatggtgaaaccccgtctctactaaaaatacaaaaattagctgggcatggtggtacatgcctgtgattgcagctacccaggaggctgaggctggagaatcgcttgaacccgggaggtggaggttgcagtgagccaagatcatgccattgcactccagcctgggcgacagagcgagactccataccccccggccaaaaaaaaaaaaaaaaaattaagtacctgccttgtgctagttactttaatattttggaaagaatagcaagcgatatgagccatagaccagattttttaat

SEQ ID NO: 42473 - DNA, 1117 bp, Homo sapiens
tgaggcgggcagatcacttgaggtcaggagttggagaccagcctggccaatgtggcgaaacccagtctctacttaaaatagaaaaattagccaggcatggtgttgcgtgcctataattccagctacctgggaggctgaggcgcaacaatagcttgagcctgggaggcagaggttgcaatgagccgagattgtgccactgcactccggagtgagactctgtctcaagaaaacacaaaaaaacaaaaaacaacaatataccccaaagtgatgttggtattacacagatctcaaaacccagagaagtttgatagctcttcattccctagtacatcgctgatgactcactgtcattagtttgcaactgatctcaagtgctccgagagctctctgggatactaggagagaatatcctgagatttttttagggagctagtcaaacccctgctctgaaacagggttggacagttttgacaatggcaggtcacaggtcaaagctctcaaatttcatatgtcctgtcaagataccgctgctgccatcactagatttgcatttccattacaccgtgaccaaatttactcttaatatttttctgataaccagaacttgctggtgggcatgtatccttgctaagagtcactatcacctctggttatagcagtggagcaaagtggtaatgggaaaattcctaggtttttggcctgagcaaaagggtggatagaagtagatgacaggtggggaacacggggagaggggcacggagagttttagcaaaagagctagcatgtcaaggcctgcatgtgagagtatggcactttccaggtaataagtgaggtatggagaaatgcctcactgtaggatgtagtatgtgggcaactgaggaggttgaagaaccaagttcaaaggaggcccctagggattagagaaccaagcactataggattcccacatctaaaaatgttgccttcattcatccattcattcagtaaacatttagcagtgtaggactggcattgtttcaggagggatgccctggatttggagatcttaacatgtaactagagaaaacattggcatcctgggctgtggtgggaactagcacccgaaaggtaactctgc

SEQ ID NO: 42474 - DNA, 1034 bp, Homo sapiens
tgggtgccaggtgtgcgggaagcggttcagcaaaggggagcggctggtccgacaccagagaatccatacaggggagaagccctaccactgtcctgcctgcgggcgaagcttcaaccagaggtccatcctcaaccggcaccagaagacccagcaccgccaggagccgctggtgcagtgagcatagcaggtggcaggcagcaccatcattcatctttctcactgcagggccttgcggggtgcaaggtgatggctgcaggaaagcactggtcccatcgccttcccacccattcgccaacgcgggaaaggcaaggcctggcttacttagagcttccagagagcatagctgcttccatctcttacccaagtggtgctaaacaatttttcttccaatgtttgagggaagcagtctcctgcggttcagttcaggctgagattttctccttcagtggactgtctgtgtccccctgccgaacaaagctgggagtaaaggcaaaaccttgacacgtgttggtagctgggacctcatcttcctgagggctctgtcttgcctgcagggtcatagctcagactcttcccccaccccctctcttttccattgaacaaacatttattgaacatcctctgagcacctggccgtgggaatgccgtggtgaatgagagactagacgtgatgcctctgggggttgtgcgttggggatgcatgcgacagcccatgacccgaggcattctcagggtatctgtgctgtgtgcccgtgagaacatcttcccatgaccactcctgccctcctgccccgtgctggatcttccctccccagctgggatctgctcccaggcaactgtgtgaattttacattatttggagcctcatctgtgtcaggctataacattctatcctcatctgtaaaacttccccgtccattattccttgcactataacaactgtcaacacaccaactattaggaagttagtattttgctattgatcactgaataaacatcagagtattttaaaaaacagttctctagaaagaact

SEQ ID NO: 42475 - DNA, 1033 bp, Homo sapiens
ctcgctctgttgcccaggctggagtgcagtggcacagtctcagctcaccgcaacctccctgtcccgggttcaagcgattctcctgcctcagcctcccaagtagctgggattacaggcatgtgccaccatgcccagctaatcattctgcattttctgtttgcatacccatggcgtgatttaacatatttccctgccttctgtattatctaaaaatgtagaagtgtttagtggtgtaatcagattcatatttcacattttggcaagaacacattatagattgtgacatgccctgtttctcttcatatgattttagaagcctagatctgcttctttcgttagttctgtaaatgcttcatcatttagtagttggaatattgtaagaaatttcccttcattaacttaggttacccttagatatagttcatacagggaaggcaagaaaatgcttgatcctcctctttatttgcctgttttcagaataatgagctagttactttttgcttcctgtaaaggcagtcaagtctgtagaaatcaatgcattcatagctttttgcttttattggtttttttgagacagagtcttgctctgtcacccaggctggaatgcagtggtgcaattgtagttcactgcagcctcaaactgccaggctaaggtgctaccccttccttggccttgcaaagtattgagattacaggtgtgggccactgcacctggcctgcactcatggatttaaacatacttggtattgatcagtctgctggagttataatttgatgctcaaattatttcacctttgaccagtggaggcccctggaccttggctcctgaatccttttgacataaccctaattctcattgacagcttctttgctttctggcatgacaagatgttccaggcaaatgttccgtatttcctgccccttttgagagtgaaagtgggtgctatttattatgctgggacagtggtgtaaaccgggactctccaggtcaaacgggtatttggtcaactcatagatgggcctccttttgtat

SEQ ID NO: 42476 - DNA, 1036 bp, Homo sapiens
cggatcacgaggtcaggagatcgagaccatcctggataacatggtgaaaccccgtgtctgctaaaaatacaaaaaattagccgggcgtggtggcgggcccctgtagtcccaactacttgggaggctgaggcaggagaatggcgtgaacccgggaggcagagcttgcagtgagtggagatcgcgccactgcactccagcctgggcaacagagcgagactccatctcaaaaaaaaaaaaaaaaaaaaaaaagatttaacatgagggtttcaagtttcctccggtttaggcatttatacctttgtgcttgttttgtttcaggatgttactatagcattgatgttggataacccatatttatataccttaaaatgcaatcatttaaaacactaaggattacatttatggtggaactttgggaattttagaaagcaaccagtgttcttagatgtgtttattagccttatttctagaactatttctactaaagtgaaactgagaacttcgtactttagttgcatcttgaaatcaaaaatccctctgcaccaacaggagcctacatgagaataaccttttgcatctgctttaagtaaaatgtttgtcaagagttttactttaaatagttcattttttttatagtcttacacttctcatacgtctttggtaaaagctccattatacaatatggccaaagcgtgaaggaccaatactgtccaactataccaagatgtcccgcttaattttagttttcagacacactcataaacaaaacccactccaccttttcctgtatactgcctttgcagtctacatttcttaaattccctatttaattccttgaggatcactaaaattattccttaaggctatataggagccagatgctgctttacaattctgcatcaagcattaacatttggttcaaaatattatcatagtggttgcaatccagttactggtcctagccagctaaccaagtaatcttgttaggatctagatatcatcagcgagcacactgcttacacatgaagaaaaatta

SEQ ID NO: 42477 - DNA, 1031 bp, Homo sapiens
aggcatgagccgctgcgctcagcctctcagttctttatacagtgagatgataagtgtagctacctgctaagattgttatgtggtcaagtgaaaatgcttaaatacccggtacctagaaagcactcagtaaacattggctcttactgttatagttatgagagggttcttgaacagtgataagaggcaagtcgcgttttagctagctttaaaggttaagtaggatttgaaaaggcagagaggactgcggggggaagtcccaggcatggagtgtgatgtgaggaaaggatggcagtcaaaatacaaggcatatataggaaatactgatgagagggcttttgttgcatagggaaggtttatggggggattgatgggaaaagaagcttgagggaaaattgggaccaggcactggaaagtattaactgcaaggctgtagagttttagaaagaataatctgaaaggtggattgtgggagagaagggagaaaatgaaggcagggaaccaaagaaaggaagctggacttcatggaactagattaaaaaaaataagtatggcctgtaatcccagctactcaggaggctgaggcaggagaattacttgaacccgagaggcggatgttgcagtgagctgagatcatgccattgcactccagcctgggcgatagagcaagactccgtttcaatatatatgtatatataatttttgtgctgttatatgtacatgatccctttttcaccaaaattaagaatatgtttagtgagagccataaaactaaaaatgcttttgctagtttaaaactcggtttaacccatcatgataaagcagtttaatggtctgtttctaaaacttcaatttgatgcttagttttgatggctgtagaggtgaaaagaataaattcagaaagatttgtagcttcagatggaagaatcacagtgtcagttctgcttagtaacttgtgattgatccaacctatcaaccatgctgaatttttgttgttgaaatgcagggtatagtcttacaaactaatcaggtgg

SEQ ID NO: 42478 - DNA, 1032 bp, Homo sapiens
ttctgtcctcatccctgagatcagttctactgaaatggcaacaacaactccaaatacatctctcccttcttgaaatccctaaagcactatcgcactcctaaatgcatttctccacaagttagcacttgattgtatactgtcttttaatccttcattgtttcatgtatgaagtttttaatcaccccctaacccccaaaaaagattcggttgtcaagggatatatttctatccctgccagcacagtgctggacatagtgagtactgaacacctaagaggcactcattcagactgacttctacaggacttctacgtgtgtgataaaagcctgtgaatcgtgagtccctgaaatatggtagcctggcccagcttctaaagaggaccttcgtagccacaaggcatgctaaacctctagggtctgatgctgtttttgttccaaatataaacgaaaggcactagtcagccgcctgcatagactttctaaacagtgagtaaataccatggaatgtcagaaatgactttatcatcgtcatcttgaagaaaaatatgaacactgatgaaggtcattttttttttttgacatctttctgtggcaaagctcttagaattctttgcagttagctgctgaacagtatgatgatttggggattttctgaatcatttgtacttagatactggagttcagaagatgtgatttttgttgcttttcagaaaaaggaacgtggtagggagtgttttttcccacgcttttccagtaactttgcaaaagcattaattgttcactggcaattactaaatgtattttgttgctctgagaaactcagcagtgtactgagatgtggctggctgtgccatcgtcatagtgcacagtgacttttctgtttcttatcactaaagactgaggtgaggttatgaaactttcattggtcccatcgttgtgcgcagggtgcaactggctacctagaagctgatggcaggagactgtttcacacacaggagattgtgagctgtgtaagtagtcatcgccactcaag

SEQ ID NO: 42479 - DNA, 1051 bp, Homo sapiens
atagtttggtgcttatcacatcaagagattggtaaatttctgaggaaagacaggctaatggggcactgaaatggaacaactcctttaaacgtgcagccttttgaatttttcctcaaaaccaagaagttgacctctgagctgtcaggtgaccactgtgtgcaaaggggatggattctcttgtcagtagacggtcttctccatgaagcgagagtaggaagtgtactggaatggccaagtgggactgcttcagctgaccaggttcttttaaaccgtagtcatgctttcccactaactcttaaatccttatgcttagaaaattgaggataaggctgggcacagtggctcaggcctgtaatcccagcactttgggagaccaaggcgggtggatcacaaggtcaggagatcgagaccatcctggctaacatggcgaaaccccgtctctactaaaaatacaaaaaaatagctgggcgtggtggcgggcgcctgtagtcccagctactcaggaggctgaggcaggaggatcacttgaacatgggaggcggaggttgcagtgagccaagatggcgccactgcactccagcctgggtgatggcgtgagactccatgtcaaaaaaaaaaaaaaggttggggggaggataggactggccaggcacggtggctcactcctgtaatctcagcactttgggaggcagaggtgggcggatcacttgaggtcaggagtttgagaccagcctggccaacgtggtgaaagcctgtctctactaaaaatacaaaaattagccgggcgtggtggtgggcgcctgtagtcccagctactcaggaggctgaggcaggagaatcacctaaatctgggaggcagaggttgcagtgagccgagattgcaccactgcactccagcctgggtaacagagactctgtctcaaaaaaagaaaaaaaaaaaagaaagaaagaaagaaaattggggataggagaacagcaaggtgggcatttcccggaattgtgtgcagatgcatccagtcgtggcattgcaagaagtctgtctgatgaagct

SEQ ID NO: 42480 - DNA, 1115 bp, Homo sapiens
ctttaccctcaccttttccatgtcattctctttcccagtgattggggctctgattggcaagcaggagggccgaaatatcgaggtgatgaactcctttgagctgctgtcccacaccgtggaagagaagattatcattgacaaggaatattattacaccaaggaggagcagtgtgagagtggaatagatgtggggaagaggagtgggagttaaaaaaaaaatgtacagggtggggaagatggagagggttggaaagaaacaggagaggagaccaagaacaggggagaaaaagtgaagagtagctggagagatctcagaaaaagaaaacgttcagagttctttctcaaaagaaagcaaaggatgagaggagacaggatagaagggagtagttattctaaactgagccaggatttgaggagggaggagagaagctggtgaaaatacaccaggagcttcacattgaggaaggatggtttaaagaattactatgtcaggccgggctcagtgactcatgcctctaatcccagcactttgggaggccgaggtgggtggatcatgaggtcaggagttcaagaccagcctggcaaacatagtgaaaccccacctctactaaaaatacaaaaattagtctggcatggtggtgcgtgcctgtagtcccagctacgcgggatgctgaggcaggagaattgcttgaacctgggaggcggaggttgtggtgagctgagatcatgccactgcactccagcctgggcaacagagcgagattccgtctcagaaaaaaaaaaaaaaagaattactatatgttctggccccttcccctctagttaaacaggtgttcaaggagctggagtttctgggttggtataccacaggggggccacctgacccctcggacatccacgtccataagcaggtatgcatgctcacacctgtgcatgctggggcagagaatggagaatgaggggaaggagaaaggtagggggcactgacttcctgtgcattgtccctctcttccaggtgtgtgagatcatcgagagccccctctttctgaagttgaaccctatgaccaagcacacagatgtgagtaatactccatgcctactctgtcatgattgtc

SEQ ID NO: 42481 - DNA, 1068 bp, Homo sapiens
actcaccggtagtgggtgtagatgctctgagtgaagggcagctttggggtagaccactgaaccacagcaatcaggggaacttccaggccctgcaggagggacaaagggggttggcacaggtattaagagtgcccctcccatcttgagtcagctgcctggtctttccctcccactgccttatcacttttctttgaacacaccagccccttatgctcacctccttggcccctggagggggctgctcaccccctctcagctgaaacaggaagttgtgttcctccagggcattcagcgggcaggggaagcagccagaggtcccgggtaggcggcagaaggagcccatggagacttccccagactggtgactagctcagaaaagaggacaaggcatggtctccccatgccagagctcagcccctgaagccatccccaccacttcacagcctcgcccctcccaggacctcaccagacattgtccaccagcagcacagagccatcgggcatgacaggtagataactggcgttgaagttggggaggattcggatatcccagatggagatttcctcctgagaggagctgttcagcactgtgggagaggaccagcttggctcagaatagctggacccctcaggccccacctttacccagaaaaaaccggacctaccccaccagcctgcccagaggaactgcatccaatcagttcccttgttgctcccggaggctggagccggcagccctgcttacccttgagcacggtcaagtgttttccagccacagtgaactgccggcatctcagaaccggagggggcagcagagtcagcagcgtgctcactgcgggagggggtgggggcaagaagtgatggtctggaggctgacctcacctccaacccagaattctcaccttcctcttctcagagcccattagccactttccagtgtgacccctcccctctgtcccccaattcccagactctagccctttgcctctgcgctgccctgcccaccttgggccttgaaagcgctctgctcgccccggaatgtctccccaggagatcgggtctgcagca

SEQ ID NO: 42482 - DNA, 1049 bp, Homo sapiens
cagtgtcccagtcttagagatctgtcctggcttcttggggtggcggggggttgggggagcttcctgagggacacctgtggcttcctagacagaattgggggatcccagcgggatggtccctgctgcaatcccaccatgtcctaggacagcagcaagggttcctggggcttcagcctgagaaaagtccctgtgatttgacctggcgtccctctgccgggctccctgctgtggcctgggctagagtcctgatgccctccttccacagctggcatcaggcagggctggaaagtaggaggacttgcctgaaatctggctggatttcagagccttgctctgtcacccaggctggagtgcattggcacgatcttggcttacttcaacctccacctcccgggttctagtgattctcctgcgtcagcctcccgagtagctgggactacggatgtgcaccatcgtgtccgctaatttttgtattttttttttttttttcagtagagacgggtttcaccatgtttggctgggctggtctcgaactcctgacctcaggtgatccacccaccttggcctcccaaagtgctgagattacagacttgagccacggtgccccgcctgaataggagcttcttaatcaaaatttcagcatggctctgggtcaaaattgaccagctgatttaataagttgatgtaaaaattttacagtcagctacccctgggagggggagtctctccctagtcagtgaggcaccagatgccagagcattggcaatgtacaaggggctcagccctgtggctcatatgtgtaatcccagcacactgagaggatgccttgagcctgggagattgaggccagcctgggtaacagtgacaccacgtctctgcaaaaaagaaaattaggggagaactgtggtgcgtgcctatagtcccacctacaggcagagcgagaccatgtcccccactaaaaagaggccaagaatgcaggaaatatagataatatgggccctgtgatgggtggaggccaaatagatcaatacagaattgaagaagacaca

SEQ ID NO: 42483 - DNA, 1048 bp, Homo sapiens
aaaaaattagccaggcatggtggccgacacctgtagtccaagctactcaggaagctgaggcaggagaattgcttgaacccaggaggtggaggctgcagtgagccgagatggtgacactgcactccagcctggctgatagagcgagactccatctataaaaagtaaaaaagaaagtcttcagtgaaaggagattcgccctatcagctatgaaagcacagaggggaggaacatggagtaggggctgcctgcagtcagatcctgccctcacaaccttgccagggaaacaggctcgtgggtacaaaggttgtgtgcctcaacttcctcatggaagcacgtgagattattttataaccatagagtggagacagtcagtatgaccaccaaacccaggagccatatattaaaatactgataaatttaactatataaaaaaatttttgccgggtgcggtggctcacacctgtgattctagcagaaaatcagatcaggagatcacagaaggtcaaggaactactgagagagcaggaatggagagcaggggggtcagcaggaagcttggagaatctgcaaaatagtagattacaaaggatcaaaagtcagtgaggttcaacaagaggtagggtgggataatgaccaaagacagagggaacacttccaggttcattctgtgaggtcagcaacaccatgacctaaaagccagataaagaccctgcaagaaaaacaatacacaaaatacagatgaaaaggctggtgaatattgatgggaaaatcttcaacaaaattctagcaaaccaactttcacagcatgttaaaaggactgtacgccatgaccaagttggagatagccctggaatgcatgtatcacccaaaacaggaaaattaatgtagtgcaccccattagcagaatgaaggacaaaacccacatgatcatctcaactgatacagaaaaaacattggacaagattgaacacctttccttttttttttttgagatggagcctcgctctgttgcccagcctggagtgcagtggtgccatcttggctcact

SEQ ID NO: 42484 - DNA, 1050 bp, Homo sapiens
gagaccctttgttatgctttccctggaaaaggcaaggaagggtatgcaggtttaggattggctagttagaataacgttagcaggctctggggattagaggctgtcatttgttatttggtgtctggcccaggatgatgaaggcagagaaatactgccttctgaagggtgagaggcagctagaagagctggttcagtgttggggccctggattagctggtttgcatatgaaaggcacactcagccaggagccgtggctcaagcctgtaatcccagcactttgggaggccgaggtgggcagatcacaaggtcaggagatggagaccatcttggccaacgtggtgaaaccccgtctctattaaaaatacaaaaattagttgggcatggtggcacgcacttgtaatcccagcaacttgggaggctgaggcaggagaatcgcttgaacccaggggtggaggttgcagtgagccgagaccgtgccactgcactccagcctggcagcagagtgagactgtttcagaaaaaaaaagggacactctcagaggggtcatttgctagctctaacaactggctggctctggcaggggcagtccctctctctgctcttggaggtccaagatgccagaatatcagcaatccagtggggcttggtgaggtggctcacacctgtcatcccagcactgagggaggccgaggcaggaggattgcttaagcccaggaacttgagaccagcctagacaacatagtgagaccccatctctcaaaaaaaaaaaaaaattagccgtgtgtggtggtgtgtgcctgtggtcttcactacttgggaggctgaggtcagcaaattgcttcagcccaggagtgatggtgatcgcgtccctacactccagtctgtggacactctagtaccttgaggacagtacagcctgattacagaagctttacagcaagtcttgaagtcaggtattataaatcttccaccttcattcttcatttgtaaaggccttttggctattctaggtcctttgaattactgtgagaatattacagttggcttgt

SEQ ID NO: 42485 - DNA, 1045 bp, Homo sapiens
gaggctgaggcacgaagatgacttgagcccaagagtttgagacttaacatgggcaacatagtgagacccccatctctaaaaaaaaaaaaaaaaattagccagttgtggtagtgcacacctatggtcccagctactcaggaggctgagacaggaggatcgcttgaggccaggaggttggggctgcaatgagctgtgatttcgcaactgcactccagcctgagtggcagagcaagaccctgtcttaaaaaacaaagcaaaacaaaaaatatttttctgttgttgcctgcctgttccttccccaatgttagaataagtttatccagtttaggaaaaacaaaaacaaaaacaaaaaacacaacactcttttaagtcagttgcattaaacctattatgcaattgacagaaactgaaatcaggctaatacacaatcttcccatccaggaacaaggtcctattttatatccctcagtaaatcttggtagtattctgccaaacatcatataaatgtctcataagattgtttaactgtctgtagtgagctgagatcatgcaactgcactccagcctgggtgacagagccagatcctgtctcaggaaaaaaaagaaaaaagatttttttaccctccatatttcctcgttattaatatgcaagattactttatgaatccttaataattgtcattgtaaaagtaatgcataggcagccaggcgtggtggctcacacctgtaaacccagcactttgggaggtcaaggcgggtggatcacgaggtcaggagatcgagaccatcctggctaacatggtgaaaccccgtctctgctcaaagtacaaaaaaattagctggttgtggtggcgagcacctgtagtcccagctactccggaggctgcggcaggagaatggtgtcaacccaggaggcggagcttgcagtgagcagagatcgtgccactgcactccagcctgggcaacagagcgagactctgtctcaaaaaaaaaaaaaaaaaaagtaatgcataggccaggtgcagtggtttctgcctgtaatccc

SEQ ID NO: 42486 - DNA, 1049 bp, Homo sapiens
aagctgggggggcccagcgcggaccgaacccccgtccccgcccacactcgctggtatataagtcggcgtggcgccgcggtgggtgttgagaggcccgcgaactgacgggccagtgagcgggcgtcgggagtgggcggatgcgttggggttcgggtcgtgggtgttgaggcggagaggaaggcgtggtgtggcgtctccaggtgattgcgattgggggaaggtagaggagccagagaacgactcagccgtttcgggggaagaggaagttggacaacatcggctgttttagtgctttttatttttccccaattcagcagagaatattttcaaggggggtgagttataatgacctatcgcgttttactgagcccagttccactcccgcccttccttggctttgtagggtctcccctccgctccctcggaagcgcttctaagaaggtgggcagagggggggaggtttgctaccaacagctcatgaataattcatgagccccgcccttcgtcaggaagccccgcccctccggatcgcgctgacgcacgctgcgtttaccaaacttaaggaagcgacgtcacaggcccaacccctaagacggggggcggggcgccagtttcagcacgtgctgcctctacccgcgcaagcccaaaagggtgtgcgcaggcgctgcccactaggggggaggaaggaggcggggtggggaggttgttggatttagagccgggcggagaccgctgagactcattcctcaggaacaagggtcgggtgtcaaggagaccttttcacaccagctcccgtcccccgcctacggtgggtgggatcgcgcggcagagacaaaggagatcagtagggccggacatagctgcgcagggaagtagggtgtcagtttggggtggtgggcttttgcgggggctgtgggggggttatatttaaactcccagagccgttaagttggttcgtagtctgatgcgcgcgcaaccagggtggtggcggagtgcgcatgcgtggttcccgggcgaagggaacgcgcgctcaccgtgcgcgctcgcgg

SEQ ID NO: 42487 - DNA, 1030 bp, Homo sapiens
ggcggcggagaaggagccgtttctggtgccggccccgccgccgccgctcaaagatgagtcgggcggagggggcggccccacggtgccaccgcaccaagaggccgcctctggggagctccgcggcgggacggagcgtggtccgggtcgttgcgcgccatctgcggggtccccagccgctgcggtcggtcgggaaagccccggggccgcggccacctcctccagtggtccccaggcgcagcagcaccgagggggcggcccccaggcgcagtcgcatggggaggcccgcctgtcggatcccccggggcgagccgctcccccggacgtgggggaggagcgccggggagggggcgggacagagctgggtccccctgctcctcctcgaccccgcaatggctatcagccccaccggccacctggggggggcgggggcaagaggagaaatagctgtaatgtagggggaggcgggggaggcttcaaacatccggccttcaagaggcgcaggcgggtgaattcggactgtgactctgtgttaccctccaacttcctcctggggggcaatatctttgatcccctgaacctgaatagcctcctggatgaggaagtgagccgcactctcaacgcggagacccctaagtcatccccccttccggccaaagggcgagatccggtggagatcctcatccccaaagatattactgacccgctcagtctcaatacttgcactgatgagggccatgtagttcttgcttcgccactcaagactggtcggaagcggcatagacaccggggacagcaccaccagcagcagcaggcagccggagggagtgagagtcaccccgtgccgcccacagcccctctcacccccttactccacggggagggcgcctcacagcagccgcggcacaggggccagaaccgggatgccccccaaccctatgaactcaacacagccatcaactgcagggatgaagtggtgtctccccttccatctgctctgcagggtccctcaggctccctatcagcccctcca

SEQ ID NO: 42488 - DNA, 1050 bp, Homo sapiens
agagggcaggcaccttttgggagttagtctgagaagaaagtggccacgggctaaagtgaggccgcgggactgtatcggcctcagagcaggttgcctgggagcaggggttctttgattccctcagttgacctcactgccgattcttgccctcagggtaattatgtgctggatcgagatgacctggtggaggcccaaacacctgagtatgatgtggtgctctgcctcagcctcaccaagtgggtgcatctgaactggggagacgagggcctgaagcgcatgtttcgccggatctaccggcacctacgccctgggggcatcctggtcctagagccccaaccctggtcgtcgtatggcaagagaaagactcttacagtgagttgggtgttgggggaatagtcattcctttggttgaggcaagaaaaggccccgaggtgggcatcgcccttggccaggggaggcggcagcgtgctgaagtggtcccttgcctctctccttaggaaacgatctacaagaactactaccgaatccaattgaagccagagcagttcagttcctacctgacatccccagacgtgggcttctccagctatgagcttgtggccacaccccacaacacctctaaaggtaaggctggtttattttgtcagggaggctggtcctggctgaaagagtgcagacccccatggggattcttgaggtgctgccaaccccttctgatcactctctctcccctcaggcttccagcgtcctgtgtacctgttccacaaggcccgatcccccagccactaagtggccccctaaacagaaagtgtgaagaggctgccctcgctgctcataaggacctgggggaagaggaaagtgtcccaaggtctttcctttctgactccaaaaatagtttcctttcttggatctgcaaagaaagcttttcttccgtcgctgcctcagcctcctccctatgcctctggcacctgcgcagcaaggctggctgtgctggagtcaccatcatcttcctctcccccagcctcccaggctggatggcatggactgttt

SEQ ID NO: 42489 - DNA, 1033 bp, Homo sapiens
gggcttaggatgccaacagcgctgctgagaaacggaggaggaggagggtttgcttgaggttggggcgagagtcgctctggctgttcttcccgctgggcgttgtacacccctcctcctgaaccaagccagaggtcagcatggggaagggaggaaggaagggatgggaggaagaggggggtgggtgagctgaaagagagggactagagtgccagatggaggagctcttttctagagagccgggagttggggagggggtatttattttgttatttatttcagtctggagggcgattctgggcctttctgacctactcctgagctaggagtggagaatcagggccaagtttgcactctccccaatgccaatgcctaaaggccccgccgtccatgccaccccacagccaaggaggggtctgcatggggagtggaccgagagaagaaggggcccagggaagcagagggcccaagaccattcacagtatttacaatttgccagaatttggtagtcagtgtggcctgctctgaatcaggcatcttatttagttctggggtgagggtctagtgccagggatgggcaggatgatgggggaggaggagggaaattttagcgggtggagggggtgggcagggtatttatttaaattaaaaaacaaaacagaagagatgtcaggaacttttttttaattcctttcttttcagaataatatattaaaagactcatgatcctaaagctggcttcttctatttcacagcgtgctctgctattcttacacttgctccttttcccatcttgcccctggttggtgggagttgaaggttgtgcggggaggggtgagtagctgtggccaagtcacagggcgaggtggagttccaggtaagtctttgggaatgcactgggccatgactccattagcattttttttgtgcacagaatgtgttcttggcattgcactgatgcagaaggaatatttgggcatgaagcttgccttcaagtaccttgtgatctactcagatgacctccactgagatgaca

SEQ ID NO: 42490 - DNA, 1053 bp, Homo sapiens
ggccagttttctgttcagtgggttacaaatatgtctccttcataaggggatagagtcgtctgggggcagtgagcaaaattactagaattcccagctggttggattggccgatgtagcaaagttgatggttccagccaaagttgaatttcctaagatctgaagaaaaacacacattttaatattggtgggtgggtatgactctgcctgcatccctgcatgtatgaactcattcttgttctctcttttttaatgagaaatattttctcagctgtagcaaaaacctacagcgttggtgtgaggggttgagagaaaggctgctagtttctgctgttcctaaatttacatacatactgccacaattgtaggtcccacacctgacctagttttattcatttggttttcttccagtacctaatttccttaacctagatgtggatctgtttaatttccccaacatacacatatgcttgtttgtttagttacatttctaattcttggaggatgaatctgtcatttgaatcttaagacgtggtaaaaattgctgctaaaaagcatctatttgcaaagcagtgctttaaatgttctttcttgttctggtttgcctgaatgcgtctgtgaatgaaccactgttcctcagaaagaaaatggatgttgaggcctgagatctcattgacacaaggatggacgctaactttgacacccagttttttcagcaaagtatgacatatttccttgatgtggctgtttgggtccatcttcaatccatcgttcttcaggtgtttgtaatagacacttatctcttctatttctgcccaactttactgtgatcacaggagtcagaattaaggtgggcagagctctgggctgggtgtcaagaatgcacttgacagctctttatttgtgacaagttcctgccctccttgtgccttactttccctgtcgggcttgctggtggttcttagttgaagcattttaatctccatgggaggaaaggtacagtatgttcttcaataattcagtacttttccatctgtctgggttggagaggtacac

SEQ ID NO: 42491 - DNA, 1863 bp, Homo sapiens
tgatcctcccgcctcgaccttccaaagtgctgaggttacaggcgtgagccactgcccggccaggtgcaccctttgtacaggaaaaggggtaggaaaggcttcgaggtccctctgagccctctgatcgcgtccctttcccacgccagggcacacagcatggcagaaaaccgagagccccgcggtgctgtggaggctgaactggatccagtggaatacacccttaggaaaaggcttcccagccgcctgccccggagacccaatgacatttatgtcaacatgaagacggactttaaggcccagctggcccgctgccagaagctgctggacggaggggcccggggtcagaacgcgtgctctgagatctacattcacggcttgggcctggccatcaaccgcgccatcaacatcgcgctgcagctgcaggcgggcagcttcgggtccttgcaggtggctgccaatacctccaccgtggagcttgttgatgagctggagccagagaccgacacacgggagccactgactcggatccgcaacaactcagccatccacatccgagtcttcagggtcacacccaagtaattgaaaagacactcctccacttatcccctccgtgatatggctcttcgcatgctgagtactggacctcggaccagagccatgtaagaaaaggcctgttccctggaagcccaaaggactctgcattgagggtgggggtaattgtctcttggtgggcccagttagtgggccttcctgagtgtgtgtatgcggtctgtaactattgccatataaataaaaaatcctgttgcactagtgtcctgccatcccactgccactgattctttcctgtgtaaattctgtgtgtgcctgaatagggatggtaggaaacgctacaggtatctaggtgaaaggggaacccaagtgtttcttgcctctatagagagcatagattatgctatgagcagtgtaacaaaacagtacagtgcagaaacccagtcatcccaatgtttgtttgtttgtttgttttttgagacagagtctcactctgtcacccaggctggagtgcagtggtgcaatcttggctcactgcaagctccacctcctgagttcacgccattctcctgcctcagcctcctgagtagctgggactacaggtgcctgccaccacaccctggctaatttttttgtatttttagtagagacagggtttcagcgtgttagcagggatgttctcgatctcctgaccttgtgatccacccatctcggcctcccaaagtgctaggattacaggcgtgagccaccgtgcccagccccaatgtttgttttaaagattttcgtcttctagttgggtgcagtggctccagcctgtagtctgagctactggcggaggctgaggcggaaagagtgcttgagcctgggagtttgaaggtgcagtgagttatgatcatgccacctgcactccaatctagatgacatactgagacctagtctatgcaaaaaaaccactttttttttttttctgagatgaagtcttgctctgtcacccaggctggagtacagtggtgccatcttggctcactgcaacgttcggctcctgggttcaagtgattctcctgcttcatcctccccagtagctggaattacaggtgagtgccaccacgcccagctaattatttttgtatttttttagtggaaacaccatgttggccaggctgttctcgaactcctgacctcaagtgatctgcccgccttggcctcccaaatgcaaaaaatttttgaaaactagatgggtgtagtggtttgcacctataatcccagctacctcgttagctgaggcaggaggatcgcttgagcccaggagttcaa

SEQ ID NO: 42492 - DNA, 1108 bp, Homo sapiens
aggccatagacagcctgactcctccctaagcagcaccctggcctcatcttccacctctctcttctccatcttcccttctgctcacctgtagggagaccccctgaaactactgctacggaataaaagatgaaatgctcctgattattgtaaatacaaaattgcatgcaggattgtgtacaaacaatgccaggttggactgccagaatgagccaacagcctgtgatgtgcttccgcctgcggagagcctatgaacggacctgcagtcagggaggtttcacatcaccaagatttctatcccagaaaagcagatgttcatagctctgggaatggaatgcgacccttgtggagagcctataaacggacgcatgggggcggggggcacctgtccatatggataagatagggctataaacgccctcatcttgccatggctcttctaggcctctttagggttaaggcatactcccttctgagaatttctggtctaactggttgtctagcttcatgtcctgtttccatggattgtctgtaaccagcttttgttgcaattgttactgctgattagtatcttgctaatcataggttatggaaagattgtgtttctgttttaaggctctgttagaaattactgatgcacacactatattgtaaattcttatctctgtatactgtacttctgcatacaaatgtactgtacttctacatataaatgttatgttaaagaattaattcatccccatgtgaccatctcacctcataatcaaatgaccctaaatccctcactaacctacccccgccctcactaaacttaataataaatgatggtacatctggtgcattgttgacaccacgggaccagaaggcggtgaccccccggaccagctttcactatcttgtgtgtgtctattatttctcaacctgctgatccgcctgggaacaaagagagagccctgttgcattgcgggctgctggccagatcccgcaatactcacctgactctccattcactttgctgaatcgacaatcccccacccacctcatacctcttcccattgatgtcctaccccccttcaaggctgaggtcattgtcacctcctccctcaaatct

SEQ ID NO: 42493 - DNA, 1027 bp, Homo sapiens
tctggcctgcgtttctcctcaggcatatgagcccccgccacctcctgcctaccgcacgggctccctgaagccaaatccagcctcgccgctcccagcgtctccctatgggggccccactccagcctcttacactaccgccagcaccccggctggcccagccttccccgtgcaagtgaaggtggcacagccagtgaggggctgcggcccacccaggcggggagcctctcaggcctctgggcccctcccgggcccccactttcctctcccaggccgaggtgaagtctgggggcctggctataggagccagagagagccagggccaggggccaaagaggaagctgctggggtctctggccctgcaggaagaggaagaggaggcgagcacgggccccaggtgagccctggggaactgggatttcaggccctacagacaatgggacaccgactgggtggggtggctggtggtgttttagggggcttttttgttttttgagacagagttttgctcttgtttgcccaggctggggtgcagtggtgccatcttggctcactgcaacctctgcctcccgggttcaagtgattctcctgcctcagcctcctgaataactggattacaggcacacgctgccacgcttggttaatttttgtatttttagtacagacggggtttcactaaaaccccagtttgttggccaggctggtctcgaactcccgacctcaggtgatccgcctgcctcagcctcccaaagtgctgggattgcaggcctgagccaccgcgcctggccaaggggctggttttggagcagagtcagaggtctgggacgtggaataggtaagggcagggcagtgcgggggagcaggatagaactgcccattggggctgagcgcggtggctcatgcctgtaatcccagcactttgggaggctgaggtgggtggatcacctgaggtcacgagttcgagaccacactgaccaacatggagaaacctcgtctctactaaaaatacaaaattagccaggcatggtgg

SEQ ID NO: 42494 - DNA, 1049 bp, Homo sapiens
ctcccaccgttccccaaaaaccaagccttcctgaccggggtcccctccaggctgggcagcattgcagagattgacctgggtgtgccgccgcccgtgatgaagaccttcaaggagtttctcctctccctggatgactcggtggatgagacggaggccgtcaagcgctataatgactacaagctggatttccggaggcaacagatgcaggatttcttcctggcgcacaaagatgaggagtggtgagtgcccctacttccctggacctctgccctggcatgtccccctggccccgctggtggagccacagccctgtcctcttcccagttttccctgtccagaactttctgggggcgggggtcgggaagtatgacagcattggctgatggggtctccccctcacttcagcaactgccacggcccccgccccgccctgtctcctgtcctgctgtcctcagagagtgggacacctccaggcagcaggccagagccacttggccccttggggcagcagacagactgcttcccacttgttggtgttgggtcattgtcatccctgatcaccaggaccctgtgtggctgtggcgtcctcctaaagcgacgagtgaatccagacaagaaaagcaaagatctcggtcgtttgacagaaaaagaattttaatttttttttccttttgtggatgttttaattttaatcaaccatcttttccccccttcctgctcctcctcctcctcatcctctttctgctcctcctccttgaaaagagccagaactgggaactacacccgctcatcgacggagctcggagcaaacccacctccacccccaccatacccagcccatacatgagcccctgggctgagctgcgcggccccggccaggcagacaggccagggcactgctgtgcacaatgcagcggtttagctgaatgtgattgctcaggcagctagccagtcaggccccactgcggagtcccgcgtgggcatctcggccgggcgcccagccaggagccagccggtggcccaccagccagcatgggccctgggcgccg

SEQ ID NO: 42495 - DNA, 1027 bp, Homo sapiens
gtccctgtccgtgttgtactccccccaggtttgaccccaggactcccctacccacaccagactccccagggcctgatgccctatggtcagccccggcccccgatcttgggctatggaggtaagtacaggagggagatgaaggggcttggtgagtgtgtggctttgggagaagaaaacagaggatggaattgaggacatagttttgcaactcaacactgatctctgtcatagctggtgctgtccgccctgcagtccccacaggaggccctccatacccccatgccccgtatggtgctggtcgagggaactatgatgccttccgaggccagggaggttatcctgggaaacctcgcaacaggtgaggagggcagacgcccaagctttgttgccgcctgcagactcccttttgggagccctcagctctcatcctgtacctctcacctcacaggatggttcgtggagacccaagggccattgtggaatatcgggacctggatgccccagacgatgttgatttcttttgagccgtcccccgttcctcagtcctgtatcatccatacttgtactaccttgtcctatgaagctctgagaattttttgtacgatcagccttactgctaataaaagcacttccacagggctcctgactctcgtgtgttacataactcctccatccttccagagtaactcctgaggtgttgctcagccctgccacttttattattgatgtcaaaagcgccaggctttgcagggacaccagtgggaggtacataggtgcgtgtctgggacccgagaatctcagttctgtaacttcgtcctcagtccaaggtgcgctgctgctgttgggagctaaggctggtcaagcacaggttgtagaaggagttggggtcaaaggctgcactcacctcttgccagcccacccacccagcagcctgtagttcactggggctttttggagtgccccagtagtgagggtccaataccaggacataggcttccgtgcctgaccctacgcagactcccagcaa

SEQ ID NO: 42496 - DNA, 1089 bp, Homo sapiens
gggaggcaggggttgcagcgagctgagatcgtaccactgcactccagcctgggcaacagagtgagaccctgtctcaaaaagaaaaaaaaaaaagagagaaatcaggaacatcatgaaagatacagcaaaatgttttaccccagcccactgcaccacacctgggattgtgacaattaacttgataaattgttccttttcctgttcggaactgactaggttgtgcgtggatggaccagtgaaaagaaaatcctgtttgggtagggaagagggaagtagaaaacctctttcgtattcttggtgtcaagaaatgggaagagaatgagggagcagagacctgggttgagtgttggctctgcactaaacagctgtgtgatcttggtctagtgccttaacctctctgagcctcagtttgtacatcagtaacattgggataatgacatccacatgcccacttcacagagctgctgtgaggactggatgagaaatgtagagaagtatttcggacaccataaagctcaaatacaaggtgttggttaggaaaagtttcaactgacttgtacccacctgatacccctccatcagcataagcgtgtatgaggatgttaggtacatgtgttgtgagtgaaagctctggaacacccgagtagagctttctgcaaatcagcttctccttcagaggagaccattttgttttgctttccagcagttacttgaagaagccttatctgaagtcacaacagtgacttcaggaatagaagggaccaatggccagcttgctgaaatgtaatgccattcttaaaagccagctaagaatcagaccgtattagttaaggacccataagagtagacatttagaaaaagtgaaaaatggcaagagtggcccaatcttttgagagtttagagaaaatatcatttggaaagggagtagctctccttctattttagccttattattacggtatctataaagcaatgccatattctaaatctgcagaaataaaattctaaggggcgaaagtccaaggcagaagtcaaaagttttgcaaggaaaccgatgaggttgctgacctgagctgggcagggttgaac

SEQ ID NO: 42497 - DNA, 1033 bp, Homo sapiens
ggacccggaccaattcagcctggggcaggggaaaagagcaacaataactaactgttagaggattttcgggaatgttagcacaaagtgctccgggaattctgcagacaatcctacggaaacatacacatgccgtgctgttctgccctccgagttgtcaggggtccctggccttcccagcctggccttgtctctacctgcctcccagaaaccagggtctagagcttctcttcggagtcctgtaacagactaccctgaaacaagctggactgagtccaggttaattctgaaatactggaggagagcggtgtgcgttctggccccctgcatctccttgtttgccccacccctaactacctccagagtgatctatgtaaagcaggagtccccaaccctgaggtcacagacaagtaccggttcaagaccagttcaaggaaccgggccgcacagcaggaggtgagtgataggcgaaaaagcctgaagcttcatctctacagctgctgccctcgctcgcattactgccttagctctgcctcctgtcagaccagcagcggcagtagattttcataggagctccagccctgttgtaaactgcacaggcgagggatctaggttatgcacttttatgagaatctgatgtctgatgatctgtcattgtctcccatcacccccagatgggaccgtctagttgcaggaaaacaagctcagggctcccattgattctacatgatggtgagtagtaggattatttcattatatattacaatgtcataataatagaaataaagtgcacaggccagacacggtggctcacgcctgtaatcccaacactttgggaggccaaggcgggcagatcatctgaggtcatgatggagtttgagaccggcctggccaacatggtgaaaccctgtctccaataaaaatacaaagaattagccaggtgtgttggcgggcacctgtaattccagctacttgggaggctgaggcaggagaatcgcttgacctgtgaagcggaggttgcagtgagccgagatca

SEQ ID NO: 42498 - DNA, 1094 bp, Homo sapiens
tgctaaccattctgccccgactctagctctgtgtacgggcatgtctgtgttttgaatggctgagggttcaaagccagaaggagttagttctcctgagaagaggctgcagcctcctggtctatctgcagagctcatcgctttaggaaagtgactccccatgaatctgatgatgtttctgagacttgccttccatagctgtcattcaaactaggaccatttatcaaaatgagccgagtgcatagcacgttccgggcgccggatgcttggatcacattgatgaataagggacttcaggggctcccaggtgtgctgtgtgtgtgtggtggagagtgtgcaggggccagaggaatgaacaaatcatccaatactgtgagataaggacttcgctaaaggtacgattgaggtgttgtgagattcacaggaggtagagatctgggtgatcctcctctggttcaaggcctggctccctgggtctaagtttctcagaatcccacttcaccatgcatcctctctcttctgtagattgcatctttcttccccactggctctttcccatcagcacctaaggatactccagcatctctctcctttaagaaaacagcctcaggccaggcgcggtggctcacacctgtaatcccagcacttagggaggtggaggtgggcggatcacgaggtcaagagtttgagaccatcctggccaacatggtgaaaaattgtctctactaaaaatacaaaaattagctgggcatggtggcacgcatctgtaatcccagctacacaggaggctgaggcagaagaatcgcttgaacccgggaggcggaggttccaataagccgagatcatgtcactgcactccagcctgggtgatagagagagactccatctcaggaagaaaaaaaaaaaagaaagaaaagaaaacagcctcattgcgtctacatcattcttttgctgttggcttttctcagccagctttcttggaagcactggttgctctgcctgactcagtttccttgtttatagggtcttctccaacctctgcggccaggtctctgccctgcttactgtctcatttgcacctgcgggatgttacttta

SEQ ID NO: 42499 - DNA, 1039 bp, Homo sapiens
ctacaccagaaaccgggcttgcttttcctggcaccatcctctctgaggaggaaatgaatgaatcaacaattacaatacagggttgggctgggtgtgatagcttatgcctgtaatcccagcactttgggaggtcgaggtaggaggatcacttgagcccaggaagtcgagaccagcctgggcaatatagcaagaccccatctctaaaaaaaaaaattagccaggtatggtgtcacacacctgtagactcagctactcagggggctgaggtgggaggatcgcttgagcccagaagtttgaagctgcattgagctatgatcccgccactgcactccagcctgggtgacagagccagaccctgtctcaaaaaataaatgaataaaataaaataaaatacagggttgcactgtgtctggggctatggtgaaaggcctctgcatgatggtagagggaagaaaagatttctattctcatccattgctaagtccatagttaatacccctgtgacacaagatagattaacaagagaaaaacatgcacatttgtttaagttttatgtgacataggaaacttcagacatgaagacccaaagaaacagggagacctgtgtatttttatgctaaatttgataaaaaagcggacagctgtggagaagtgtgattgcacaaaaagagtatgatctcaggccaggcgcagtggctcacgcctgtaatcccagcactctgggaggccaaggcgggtggatcccttgaggttaggagttcgagaccagcctagtcaacattgcaaaaatccatctctactaaaaatgcaaaaaattagctgggtgtggtgtggtgggtgcctgtattcccagctactcgggaggctgaggcaggagaatggcttgaacctgggaggcagaggcggaggtgagccgagatcgcgccactgcactccagcctgggcaacagagcaagactctgtctcaaataaaaaaggtatgacctcatcataacaaactgggtgaaacttagcaaggcatgttcagattcttctctgt

SEQ ID NO: 42500 - DNA, 1055 bp, Homo sapiens
gtcccccccaaccccacagcctgaggctgtccgtgtcataccccatagggagctctgaagcccggtcttggggttcacaggccagcctcagcagagacattgaggacagtgggggctccaggtcagacttgcacaggcaggtccctgcacaggcagctttgcggtggcgggaagggctggagacagccctcacccgcccgccctggccctgccgtcagcagctgcagggaagaggaccgggcgcatttatagaattcctgcctgcaaaggccatgcagttgttttaaattagcatacaaatcgacattagtgtagtacatctgttgttaatccacatcccggtggaacggagatgccaacacgccttttattaggcacgtcgatcccataatgtcctttctccctgcctttgtcttctatcagagtccgtaatgggttccaggatgtcttttattttgctatggaccacgtttcctcctgcccagcggatcagaaacgtaatggattccaggatggaatttatgttcctttggaatcagaccctgtacgatgaattctaaagccttcgggcaaatctccagggaggccgtggccctgtgtttgcccccatggtcatcagacaggcaccgggaacccgggcacagtcccagggctggagggggaggaagggagcctgggccgacagctcccaattaagggaattccaggcaggcgtgggaggagaggccaggggtgctggtggagacagacagggaagctgggaagatgcagggcggggaggagggggcacagatattctagaaacccaggaaccggcagcaccagtgtttctggggctggtcacagacactggacaccagtttgcgaggtcctggagaaaaggaccttgaccctgagtatcccagcaggcctggggaggagggcagggtgttgtgagccagagactgcccttggggctaaccaggccgggactaagatacccagctttaccctttgctcatggcatggccctggagagtcactgtctcttgctgaggcttggattccatagcctg

SEQ ID NO: 42501 - DNA, 1034 bp, Homo sapiens
tccttccttagtctcccgagtagctgggacgataggcgcccgccaccatgcctggctagtttttttgtttttttgtttttttttttttttgagatgtagtctggttctgtggcccaggctggagtgcagtggcgcgatctcggctcactgcaagctgagcctcccgggttcacgccattctcctgcctcagcctccggagtagctgggactacaggcgcccgccaccacgcccggctaattttttctatttttagttgagacgaggtttcactgtgttagccaggatggtctcgatctcctgacctcgtgatctgcccgcctcggcctcccaaagtgctgggattacaggcgtgagccaccgtgcccggccgatgttttcttaaatattaatggcagggccctctggattgactgtgttatttgacccattccagttttcaaggcgtggtcttgaaaagctgtcgatcaccctggttttgggatgtgtttcagaaccaagtttcgatggtgtgtcagtgttggattttcctgctgaggacagctaaggtttggtatggagcagttttggatttgctgagctgtaatcagtccagcttctctgctgtcttctgagaaggttgatggaggagagtggtctttggcggggatggaggtttccctgcaggaaatgaaccaggactgaggggaacctgtgccgttcccctcatttgtcctgcgcctgaaacagctttgaagcacctggcttgtgacttaaaagatttttaaaaagcatttgtgctgccctattcgggtattacacagtgagggtgaaccattcttttcgaaagacgtctaaggccgggcacggtggctcatgcctgtaatcccagcactttgggaggccaaggcaggcagatcacttgaggtcagaagttcgagaccagcctggccaacatggcaaaacctcatctctactaaaaatacaaaaattagcctggcgtggtggcgcatatccataatcccagatactcggcaggctgaggcatgagaattg

SEQ ID NO: 42502 - DNA, 1044 bp, Homo sapiens
gtgagccgccgtgcctggcctccactctttttagacacctttgttgagttgttgttttgggcctgtaagtttctctggcttattaccactttcccctcctgtttctagggaagaaatgattatttagataaaaaataatttgataaaaggtagcagatgataccaaaggtaaatctttgtcttgaagagcctgaagctgtgagcattggtaaagccgtgggctgcagtgagggaagggccggcttggagccgccctcagcctagcctccgggtgttacctggagcccttgctgtcaggacggcctgtcacttctcgcccttctcctgccctgccaagcctgtcccttcctgtgttgtgacaacttttttttttaaacaagtatttctacagctccattattttgagattcttggaagaaagatactatgtaaatgaaaattaaaaataaaattctcgctggagggaatcgtatacatgtaacgtttttgatgaggtttggaaaagactttcgttctccctctggaactgggaacattctgtggctcccgtcaccatttctgtgtcactctgaaaggtgtggcagataatggtgaaacatattattttctgtttttcaccaagtagttgacccagaacttgaacccatgcagtcctgggtccagtgaattatttctgctgcatacagttctgctgtgtcctcgccgagagcgtagtcagcaaccgcccggagaataccaacctttcaaaagaaaaagggctggagtccccaacatacagagattacagctaaaattacgaccagagctgttaatcaaatcccatcttcccttcctattcacacagtagagatgttataagtcatacaggtttgagacagaaaattgagagcagaggagcatgtgtttaaaccagcatagaaacattcatttaccagaattgctttatttcagccgtatctcaactcgttgcttacacagtaacgcatgctgtctcgtcactcagccaagtgggagacaagttcaggtttctgctccatgggatcc

SEQ ID NO: 42503 - DNA, 1029 bp, Homo sapiens
gcctcctgagtagctgggactacaggcgcctgccaccatgcccggctaatttttatatgtttagtagagacgggctttcaccatgttggctaggctggtcttgaactcctgatctcaggtgatcaacccacctcagcctcccaaagtgctgggattacaggcgtgagccacctcacctgggctcactcaccacaatttttgagatcttgttgtctatgtcattccctgtgaattttgtttgttatgacagccgtattgaaatccatcttcagggccaggcgcggtagctcacgcctgttatcccagcaccttgggaggccgaggtgggtggatcacctgagatcaggagttcaagaccagcctgaccaacatggtgaaacccccgtctctactaaaatacaaaaaattagcagggcttggtggcgcatgcctgtagtcctagttacttggaaggctgagacaggagaatcgcttgaacctgggaggtagaggttgcagtgagccgagattgtgccattgcactccagctttggcaacaaaagtaaaacgctgtctcaaaaaaaaaaaatccaccttcagaattgacctgtgttaatctgtccagactgccgtaacagaataccatagatggggtggcttcacatatttacacaacacatatttatctctcatagttctggaggctggaaagtccatgatccgggtacgggccaacgtggttcctggtgcgggcccttttcctggcttgcagatggcctcgtttttgctgtgttgccacatagcagagagtgtgcgcaggcaggcaagccagctctctggtatctcttgttttaagtacactaatcccatcatgagggctttaccctagtgacctcatctcatccttacgaccttccaaaggccacacctccaagtaccatcatattggaggctggggcttcaatgtatgaatttgaggggggtggacaacacagttcagtccgtagcagcaccctagctcacacgtccatttccctggggctggtcacc

SEQ ID NO: 42504 - DNA, 1052 bp, Homo sapiens
gctggctagaatctgaagtactcaattacatggtggtggtgatagaggctgcccttttctttctctttctaccaaaggagatttttggtagaaggtttaaccaggtgaaggaactaccttaactcccctttccatagtttttagagaattttttttggtataaataggcgttatcctcttgcaaatacttttccttaaaacctattcatgtccatgcagtttttatcctttagtttatgaatgtggtaaattacattgattgactatatgatgttgaatcatttattgctttctgggataaactcttcttcctcttgtattttaaaaatattgttggatttgatatacagttttcaaatctgtgttattaagtgaaattggcctataattttcttattcagttggaattgaggtttactagtctcatgaaatgggtaaacattgtgttggaacaatttatataacatgaggattatctgtatcttaaaatttgatagctcacctttgaaaccatcagggcctgagactttagaatggtggctgggaggcatttaacatttcactttttttgtttttggtctattgaggttttctattctttattttattttattattattattatttttttttgagacggagtcttgctctatcgcccaggctggagtgcagtggcgcgatctcagctcactgcaacctctgcctcccgggttcacaccattttcctgccttagcctctcgagtagctgggactacaggtgcccgccaccacgcctggctaattttttgtatttttaatagagacggggtttcaccgtgttaggcaggatggtctcgatctcctgactttgtgatccgcccgcctcggcctcccaaagtgctgggattacaggcgtgagccaccacgcccggcaggttttctattcttatgccaattttggcattttataattttctaaaaatgttttcattttatcttggttttaaaacttaactgttctgtgatcatagtattttttttttgtaaatctgttttgaactctagctgtctc

SEQ ID NO: 42505 - DNA, 1029 bp, Homo sapiens
atttttgtatttttagtagagacagggtttcaccacgttggccaggctggtctcgaactcctgacctcaagttatccacccactttggcctcccaaagtgctgggattacaggcgtgagccactgcgcctggcctgtctttattctttaatgtcaccaaaatgtatctaaataatgatttcttccacctacctatcttatttggcactttactgaccctttgattctgatgtcttatttttttcttttattctagggagttctcatacatttatctctccaaatattttctctcctctctttattttttcttctttctaggacacccactgtacaggtgtcaacccttcttctgttgtccatctctctctctctctctttttgaaatggagatggggtctcactatgttgcccactctggtctcaaactcctgggctcaagcagtcctcctgcctcagccttccataatgctggaattacatgtgcgagcccccatgcctgacctgttctctgtatctcttaacattagcctcattctcaaacatgaagagagtagccttggtgtagactggccacgaattggcgattgttgagatgggcgattggtagtgagggtacccatgaattggcgattgttgagacaggcgatgggtggtgaggtactgtttgtatgtatttgaaatactgtctgtgtatagctccagttgaattacctcctactgagacccactggccttagcctgtggtgtggggatgaaagtggggagggaatagaggaggaggctggctagataggcttggggctggctgccaggacagttaacatgacttacatggcacatcgtacatttctatggaacagtgctgttccgatttagccccttgctaggcaaagtgattcatgaaccagcaacagtggtatcacctgggagctcgttagaaatgcaggatctggccgagcacagaggcttatgcctataatccccgcactttgggaggctgaggccggaggaccacttgagttcaaga

SEQ ID NO: 42506 - DNA, 1041 bp, Homo sapiens
ttctctgaagggtgggtagttgagttgggggtatgagaggggtgacagtggatcatcttagctttttttctatttcacgtcattgttcatggatacaagtgcaggtttgtgacataggtaaacttttgtcatgggggtttgttgtacagattacgtcatcacccaggtattaagcccagtatccattagtttttttttttttttagttatttctcctgatcctctccctctttccacccttcactctccaaaaggccccagtgtgtttttcccccctctctgtgtccatgtgttctcattgtttagctcccacttataagtgagaacatgcagtatttggttttctattcctgagttagtttgcaaaggataatggcctccagctccatccatgtccctgcaaaggacgtgacctctttcttttttctggctgcatagtattctgtggtgtgtatgcgccatgttttctttatccagtccattattgatgggcatttacattgattctatgtctttgctattgtgaatagtgctgcagtgaacatacatatgcatttatctttatgatagaatgattgatattcttctgggcctatactcagtcatgagattgctggatcgaatggtatttctgtcttcaggtctttgaggaatcatcacactgtcttctataatggctgaactaatttacactcccaccaaccgtgtatataagtgttcccttttctccacaaccttgccagcatctgttactttttgactttttaataatagctattctgaccggtatgagacagtatctcattgtctcatgcaattttttttttttttttttttttttttgacagggtctcactctgtcgcccaggctggagtgcagtggcgcgatctagatcttggctcactgcaacctccgcttctgggttcaagctattcttctgcctcagcatccctagtagctgggattataggaatgtgccaccatgcttgtctaatttttgtatttttagtagagatggggtttcaccatcttggccaggc

SEQ ID NO: 42507 - DNA, 1019 bp, Homo sapiens
agctatgactttgtaaatattagtattctttgtacactacttaatgtatgcctaaactctcctccagcaacatagatctcttaaaatatggaaggccatcagtgaggtagggtttcatctttcttggtgacagcccttcttggcccccctattctgcccagctgggtctcccattcctcatcatctcgggggcttcctcccatctctctccagctttggatctcctgactcgtgtacgccatggctttgttcttcctggttaacctctcatttgctgcggggatgttctccgattgcttcctgatagatggtgaccatatctgcgatccgacaagatcttctttattctgtcctcaaatcccaggttggaaaacacttcctgcagaatgggaaagatttggctccccgttttctagcatccgtcaagggcgttctgcatttttgtcctttgttctaacaccttgtagagttgtctttttcttcttcttctcagatttcatgaacacgcaccttggcgtggttcttatggcctggtctctgttttctgtcttccagagttgcgttagtcagatgttgcactttgtggcctgatctgctaatttttcttacttttcatttgtctttcttctctcttttttttttttcttttgagacagcgtctcactctgtcacccaggccagagtgtggtggcaccatcatggctctctgcaacctccactgcttgggctcaagggatcctcctgcctcagcctccccagtagctaggactacaggtgcacaccaccacgcctggctaattttttaagtattttatagagatagggtctcactatgttgcccggactggccttgaactcctggtctcaagcagtcctcccaccttggcctcccaaagtgctgtgattacaggcgtgagccaccgcacccagccttacctttcactttcatgcctctgtcttttttgatgtgttttctgcaggaatttctcaaccttccagtctttctaaacttttatgca

SEQ ID NO: 42508 - DNA, 1027 bp, Homo sapiens
cttgaactcctgacctcaggtgatccacctgcctcgtcctcccaaagtgctgggattacaggcatgagccactgtgcttggcctctgcattgaattcttactgtctttactttgtaaaatgttttttaaaaatatataaacagttgcataccatgcattttggttgcaaaatataatacagtgaacacccaggaaccctccacccaaccctaagaatcagagctttgccagtcaattgcatccacctgtatattcctcccacctcctattccctgccccctctctgggacaggtgacccatcctaagtagtgtatttattatgctcttgcctaaaataatgtattttctgcacccatgaatagatgcttaagtagtatatgattactcttccctgagtttgagctctataaaaatggtattattctgcaatagacttgcaggatttgccttttgaacttgagttactgcaacattatctgtgaggttgtctgttataactgtggtccatttattttctctgatgcttaaacccagttgtgcggctagacccaaatttctttagcctttgtcctgtcgctttgtctgttttcctcgtttccctctttgttttggtcccagttagaggtttcctcaaatgcctagtgacgtgttgttgtttgttcatatatcagagcatggcaatagaaagggtgtgtgtgtgtgtgtgtgtgtgtgtgtgtgtgtgtgtcggggtaaagagcagttttggtggcccccaccgtaagtaattaacccaggtgtctagttgcggggagcccccaggcatgggtatcagtggctcattctcttggactggtcagtttctctagcaaggagccctcagtgttcctgctgggtggtgcagttgggaactgttagtctgaccacctgtcttctaggcaccaggctggggcatgtgctgggatattcactcagccccctgcccatggtcatgagaaaccccagtcttctgcccacagtgcaggagggacctgaccgcagtggcat

SEQ ID NO: 42509 - DNA, 1021 bp, Homo sapiens
gcattgattcctgcaggttcagctcctgccccaaggcagcgtccagctggctgagtggggttctcccagggtctctaagcacaggacagcctgcttctgcatgggggcgcacaggggaccgcagagtcacactcagacccttctaccacctcctgacttgtggactttggtggtgggtggcgacaaactggagtccactgggtctgtggcagagaaaggtggctttgctgggggctgggggagaggaggcgtttttggatcgcagcatataccttgtctagaattgtataaaaacctacaggaaaaggctgatttttttttaaaaaggctgtttttttaaaaacaactaaaggcacaaaaactccaagtgtgagaatatccagaatgcgtttatataatgtgcaccgttgaaaggaacattgaaaaaacaaaaaactccgaggaacaggtcattgggtttggagaagtttccttcagaaagttctcttcctgctcgttcactgtggattaaagctcgttggcaatttcggaagttcacgttcttgagactcggtgcctttggaacaatggctcacaatgaggacggtgtgcgttcccggcaagaatgagtgttgggggcttttctccttatcacccgttccccagacccctctcatcggcctcataaagaaacagatggttcatcaggaatagctcagaaatcacgttggctcctggctgtataaagagtgggaactgggatcataaacatttgaaatctcctaggaaaggacaatgattccctcaatgaaatattgatgtaaagggagcattttaaaaggcagaaatgatgaacctgattcaggttgaagctggtagtgtactttaacctttttgagaattgttaatttaaaagcaaatagaatgaaatatagactataaaagcagattaaatcatttttatgcatcctgggttttttggtgtcacgtgacaggaagagttactacaaagaagaccaggttttggaaagacggtggggtt

SEQ ID NO: 42510 - DNA, 1027 bp, Homo sapiens
gtggcgggggaggtcccactttaacaggaggcaagatggccgggagaaagctatggggaacccaggcaaatggagatgagcagaccccaagaaccgtaccctagggggctggctgggtcgggggaattagggtcctttgggctccttgcagagccgaagattgtagtggggagcactgcgtgtgcctacaaggctgagcctggcaggcagaattatgtgttgttttgagataacagccacaacagagcagtaaagaatactgcttataaaacggacatttttttgtagctcaaaaatggtcaaatatcagtaatgtcatgtggtttgagtaatccataaagcagagcccttctcgttagggctgagaattatcctcccctctccctgccacagagccggccacgtggcctgccccggcacctgctccgccttacatgtcattatgcgtctccgagacagcgtctctcacatctcaccgtttaaatgagcgtctagcaagtattctatggagtgcaatgcttgttggatacatctggcattttcatcttcgcagagtgggtttgtgacggggtgaaaaacaaaaaaacaaattcttgattcttgatggaaatctctcagtcctgagagatttataaaaaaggcttgtaggaaaactttgtacgcgtagcttttatactcatagaccaaattataattttttattcaatcttattttctgaataggtaacgtgttcacttggtctaaaatcaaaattttagccaggtccggtcactcgcacctgtaatggcagtactttgggaggctgaggtggggggcggtcacttgagctcaggagtaacatggcaaaaccgtgtctttacaaaacacacacacacacacacacacacacacacacattagctggacatggtggcacgcgcccgtaatcccagctactcagatggctgaggcgggaggattgcttgagcccaggagttcgaggctgcagtaaactgtgattgcatcactgcactccagcctgggtaa

SEQ ID NO: 42511 - DNA, 1030 bp, Homo sapiens
cactggttgctcctctggccacaccgcaggattgattactaaccgtggaggtgacgtcgggttgttgcatgtgtagaaacgaggcttgcttagagctttcgcccgttgggtaggacagcctggcttaccgggaggagggtatcctcttccctatggatgcagcccacgatccccatggcaacataccttccagggcacagcgtggcagagccagggctggtggtgttcctgctggtgtgacaccaagggtgttgatcttgatggaaacgcccacgtctctctttgttctgggaaagaaggaaaggtttcctggtgtctgatgaatgtctaatgtgttccacagggaggattaggcacccgcgagggttcagtggggagtaaagtttgtctgccatcggagatttcaccttctagactggcccttcccagatgtcactgggaaaagctctagtccaggagggaaaaggtgggctgtgacggggaggtggccagggaggggtgctgtgtggtggctgggactctgacaggcgggagaagccacaggaacatcaggaggtgagcgccaggatggctggagccttgaagggtttttctggggacaggatcctgctctgtcacccaggctggagcgcagcggcacgatcacagctcactacagcctccaactcctgggctcaagtgatccctccgtctcagtgtcccgagtagctgggattacaggaacgtggcaccacagtgcctggctagtatattttattttattttatttttatgtgtttttttttttttcttcaagtgtcttgctctgttgcccaggctggagtgcagtagcacgatcttggctcactgcaacttccaccttctgtgttcaagcagttcttctgcctcagcctcccgagtagctgggattacaggcatgcgccaccacacccagctaatttttttgtatttttagtagaggtgaggtttcaccatgttgcccaggctggtcttgaactcctgaccttgtgatccacccgcctcagcctcc

SEQ ID NO: 42512 - DNA, 1304 bp, Homo sapiens
agctcgggcaactttaaaaaaaaaataacaacaaatataggtagtttcagcttaaagtgtttcaaaagttggtttgtggccagacacagtggcttacgcctgtaatcccagtgctttgggaggctgaggtgggaggatcgcttcagaccaggagtttgagaccatcctgggcaacatagtgagattccatctctacaaaaaaatcaaaagattagccaggatggtggtgtacacttgtagtcccagctacttgggaggccgaggtgggaggatggcttgagcccaggaggttgaggctgcagtgagccatgatcataccactgcactccagcctgggcaacaaagtgagatcctgtctcaaaaaaaaaaaattggtttgtaataacaattaatcatcttacaaatatttattgaacaccttccatgtgccagacagtttggccctgggaataaaaccctatctccattctttaaaaagtttcttatctttcttagtaagcaaatagaacccaatggcagagcgtgttaagtgctaggatagaatgactggaatcttctgactgtagactttccccacagaaacactcttatgtcagtggtgataaagttctctggataagccacatatggctcagtaaccctttttatagataaacagttctgctttttgagccttggttcttaacctttaaaatatccatgaaagttgaggacctacgcacctgggaaatgcacgtttgcagtttctggggggctcccagacactcatccatgcagccttagtttagaacaccagttctctgggcccatagtcccagtttcagctcaccattccaggagaaccagtgggtcacctctactctccttctcctccttgtgtcctggggtggaaggggatgaaggagggaggaggggggattctagagctttggggtgggtgacagatgagtaccaaggcctgaccgctgggcagggacagggtgtgcctggccttgggctgggtgctggggagtgggagatgggtgaaggagcaaggccacctgatgtgacaaggggctccacgggctggcagcaggggcagcacctctgcactgggctggccacagcatgtcaggagggagcagcagcagctatctggaagcctggtggtgttagaatcatgtatgtgagcagtggaggctgaaagcctagctctcgcaaaccccagaaagtgtctcttagcttttccgtttgccgtttgcttttccatggctttgatcgcggtcaaactccgatttcccgcgtgtgtgattccagagttcttc

SEQ ID NO: 42513 - DNA, 1049 bp, Homo sapiens
gtgctatcccatttcacccaggaggtgaaatgaattcagatgcacagagcatatagtaggtgctcaacaaacaccctcctctcttctttccttccttgctttcttttacaagtagtcctgagcccttttctagggccaggggcagtcagatacagcagggatggagggagaagattccagatctcacagagatctggcagtggccaagtaaacaaatgatgcacaagataatttcaggtggcggtaagagctcagacagaacaagatggcagtgagtgatcaaggatgggcgaaggtactttggggagtcagagaacgtgttttgatcttaagaatgcaaaatgactttttgtatcacctgtcaacacaacacacacacacacacacacacacacacacggaggctttagtgcaaattttgaaataaccattgattaattttggcaagctgttagcagtggagtcccccacatttcttccatgtaaagccctgatcatcttggctgtaaccactcacttactttgaagcgtcagattcagtctctctgctttctaagaccagggatgctatttaatctgggcattagaaaattcagttggccaagtgcggtagctcatttctgtaatcccagcactttggaggctgaggtgggaggactgcttgagaccaggagtttgagaccagctggggcaacatagcgagaccccatctctacaaaaaaatgaagaaattagccgggcgtggtggtgcatacctgtaattcaggaggctgaggtaggaggatcccttgagcccaggagttcaagactgcagtgagctatgattgcgtcactgcaccccagcctgggcggcagagcaagaccctatcttcaaaaaaaacaaaaacacacacacaaaattagtcaatgaattgtggagtttcaaagagaccttattttgtttgtttgttttctgggccaaaggcccagaaattcttaggtaattcttcggtaattaattcttaggcaattcttaggtaattaacgaggagctaatctcccagttgctc

SEQ ID NO: 42514 - DNA, 1021 bp, Homo sapiens
aaaaaaagttctttctgttttctatcatcaaagtttaaaaagcgatgtttggatattttaaaagccggaaagaccatgtatggcgtgctgaggaagtttgctttgtttgatcattttctcttcccctcacccccatcagctggctaataatgttttccatgttaaatgtgtatcacagcctgttgaaatccctgtggttaatcagaagagaagttgtttctatcctatggaaccttaatacagttgtcaggaggtttgtgaacagaaattcagaattcatcacactgtaacgatgatctaaaggtcaagttgtacagtataaatttgaaaatctctctctgacttcctttctacctaaattagagcctaaaagtcatgagaattttgtcttctttttgtttattttagagatagcatagtcgatgttttaaaaagttgccaccttttcactataatgcgctcccattatcagagatgtttattctggttgtatctctctgacaaccttcaatacttaacagaataatttagtttggattcaaagaagtgcctcttctatttctgtgtttgtttctagaaactttgaggtggaggaattattgttccttcttcttggcaatgttcagggtttcacgaatctgacttttaaaagcccagctctcagccccgagcctctcatgagttaaagaaagggttttgcagcttttggtagacgagaaacacattttatggctcttcatgaagttgcccgctccgtccacgtcctgtcctcttcctccttcccagtttctgggctccctggctcttgtcatgaggctttcagttttgtgtcccagaaagcgcttcccccggggacagtgccatgccaaggctgggagaagggaaaaaggaggtgtttatcgccttgaagatgccttccagcctttattattaactcccttccaaagtaaactttcgggtttttttcaagtctgttctggccaaagtacagttgggtttgccgtgttctctaggagtagag

SEQ ID NO: 42515 - DNA, 1474 bp, Homo sapiens
ccaggacaggaaaattcccagcagggaaacggcctgtctgtaatgcagacacattgggtcataggtttgctttcacagaataagtgaaatggaacaaaagtcttttttgaattctcattccaagaggcccagtttctgcaggtgtgtcttttcgatcttaccttgtattcagtattatttcaagcaatctccattttaggcagtgtctactccagaccaaaaaacctggctaagaaagaaattttgttgattttgagacagggtctttctctgtcgcccaggctggagtgcagtggtgtggtctcagctcactgcagcttcaacctcctgggcttcagcgatcctcccacctcagcctccctagcagctgagaccacagatgcctgccaccacacccggtgaatctttaaattatttgtagagacagggtttccctgtgttgccccaggctggtctcaaaccactcctgggctcaagtgatccccctgcgtcgacctcccaaagtactgggatcacaggcgtgagccaccgcaggcctcccagactctgggtcagagggcagcttgagctcctccaccgactgctccaagcctttgccccagctcttggtgcctggggtggtgggagcagcatgggcttcgctgcacacggacctgggcccagatcttggttccatcggctgctgggagatcagttcccttctctgcacctccattcagcttggacgggaatctgtccttcctagaacagctgtgattaataactgagaccacacccatgttcgttgtggcttagcgccatgcacacaggtacctagtggatgttaactttcctctccatcctggtcagtgctttttttttttttttttttttttttactttttctttttctgtttttgagatggagtctcgctctgtcacccaggctggagtgctgtggtgcaatcttggctcactgcaacctccacctccctggtgcaagagattctcctgcttcagcctcctgagtagctgggattacaggtgcccgccaccatgcctggctaatttttgtatttttagtagagacgggttttcaccatgttggccaggttggtcttgaactcctgagctcaagtgatccacccgccgtggcctcccaaagttctgggattacaggtgtgagccactgcacccggcctctggtcagtgcttctgttgagttcaagaaaaatgaccaattcatctaaaaccccgagctggcagatgctctcccgcgcggcggcggctgacgtcagtgctactttcagcgtctttggtgcagtcttggtgttcgctctcaaatgggctcttttcagtatcacatatcatatgcaggatgcagaggggcccggcttacataccgagagtcagaggactcatgcggccacaagtaggttgggaacagtgtcccctaataggatgagttttgggctttaaaatttaaaaaaaaaaa

SEQ ID NO: 42516 - DNA, 1907 bp, Homo sapiens
cgggccacccagggagcaggtgggcacacccaggttgcatctgtcgccacactggtgcaggccgtgttgcacatcactgctgccgggttgaccccacttggtatgaaatgagagggcctcttttctgaagcaaggtgttgcaatttagcctggggatgaagctgcttcttccaatacccagagttaacaccaaatgccacgagagtgagaaaataagacagcattgcactttcccagaaattgtcaccccagggtgccaccccacctcccaagcccactctgggactccttccacacacagtcacccactggttaccaagcctgcggggcaggtgctaggtgcgtgctgggagtcaggggtggatgaggtcttttgcagacagggcagagcgacctcagggcagagccatgagggcctgtgtgcagcggcttccacccaggcaggctccggctctgcaccttcagctacaggatacacttgctttcgacacctccactgtcatttagacacaaagcacaccaccaccgaaaccactccacagaatgtagagtttcttgccaggaaaataaaataaattaaaagtcactaatacttttatttaaattgcgagtacatttcctcgctgttgcattttgtaatttatacctgggagttaatttattgttatttacagttgcacaaggactcatggaaatgccttgtgtatcgagtgttctcattatgctgggcacggtcccaggtgccggggaggcaggtcatagtcctggcctcgtggagctgatgttctgaacgagagttgagtacccagtgggacatcctgagagcccaatgcaggtcctggtcagggctgtggggactgtggggaagacctggatggcaagaggagtagggacaagatctacaggattctgcatgcagggctgcaggccaagagggaggagttgggggttctagtccgctaggttcagggagccagacgtgtctgctgtcccaaacctcctgtgctcaggaacgtggttctgatgagcctgtatcaccttcccttccctccacctatgggtctgagtggcaggaagagttctagctgtgtcagccaaggccggggacaccagaggcacagggcttggtttaggagtcaagacaaggcatttgcttatttaaagaatgagttctatgcacttccaatgagtggttctgtggtcaggagggcggcacctggagagaggtcaaggtagaattgtggatttggaagggtggaggatggaaggccccagaggaaaccagcagtcagggactgaggaggtgatggcattctctagtgtgatgtgtggacagacagagtagaagaaccaaaaccagtcttggagcgacaggtgggtcagacggcagctttctctggacccgggtcaggaagagaagggtttccagcaggagggaagattgcgcttaggaagagaagggtttgctgggctcgatggctcacgcctgtaatcccagcactttggcaggccaaggcatgtggatcacctgaggtcaggagttcattttgagaccaacctggccaacgtggtgaaaccctgtctctactaaaaatacaaaaattagcccagcgtggtggtgtgcgtctgtaattccagctacttgggaggctgaggcaggagaatcacttgaacctgggaggtggaggttgcagtgagccaggatcgtgccactgcactcaagtctgtgtgacaagagcgagactccgtctcaaaaaaaaaaaaaaaaaaaaagagagaagggtttccagcaggagggtcagtggcggtgaagcttgcagctggcaaatgttgggttggatttggggtggggagtgaggccaggagctggtggaggggggcagaggaaggaaagatcactcactgct

SEQ ID NO: 42517 - DNA, 1137 bp, Homo sapiens
aaagccacaggaggcatagacttgctcagagaattcatactcagttcagcagactccagtattgatgctcaacccatgctgctgctggggagggctcaggggacaatgttaagtgagaccaaggaggtggcacccctgaaccagtctctccgtgagctcggcggtgagaaaacagtgcacagggagaggagccacagaaggcccgggatgtgtcacccagggtttcagctgggaggggacaaagccgatttgggtgggagagtggaagtaggtcccaagaacttttattttaaatgttttgatgacagatttaaaacttgagtaacttcattgtaaaatggccaggcgtggtggctcacacttgcaatcccagcactttaggaggctgaggcgggaggatcccttgagcccaggagttgggagaccggccttggcaacatagtgagtgagaccctgtcttgacaaaaaattaaagaattagccaagtgtggtgacatgtgcctgtagtctcagccacttgggaggctgaggcaggaggattgcttgcacccaggagctcgaggctgcagtgagccgtgatcatgccactgcactccagcctgagcaagagcgagactccgtctcaaaaaaacaaaaaccgaaaaaaccacctcactattctaggcccgagcccgagcttaaatatttaccccatatccaaccataagttaatcccgcacacaccttcatcagtttcttaaagaaactggtgccccagcacggggcatgccaacgtattagacaggcaacaacttagacatggggatgaaatgaattccatcttaaatctcaaagtgcacaatacagtctctaaaattaaagaaaagaaagatttatttccaaaaaagcccacagtgaaataattgtctcagtctgtggagagagctaatttggacagaatcacatattttgattcctgggatttttttaaaaggaatcttttaaagcagtaaatgaaatatttttggatgtagacaaaaatgacttacttagccattccactggcaatgtggaaaggatgaagaccaattttgagttagcaaggacaccttcagaaagttcagctcccaggaattgttgaccctagccatccatgtc

SEQ ID NO: 42518 - DNA, 1026 bp, Homo sapiens
ggcaccactgcactccagcctggacaacagagcaagaccccgtctcaaaaaagcaaattctcaaagaggccttaatataccttttttaatcataagctttaagagcctggtcatgcaaagataattcagtgagatgaaagattgtttatttcctactgtgcattggtcacaactttgattccacagaagggcagtgtgctgtcctaacagagctgagtgtgtggagtcttaagagcttcctccctctcagcaaatgtgtattaaatgtttctgctttgccagttccagtgccagtgccctgtgattagaaggtgagcttcaccgaggcctcctggtgttgtggagagggagccccgggaatggctggatgcagaaggtgaaggttgagatgcaggagagggagcagttagccttctggcttgggctgtggtgggtggtgccctccatgagattccaaaaaggactagtttggggaggaatgaaattggcatttggagagtgtaagatactagtggagtctccaagcagagctgcccaggagacaggctggccatgaggagagtagcattcacctggatatagatttgggagccactcaccgggagagagattccatctgtgtgtccctgggcagcgtgatcatgggaatactgcttaacctcaaatccttggctttctctgtaaagtaaatgtaataagatctccacagggtttgctgtgagggttgaacgagctcagtgcacatgaaaatgccctatacactcgaaaccagctataaatattggttattattgttaggatgctgacgttcaaatataaattgccaaaatcatttgggaagcattgcatactccattcccacatggagagttgcagggcatgtgattatctgtttgttcatttagtcacaatattgatcaatatagaacaaagcagtatattttaaaaatcaaccaggagcagccattctttgaagtgttatgcaaccattaaaaattaggtttggccaggcgcggtggctcaagc

SEQ ID NO: 42519 - DNA, 1192 bp, Homo sapiens
agaagtcaagaggaaaggaagctagctttgctttatttcaagtttctcattcttttttgccgtcattcttttttgatcacaaaatgcccacctgtgctctagaaaccacgcctccattggacaggctttgggagtactggctccagtgatttgggtggttttgcactgatttctcatccagcaagcaaacctcaacaccttcagactgtccccagcaaccagaatattatcgtttcagagtttcgagggaccatagctgtcagcctgtctgtccaccctgcctggcgctggccttaattggaggatggttgcatttggaccagagcagaggcagatatctcattcctccaatgaaatacgagggcttgtgcaacaggcttcttatctcatctccacctgatcccaggagcctgattcctttccagggagcagcagatgagacttttctctttccaacaccagtgtgtgtgagcgagtgaatgagtagggtttaatggtgattaaaggcgtggtcttcattttgacaccttttgttctataacaagcctgacaaccatgaacctacttcttgccagacagaaaagtcattcccgtgccttgcccctgagcctcctcggaaatggcagagctgcacatgaggaattatgcttcctcgaacagcaacatatgagtcgtgcctcttccctaacaccgctttgcagtttgtgactataatctaatgaatccagctgacgttgatcaggtccttggtgtgggcgaggcactgtgcggcggggagggggcttccttcctttgttcctccctagtgcaaagcagtgggtatcacagacgaaactcacaagccacaaagaggttcccaggtcgagctggcctttgtgcccatgacgtctccctcccagacctgttctccttccaccatccttggttcccagtcagggcatggtggtgggggaagggcagggtcagcagggcatatggcctggccctgtcctgcagtggggttgactgcggtactgctccagaaaaatggactttgttgccagcgttaaaaaatgatgacttggccaggcgcggtggctcacgcctgtaatcccagcactttgggaggccgaggtgggcggatcacgaggtcaggagatcgagaccatcctggctaacacagtgaaaccctgtctctactaaaaatacaaaa

SEQ ID NO: 42520 - DNA, 1045 bp, Homo sapiens
ctgatcaggtgcacagcctaggggatcctctgggccgagcggacctgccagggaagctctcaagtggtctggatagaacaagcagggggcttctgcaacaagccggcctagctccaggacacccccatccaagagggatttgacagatccatcccagccccataacttggttcctttgcagagggatcatttggaatttttttattttattttattttattttattttggtgagatggagtctcactctgttgcccaggctggagtttagtggcgcaatctcggcttactgcaacctccacctcccgggtttgaatgattctcttgcctcagcctcctgagtagctgggattacaggtgccctccacttatgcccaggtaatttttgtatttttagtagagatggggtttcaccatgttggccaggctggtcttgaactcctgacctcaggctatccacccgcctcagcctcccaaagtgctgggattacaggcgtgagccaccgcgcccggccagaaatctttttccatttgccacacttgtgacttagccaagtgtctttttcaaagactaataaagccttcacagcttccgaaacaccgcgctagatctggtagccgcggacaatttggattccttctccagtgggaaagattcaaaactgcaggtttcagaagcctttaaaagcttcttgtctgtgtgatgttcattgaatgcaaattctttcgcaaataatggcctgcaactgctttaaagaaataaactcatcttgctgagcccgggcatgtatgcgtcaatggtgaaaaactgcaaacacacattctgttagcagaatcgtttaattaaaccacattcttgaaatggtctgcactataggaagggatgttgtgtgcaccacactttctaaaaagatatgtaaaaggtccccagaaacatataatcagaatttatcctagacaagtaatttcctctccccatgtctgtgtcctcatctgtaaaatgaggtagtggggccaggacgtctgtaaggtccttgtagtgatgc

SEQ ID NO: 42521 - DNA, 1048 bp, Homo sapiens
agattgtcgtgggacaatgtagataaaaacctcgatatacagcctagtacacaaaggacggtgtaaatattctcttccgtgcttcgtagatttcatttttgaacgctcagattgttctccggcaaaaaaaaaaaaaaaaaaaagtgcttgcagtgagaacctgccctgcactctcaggcgagctgttgggtgcaagtcctgcaggactgagctctgaaggccacccacaccctgggttgtgcttggatgatggcatccctcctggcacaagcgcagatgggcagtcgggagggaacatcagcctgggaaaactagatgtcagtgaaaaatgctggaggtggctggcgttcgcaaaactcagtcgtaaaaaacagcacgttctcagtacaaaatgagcactgttaaaaataaaccgcgcaagaagaaatatatgaatacgagggcatggcaaacagttttgcaaggtattaagatcgcattaatcttaattttattatatattaaagtttctaacttttcaaataatgcagttttcgttgttttaaaacgtctgagaattatagagctatttggtgtggctctcaggcaaggactcctgccatttattggggccctggttttatttaatagccagatgaatggaatagttaataaaagaaatattgctttattccctgacatttatgtccttggtttccaataaagaattgaaattatgaatagttgatggtttaaattgatgttttatgttgaacgctagctataatttgccctctgaggattgtaataccgagaaacagatggtttctcacagtaacaaattgctatgtgtatacacgctatagtcttggctttcagatactttcacctttggttctgagctgctctgcagacgggagaggggggtcgtgcggggagatcagcctctggaggaaggggtttcctgccctgtgggggagacacagacaggccctgggggttcagggaaactggggaaatgtagctagcctggcatggtgtcagtacctggggccaagaggagcgttct

SEQ ID NO: 42522 - DNA, 1032 bp, Homo sapiens
ggtggtatctggttccacgtgtccccaatggcacctcgcctggaacgatgtctgcgccgaccagtgataacaatcgaaatagcaggcgtggctgaccgtgtgccgaggctcggcgtgccgcactggccagccgtgatttcatctcagcctctagcatcctgctggggtaggttaataatccctggatttctcagatgggaaatgttaggaaagtctgtaagcccccatggaaggtcccggagcccaaattcaaacccgagtggagcgttctgttgcttcactgtgctctggtgtgaattttaatgtaaggccctggcatttaagagctcgaagacaccatggaggtggagagctcagccctgtcattggatggaagctgagactggtgagattctcaccggggcttttgcagggagtttgggggaattttgaaggtggtacaggtgttctgaccccaacaccatctcctccagctgggccacacacttatttcctgctcctacccccgtccttcccaccccttggattctgggtgtacagaagagtgggcacatgctaaggtcagccctgggttagcctcatggacaaggtgggcctggagcaggaacccgcctgatagaagacactcaaagtctgtccgtacacgctcggtgtgggcatcgcttgcacgcaggtgcagcttttgctgtgggaaaccactttaaatgaattgatagcctcaccacagtggagccatggcccgactgtggagagactccattgtagagaaatatttgagtgaaaggtttcatgtcagaatagcatctgcatgcaaataagaggcatgggcgggtgcagtggctcacacctgtaattccagctacttgagaggcagaggcaagatgatctcttgaacccgggattttgagaccagcctggacaacatggtaagaccccatctcttaaggaaaaaaaaaaggtttaaattagctgggcgtggtagtccccgtagatgaagttatttgggaagctgaggcaaaaggattgcttgag

SEQ ID NO: 42523 - DNA, 1137 bp, Homo sapiens
gggcagcatagcggatgagttctgggacaccagctaaaatgtgggcaagagaagccagggcgcgtagcagatgtgtgtgtgtatctttatgggattcaagtcatgtctctgttttgttgaccaacttccgctagaattcatagccatctagcctatgtattggatttttatttctgtgatgtctgcttcttttaaaaatatcagttggggccgggtgtggtggctcatgcctgtaatcacagcactttgggtgaccgaggggggtggatcacttgaggtcaggagttccagacccacctggccaatatggccaaaccctgtctctactaaaaataccaaaattagctggacgtggtggtgtgcacctgtaatcccagctactcgggaggctgaggcaggagaatcacttgaacccgggaggcagaggttgcagtgagctgagatcgcgccactgcacttcagcctggggaacagagtgagacttcatctcaaaaaaaaaaaaaaaaaaatcagttagtagccaggcaccatgcacacacctatagtcccagccactcaggaggctggaggatcacttgagttcaggagttcaagaccagtctgggcaacatagcaagacctcatctctacaaaaaataaaaaattagcagggcatggtggcacatgcctggagtcccagctccttgggggaggcaggagcatctcttgagcccaggagtccgagaccaacttgggcaacatagtgagattccgtttcaaaaatatgtatcagtaggttaatctagactttgtttacatgggccaagtggccaaggtcacatcttagagttgtggactgtataatcaggtaagtgtggctacagtcacagaaagtcagggtagaaagaggcttggaggggggtgcacttcttctagccagagctttcctactgagctccttaaagcacaggggaaagtgggacggggttggggggcaacctaaaacccaccccctcccatcttcaaccagtgcgaccctgtttttacctgctcagcagtattgtgcatccctgtaaaattttatttgaaaatggccttctgcagttaaaactacaaaaaaaggttgaaagtggccaacttaaactccactctgtttct

SEQ ID NO: 42524 - DNA, 1078 bp, Homo sapiens
tgcagtgagccgaggttgcaccattgcactccagcctgggtgacagagtgtgactccgtctcaaaaataaataaataaataaataaataagataacaaggcgtgctggagatggccacaggcctccagcagccgcaccatcagagaaatggagtcagagagagctgcagctgctctgatggggggtgggagtatgcaggatcctctgggggtggctcaggcctcccaggggagcacttaccttttcatttcatagtatgtcggagctgctgatgcaggaataaagcaaagtgcctggcactctgcgcgactgctattttttcattcattcatatatttgtccttcctctacacatgtatggcagattaacaaaagcacctccacggcctagctatgtggcccccacgggtttcttagcctctctgagcaagttggacagggctgccttttcctctccctaactctgacttctgtcccagcctcttccatctaatgtcagccctcatccctgcctgcccctcccggtgcagactgggacattctcaggctgtttgagccaccccttcatcctctgtgcttttccctggcatcctggactcccttctccccttcatggtgctcctaggccattcccagcgctcctgttactctctctgtcctcccagccccaaacccgtccagctctgtatccatctgcctggctgccattcatgctgcagacgtagcactcccagagcccatctgtctccacacattgaggcttccagccccctaaccccggtagtggccacagtgcccagtgggccaccccagccaagcccaagagtggccacatgggagcccttcttccatctccctcccctcatccacacattaccaagtcttgccaatttcatctcctgaggacctcagcttctgtcattctctccccattatactgcagttgccaccgttatttctctcctagaccttggctggcattacttggacattcatttctttggaatctcttggccagctttgcacacctttaactagactaagaagatttgaggccaggggcagtagctcatgcctc

SEQ ID NO: 42525 - DNA, 1021 bp, Homo sapiens
aaggcaggaggatcacctgaggtcaggagctcaagaccagcctggccaacatggcgaaaccccgtctctataaaagtacaaaaattagctaggcgtggtagcaggcaactgtaatcccagttactcagaaggctgaggcaggagaatcccttgaatccgggcggcggaggttgtagtgagccaagatcgcaccattgcactccagcctgggtgacaagagcaaaactctatctcaaaaaaaaaaagagagagagagagagaccctagtttagctcttttggaaagcagctgccctgcattgagacacatgtgtcttaagcttgcttctggacgctagcactaaaatagcaatcggactctggatgcctctcacaggcaacttgtccacaaaaccacttccaaatgttttcccaagtgcatgcgtctgacccaggcttctttctcatccgcctcttgtggaaggaagatcgcatcttgagttctaaagatttttaaacaatctcatacctgcagagcaatgtatatttcaagaccattgacattggaaaacattcttgtttaatcaatgactctggtcctgctttagatttctccaaaaatagccagatcccgtgggcacgttgaagctgcagcccattgtgcagaattgcttaatgtgtacctcacctggttttggccttcacacaactgttgctcccttagcaaggggttcatttggttgggttttatgtgcaggaatgctggtgggttgggtgagtattagtatttaagggaaggttttgtttttgttttgttttgtttgtaagagctagggtctcactttgtcacccaggctggagtgcagtggtgcgatcatagctcactgcaacctcaaactcttgggctcaggtgatcctcccacctcaccctccctgagtagatgggactatagggtgtgcatcaccatgccaggctaatactgtttatttgtatttttgtagaggtggggtatcgctttgttgcccaggctggtcttgaactc

SEQ ID NO: 42526 - DNA, 1027 bp, Homo sapiens
tcgaactcctgacctcaagtgatcctcccgccttggcctcccaaagtgttgagattccaggcatgaaccactgcacccaacctgtagcctctttctacaagtaaaataattcaggtgagttcaggcccacgccaggtcttaaaccctggccctctgcccatcttccagcctccaccccttctctctccttacagaatcttctgttcttctgcacaccagcgtggcagacaggttggccaagggccttggacttctttatctctagtacatgttcctgtaaatttaaacctcctcagttgggtaaaagctttggaattactaacattccttttgtgctgcctaacgttcttgccatttaaaagattagcaggcataatttcagtgagccttcgtgactggcgtgcctcacttagcttaatccctggttggtacatgttaaaacctataaagacagcctctccagcacacatggggagcttgaaaatgaaagaaaggttgctctgacctctcagaactgcggacttcttaaaaaagaaagagtgaggtgggcggcctcccttgctgccggtgctagattccatgatatgaaacagcaagggtgcagctgggtgcggtggctcatgcctgtaatcccagcacttcggaggcgggggtgggcagatcacctgaggtcaggagttcgagaccagcctggccaacatggtgaaaccccgtctctactaaataatacaaaaattagccaggcatggtggtgagtgcctgtagccccagctactcaggaggctgaagcaggagaatcacttgaacccagaggtggaggttgcagtgagctgagatcacgccactgtactccagcctgggcaacagaacaagaagactctgtctcaaaaaaaaaaaaaaaaaaaaactgacttggatatgtgcttacataagaaagggagattcaccaagtgaaccatgcatagcatctcttaaatctgtatcatggaattcgtgattgggcctctctttcatatcaggcaacata

SEQ ID NO: 42527 - DNA, 1060 bp, Homo sapiens
cccagaaggcagaggttgcagtgagctgagatcttgccactgcactccagattaggcgacagagcgagactccatctcaaaaaaaaagaagaggcagctaaaatacagtgcagtggcccaggtccatttcagatagaaacagccaggcaaaccccccattctagtctattttattctaagcagattatctcacttagactgacatcagcaaaagctttagtctgtagcacattcaaaatgaggtatatgtgaccaggagttagtagaaataaaacatcgttgtaggccaggtgcggtggctcacacctgtaatcccagcactttgggatgctagggtgggcacatctcttaagcccaggagtttgaccctcgcctggacgacatgatgaaaccctgtctctacaaaaaaatacaaaaattaaccaggcatggtggcgtacgcctgtagtctcagctacttggtaggctgaggtgggaggatgactctagcccaggaggcagaggttgcagtgagccagggttgtgccactgtgctccagcctggtcaacagaatgagactctgtcttcaacaacaagaacaacaaagaaccacctcgttgtattcttaaataagtttaaatcctgaagcgccagttggcgttattgatgttttaggagtgcaggaatgggtgaggtcccaggcttgctttagatagtgataattagcactgactgccacgctgtttttaggaggccttaaccaatgtttcccttctttctccttctcaaatggctgcttcctgacctccgcctcctgctccaggatttgcgcaagcaggtagcgccgctgctgaagagtttccaaggagaggtaagcttttctattcattttctatcctgagccacccttcgtggctaattggtctttttattcacattaaagaaatgctccgggcaaaaggtgctgcccagatggtgccttcccggctgctccgacccagcgtcatgcagattttgcgctctgtgatgtaattttccattgggtccttggtgaaagccctcctggaaaaggaagctatg

SEQ ID NO: 42528 - DNA, 1923 bp, Homo sapiens
cctcttaagaaataacttgagtgctcgtattagagaataaatgaaaaacaatctatgaactaagcatcggctttataaaattacagtaggctggtatgatggctcacgcctgtagtcccagcactttgggaggccaagccaggaggatcatctgaggccaggagtttgagaccagcctggcctaacctagcaagactccatctcaattaaataaataaacaaacaaataaatgtacaacagaataagttcaaatagaatgaaagaaatgacaaatataataataaacataagaatagaaatgaatgaaaaaaacaaagagccaggagagaaacattgcaaaagtcatttatttgaaaataccactgcaactgacaaaccactgtactcatcaagacaaaaaatgttaggaataaaattggggatgacattgcagctgctgcagagattaaaaagataaagggaatgttataagcaactttctgccaataaatactgaagtcgaaaaagttccaaaattctgtaactaccaaaattgattaaagaagaaacagacaacttgaatagctttgtaactattactgaaatatttccataaggtctagacagtttccaagagagttttatcaatcattcatgaaatagagagttctcatacttagcagactccttcagaaaatagaaagagcgagcacttcttaactccttttatgaggctaatataaccttgataccaaaacaagacaagaacagtacaagaaaggaaaattaaaagtcagtcttattggccacgcatggtggcttacgtctctaatctcagcactttgggaggctgaggcaggcagatcactcgaggttgggagatcgagaccagcctggccaacatggtgcaaccccatctctactaaaaatataaaaattagccgggagtggtggcaggcacctgtaatcccggctacttgggaggctgaggcaggagaatcgcttaaacccagcaggcggaggttgcggtgagctgagatcatgccactggactccagcccaggtgacagagcgagactccatctcaaaaaaaaaaaaaaaaaaaaaagtcagtcttattattgaataaatacacagaagtcttttcaaaggtattagtaaattaagtccatcaagcttggtatatcccaagaaggctgttttgtttaaaatgttcaaaacttattaacataaatccatgtcattagcagattaaaggaggaaacaatttcagtagttatatgaaaagattttgataaaatttaaatccattcatgattaaaaactaccaacaggctaggcatggtggtcaggagtttgagaccagcctggacaatgtggtggaaccctgtctctactaaaaatacaaaaacaggccgggcactgtggctcacacctgtaatcccagcactttgggaggccgaggtgggcggatcacaagttcaggagatcgagaccatcctggccaacatggtgaaaccccagctctactaaaaatacaaaaattagctggacgtggtggcatatgcccgtaatcctagctactcagaaggctgaggcaggagaatcacttgaaccagtgagtcagaggttgcagtgagccgggatcgtgccactgcactccagcctggtgacagagagagactccgtctcaaaaaaaaaaaaaaaaatacaaaaacaaaaaattagctgggtgtggtgggtgcaggcctgtacacctagctatgcaggaggctgaagcaggagaatcacttgaacccaggaggcagaggttacagtgagccgagatcgcgccaccgcactctagcctgggcaacagatcaagattccatctcaaaaacaaacaaacaaacaaaaaaccctactaacaaactaggaatagagggaaacatcttaggaataga

SEQ ID NO: 42529 - DNA, 1084 bp, Homo sapiens
agccaccgagcccggccccagcaagaatcttaatgaaacttttgaaaagctgattccagaatttttatacatatgcaagaacaaatggtaaataatagtgaagataatactgaaccactccaagttagaggaattgccctaccagattattaaagctgcagtagttggcagagaatgagataaataaaccaaaggaacacaataaagaaatcagaatctggccgagcgcgttggctcttacccgtaatcccagcactttgggaggccaaggcaggaggatcacttgaggtcaggagttccatacaccagcctgaccaatatggtgaaacttcgtctctactaaaaatacaaaaatcagcctggtgtggtcacgtgctcctgtagtcccagctacttgaaaggctgaggcaggagaattgcttgaacccgggaagcagaggtagcagtgagccgagattgtgccactgcagtccagcctggcccacagagtgagactccatctcaaaaaaacaagcaaacaaacaaaaaaaaaaaaaaacaccggaatctggcctatgcatatatatagaagctgaataaattgcaaagatggtatggatcagtgaggaaaggggggacttttcatggtcctctgacgattggcaaatccttatagattaaacgaagttgagaccgagtgcactggctgctatctgtaatcccagcactttgggaggctgaagcaagcagttcccttgagccctcgtgttagagactaacctgggcaacatggtgaaaccctgtctgtacaaaaacttacaaaaattagctgggtgtgatggcacacgcctgtagtcccagccacttggaaggctgaggtgggatgattgcttgagcccacaagttggagacttcagtgagctgttgatcgcgtgccactgcactacagcctggctgacagagcaagatcctgtctcaaacagacaggcaaacaattaactagagttggagccctaccttacaccgtgtggaaacacaaattacaaggagagtcttagatcaaagctttaaactttatagaataaaatataaaagatgatgactt

SEQ ID NO: 42530 - DNA, 1029 bp, Homo sapiens
gtgagtgccagggctctgcagggatgggcttgcctggcagggagcaataccaaggaagttagtagggcccgggtcatgccagggccttgtaggcagaacccttaagtctctttgtagggaccctttggtctcccctttgaactaggccctttcaaagacgtacagtagaaagcaaattccccatgggcaccggcaggatgatttgacagattctaatcaaataattggggaaataaagttgggtgaactacagcagtctatgaatgagttaaaagtgactacgagtctgctgcccatcttgcagcccatatctgttgagctgtaacatatttaagcattcagatctaaaggccattgctaaataaagccagggcgtccatgtggttcgctccaaagagcatttcacagggagccagtccaggcgctgccgcccaccacctctgtgaccttgggtgagtctcggggcctctttctgcccgactttgctcatctgtaaaacgagtgggttacccagatcctcccccaaggagctccgtagctctgaaacctcatgagactcactggagcagtactttggttgactatcgctagcagaaccgaaaaggacattctccagcaatgtaaatctgttcaaaaatgggatgagctggctgggcacagtggctcatgcctgtaataccagcactttgggaggctgaggcgggtggatcacaaggtcaggagttcaagaccagcctggccaacatagtgaaaccctgtctctactaaaaatacaaaaaaaaaacaaaaataaaaaaattagccaggcatggtggtggcaccagctacttgggaggttgaaacaggagaattgcttggacgaccacctgccagggagattgtcacctcttatccattctttttttttttttttttttttttttttgaaatagagtctctctgtgtcacccaggctggagtgcagtggctcaccataatctctgcttcctgggttcaagcgattctcctgccttagcctcctgagtagct

SEQ ID NO: 42531 - DNA, 1032 bp, Homo sapiens
tcctgcctcagcctcccgagtagctgggattacaggtgtgtgctaccacgcctggctaattttttgtatttttattagagatggagtttcactgtgttagccaggatggtctcgatctcctgacctcgtgatccgcccgccgcagcctcccaaagtgctgggattacaggcatgagccaccgcgcctagccgaaaggttcttttcaaaatatgactgctcattgacagtgcacctggtcaacaagagctctggtggagatgtacaagatgaatgttgtttccatgcctgctaacacaacctgcattctacagcacatggatcagggagtaattctgacactcaagtcttattttttaagaaatacattttgtaaggctatagctgccatagatggtgattcctctgatagatctaggcaaattaaatagaaatcctttccttctggaaaggagtcaccattttagattccatgaagaacatttgtgattcatgggagggggttgaaatagcaacatgaacaggagtttggaagaaatggattccaaccctcatggatgactttgaggggttcaaggcttcagtggaggaaggaactgcagatgcgggggaaatagcaagagaactagaattagaaatggagcctgaagatgtgactgaattgctgcaacctcatgatcaaacttgaatggatgaggggttgcttcttatgatgagcaaagaaagtggtttcttgagatggaaactactcttggtgaagatgctgtgaatattgttgaaatgacaacaaaggatttagaatattccataaactgagttgataaagcagtgactgggtttgagaggattgactcctattttttaagaagttctactgtgggtaaaaatctatcaaacagcaatgcatgatacacagaaatcttgtgttaacgaaagagtcaatcaagctagccaatttcattgttgccttaacaaattgccacagtcaccccaagcttcagtaaccacaaccctgatcagtctagcagccatcc

SEQ ID NO: 42532 - DNA, 1052 bp, Homo sapiens
accatgcacccttgtgcccctcaaaatctcaccccacttgattgtccagctgcgtcacccacagctcctgcatatgtatccgcgttcccacctggcagactctcgtgggtcccctatgccccatggtgtgttgtagccgtgttggtggactcttaatctggactccaggaatagagcacaagctgacatgcaaatgagtgtcttaaaacagaacacataggccagacgcagtggctcacgcctgtaatccccgcactttgggaggctgaggcgggcagatcacctgaggtcaggagtttgagaccagcctggccaacatgataaaacctcgtctctactaaaaatacaaaaattagtctggcatggtggtaggcacctgtaattccagctacttgggaggctgagggcaagaatcgcttgaacctgggaggcagaggttgcagtgagctgagatcgtgctactgcactccagtctgggcgacagagcaagactctgtctcaaaaaaaggagaattttatgaaattctttgctcctgggatttgaatgtgttcgtccgtttacatgcagcatcttacccgtccacctgggtgaaatgctttttaagactctgctctaaggtcacaactttactgcctgaagttcccttctgcatgtccccagggatttaattacttgttaattacatacctgtttccctcctagaccctgagcttctgggggtaggaactgtctcttcccacccacctctgatccccagcagtgtctagcacatggccagctcttaagtcagcatttggagaagacaaaagaccaggaagggcacgccagaccattctctatggaagacccacccagtgttccctgctgtatagtgaatggctccatactcccaaatctctgctcctcccttgtttaccttcatgaacagggtccttttgtgtttgcaggcatttcctctaagaggctgaagcccagttgtcaagcatctcccttgctacgggaattcactagatgtgtaatgctttgtaaattacctcttgacaaatgttga

SEQ ID NO: 42533 - DNA, 1111 bp, Homo sapiens
gcttctctgcaaacatctgattggttgcagaaagcaactaatcaaaggtactttcaatttcccatctgcagggcagaaaaggtggaggtttgcaaaggaagtagacgctggtccttttgttacttaggcgtggcaagtgggggtttttccttcgatttagttctaggaagtcagggtgaatcagcctttggttccctgcctgcagaccctattttcctgcctcaagagcactgtccctcgggcatcagcagcctggcgggcatcactggcattttcttgtgcataaggtagtgactgagaattttctctctggactatgtcatgtccatactgacgcagggataaagaatttacagaaaaagcatgacctgggctttgagaaattttattttgtgtttcgaaagagttcattctttgactttttgttggttcctcaggctcaggaaggttctgctccattctattccaagaagttcttgctaccacttctgggagcaggatcccagaaggggagtgttttccagctgagaactttgtccagttggtgatttagtcggaagaagactggcttacttcatctttgccagagacccaaagactgtttagctgctgttttctaaataatatgtaatctcttttctttcttttttttttttttttttttttttctgagacagagtcgcactctgtcaaagaggctggagtgcagtgacgtgatcttggctcactgcaaccttcgcctcccaggttcaagcaattctcctgcctcagcctcccacatagctgtgattacaggcacccatcacgacacccagctaatttttgtactttagtagagacggggtttcgccatgttggccaggctggtctcaaactcctgacctcaggtgatccgcctgcctcagcctcccaaagcgctaggattacaggcgtgagccaccatgcccagcctagctgctgttttctaaataacctataatctcttttcaaaaagtcaaatttgtacctcaatttttccctagtgaaattttccaactgggcagtcactttaaaacattgctaggtttctttctctgcagttacgttctgtgttaatttcccatagaaaaaa

SEQ ID NO: 42534 - DNA, 1043 bp, Homo sapiens
ctacagtctgcagttcacggtggcatgagtctaagtgcttacagggcggccagactcttcctggctaatcgccaccgacccctctggattaacctgttgagacgccacttcctgacagagaggtcttcctggcctccccagctggtttaggggacccttcccatgcacacacacaccctggccggggaccctgccattcacttcatcataattccttggtaactgtttggccgagagactggttcagtgcggttttgtccctatttcctttatatccaccccagtgcctgccatgtggcagaaactccataaatattgctaaatgaatgcagaaattaatgaatcaaattatttcttcaaaatgctgagtgtttttttggtctcaggctcctactgttcccactgaaccaccctcccgaggttgaagcttcccagtgagggcgagcactgcagagcactaagacaagtcaattgcaggagaacagaatgtatcttttattgagttgtagcagtttaatagctgtctgaactctcattttactttgttgtcattctataaagatttacatgcctgcatggacatttatacagcacttagcattcggagttgcccaaaccagcacatgtgcatctgaggacttcggctctggggccggcccttggtgtctgggatctgtgtttggtttaccagacgtcccgccggcgccccaagcccagcacacagggtaggatctccctccaccccagcttatcccccaccatccccacccgccccacttctcccttggtgttctggctcctccctcttcttcatcttccaccttctataatttccttcacattaaagacacaaaggccaggcatggtggttcacgcctgtaaccccagcactttgggaggccgaagcaggcagatcacctgagatcacgactttgcaactagcctggccacatggtgaaacctcgtctctactaaaaaaatacaagacattaggtgggcgtggtggtgggcacctgtaatcccagctacttgggaggctgtgg

SEQ ID NO: 42535 - DNA, 1011 bp, Homo sapiens
ccgtagactttcttgactccacttcgattgcttcttccaaaatgcacacactattatgaactattttttttctgagaaagtacttaaacccacctaaaactttattaatcatccctcagttacaggactaatttaagactcatcaataagatgatatgatattttaccattgatttccatctccccccacccttttttttctttaactggtactacagaaaccaaagctcttcttttcagcaaaatccattgatcctcctcagcctaaacgtttaaagttcaatttaacatttagggagtaaaaggtctctgaagggactcataaccattgattttgtgtcagagttgaagagctaaggtttaaaacacaccgatcctaccaggttatgagagccttgtacctacagccatatggaattgtatgcttctcttactgtaggtttttttttttcttttctgcagaggttacgataaaagcacttaaagagaaaatccgagaatatgaacagacactgaagaaccaagccgaaaccatagctcttgagaaggaacagaagttacagaatgactttgcagaaaaggagaggtgagcatgacttccaggcacacacagactgacatagcatttgcccctgaacttcacatcatcagacatgttgataaatggatctgcaaaataagcccaggttgtaaccccaaatctataaggggtaaaatgtttcaaaaatgatattctggctgggtgtggtggctcacgcctgtaatctcagcactttgggaggccgaggtgggtggatcatgaggtcaggagttcgagaccagcatgaccaacatggtgaaaccccgtctctactaaaaaatacaaaaaaaaattagccaggcatggtggcgcacgtctgtaatcccagctacttaggctgaggcaggagactcacttgaacccgggaggcagaggttgcagtgagccgagatcgcgccactgcactccagcctgggcaacagagtgagact

SEQ ID NO: 42536 - DNA, 1021 bp, Homo sapiens
gtgtgcatgaagggagagagactcactcggttagatgataggcatggctcagagataatagattcattcattgattcaacagacattcacagaggcttcctctgtgcctcgccctgtgcaaattctgagactgttacggctccatggggagacaggccattgcaatccagcatgcccagtgctgcaatcaaggggacagggcgctgacggtcagcaggtcagacagggagcctgcaggtggcaggcagggcactcccattgggatagtcagaagaaagtttggcagggtgcagtgactcacgcctgtaatcccagcactttgggaggccgaggcaggtggatcacctgaggtcaggtgttcgagaccagcctggccaacatggcaaaaccccatctctactaaaaatataaaaatcagctgggcatggtggcgtgcgcctgtaaccccagctactgaggtggctgaggcaggagaatcgcttgaactctggaggcagagattgcaatgagccgagatagcaccactgcaccccagcctgggctacagagccagactccatcgcaaaaaaaaaaaaaaaaaaaaaaggtcaatattgggcctatttgcagaggtgcagttcctaggctcatagtaccggcagggtttccacgcctgggtttgaatgagccagagcggggaaaggtagctagagactgaaggtgagggccccctcgaggggagccgtggccttggggagggaagagggacccagggcagcgccagggaccccttaactgatcccctctctcctcccaccagccaggggagctggggaagggcatagtacatccctagcatcaggggagcgcagggaaagaattgtcgaggaagccttcctaaagagggtggtatgggattcgggattggaagatgagtcaagtcaggttttgcagaggtttgtgaagatgcaagcctggcgaagcctgtcttggggaggacctgccagaggttccgaacgatttgcctgtggggtaggatggg

SEQ ID NO: 42537 - DNA, 1025 bp, Homo sapiens
gggattacaggcgtgagccactgcacccagcatgctaggtggttttgaagaggcaggaatgggatgtgtgtgtatagcacctggcatggtgagagtctgaggctaagctgtcgagagatagaagctattcccagcaagctcagagcagggcgtggtatgcgtttctgaaattaacggccttggaggaaattgactttcaccgcatcaccacgacggactgggcccacattgtctgtctgtcgtggggagatgtcacagggtacccatccctctcccgttttggagagaagcccgcaggtctgtggtactgaggctgctccgagaccccggtttatcgtgagcagtcatcgccatgcgtcagctgggacagcacgggctgactgtggcagacaacggcagtaaagttttccatgtgtaggcttgaagcaaaatgtaattagcctttatgtgcagaacaagggcccattgatgaatacagctggtctttgttttgtcctgtcgttgagagtgggaggtaaaagtgttcttcttcatgtttattaatgcaagattccttagacaaatggcaagcacagtttaatatttgttggaacatgggggctttgccaaaacagttgttgtgtaagaggattgcaaggtttccgattataaccatttctgggttaaataaatgaattatttctgccctttttttcttttttgaaatttttttagagtcagggtctcactgtgttgcccagagtggtctcaaactcctggcctcaggtgatcctcccgtcttagcctctcaaagtgctgggattacaggcatgagccactacgcctgacattcttttttctttagttaaaaacatagctccttctcagatggtcaccctgtgtacggatcttcccgcttctcttagcaaatggagatttaccaccctaatagccttaaccttggagactctagcaaaggaacgtgctgtggattttaacatctaaacaattccttgggatggatggccgtggaggtggcagatccc

SEQ ID NO: 42538 - DNA, 1066 bp, Homo sapiens
ccaaagaaaggaaatggctgtgttgcaggcatacctgcactcacacgtttatcacagcgctgttcacacagcagcctaggtgaggaagtgacctatgtgcccagcttcagatgaatggatgaagaaaatgtgtagatccacagtggaatatgatggagccttacaaaaggaaatcctgccatttgcaacaacaacgtggattcatctgggggatgttacattaagtgaaatgaaccaggcacagaaagacgaataccacaagatctcactcatgtaaaacgttgatcacataaaagttaagaagaatggtggttaccagggggtgaggagaggttggttaaatgatacatatttataggtagacaggaggaataagtttgagagatgtattagacagtgactatagttaatgccggtatattgtaaaattggttagtagaaattttttttttttttttgagacagagtctcccctctgttgcccaggctggagtgcagtggcatgatctcggctcactgcaacctccgcctcctgggttcaagcaatttttatgtctcagcctcccaagtatctgggagtacaggcacagggcaccacgcccagctaatttttgtatttttaacagagacagggtttcgccatgttggccaggctggtctcgatctcctgacctcaggtgatctgcccacctcagccttctaaagtgctggatttacaggcatgagccaccgcgtctggccccattttttaagtgttgactgaaaactacctcaaaagaccggctttatcccacactctgtacaccacaggcttagcacgtcgtggctctccaggaactcttgagccttccccatgatgatgagtgggtcagggttaccgcagagctgaacggcctctgtagcgttcagcctgcagcctgcccaatgaggacgtttgcgctctggaaaggtaaactcaggatgctgttggctcctaagcagaaagcaggcgccacccagccttcaagtgcttcaacagtgaagagttaggacggaggcccagcctggaacattcacgccaccttct

SEQ ID NO: 42539 - DNA, 1028 bp, Homo sapiens
gtttttttttttacctgacatgttgtaaatatttcttgcttatcattaaatattcttcagaaacacagtgcatactgcataacattccatcacgtaggtgagccctaagacttaccacttatttccctgctgttcaggagcctgatttattacactgctttcattgccctttggggtttaatctggggagctttgtccctgttctttctatgccttcatgttctgccagtggctgtggcatctttttcgtgttttttgtttgtttgtttgtttgttttgttttgtttgagacggagtcctgctctgtcacccaggctggagtgccgtggcatgatctcggctcactgcaacctccacctcccagatttaagcgattcttctgcctcggcctcctgagtagctgggactacaggtgtgtgccaccacgcccagtgaatttttgtatttttagtagagacagggtttcgccagttggccaagctggtctgacctcaggtgatcggcccacttcagcctccagaagggctgggattacaggcgtgagccaccacgcccagccggctgtggcatcttgaggtagcctcccaaggccatcatcagacaagagcgtttggaagcccagaattctccaagggctcatggcagtactggcacggggcctctgttcctagactgctgctccatgacgtttgtagatgcctctagtgaaaagtcagggacagtggatgatatgcacggctcagagaccctgactctggtcccatctgtccccaggtgtgaccccacaaagcccctccctcggccgcagcaccggattgggccgggtgccaggcaggacggaggagctggcccttttgtcagcctcttgcactttcttgcccagttctacttcccagagacctggatctcggatgctgtcccccagcagggcctgtttgtggagtggccttcaggcagggctgcatccagggcaccgggcacagcatgagtcacggtgggaagaacctgggtcgcaacatcgtaaagac

SEQ ID NO: 42540 - DNA, 1041 bp, Homo sapiens
ccttgggtgtggttcatggtaggtgccccatgggcgttattggtgggagacctccctgtctcagtctgagctgggcccatcgccatcagggcacgacagccacagcaggtgcctttgctgggagtaatcttgccctggctcgcatgagactgcagaccagcccttctccgtaagttcaggcgtttgtgctccgatcagcttttcctataggtttgtcccccaccccttgcccaactctttgaccccccgagttaaggggattccagacctagagccaagtgaccttcctcagagcctggccctgtctccaccgcttcagcaacctgctctttctggacagggtccagcgagccccacctctgtccgtttcctctaccccctgtgctaaggaagcctcacctgcagtgtaggttgtggtgaaaaatgtccccccttaaggacagagcaggtcatcacgtgcagccctggggtagaaggggagagttcgcttgatcaaacctaactggagcttttcttttaaagcaggaagaattaatctgtagatatttctcctttcaatgccaaagaactttatgatctggtattgagactattggtgggttttttttgttttctttgtttttttgttttgttttgtttgagacagggtctcgctctggtacccaggctggagtgcagtggcacgatctcagctcacttcaacctctgtgaccggggttcaagcgattcttccgcctcagcctcccgagtagctgggattacaggcgctcgccaccatgcccggctaatacttgtatttttagtagaggcagggtttcatcatgttagccaggctggtttcaaactcctggtctcaagtgatccacctacctcggcctcccaaagtgctaggattacaggcgtgagccactgggcccggccgagactattggcttatgaatcaagtctaagaagatacactagtctttgaaggccgctctgtatgtttttccaactgccttgtagatatactttgttttaacagctcgttttaacagctcc

SEQ ID NO: 42541 - DNA, 1031 bp, Homo sapiens
ctggtgcaggtggcaggcatctggaccaacacctttcccatcaggaaaccccccaggaggagcaatttactagctcactggcatacaacattcgttttccctgggtgtgtagttagaatgttctacggagacctgaagtgctcgtttattgctcaaccactgtgctcctgttatggagaagtagcagaggggtcggcacctgtcagttatgtccgagcctcattcacacctgtttgttgaacatcagggcactggcataaatactcactgtcccaattggtgacagtaaaggatcagatctcttgagacttcatggtcaataagaagccacagctttacactttgaactgcatgtgaaaccccgtcccgtccgggggctttcagcaattcacagcctttttgtggtgaaaaaaagtggcccgcccaccacccctccggggcctcctttctgagcagtggtgatccgagttgctggtgggtctcaaactcctgggctcaagctatcctctcgccttggcctaccaaagtactgggactacaggcatgagctactgcgcccggctttgaagccagcatttctttactacctacgaggcctgctcagagtccgtgctcaaaaagatgtattgaatgaatatgggctttgacgcacaggctggagcgcagtggcatgttctcctagcccacagtggggctgggagggagtcattgaagtgagctgccctcttcctgttcacctgcctggtgtttatgtcacaagactgccctagtggaggactctccaggttgaggttaggggttggaaaccacagctgaccctcaccacggagagtgggtctccatggaggccttggccactggtgcagcatcagcgtgggacacgtggtggtcagcatttggtctccagctgtggtagctgttcccgacctccttcctgcagagtcagtgacatggagttacctctgggagtcgagatgttcactgtaattgcatgctgcgggtagggcagcagggccttagcccatcatcag

SEQ ID NO: 42542 - DNA, 1035 bp, Homo sapiens
tagctgggactatagacatgtgccaccatgcccatgatatttgtgtttttagtagagacggggttttaccatgtcggccaggctggtctcgaactcctgacctccagtgatcctcccacctcggcctcccacggtgctgggattacaggtgtgagccaccgcgcctggcccctagttgtaattattcacagaaattacgctccttaactttgacagaaccacttgcatttcagaatatagcacaggaaaatgaataccaagtataaaaattatcagaggtcaggcgcggtggctcacacctgcaatcctggcattttgggaagctgatgggggaggatgacttgagttcaggagtttaagaccagcctatgcaacacagtgagagaccttgtctcttaaaacactagccaggcatggtggcatgcacctgtggtcccagctacttgggaggctgagctgggaggattgcttgagccagggaggtggagggtgggtacagtgagccgtgatcgtgccactgcgctccagcctggacaacagcgagatcctgtcgctaaaaaaaaaaaaaaaaaaaaaaaaaaaaattctcggggaaaggagccccaggagggcaggtcggggagcactttcactgacaccccctttattaccctctacatctgtgtgtataccaaaggccaccaggtcatcaagctgtagtgtcaggccctggtccttggttgagacaagatgcctgaatgtttcactgacaggggccatgctggggaaatacacagtgtggttctcccaaataacccacactttgcagtaggtcaagttaggatgagaagcatgtccccagctgaagggggccgccctgccacactctcacccctgtttctccatgcagcagagccggcccagccttcctccgcatccggcagcgggaactctgatgacgccatccgctccatcctgcagcaagcccgccgggagatggaggcccagcaggctgccctcgaccctgccttaaagcaggcaccactgtcccagagt

SEQ ID NO: 42543 - DNA, 1071 bp, Homo sapiens
acgatctcagctcactgcaacctccgcctcccccattcaagccattctcctgcctctgcctccccagtagctgggattacaggcacccgccaccatgcctggctggtttttgtatttttagtagggagggggtttcaccacgttggccaggctggtctcaaactcctgtcttccaagtgatctgcccgcctcagcctcccaaaggtcttctgcattttagactcagattgagagtggagagacagatacaagccacctccagcaaccagccgccacatgtcactttcacatgcctggacctctcagggctcggacagggctttgatctcagggggcctgcctttgtctgtagtcacagcctggagcacagagggacacctgtaacagtagtgagcgcccctgtttagttctcctgggggttcatgatggcacaaatccacgccactggcttgcaaggcgcactggaagaaagaactgtacagcctctgagtttcgtggtggctctgcctccgccagcacccagaacaaaacagggagatgccacagcagccggcaccacactcggtttattagccagacagccatgatgttgaccttgctgtgggttaaaggacacaaaacctgaagagaaatctgtttatcatttgggaaattcatgccatccttgacagtatctggtgagcaagatggatgatctgccaggccggcccctcgcatgggtgaatcacgccatccttacggtacggttcctctgccggcttcagacacaaaaataacatttgtggggttttatatccagttctctggtgacccggggggtgagcagagagaagaaatctgatttgtaagattcacattgccctaaagatttatacggaccatttctgcctcttacgcttgtctcttctacatctttcaaaaaccggtttggcatgtgtttttctctttgtaacctgatttcccaggtcaaggacacagccttatgcgatggcggaagtttgtgccggttcaggacgataaacgggttgatcgcttaagttgcaaatgttttatttgaggttttgctctttc

SEQ ID NO: 42544 - DNA, 1862 bp, Homo sapiens
gcaagtaattgaggcaaaagataccagtcgacagcctccctggggtagatcccttgtacctccaaagtacaaatacctccctgctcagtttccttcctgtcgccatctttgttttcttcccattgaaaaaccatcctgtctgatgtggacgttcaggtctgctggttggcggtccgggcccagagtgcagcagagctctgggttaaatattcctttctggccaccgcccaagcccaggtggccagctctcataccccatctccctccttggccagggccagcatcaggcgtgcagctcatgaccagtttacacaggctgcaaagagatcgctgtgggcctcggctgactactttaagattatgccacagccaggccctaaaaagagaggggaacaggagtccccaggtgagctctctgacgggcaggtgccttcccgactaaggttggactggatgactttgttcctcctgcatgcatgtcctttgatgcaagggtgatcaatgaactctgttgacattctatgcaatgtttttcattcctctgattttagcaaagcaaatcttactgaaaaatagcagagccaggggaacagacgcatgtccttctgggagtcacacaaaagcagagagattttgaactgaggggcgacagcctttgccttaaatgcagtatgacaggcgcttcttggcagaccagtaaaaacaaaagcccatagaccttactcatcccaaggccgacaagccagctgtacagggcgagatgtagcaacacggggcatgagcggtgggcgtgctgggctatttgctgtggtactttaggctggaggtttggctcctgtgctgccggtggggggccctgtccctccccagatgtcctccctcttcttcacactcctcattgtcccttctacctcactaacctgtcttctccatctgatgtcacccagaaccacaccccacagaactgtgaggcacgtgggctggagagagcagaaaagctgccagcgcagcagacacgaacatccctctgcctggtgggccggctttgtgtgtctctccttttgtgagcgcaacacggacaaacagctgtgctctgcaaggcacacggatgtttcccttccacctgttcccaaagctccagcagctgtttcttttgcaggcagggcgtggtctcggggctccgagggtcttgtctttggtccgccttcctttctgtccagtcctgctcagctgttaagatccatcatggccattatccttgtcccggactgccccaaagttcccagctggctttggggaacactgtagctcttgggtgtctcttgtctctggcatggttttagcgtcactgcgaacactcctttgcaaacatcaaacatctcaaagacggaaaaggatagatggcttcctccagcctacacgccccgtccacagtggcatcaccctcttatcccaaaagaatatgccagttcccatccagcaccgaagaaaatcagctcctggggctggtggttggaggtgggtctgtccactgtgggggccaaagtgttcccctgctggagacagtttgcaagtaagaacctaaggatggggacagcatcctgtgcttgggcattgaccagccaaagctcacatttagaaagccctcagtgcttctgtggtttcacctgggcatcgacgacattagggaagcctttgtgaccacaagggcagggcttgtgccctgagtggcgaggtggtgacctgaggccagtgtgatgtggttggatctcagcgtgtactgaatgccagtctggccggcacactcgaacgctaagagaatggtccaatttgatgatcttatttctatttcgatcaggttt

SEQ ID NO: 42545 - DNA, 1050 bp, Homo sapiens
acagcacaagacgcactcacagggtggcggaatcttccggaaaactctctataagctcagctccccccaccccacccccactctagcgttttgtcacgtcttacattttagcagtattttatattttctgtaacgcaccaagtcttagatctttctagagcttgtttgttcatcctcacaatcacagatttttttctccaatcctcacagagacccaattgaccaaaaaagaaaaaaggaaaaaaaaaaagtcgtcttttttttttttttttgtacaaatcgctttgagatgcctctggtgtgttgctgtgtgacatctctctggtaacattttatttcttgctatttgtttttctacattaagagtcaaagttgacctggctggcgtgggggtgggggaggcacccgtcggccccttggtgttgtccctctgtctttggttagccatacgatgtttgttctcagcactgtacaacggtccctatataatacggagaagcaatatcactgtatgagactcacaccatgtattattattcactagcaccctaggtgtgataattgaagtaaatatcttttatacaaacacaagaatgtgtgggttgtttttatttaaagtgctctggcctgaggacgagcagcaaacactgtcattcgaggtccaaagggcacctcaagaatcgccgttcccgaggtcgtcccctttgcacctgtccgcaggtcctcgggcgtgtggcttccgggcacacagaaaaccgtgtggttctaggatacatggggatctcgggcactgctctgtcaatctgcatctggttcacaggaagggcttcgccagggcctgcgttcctacttgctgttgtcaccagcactgtttgcctacccttgaaccaagcccttaccctccctggcgtccgcttccttttctgtaaaatggagacaccatctcctgtcatataggcttgctgtggggaaccaggaatggtggccagtgctggtgcggcactgggctggtggtggcagccccaatcgatggcacttgggcgaccagga

SEQ ID NO: 42546 - DNA, 1083 bp, Homo sapiens
atggagctaaaaaaataacatgggtgaacaaggtgccacccacatgcaagcttccttcccatgtcatgtaatgcctctcctcatctgctccatcaatcaataaaggcataatcactcctgtgatacctttaagaaaagaacacactctctcaaagctgggtgcagtggtgcacgcctgtaatcccagcctcctttgggaggccgaggcgggcagatcacctgaggtcaggagttggagaccagcgaaacccatctctactaaaaatacaaaaattagctgggcgtggtggtgcttgtctgtaatcccagctacttgggaggctgaggcatgagaatcgcttgaaaccaggaggcagaggctgcagtgagccgagactgtgccactgcactccagcctgggtgacagaaagagactctgtctcaaaaaaaaaaaaggaacatgctctctcattcaaggttacccttctatcactccaaggattcactccataatcttatctttcttgatatgttacattcactaaaacgttcacatcaaatcaagtttgtagacacttgtccttaccaccttacaaaaagtgagatggtatcaacagaggtgagacactgctttacctgcatgtcacttttggcagctttcacagcattgaaaagatcattggctggtggctctgactgtttccggctatgacgatgtaccactcgggaccctttctctggatgtttgccatctaatatgtataaaaagatcagaaatatgaaaaaaaggtaacaatgacattaacacttggtctcatcattatcacacaagtaggcttatgctgccacttccatggcagagtctgagttagtcctgaaataattgatttttatattatgaagtttattaacttttttcccttaaaaaaaaaaagtccttgagtccccttcctgtatccctatatcctaacgtccttttctcttcttttctcttcaaaatttctcttcttcctatttccgtcccttaacactttgtaaatcttgtccttttatgaaccatatcacctgaacctcttttaggtttttttttttttttttttttga

SEQ ID NO: 42547 - DNA, 1030 bp, Homo sapiens
gctcacgcctgtaatcccagcactttgggaggcccagggaggtgaatcacttgaggtcaggagtttgagatcagcctggccaacatggtgaaaccccgtctctactaaaagtacaaaaattagccaggtgtggtgtgagtgcctataatcccagctactcgggaggctgaggcaggagaatcgcttgaacttgggaggcggaggttgcagtgagcagagatcatgccactgcactccagcctgggcgacgagtgatattgtcactgtctcccccttgctaacctcctaggtgcttaggataaaacgtcaaatatttaacatggcttcacagacatcttgtatcatttggcccctggctaccttacctcacccaatttcctcctttgctctgtactctagctacactgtccgaggagttcctaaaacatcacgctgggtccgaccacaggatcttcacatgtgctgctccctctatctgcatcgctctttcctcttctcttgtttgcttaactcctatttaccctcgggcttaatcagcactttctcacctctcctagtctgttgctcttatttaagatcaaacagcagagaaatgtgaagtccactgacttccgggtggaacagggttcagtatgccaattaaattattgggtgctggctgggcacggtggctcacacctgtaatcccagcactttggaagggcaaggcgggtagatcacttgaggtcaggagtttgagaggacaacatgatgaaactccatctctactgaaacacaaaaattagctgggcttggtcgtgggcacctgtaatcccagctactcaggaggctgaggcaggagaatcacttggacgcacgagggggagggtgcagtgagccgagatcgcaccactgtactctagcctgagcgacagggtgactccatctcaaaaaaaaaaacaaaaaaaaaattaggtgctgactgaaaataaatttgaaagcaaggtgtatgacagggaaggctactacctgtgtaatattctcttactta

SEQ ID NO: 42548 - DNA, 1081 bp, Homo sapiens
acagtaactcttcactgtaataaaaagttaaattcaccaggaagataaaagaattctaaatttgcatgtacctagtaatattgtcttaaaatacataaagcaaaaatcaacaactctataagactaaatagctaaacgaaaaatagtgggaaattttaacatacttttcaacagaaactgataaaatagttagacaaataattagtaaggatatagaagatttgaacaacttaatctatggacatatatggtcacagtgacatgatgaagctggcttgtatcctctcatgagaaacaatttttaaaatttcaagacttttgtgaaccagctgatatcgcgctagtagcttgacattgaccactatgggaatatttatataatagtatgataggcaaatgctaccaatcacagttttatccccttcccctctgaagccagttagtttttttactttttctttttttttgatagagatggaagtcttgctatattgcccaggctgatcttgaacccctggactcaagccatcctcctgtctcagtctctctagtagctgggacaccatgtctggccagttgttaagttttgtttgtttgtatttgagactgagtctcgctctatcgcccaggctggagtgcagtggtgcgatctcagctcactacaacctccatctcctgggttcaagcgattctcctgcctcagcttccccagtagctgagagcacagacgtgtgccaccacacccagctaatttttttcttttgtttttttttgtatttttagtagagacgggatttcgtcatgttggccaggctggccttgaactcctgacctcaggtgatccacctgcctcagcctcccaaagcgttgggattataggcatgtgccaccgcacctggccatgctgcatcttctttgccctaaatgaccccttggtctgaagagatgacataggagatcccttccccacaagtcagatgcattttacaagcccttgaatgatggtgctggcagaggtactgcagatagaaaaggccagtccatttctggtgtagtaccaattagagtaagacaaatcaat

SEQ ID NO: 42549 - DNA, 1022 bp, Homo sapiens
tatatctgctgataaatatgtccacaatttagaccagacttagacactgaagttattaccagctccttcacacccacatgccttaactctctcttgccttcatgcattccttcactccattcattcgcttaactttcatccagcagatatctgccaagcaccagctctgtgacagacactgaggctgggggtgccagggagacctttaccaaccggacagacactgccccgcactcctggctctgtggctttctgatagtccgtggcctcacatgttcatttattaagtgtccttttattgattgagtcttcattctttctcttaatgtccttattcattcattcatccatcacttgctcatctcactgacacgtctattcagtcttcatatatgttttcattcctttattctccaagcatcctggaagtacccactctacaccatgccagggttagatgctgggattctggcccagcccaccacactgccaagcccatggggacacagatggtgaggacatagtggtaactacttcaccagttattgggattcagagctgggagagcaccaagaagggagcaattcacttcctggaagtgaggggtgggagaggcaatctgagaaggcttcttggaggaggtagcattttggccaagttgagaagcctgtatgggagttctccaaggaggaaaagatgctttgttttgtagacaaaaaccttcgttctgtggagtgtttggagaaaagtgaggtactggttgctaatgtgtgtgatcctgggtgagtttgtgtgcatggccccagccaggccaagccctccccaggttccagtgacagacctgggccactaaggacccttaattccaccctgagctcctagaaaaccacccactattgggcagccaggaatgacctttggagaacaaacacttcaccctccaggtaccatccacttgtccacctgttcatcctcttggggactcagtgggagggcgaccctgtccctaggagcccatgtcc

SEQ ID NO: 42550 - DNA, 2496 bp, Homo sapiens
ccctgcatgtgctcagaagttatatcaagctgggcgtggtggctcatgcctataatcccagcactttgggaggctgaggcgggtggatcacctgatgtcaggagttcgagacaagcctggccaacatggtgaaactccatctctactaaaaatacaataattagccaggcgtggtggcgtgcacctgtattcccagctactcaggagactgaagcaggaggatcacttgaacctgggaggcagaggctgcagtcagccgagattgcatcactgagctctagcctgggggacagagtgagactctgtctcaaaaaaaaaaaaaaaaagttatatctaatgtgctcagaagttaacaatagagcaaaatttcatcaaggctgtgtgtgagggtattatctagttacagattacagaggcttggctgggcatggtgacttaacacctataatttcagcactttcggaggcccaggcaggaggatcgcttgagcccaggagttcaagaccagcctgggcatcacagcaacaccttgtctctgcaaaaaataaaaataaaaaattaactgggtgtggtggcatgcgcctgtagtctcagctactcaggaggctgaggtgggaggagtgcctgaacccgggagttcaaggcagcagtgacctatgatcgagcccctgcactccagcctgggcaaccaagcgagaccctgtctctaaaaaaaaaaaaaaagttatagaagcataatcattaatcccgtcagagattatgtacaggaagaggcaggggctaggatcattgaacttgtcttttctaaaaatgcagtgttcaggcaagagaggtggaaacctgtgttctctctcgctcttcccagcttattgttcagggcgttattggagagggctgcgctcagtcaccgagtcacggcctttgtgaaatcctgctcgcaagcagaatgagcagacatggttccttaggtttattactgtgcctcacactacgagacggtcattcattggcagaggtgtatttgcggggggccaggtatagagtaattcaaggcggacaaaggaggaatgtcccagtcttcaggaagctcagtgacatgtttgcgctgtcttatgtaaacaggagattgtcagaaatggaggagggggcaccagatccaaggaagtgcccggacaaagccgggaggcgaggagagccgacggggaggaggtgccgagagcatcagcggggctgctcggtggcacgaagacgcccgcggggactggagaggtcggctagggccaggctactcaggcacggagggccacctccccttcagggacgtgagcatctagctgcactgatttgttgttcaggaacaggaaatgaaaccccgcagctttgaacacaataacccacgccagcctcaggctcatgaatattcagcaggctgcttgcgccttgcaaccccgcctccgttcccctctgcggagactgcgtatgcgtcgccggcgcgcggctgtgtcgtcatacttgcgcgccgacgccgccgctcgcttgtgaaactggaaggctgccatggctagcccagccgcctcctcggtgcgaccaccgaggcccaagaaagagccgcagacgctcgtcatccccaagaatgcggcggaggagcagaagctcaagctggagcggctcatgaagaacccggtgagacgaggcccaggctccacggcccgtccgaggcccacccccttcctctgcagcgcttcagggttcccgcaggtccaccttccccgcctccaaactcagaaactcagtatccgaccctccaagagcagtctttggggaggaggaggagaaggaggctgtcccggagatagtgaacttcccgtctgtccttgtgtgagagcccagcttgaatcaaagcacggtggagcggcttcccgtgctccaagaccccttctggtttaactttctgtgaacaaaaagcgttagactgaaaaggtagaatttgtgggttagcaaaagggtatactctaaacaacactgatcgttagagagacagtggccgagacgtttggagctggtcactcctctcccgctcacaccccctctgggcctcggtcccctcaatcataaaaacaattgaacgggaacgtcctttatacctttaactagaaaagcttgactcttcttatctagtagtgttaaagttggcggtttctagctggaaactatggcttaggtttttcagttctgctctggaaagcgtagccctgggaaggtgtggactgtgttatacccaagagtacataggatgaaaaaagccacgacagagggaagaacacaaaatcagctctgtgtccaagtagcaaagcagtcctgcttcattagtcaattaaaattctttggtcttaagagatgtaacttgggctgggtgctgtggcccctgcctgtaatttcagcgctttgggaggccaggcgggaggatggtccgaggccaggaaggagttcaagacc

SEQ ID NO: 42551 - DNA, 1976 bp, Homo sapiens
gacagagcaaggccctgtctcaaaaaaaagaaaaaagctgaagaaaaaacacttttacaaaaatatgattgttctacatatacaactttgtaagcacctttatttcatttaatgtatcatggatgtcttttcaactcactagaaatttagcgtgtcaaatgtgaaatcatggaggaggtgagaaagtcacttaaccacagtctgcccctcctgatactgcatttgagtgggatttttagtgactttacattcaacattcatagaacaaataattcacgacatctacaatatgccaggtactgggccagttctggatacagtggggagaaaggaaggcatggtcccttccacgacttccactttttgtttctttagtcaccctcgattaagggtgacctgtgttggtaactgaatttcatctagaactgtggactgttctggctacaggttcaagtgctggggccggcagtggagagttccacgtgtacagacatctgcgccggagagaatatcagcgacaggactacatggatgccatggctgagaaggtcagtgagccagaaggctggctgagcccccatgtttgggcagtgtgcgtgtactttctttagaaaaaagcatttgaagaggctgggcgtggtggctcaggcctgtaatcccagcactttggaaggccgaggcaggggatcacctgaggtcgggagtttgagaccagcctgaccaacatggagaaactctgtctctactaaaaatacaaaattagccaggtgcatgcttgtaatcccagctactcaggaggctgaggcaggagaatctcttgaacccaagagatggaggttgcagtgagccaagatcgtgccattgcactccagcctgggcaacaagagcgaaactccatctcaaaaaaaaaaaaaaagagagaaaagaaaagaaaaaagcgtttgaggaagaatagatactgctagttgtggctggtgtgaggtctgccttctacggacagcacaaaatgcagagtctctactaaaaatacaaaaccccgtctctactaaaaatacagaaattagctgggcgtggtggtgggcaactgtagtcccagctacttaggaggctgaggcaggagaattgctggaacgtgggaggtggaggttgcagtgagcctagattgcaccattgcatgccagcctgggcgacagagtgaaactccatctcaaaaaaaggaaaaaaaaaataacaccaagaaataatcataaaatattgtaatatttagccataaaaaggaacaaactactgatctgtacagcaactgggatgaatctttaaacatggtgagtaaaagaagccttgcacgaaagagaccatattgtgtaatttcatttatatgacgttttagagcaggtacaattagtttgtgtgagaaaaaaaaactggttatctggttggggtcacggttgactgggaaaagacgtatgaggggactttctggggtgatcaaactgtacactcgagatctgggcatttggttctgtgtagatactaactttatttattattttgagatggagttttgctcttgttgcccaggctgagagcagtggggtgatcttggctcactgcaacctccacctcccagtttcaagtggttctcctgcctcagcttcctgagtagctgggactataggcacaacccccatgcctggctaattttttgtatttttagtagagatggggtttcagtatgttggccaggctggtcttgaactcctgacctcaagtgatccacctgcctcggcctcccaaagtgctgggattacaggcgtgagccaccatgcccggccagctattactttaaaaggaagaagaaaagcatacacaaatatgaaaccctatttaataacgtgcatgcttgaatgttcaagaatggaacttcccgatgtctgcagcttactttgaaatgcaccaaaacaaacaaacaaaaa

SEQ ID NO: 42552 - DNA, 1032 bp, Homo sapiens
ccatcggagacctatgtattgattacctgccctgcctctgggacagccttttaaagttaaaatggccctggggacccgggtagtgcctccgtcacccccagtggtgtgacttctagaactctcctactttgcctgagcaaaacctcccacagtctgcccagaccagagcgtgtctaaatgatgtgggttttgttgcagcaaaaattggatgcagagtttcagaaaagactggaaaagaataaaattgctgcagaggagcagaccgcaaagcgccggaagaagcggtaagcggcatggcctaactgtgatgacacttaagggccaggggtggtggctgggtgagctgtccttgcagtcagtagtagttcctctgcatgacctgtaggggtcatgaatgtagagcaatgacttctactacctgagcagagagcaagttccttatgaccctccaactggttacagattgtccagagcttgcaagtcaggacttcagtgatcacattgatttctgtgtctccttcaggtctgtatttttttttttttttgagacaaagtctcactgtgtcccccaggctgcagtgcagtggcacaatctcggctcactgcaacctccgcctcctgggttcaagcaattctcctgcctcagcctcctgagtagctgggattacaggtgcctgccaccatacccagctaatttttatatttttagtagagacgaggtttcaccatgttggtcaggctagtcttgaactcctcacctcaggtgatccgcctgcttcggcctcccaaagtgctgggattacaggcatgagccaccacacacggccgcatctgtattttaacaaggtgctgcaaccaaacttcccatttagcatgtttcttaaattacggtttatgactccctcaagtgactacatggtatataggctgtatgtttatatgtgtatctgtgtgtttacataagtggtctctcaacttttacaatgagagctgaggaggattctaacaacagcccctaaatatcttgaaatg

SEQ ID NO: 42553 - DNA, 1104 bp, Homo sapiens
aacagggtactctatgtacagacttagcacagtgcttccatgtaatagtgttggacaaatattagctattaaaatatcctcaccatttaaactttaaaaaaaaaaaaatctgtgcccaggctgccgtgcagtagcatggctcactgcagccttgaactcctgggcccagaaggtcctcctgcctcagcctcatgagtagcgaggactataggcatgtgtcaccaggccattttttatagaaatggaactcgctgtgttgcccaggcttgtcttgaactcctgggctcaagtgatccatcctcctcagcctcccaaagtgctgggattacaggtgtgtgccattgcacccggcttccccgtttgaactttcaaagctaatcatgctgtgtggtatgaggttgaggggaaaaagggatgccccaaattaatgaaactaaatcttccagatgctttcgccagcgccgtgcgtgttctgtgttctttctgcggtcccatcctgggtatgacagtgaattttaggctgggctgtgcctttggctgtgcagggcctcctgcttagaggccctttgtctgacctttggtgacacagcagtagcagcgctcagggtctgtagtgggcgtgtgggtggccagggcaagccctgcacatgtgcctcaaggagcattggctggcccgggtgagcctacccatttgtgagttgctgaggccaccgtgcctgcggccggcgtcctggcatggctgagccgggccatctgctgccttgtggtctctgcctctgcctttccaactctcacttgtcctcctgctcccgcgtgaagagggggaggggaggagttgggaacacgtcctcatgctcggcttctggctggcagtcatgatgggggacagggaacctgtgctgctcacaggtgtcaggaggggcttcctgggccatgcttgggaggagctgggaagctggcgtatgtgtggggggcagagccctctgccacacaggtttcggaaatccttttgcagacggcagtgagaacttgagacttcagtgagagtgttgtcagcctggcgttagtgttgaagagctgggtcgggaagttgcccacccaaga

SEQ ID NO: 42554 - DNA, 1104 bp, Homo sapiens; identical to SEQ ID NO: 42553

SEQ ID NO: 42555 - DNA, 1050 bp, Homo sapiens
ctcttggaaatagaactcaggccaattctttttcattcatggtggagacacgtgttttctccttctccctcttggaagttaatttctgtttactatttggtgtacttgactaaagttagctacgattaccatatattaacatatatttcagtagagagaacactcttggaaattaacctggagcgagttccaggaggccgtttcttgttttcttactccacagaatgtcacaaatccactgggtgtggtggctcttgcctgtaaccccagcactttgggaggcctaggcaggaggatcacttaaggccaggagttcaagaccagcctgagcaacatagtgagccccacatctctaaaaaataaaaattgaaaagtgcacctggcctagtggcatagtcctagctacttccaaggctgaagtgggagaatcacttgagcctgggagattgaggctgcagtgagccatgattgtgctgccgcactccagcctgggtaacactaagaccttgtctcagaagtaaaaggctggatgcagtggctcacacctgtaatcccagcactttgagaggccaaggcaggtggatcacctgaggtcaggagttcgagaccagcctggccaacatggtgaaaccccatctctactaaaaatgcaaaaattagccgggcatggtggccagtgcctgtaatcccagctactggggaggctgaggcaggagagttgcttgaacctgggaggcagaggttgcagtgagccaaaatgatgccactgcactccagcctgggcaacaagagtgaaacttcgtctcaaaaaatataataataaatgaaaaaaaatagcaaatgtttattgagcaccaactaagtgcaaaatccaagggattccaaggcccattgctaggcactggggatggtggtggacaagacacagtccttgccttcagggggctccaggtctgagcaggaacaggattggggagagcagcacagcctgctgtgtgggcacctgacccaggcctctgcgaaggcgagcgctgagctgaagtcaggtgg

SEQ ID NO: 42556 - DNA, 1050 bp, Homo sapiens; identical to SEQ ID NO: 42555

SEQ ID NO: 42557 - DNA, 1069 bp, Homo sapiens
tgggtatggtagcaggcgcctgtaatcccagctacttgggaggctgagacacaagaatcgcttgaacctgggaggccggaggttgcagtgagccaaggtcacgccactatactccagctggtcaagagtgagactttgtctcgaaataaatagattaattaattaaaaagataaaatcaaatcaaatcgctgcatggtacagggtttcctgagaaaaggcgcccatgtctgccccgtctcaggcaccacccaaaagtttggaactctcagggatctctgagcagggcctcagagattgattggggttggatcagtttagcccagttagcgatgcagacgttcctggaatctggcctccagggtgacaaaggagagcttttggcctggctcccagcggccgccttccttctgagtcatcccctaggacaagagtcagtttccgacaaagctgcggctctgacaaggggcccatctcctgttgactccaaagccgctgacccacacccctggagggaattgtcccagaggttaaggactcacagtgaggacacaacagtatgctcacaggtcctattgggtggaagtgatttatttgttttttgttttgtttttagagacagggtcccactctgttgcccaggctggagagggcggtggtgtgatcatggctcactgcagcctctacctcctgagctcaagccatcctcctgcctcagtctcctgagtagctggaattataggcacgtgccaccatgcctggctaattttttttttcttttttcagagacaagttctctgctctgttgcctaggctggagtgcgggggtgcaatcatggctcactgcagtcttgaactctcaagtgattttcccacctcggcctcccaaagtgctagcattgcaccttgtccagcctgtttccttatgtgaaaacaattattgtttttctttttgtttgtttttgtttttgttttgagatggagtcttgctctgtcacccaggctggagtgcagtggtgtgatttcagctcactgcagcctctgcctcctggattcaagcgattctcctgc

SEQ ID NO: 42558 - DNA, 1035 bp, Homo sapiens
atgagccactgctcatggcctaatcttgtagttttaatagtatatattagctttttcaaagttgttcccatttttaaaaaattacttcaaatacctgtgatatagttgcatggtaatattttcattttttaagtatgaaaggttagacataggatttgaaaacctaagtcatgatcatatatactggggaagaggcttctacagtctttcacaggagtacttaacagaatcgtagtctcctttacttcccatctatgttagttctctttaggtgatttaggccagtagaaataactgctctgtttctaaaaacgggcagaaaggctattgtttttggtcccgttgctgtggtagaagaccccttacctttacagtatgcactttccaggattcagcaatattacggacataactgaggagttgggtttctaggttaaaatgctttggagcttataaactgcagtactaacttgcttttttctttttttacttctaggtttagatatcaagtcatcagggtctggctgtgtaaaagttcaaagtattgagggtgataattgcaaaattgaaacagagcatgggactagtatcttgcagtctgttaaggtatagcatttttctaattttatttcactattatttttttaaaagccttaagctatgaatcgtactatcaaactcaagagattcttctgtttttcagaacattgtcattcattcatctctcagaaagtccttggcaaacattttgccttgaaatcagttctagtaaagtacagaggttatagcagttttgaggttttgcctcaaatttcttttggatttaatttcaaagtgtacagtgaaactaatagtattttcctagtattctgaaatcttactaaagaaattttagtttccacaaatgattttcttccattttattaaagagtaaggaagaatctttatgcactataaatgtgcttaaatattagatgactttaatcacatttttaatgtaccaggtagctcattacttaaggattaagtagttat

SEQ ID NO: 42559 - DNA, 1030 bp, Homo sapiens
atgaataaaactctattttaaatatttagatttcctatgtaaattaggctctattttaagttctatggaaacatatcttgatagataaattgctgagtattagttctctcattttctctgcacttcaaaagtcctttgttcttcaactatttggcatacatgcataaacttttcctttagtaactacttttttatttttgaaattttcaagaagtacaatttacatgaactgtacaaaacacaggtgataactttgatagcactcaaaatttcagaagaaatgtcccaatctgctttaagaaggacttgtagtcactgataaatttataaatctggtttgtaaacttagaaagtcagaaataatatacaattttaaaacagaatcttttattggattaaatagatcttttcatgacattcatgaaaatgttttattgaaattctagtatttattcctagcctaggtcattatgaagttttaatttgattatcattttgatgcttaatttcgaatctggacacatacaactttgttttttttgttttttttgttttgttttgttttgtttttgagagaagtctcactcttgtcccccaggcttgagtgtgatggcttgatctcggctcactgcaacctccactacccaggttcaaacaattctcctgcctctgcctcccaagtagctgggattaaggcgcctgctaccacgcctggctaatttttatattttttagtacagacagggtttcaccatgttggccaggttggtctcaaactcctgacctcaggtgatccgcacgcctcggcctcccaaagtgctggaattacaggcatgagccaccgcacctggccacaacttttttatatgaaatattagaaaagaattacagcttttttttttttttgtggtgcaaaccatgtaggtttttcagggtttagacctctgacacaaaatattgatatttactacagtgtctgtcctaagtgcagctccttagagacattcagagacttggcttcctcagtttg

SEQ ID NO: 42560 - DNA, 1086 bp, Homo sapiens
aacaagcacataaataacaaaaggtaattttagtttgtggtaagtacaatgaagaaataagaaagggtaactgaatagagattggggaaaaagaaagctacttcagttaggcaattgggggtggtctggagagggtacatttaaaccaaagccagaaaaatgagaaagagttatataaaattctggatacaggctccctagatagaggaacagcaagtgcaggccttgaaaatggaagtttactattttcaagggaaagaaggctggcttatgaggaaagtggtaggatatgaggtaagtaaggctagatcttaggaccttgtagacagggtaagagttcagactttattccaactacaacaggatgttagggaagtgatatataatttatattttaaaagaacaacctagctgttatttcataatgtaccagaagggttcagaagtgaaagcaggctattagaaggcttaatttgttcattctactgttgatggacacctgggccatttctaattttttggcaactgtaaataaagctgctatgaatatattaatgtaagtcattttatggatgtatatatatttttcctcttgggtaaatacgtaggtatggcattgctgagttgactaggtaggttctatgtttaactttatgataaactaccagaccttttcccaaagttccactttatactctcatcaacaatgtatgagaatttgagttgctccacatcctcatcaacatttattattgtcagttttaaaatttttttatatcatcatttgttgaaaaaacttcctttctctgatggattactttagcatccttgtctaaaatcaaatcactatataagtgtggctcaatgtctgatctcttgttcctaattcattgatttatttggtgagccttatgccggtgccacaatatcatgattactgtatctttggtaagtctgtaaatcaggtagttgaagtcttccaaatttgttccttttaaggattactttggatataataggtcctttgattttccagtcagtttctaccaaaaaatacagttttgattatgtttgggattgcactga

SEQ ID NO: 42561 - DNA, 1013 bp, Homo sapiens
aacaaaattgatagaccgctagcaagactaattaagaagaaaagagagaagaatcaaatagatgcaataaaaaatgacaaaggggatatcatcaccgatcccacagaaatacaaactaccatcagagaatactataaacacctctacggaaataaactagaaaatctagaagaaatggataaattcctggacacatacaccctcccaagactaaaccaggaagaagttgaatctctgaatagaccaataacaggctctgaaattgaggcaataattaatagcttaccaaccaaaaaaagtccaggaccagatggattcacagccgaattctaccagaggtacaaggaggagctggtaccattccttctgaaactattccaatcaatagaaaaagagggaatccttcctaactcattttatgaggccagcatcatcctgataccaaagcctggcagagacacacaaaaaaagagaattttagaccaatattcctgatgaacatcgatgcaaaaatcctcaataaaatattggcaaactgaatccagcagcacatcaagaagtttatctaccatgatcaagtgggcttcatccctgggatgcaaggctggttcaacatatgcaaatcaataaacataatccagcatataaacagaaccaacgacaaaaaccatatgattatctcaatagatgcagaaaaggccttgacaaaattcaacaacgcttcatgctaaaaactctcaataaattaggtattgctgggatgtatctcaaaataataagagctatctatgacaaacccacagccaatatcatactgaatgggcaaaaactggaagcattccccttgaaaactggcacaagacagggatgccctctctcaccactcctcttcaacatagtgttggaagttctggccagggcaatcaggcaggagaaagaaataaagggtattcaattaggaatagaggaagtcaaattgtccctgtttgcagatgacatgattgtatatctag

SEQ ID NO: 42562 - DNA, 1027 bp, Homo sapiens
tgttttagtatctctagagtagtgggtaattcaagaacaattttggccctcacctccaccagagaacatgtggtaaggtctggagggatgggatcttatgtgctactgacatatagtgagtagagggcaggcatgctgttaaacatctacagtgcccgggacacacacacacacacacacacacacacacacacacaccccactacagagagttatcttgtccaaaatatgaatagtgtcagggatgaagaaccagaatttaggaaataaatctccaggcttctgtttggggtggggagagacagttgcccagatttatggagtaggggctggaatctagagatctatctacttcttaagaatctctaactcagtctcccttattttcatccccactcttaacccagttccaaaggtacacggtgctcccaagcttgaagattgtggtgtaaatcagatttttttttccagctttctctactgttggcttaggattcaaagcagtctctggtctgctaaattagtccatctattttcaagcttccaaatttttgttgctcttatctcctctcctgttttccttatccatatgggccctcactcttcatctctagttctggtagcgtttcaagaggaacaaaattatatgtgtatattcagtctactattattaatccagaacctgagatctctagttctttacatggagatatgtccatagtatattaaaaagtaggttacaatgtattttggaaagtatgattctattattttaaaaaacaaggcaaaacacaaactttctgtaactatttctaatctttttgtgcatagaaaaaaatctagaagaataaaataccagcgatggttatgtccaggtggtgacaggacaatggatatttactttctcccttaagcttttatatgtagtccaaatttttcataatgagtacttacttcatttatatacagaggtcccagaaaaattataaaacacttgaaaataacacaaaagatgatggtatgtcct

SEQ ID NO: 42563 - DNA, 1152 bp, Homo sapiens
agaaagggaagacataagaaacttcattttgacctgtaccctgaacaattgctttgccctgagatgctattaatctgtaactttagccccaaccttgagctcacagaaacatgtgttgtatgggatcaaggtttaacggatctagggttgtgcaggatgtgccttgttaacaaaatgtttacaggcagtatgctgggtaaaagtcatcgccattctgcagtctcgataaaccaggggcacaatgcactgcagaaagccatagggacctctgccctggaaagctgggtattgtccaaggtttctccccatgtgatagtctgaaatatggcctcgtgggatggcaaagacctcgtgggatggtcccccagcccgacacccgtgaagggtctgtgctgaggaggatagtaaaagaggaaggcctcttgcagttgagataagaggaaggcctctgtctcctgcctgcccctggaaacggcatgtcttggtataaaacctgattgtatatttgttcaattctgagataggagaaaaaccgccctatggcgggagacgagacatgttggcagcaatgctgctttgttattctttactccactgagatgtatgggtggagagaagcaaaaatctggcttacgtgcacatccaggcatagtacctacccttgaacttaattgtgacacagattcctttgctcacattttcttgctgaccttctccccaccatcaccctgctctcctaccgcattcctcttgctgagatagtgaaaatggtaatcaataaataatgagggaactcagagaccggtgctggtgcaggtccttggtatgctgagcgccagtcccctgggcccactgttctttctctatactttgtctctgtgtcttatttcttttctcagtctctcgtcccacctgacgagaaatacccacaggtgtggaggggctggcccccttcacagtggcatgatcttggctcattgcaacctccacctcctgggttcaagagattctcgttcctcagcctctagctgggattacaggtgtctgccaccacgcccagctaatttttgtatttttaagtagagacagggtttcaccatgttggcagctggtcttgaactcctgacctcagggatccgcctgcctcagcct

SEQ ID NO: 42564 - DNA, 1027 bp, Homo sapiens
caggttttagattttctctccaaaataaaaatgaaccaggattgaattacccaaatggcaatcagatatttttcttgttgcctgtggcataacccacactttttacatttctctaagtttatttcaaaaagtggtgcctagtggcccaattacctggcactagtccagggtcctctgtggggcaagaaaggcgggggaattccttaagctaaaataatcagccagaaagagttgatgggtgtctatttgcacagccagccacctcactttttgttcttagtctttcccaagaaaatgacaactcataatgtttactgtaaggacagtcacagcatcctatgacctcttccatttaaggatctctaagaaataaagagttcacgaactattatcagtactgctttcacctcccatttgcggacataatagaataagaggtgatctaatcaagggaggctaccagtctagtggaaaaaaagagagcctggaatctgaaattgtatctatgtgaccaggaacaagtcatgttacctcaagtttcttcatatataagaggagaaagaaaataactgtctacctatctcataggcctattagaagattaaaagaaaatgtgtattccaaaagcacttggaagacatggaccctggcttttgtctgtgaaccagagagatcctggaacgatcctatctatgatgtatgtgatgagggctttaggatgaggaaatataatgaacaaaatttaactggaattgatagggagggttattacaaattataacatggagaaatcatagctcctgtgagacatgccacaggcccttggtttatgtcaggcaaggcacaatgagcaaagcctaggtgtgtcacatagaagagggatcaaaaacatatcaaaaacctaaacataggtttaaaaaacaaaagaagcaaacattctgatgtttattttccctttttttaaatttttgccttcagacaatctgacagtttttttttttttaacttttggcaagtttcatcttac

SEQ ID NO: 42565 - DNA, 1045 bp, Homo sapiens
aaaggtacatagggctaggtgtagaggtcctgagtgcaggaacttctgtccccacagagttggagtgcacccctctcctgacatatggatgtgttcgccaacctggaagtactctaaaccctgtagttcagggatttttatgggggcttcgtcatatagacaccatcaattattagctcaatctccagcccctctccccttcccaaaggatggggaatggagcagaaagttccaagattctaatcgtggcctggcctttctcatgaccagcccccaaccaagaactcaccaagagtcacctcattagaacagaagatacacccaggaaactccaaggaattaggagttctgcatcaggaaccatggtcaaagaccaaatattagaacaaaagatacctattacccctattgctcagaaagttacaagccctttaaggagctctgtgccaggactgtggataaagaccaagatatatatatttcctataaatcacatactcacaagaagagaaattttgacaacagtaagtgccaaaatactgaatagatcttggtagttcatagggcttgaaagcggggacaccaccaacattcctggcagccaagtcagatgcatggacatcgtctttaaccacatcttcacactcatccctcatctgaactatcaacaatttcatggattttgctatctaaatgttcatgttctctaatccatttccttctccccagcctccctgttacttcccttgttcaggttgctatcctgtcacccctggactataacaaaaacctcttagattcctaccttcactctccttttccccttctgctcttcaatgtaacttccactttccttgttaaagtgatttttctgacagataaacttccctggcattcccatgctggattaggtacctcgcctgaatcctcccatagcctcctacatacctttatcacagcattatgactaaaagcatccttttggaattagacattttatacactagctcatgtacttacctgtttcatgacttgggagaagttt

SEQ ID NO: 42566 - DNA, 1033 bp, Homo sapiens
gaagaccttgacctcagccttcccaaactatcctaatcagaaacttcttctgtgtgtcagtgccataaccctaccatgttgatcttgctttataaatggctggatgtctgtttggcccatcagttccctgtcttccattgggatcttcatttctaattccaattgagaaccaccagatccttctaagaagcatttcagcaaataaagcaggacaggagtttccaccattgcaatcctaagaggcagtttcacaacagctctacaggtgggcgtacagatgggaagaacactgggagcaaaacatactgattgctgacatccgtttacaccctccgtttgttcagatttgcaaagaactgagcagttaaggcaaaagatatcctgtttcagctgaatgagccatagtaggtggatgcgatgcctgtgtgcccatcaaccttccacctataagagggggagtgtgccagcacctaggaaagcagttaaggatgtgtgtgtgtgtgtgtgtgtgtgtgtgtgtgtagaaattcatattatagtcaagaaaggattaaaagtgaatggaaaagattattgaggtaatgatccaaattaattggttaatacatttagggccaaacctggatatcaaaagtatccatgctgtttttttgtttgtttgtttgttttttaatacacaagctggggtttcatccctaaagattcagactcaatagctctgaagtggggcttgggcatctatagttttttttgtatgtttgtttgtttgtttttgagaccaagtctctctctgtcgcccaggctggagtgcagtggcacgatctcagctcactacaagctctgcctcctgggttcacaccattctcctgcctcagcctcccgagtagctaggactacaggcgactgccaccatgcctggctaattctgtgtatttttagtagagacggggtttcaccatgttagccaggatggtctcgatctcctgacctcgtgatccgcccacctgggcctcccaaagtgctgggattacag

SEQ ID NO: 42567 - DNA, 1024 bp, Homo sapiens
gaatatattactgaatgactcattaccttacacaatttgccaaattcaacacagtcagttgcttcaaaggtgaaagggatctgaggctgctgtctgttattcccttgcagtcagccatataaatgtgactgagatttggataattcttgtctataaatttgaaggatgcatcagtaacccttttatttcctgtttttaaaaaacagaagaaaagacaagtattgtatttagaatgccacaagagtaaaagtaaacaataatgctgaaccacatttttaatataacagaccttcaaatcggatctttctgagtttacaagcagaaagagctctgaaagtacaatcggagatatgcggtgcaccagtgaaaaccagcgatgtaatacgagagcatttttcaactaaagcctttagaagaaaaaaatgattaaattaatcaagtgtacagaacaggtttagcaaggtaatgaagtcactttttccttcaatatattagagacagacatgttaactgttaattttcctaatttcaaagacaactggatttttccatacattttaatacacctacatttgactaatgtggaggaatcagaattaaatcacgtactaagagtatgggaaaatatgagaaatggactactgaaaaaaattactacatttggcagcttagcatggagaactaaactcaaagtttgtgcttaggctgtaacatcactaaaaaaaatcctaactgtgaaacaaggtttcttaggatatttaaggattcacatgttttcaagggtatgtgcatgtgtggaaacttttcaatgattttattactattttaaaataactaaaatgaaaagtccattcatatttttcagtaattcaagccattagaacatatatctatcttatgggacagaaaagtaaaggtacttcccaactacctacttttacacagttgtccgtcagagttggcatgtcattaatggtaagatgcataattccagtgcagctgtttgcaatgtacctgaagcctt

SEQ ID NO: 42568 - DNA, 1033 bp, Homo sapiens
tattaaaattcaaaaatcagcagagtgtggtggcagacacctgtaatcctagttactcaggaggctgaggcaggagacttgcttgagcccgcgaggcggaggttgcagtgagctgaggtcgtgccactgcattccagcctgggcgacagaggaagactctgtctcaaaaaaaaaaaaaaattaaataaataaataaataaacattactgagtgaaagaggaaagcaaatatagaatagttggtttagaaagttaaaacaatacttatcaagttatacaaacttttcccaaattcttatttagaagtcatttcatgaccatattttttttattacttctaaaaggaaagaaatcaaatcatgcaaatgcaaaaatataaattagttcctagtttaattattggtttactgataagtatctaatgactggctttccaaaaaaagtatgcatataaatgtatgtgcatttactataaaattttatattttactattttgcggatataaaggatgtgtagcacgcaacttacaaatgataaaacataccatattctttactgttaattccatgtagccaatcaattctcacacaatgttttcattgacttttgtcaatgaaactcttataaatgtagccagccaaccaatggttgaaattaaagaatgatgactgggcgtggtggctcacgcctataatcccagcactttgggaggccgaggcgggcggatcacgaggtcaggagatcgagaccatcctggctaacacagtgaaaccccgtctctactaaaaatacaaaaaaaaaaaattaactgggtgtggtggtgggtgcctgtagtcccagctactcaggaggctgaggcaggagaatggcatgaacccgggaggcggagcttgcagtgagctgagatcgcgccactgcactccagcctgggcgacagagcgagactccgtctcaacaaaaaaaagaaaaagaaaattaaaaaaacaaaagaaattgaagaatgattacagttccaatatgaatttttttatta

SEQ ID NO: 42569 - DNA, 1047 bp, Homo sapiens
ccaagtaaatagcttatatatttattttgtaaatatacacatatatacatttgaacagacagacagatctggaaagattaagcctaaaatgttaacagggattctctctgaggagcagtattaaaggtggttttttaaattcattttgtatgtgtaaatttcctaaattttttgcaatgagcctcttttacttttgaaaaacatttttaaaaattcaccctagcaacaataaattataacttttttctctacccaattttgggtacaattgtgccatcccatattttatacttgaactgtttgtgtttacatgtatcttagtatccactgaaacagcagtactgagtccccagcatatgctagatgagacacaccagtgagcacagcgtgacatggtacatgtcctcacgaagcttacagtctagtggagagacaaaaatatataacaagtgaacaaggtaattaaaagctgtgataagtgttctgaatgctgggatagaatggagctccactcctgtagaagaggaaccatcgtattcatctgctcatccctattccccacccagctctgtgccctgtggtgtatgggcactaaatgtttgatgaaaaaatgagttcccatgaaaaccgtatgatgatcttaaaaaagaaaatggttgtttttcccaaataaccacattctaaaattccaaggaaattgtatttttccagctgaaacactcccttttttccattagtattacagcgtgggggtacataaggttttatacatctaagttatgaaattttgggttttctgtgacaaaatttttttaatgtgagatacattttaaatgtgaatttaaaaattttaaaatgtgagttattcaatgtagttttaaaatgttaaaatatacatgaaaaagttttcatatattattaatataaaataatactcattgtttcatatttcaggtggattcatcattcctttccctttatgacagccacgtagcaaaggagattcttcttcgagtacttacgctatttcagaatataaagaactgc

SEQ ID NO: 42570 - DNA, 1074 bp, Homo sapiens
aaaagagaagcatagctataggaaattgaaaaaatgataagtaaccccctgagagaatcatacaatgttagaggcctgctacttaggcaccagacggctcgtgaggataccagactcccatttacatgcttaaccgaatcatacacttaaaattcatatactaagtccccatccccaagggctgacagtttcattggacaggcagggtaagctagaaaaaaatatatagcaaaatatgtgattcagagaataagtactaaaagatttccaaagggaagagatgatggccaacatgatttagttttcagggaataggcgaaatttggtctaggccatgctggaaggctagattttgttttaatagaagggaacatggcaaaggaattataatcagggagctatatatttctaaaaacgcttcctcagtgcctggcacacagtcggtgctaatatgaacactttaagcctcttcagatgaggaaggaagggaagaaacaactaatgtaagtttcaggaataagtgaatggattaaagagtgaatgaatgaggtaactaatgagtggaacatgaaatgcctggagtaccccaatctgaagcctggctttcagagttccccaaatctaattgggccagagcaggcttctcccccaagggtacttagttccccctactatgaaggtggctttaggaatactgggaggcaaaaattctacctctggcctcctctttgggccagaacttgctttcctccagcttgcttctgttgactccttttcagaggcctgaaccttcctctcacctgcccccagacacaggaagatttgggaccaattcagctggacatcgtatggtcgatctcctacctccattatctagggtgggaacctggatgtttcacacaatgtatcctctcactcctaagctgttccctctactcaaccttgccttatgcttcctggggtcagagatctgttcctgatacactcagctcttctctgtagcttccaccccttcccagaagacccttctcctatgacaggttcattctcccacagctccactccctccctccc

SEQ ID NO: 42571 - DNA, 1051 bp, Homo sapiens
aggtagtgaaataaagtcaatttctctctgggtaatgataataattgctcatcttccctgagggaagggcatgtttataaacacgttgctggctttaggacagtggctggtgacagatgtttctaggccaggcagagatctcagtggaaccaaaattcaagaagaaagattcttttatagagacagcctatttaaaatagatttggttttaaaagcaacatttaatatcagattagtaatgtgttttgctttgtctcttccacttcctacccccaaccagtcattatattttggagagaacagattaagaagtacacaggctgctacccaagttgttctgaatgttcctgaaacaagagtaacatgtttagaaagtggactcagagtagcttcggaagactctgggctctcaacatgcacagtaagtgactcaggcaaccttctctaagtgacccttcatttagcgtagcaaattgttgattttaatctttagctttttcgttggctggtggttcaaaaagggtgacagttattttgccttgacagatttccatgagttgtgaaccttttcttccagtggtacttagttacagggtgcatatgtatcctgttgcattgtctgcatcttgttcttgtagcttattattgattatttattttcagtagtattgataataatgaaagaaatatgtttgcagggctactctgccaagtgtttttactgatgtcttatttgataaaaagcaattgtttgtagtgggcatcctcacacctgttttatagttaaggaagtgagagaagttaaatggttttgttcaggtaactcagctaatacatgacagagccaggatttcaaccgaagttttctgacagtctctgatgttcttgatactacagttattaattggctggattaatgagttgggcaaagaatcctcattgaaggtggcaggtagatacttgtagcacccagcagtatcctgatcgaaatttttaaatctcatagttcacaggaatgaactatcaattcactcaggtcaagaaaatctta

SEQ ID NO: 42572 - DNA, 1078 bp, Homo sapiens
atacgtgtgcatgatgatcacttactcttattggtaagaaagttgatcatatatccttaatgtatgtatacttgtaagttaaatacatgtgctactatactaacatatattaaatacacatttaaaaaaaagattcagattaaaacagactgggaaataggagcccccctccctgcctttggaaactaccagggtagaccaccaatcccacataaaggaggattttcacacaggaattcttgtccttccatttgtctatgggctctttctcacccattttactggactctgttctcttatctggacagatgggttttatttggttttacagataattttttccttttggtcatgatctcagccacagcttactataatagtttgttctgtcatgttcttagtatttgaacataatcagttctgagacagtgccccttaaagtgaacttaattaaaacaagcaacaacagtttgtagtagagtaaaaaatgaaacctaaaccagacacggtagtacatgcctttagtcttggctacttggaggaagctgaggcaggaggattgtttgagcccaggaattttgagtccagtctgggcagcataatgagaccttgtctcttaggggaaaaaaaagaaacttaagattgtaagtttattttataacattaatcgtattaatgaaatttagatttatgattgcaactatgtactaattcttcaagaatgaagcacagttttttttttggagaggtatgcgctttttctgataaaattgcttaatggcctaatataacatgttccacttcacttttggctttttgcaaattagggtttgagaacacacaattctgtgattcatttggggcatattttagattgtaaggattcttttctctgttgcccaggcgagagtgcagtggtgcaatcgcagctcactgcaatctttgcctcccgagctccacccatcctcccatctcagcctcccgagtagcagggactacgggcacatgccaccacacgaagctaatttttgtattttttgtagagacaggattttggcatgttccccaggttggtctg

SEQ ID NO: 42573 - DNA, 1024 bp, Homo sapiens
gggattatataggtgtgagccacggtgcctgaccagttctttgcttcttaacatagcactgtcattgctgtgggaacttgcatagtaaatacttgggtgatacaaaccctctgtacattgctagctaggtattttcagactaatatatataactttgtaattttcatatagaacaatctatattaatatgcaaatttccatagcattttttaagtaggtagagtcattacaaggtgatggcaaatttatactttttccccaaggaaaaaatcttttgtactataggggtttatatgttaaattttaattttgtcctgttaagtatatctgatgtttttctcctaggctaatcatttagtattgagtgatgggtcagtgtcatgatttctgattttggtttaatagattttaatagtgaaagttaagattgctggcacgttttcttatattttattttcaattagctgtagaaattcttgctgatataatacaaaacagcacattgggagaagcagagattgaacgtgagcgtggagtaatccttagagagatgcaggaagttgaaaccaatttacaagaagttgtttttgattatcttcatgccacagcttatcaaaatactgcacttggacggacaattttgggaccaactgaaaatatcaagtaggtataacagaatttcttggtgtataagggaatttatgaatgttgaaaataaacatttacaaattttcaaaaagtatgtttcagaaagtaattttccccctggtaatctaagtgaaactgtagttagctacattttagtcccacctagctcccaagcacgtgagttcataggtacttcgggaataaaccagtaatggtgtattttttctttgatgtaaaaaaggtgaagttctttgatgtgttgcctgtatcctatttctgactgcattttaggatacagttatggtccaatttgatttcaggtatattatgtgaagatctgttttttttttggtttcctttaaaaattgttttactt

SEQ ID NO: 42574 - DNA, 1066 bp, Homo sapiens
tggagtggtatgcttattagtttgatcctgttgggagataccctaagaattttcatttacatagcaaataactgatagtgtgtaaggggaatgtggagcactggaatcagaatttccctctattttttttaaagtaggtttcatttaggccaggcatggtgactcacacctgtaatcccagcactttgggaggccgaggtgggcggatcacgaggtcaggagttcaagaccagcctgactaatatggtgaaaccccatgtctactaaaaatacaaagtagctgggcgtggtgacatgcgcctgtagtcccagctactcgggaggctgaggtaggagaattgcttgaacccaggaggcggaggttacagtgagccaagattgcaccactgcactccagcgtgggcgacagagtgagactgtctcaaaaaaaaaaaagaaaagtaggttttatttatagaaagacttaatgaactgttcaatacataagcgtacatagtagaacgtgcaagaaaagggcaaaggagtgaactgggagagagtcggaagatggtgttctgtactttgagaattttttgagattttaaattatttcttgagaaccaacttcgtccttgttcaagcatggaacgggtatgttcattctttgatttgttcaatcattcatttaatagatctaatttttgggaaggagaagcacatagggagccataagaatgttgaatgggaatccaaacatgcaggtgacttcagaaggtttccttgaggtcatgtttgaagccagtgaatgaaaaaaaaaattgacaacagatattgccagatttcctggcagtctgaatctagacagcagtacattttaattggtttccagttttttatttttttctttttaaaatacatttatagaaatagagatggattcttaactatgttgcccaggctggtttcaatctcctgagctcaagttatccttccaccttgacctcccaaaacttggggattacaggcgtgacccaccgcacctggtctccagttttcatttctttgtattttttaatattagagcaaa

SEQ ID NO: 42575 - DNA, 1021 bp, Homo sapiens
ttgtatatcttctttggagcaatgtttattcaggttatttgcccacttaaaaaatcaggttgttttcttgtgtggtaggagttctttatatattctggatattaactctttaccagaaatagattaccttcactatatttgtagatgtggccactacttattgtgtctaatatgccaggcgttttacaaacactgtaaagtttccttctcacaggtaatcagtccaaaaaccagcgtgccaaagcgtttccccagggctctgtccggactctgaagcactgcataaaggggtctgtctgagcccaatttacttccggtggggaagggaaagggaagacaccaccggaagcaaggaaggtgctgtgtaatcattaaggagcggaggcttttggagctgctaaaatgccggattacctcggtgccgatcagcggaagaccaaagaggatgagaaggacgacaagcccatccgaggtcagttgacatgggccggagctcggagctggggcgggactggagcggagctgccttggcactggagaggagctggattcccgctcctggctctgtgctctggcccttttgtgcccctagtaatttagtctggacaccggccggattaacttgcctgccttctcagtctccctcatccactacaagttctgtattatctgctgatggaaatttttattcattctcagctctcgggtcttgaagaagtcacgcaccctgcttggcctaataggccttgaaaagttctgcctggcggtgctcggtcacctgatcctctttcctctcctcctccttccccctgtgacagccgggagctgtcactgtgtagccacaattctgagacataattttcttaaaaaaattatttgaccagataatacattcacagggttcacaattcaagaggcagaaaagatatctttgaaaagcctcgcatccttggccccagccaccaacttctccacagaggcaactaatgttgctattttgcatatctttttagacatattc

SEQ ID NO: 42576 - DNA, 1072 bp, Homo sapiens
gagaaaccaggcacaagcttccaagggtcctcttccagtggagtcacacaggatgtacttaattcccccagcaacaggtagtgacaatatgtgtaaaatgttgctaaccagagtagctcgttagagatttggcacccagggtttttattatgggttggtaatgtaggcatctctgcctagaacataccaaaattctagactccctgaaggaagataagtgttctgcataaaccctgtagtttgtataaacattttaagcacagtgaaccacctttttcagttctgggaatggtaggaaccctctgaaattgttctcagacaagagccaagaaccaaccttataagcaggcctttcaaaggatagcagttaactcttctgtgcagataacagtaccacaaacttaataaaatttaaactgaacttcgtatctccctctgctaaccactttctattgtgacttctgttgtgtggtacctaggtccaaagcctgggcatcatgtttgatcctctcccgtcagcttctcacatttagtcatttgccatgtgctgtagattcttcctctgagggtttttttttaatccaactcttcctttctcttttcattgctaccatttttatttaggttcttatgacttccgagtggcctcactccaatttgttcttcatatctcagcgagctaattcttcctaaggcacagttcctataatgtcaactgtagtggccctgattacctcattctagaatttatggtctacttcactagagccccaaacctccatctacttaatttcctattaccgcctaatgtgtatactatgtttcagcttacctggtctagctgctgttacctaagcatgctttttcctacctctactcatacttagttaaaaaaaaaaaaaaaaaaaaaaaaaaaaaaagacctgccgtttttttccttaaaatatgtacgattgtatgattggttcttgtttttcatgatagatatattctataaagttgctgtgaatggtcagttgggaagtactgaacatttgatcctaggagaaatatatatatacatctcacatag

SEQ ID NO: 42577 - DNA, 1046 bp, Homo sapiens
atcacaccattgtgtttcagcctgggcaacaagagtgaaactccatctcaaaaaaaaaaaaaaaaaaaaaaagaaaaacggatttaaagtataaactcaggaaaagaatgaaaacccatttattactgaatttggtgtaagacaagatgaccatctttttgtagggaaaataaaaacgagagcaacttaagatatacaggagcatcactaataataaaggaatacaaactatggaaatcaagaaatcagagaacttcttaatgatgagatatttgggtttaattttccaggagaatgtatttgaaaattttatgacttggctaaagtcgaatggacctttggagttgggtatagaaaaggatctttaacagtgtcccagtttctgtagttctagtttatacctgtatattgcacactcaggatataatctagttagttgaattcattattagtggcttaggttccttattctaatcaagctttttgctgtgttaggtgtacaaagataatcaatgctgattcggaggacccaaaatacattatcaacgtaaagcagtttgccaagtttgtggtggaccttagtgatcaggtggcacctactgacattgaagaagggatgagagtggggtaagatttctatttacaataaatacttttctttcactaaggatactgtctcacattcatatccttggctttgtagtgaataaatggactgagttccttggaataccaaaggatgatctagtaatgtactatagttgaaaattctgtcttctgcatctgcttcctaacttcccatcggcttcgctgactcccctactcccactgttgtttattatgaatggcttcaaatttcagagttgaggttaccagtccatttaaggtaacatggtataggttgggggagtacttgctttaggatagttgtgatgctaagtgtgttaatgtctatagaatacataacaactcacttagtaaattaaaaaaaaatctcccctccctcctcaaaggtttgattgctgttggataggttgtttgcgaca

SEQ ID NO: 42578 - DNA, 1045 bp, Homo sapiens
cctgagtagctgcaattacagatgcctaccaccatgcctggctaatttttgtatttttagtagagacgtggtttcaccatgttggccaggctggtctcgaactcctgaggacaagttattttaactaatctctgagcctcagtttgctcatcttataaagggaataattgttgtcttgtgtacttcatgagtttttgagaggtccaaattaagtaataaatgtggtagactttgaaaacactaaactgccccataggcagtttaaaaaacgttaagtaaatctgtgatgaatacttttgaaagcaaagattcactttctaattagttttatataaagcaagctgttcttacaggatttgcttcaaagtgggatgtcacttgtgcctgaggacatgatttgagctgagatttttggtactttcaggtcatgcatagtgctactcttgagtggacttgaagagcttatctttccttttgtcttctcaggggctcgttttgatgatggtgctggaggtgacaatgaagtgcagagaacaatgttggaactgatcaatcagcttgatggttttgatcctagaggcaatattaaagtgctgatggccactaacagacctgatactttggatccagcactgatgaggccagggagattggatagaaaaattgaatttagcttgcccgatctagaggtaagaaaaccatttcattttaggaaagggatttttgaagttttttcttcctgtgatttttttccattttaatatttgtcaattttctcatttttagggtcggacccacatatttaagattcacgctcgttcaatgagtgttgaaagagatatcagatttgaactgttagcacgactgtgtccaaatagcactggtaagtagaaagttcttgcttatatttgctggtctgtctgctcaggctgctttaattaagcccgtttattttctttttgtttgaaaggtgctgagattagaagcgtctgcacagaggctggtatgtttgccatcagagcacggcgaaaaattgctaccgaga

SEQ ID NO: 42579 - DNA, 1910 bp, Homo sapiens
ttttagggaccttttgaactctgataatactatagattaatttagtggcagatagttgagtgccttcctatgtaaaagcatcatagtagctattaattttgtcttgttcatcttgcacatactgcttcctaagggaaataactgatgattgtgttggttaacatcgctggagtcagattgtgtggttttttcaaatgtaagcctgtaattggtgtacagtaacctagttgctgtatattagtattaatcgttagctatacagtaatctgtcaaccatttgatctttgaattgtatgtttaaactggcaaatctcatggatgtgatatggttgtaccaaaagacaaatgctgttttattgtgtgattactttgagaataattgtgagaaactggtaattatcatttaaattgatctacagtgatagtggaagttatatgtcaaaggagattttgtcgacatagcttaaaatttcacttacagaagtttaaaattggtacctcttacctcctaaagtaaatagttcattaaggattttgggaaaagcaattctagttcaatccccagctacacacagcaatttcctcatgcttaaatggtttttatgagtgactgatgagctcactatatgtgggttatttttcatttatatataaaatccctttgcagaaaggccccgccctcttttttttttttttttttttttttggagacagggtcttgctctgtcacccagactggagggcagtggcatgattatggctcgctacagccttaatctcccaggctcaagtgatcctcccacctcagcctcccaagtaactgggactacaggtgccatgtcaccatgtctggctaatttaaaacaaatttttttttgtagagatagggtctcactaaacagcccatgctggtctttaactcctgggatcaaacagtcctcccacctcagccttacaatgaagctggaaggtgaaagtgagtgtagtctgtctcatagcaaaggtactggtcccttataggactcattgtatccaccaacctcattcttgacatttcatttttgcctgtattctaaattttttcagagattgtgtgctttttttgaagttcaaggcaggctactctaaaagctcatgtgtgtttgcatactgagtatttttcttattggatatgtggatctattaattccataattcatttttgtgtgtaaagtgcacagacattttctttccttaagcttcaactctctagttgtattatactagtcttcccatttccgggtttttgtttttctatttacattactgtatgaagaggaggaagctgatcttgggatatcgtaagtcttggaattaaaagacaggaaaatgctgtagaagtaaaactgtttaaacttgaaagtatttacatatatatttataattaattttggtcccttgctgattttatgggtttggtaagtacttaggaattaagtctactcttagtttagtcttaagatttttatagtaaatattttaaatacatctgaaatattaagataattattcaaatatactaatagagttgctgttctttcaccatttgcttagtggccaacagtattctgattggaattgattattatcattggactgaataatacaatttttgtatattctaagagacaactaacattaataaataaatatctacactgtgtctacatatcgtactctgagcaaaaagatagatattttgctcattttttcctgagtggcatagaggaactgagactttttttttttttttgtgagacagagtctggctctgtcgcccaggctggagtgcagtggtgtgatctcagctcactgcaacctccgcctcctgtgttcaagccatcctctcacctcaggctcccgagtaggtg

SEQ ID NO: 42580 - DNA, 1027 bp, Homo sapiens
ttatataaaaagggacatactagtaaataaatacctaagtagattattttagattggaaatatcactcagtacttaaaagactttaataatgacttgatttcctttcaatgtttgcctctggtaaataagtataccactaaatatagtatatacctaaaatacaagacttttgtgagtctaacataaaaaacagtgtttcttcaagtagcaattcttatatctgcctgtaatatttagttacatttgaaaatatctatttaggttaattcctgtttcacagattatacagattgtgagttcatacattatgggggaagattaccaaagcgggttaataacatgttaatagtggtttgaattctccaagaaaactagccttgaacttttaaactatgtgtaactgggagagagctaccagattactaattattataagataaaaatatacagtaatagacaattgcacactgcttttcaatatttcaggtattacattacagagacaaggataatgactgttgctgttttctaatttataggattatctatattggttttgttcctgagttgcacctgtataatttttgaaaagactttgagtagatattttataaacatacctgtagccactgttatgtagtgaatttaaattagaaaaattgatgttgaagctaagtatcttttagttgctattgtaaatttgtttaaaaaaaaacttcattagttttttctactaattgagttagggaatattaactctttaataactgaacaatattaatggaagaaaaagagaactccttcaacagtatacctagatttacctgttatagaaaatgacaactactgtacagtaatcaaatttttacaaataacatagtttcccttacatacagatgcaaacagtagagtagaattggttcagatcctggtttcatctcttaagtggagtagccttgattaagttatttttaaaccatgtgttgctggaggagagctaccagattactaattattataatatga

SEQ ID NO: 42581 - DNA, 1033 bp, Homo sapiens
cactcaagccccgggagtttgatgctatagttagctatgctcacaccactgcactccagcttgggtgacagagtaacgccttctctcttcaaaaaaaagaaacaggcgaggcatggtggcacatgcctgtaatctcagcactttgcgagccaaggtgggcagatcacctggggtcgggagcttgagaccagcctggccaacatggcaatacctggtctctactaaaaataaaaaaacttaccgggcatggtggcacgtgcctgtaatcccggctactacgaggctgagacacgagaatcacttgaacccgggaggtggagcttgtagtgagctgagatacatcactgcactccagcctgggtgacagagcaagactctgtctcaaaaaaaaaggctgcgaaattttttttttttttaaagaaaggctgcagagaattaagaattacttttgttgatagtgtaattgatagattcatcaaagtcttttattttcacaggtcattgtatcagatgaacctaatgatggttgatgtaccctgtgttctgtacctcataaaaaatgaaggcaaatcattaagacacttggctctgtagttgaaggaactcaaggaaaaaaaaaggaaaaaattggggaattatttgttgtaaaagcaagttgctctgtctgtctgtctatctatctatctatctatctatctatctatctatctatctatctatctatctatctgtctgtctgtctatttgagatggagttttgctcttgttgcccaggctggagtgcaatggtgcagtcagctcactgcaacctctgcttcctgggttcaagcgattctcttccctcagcctcccgagtagctgggattataggcatgagccaccatgcctggctaattttgtatttttagtagagtcagggtttcaccatgttggtcaggcttgatctcgaactcctgacctcaggtgatccacctgccttggcctcccaaagtgctaggattacaggcgtgagctaccacgcccagcccgcaag

SEQ ID NO: 42582 - DNA, 1037 bp, Homo sapiens
ttatctacctatcaaccttctacctaagactcttagcatccatggttatttgttgcccagatatataacctcttaagggttgcagtttagttatttttctaatttatttattccttctgcattttttagctgttggggaatttctaaaagaagcagtcagcacctaagtattggcttatgtattaacaagagaatatacttacattttagttttagagctgagttgcatgttagaatccccttttatgcatttcagttgttctacttgttggaaacagaattcagagttttgaaaaggtgacttcatctacaaattatggtggttttgaccataccttattgcttatatattgggaataatttcattacctgctactaggttggtgcaaaagtaattgcagtttatttttgaccattttgaaaattttgaacattttgaattcttggagtatgcaatgaatatcttttgggaaatttcccatggataaagagaaaatcttttttggattcagtgattttagaacatatacatacttcctgctgacaggctaaaagaaaaaaagaacatacaaagcagtatatgaatgagtataaaccactatataagctcttcactctctaactgaagagtaagatatcaaaattatgtatgtgaaatctcatttttctatagaatgaacactgcatcatggattatgttttgatacataattatataaacacttctgtaaataattatgaagtataacacttagaaatgtaacacttctgtccttacatttgggaagaaggaaaaagaaattcatgctagttttgctgttggacctcagactgcaaaagttatggctgctactccaaaatatccaagttttgcccacaccttttagtaacatgttttgcagagtttgatctaaatttttaagagtgaatctttgtgctctggccacagttcctgcatgttgctttaataatagtactgtaaatcgttgctaaaacttcacttcttccttctgtgtaatttttaaagaatttaaaaa

SEQ ID NO: 42583 - DNA, 1100 bp, Homo sapiens
tgatttcacaagtttccctgttctatttctgtaagaaggtgtttatgtctataggcttgatcagatttaggttcaatttctttttttttttaataagactattttcatagttagactgttttgtcttatcaggtggcacatgatttctggttgtcttatgatggaagccagtgatagtccttagatccactaatttattaggggttgcaaattagtgatatgttaattctgttgttcattacttatcagctggaatatttttattggaacaaacttctcttttttttttttaagacaggatctcacattgtcgaacaggctacgtgtgaccacagctcactgcagcctcagcctcctgggttcaggtgattctcccatccttccacctcagcttgccaagtagctgggactacaggcatcgccaccatgcctgactagttgtggttttttttttttttgttttttttttttttttgtaggcacagggtttcaccatgttgtccaggctggtctagaactcttgggctcaagcaatcttcccacctcggcctcccaaagtgttgggattacaggcgagagccaccttgcccggccatgtctctatgttaactattcggttctcttaagatatatttcattgaggaaaggctggataaatgcttgttgaatcttagcctttatttactggttttcagaataatgaaaaattaagtatcattgtgacctcatggatttaaaccatagtggatgtcagtctcttgcagttattacccttattgatgcttaaatttcattccatttctggtcagtaggaacctcttcaagctggttatcaagtcctttaaacaacaccctagtggtacttcatggcaaagaagatatctggtgtgacaagatgtctcaggcttatcctgcacttctgtgccccaaattcagagttggctttcaagaccagaattggagagctagtcatgccctttcctactagattggtcactgttcctagtctttttagtagacaaagctaggaagtatgtttcatctgtttctttaagataaaatacatgagtttataccgataattgcaattgaaatttagg

SEQ ID NO: 42584 - DNA, 1100 bp, Homo sapiens
agataaactgtatatttcatatgtacctgttaaggtactttttaaagcttgtacatgaacctttgtataaaaaacaccagtgctctttcgttgtatttttctcatttttgctttttaaaattcctttaaaaaatgtgctgttaagccagtattaggtatctttattttgtaagtgaacattccagctgtttttttctggcagatctgatgctgatttgatgctgtatgatcttttttttttttttagttaaattcatttagtgaatgttctattattttatacatacacattaagtactcagctaagtaatggcactatgaggattttttttttctttcctgtcagcagcagttctgtgaatgcatcttaggtataaaaatgcaatacagatttttatattttggtgtggacatggctcattttgttttaccagttatttgcaagcaaaatgtaatttaatgtatagatgatttctaatgtctcctgacaaactgtaaatactgcatttcttttgcgtatataattgcttacagcttttctcatttgatatatagcattgtacatatgacaagtcttttgcaaaactgtgtgatctttgtgaaagtagtacagtatatgacctttaatttcttttttattttaaatatactgtcacactgaagcactggttgggcattttaattcatgttaataaatcacaattatgtcagttttaccagattgtcctgtacaacttctaagatcgggatctgtgtgtttctacagaagttctagttttcaaatatagattgtaaggagccttcaattttctttagcgactactacctcagcaacaggaggcagcaaggggctgttcctgtggtggtttctgtttgcatttttgcaggagccataggaaactactgaaatgattgtgctgggtaaattaaggatctggcatcatacaaaatgaagccagaccactaatgcattacagtagttcttgaatacaaggtacaacaactgtttgaaaatatgggtagtttgcccaaaacaggaaaatttgtcttgggtgtaaaaactaaagaaaaaaggcattattcctagatctctcagtgaa

SEQ ID NO: 42585 - DNA, 1047 bp, Homo sapiens
gttttgttttttgatacagagtctgtctgtgtcgcccaggctggagtgcagtggtgtgatcttggctcactgcaacctctgcctcttgggttcaagggattctcgtgcctcagcctcccgaatagctgggactacaggcctgtgcccccacgcctggctaatttttgtatttttagtagagacgggatttcgccgtgtttgccaggctagtcttaaactcctggcctcaggtgatgcacctgcctcagcctcccaaagtgctgggatcacaggtgtgagccaccgtgcctggcaaaattattaacttttgaaggcagataaactgcttttatatgttttatattttctttaactccatagtacttagtggcgttgagtaattgttattcttttgttgtaggtgacataaatgttacagttcttattggaagtaaacaagtcagtgaaggtacagataatggtgatctcccttcttatgtgtctgcattcatagaaaaggaagttggaaatgaccttaaatctttaaagaaacttgataaactcatagaacagaggacagtaagtaaaatgcagttagaagaacaggtaagtattgaaactcactgaaataattatcagtggaatacttttaacaatataatataaacataatctattatatatagaattttaaagatatagaacgtgacaaatagtctattatatactgtttaagaggatttaagaacgtacattgtattacctattttacaaattaggtaaaagacaaagttcctactgatatggtttgtcttcaaaacatagtgagacctaacattttacatagattttcatagagtgacttttttttcctttcaatctgtttctagtgaacatacagtgacttttaaattgcttttacaagcaaataatttcatggcatacaaaaatatataccatggtgtaaacaccatcatttcaattttttttttttttttttttttgagacggagttttgctcttgttgcccaggttggagtacaatggcgccatcttggctcactgcaa

SEQ ID NO: 42586 - DNA, 1075 bp, Homo sapiens
actcccctcaactgttctttcagattctgtttgagacatctacccaacctgtccattctgccctttccttttccctagcagaaaaaaatagaagcctagcatgaatttagtagcattgaattcagtctgttgaatagtctatcccacaatcgacaaatttatgtgcagtcatttttaacctcttcattcagcaaaggatcagtcgaaggcagaccttataccccaggttctctctgccacctcagtaaacttgtgtcactcttataattttaccctgtgttcgtcaaccagtcctatcccttcagcatgtgcacatagacaggtcttttccataaaaccttaacaaagaaacaaaaaaacccatgatcttttagcaggtattagttctttcctttgattgtcaggcttcagaaagtaacctttgttatctatctctactttttgtcattcatcttttacccactgtaatcaggtttgtttccctaatgaccacagaaacttttactgaagttccttattgaaccttaaattcagcatgtccaaaactatactgatccattttttagaggcttgtctgtcttggttagataatggcaccactatttgcctgtcacccagacctgaagcctaggagtcctagattccttcttatcatcctctcatcctctatcccatcaccaagtcatctgagttcagcctcaacatctctggtatccatcccatctttcccactcttttttttttttttttttttttgagttggagtttcactcttgttgcccaggctggagtgcaatggcacaatcttggctcactgcaacctccacctcctgggttcgagtgattctcccgcctcaggctcccaagtagctgggattataggcatgtgccaccacgctcggctaattttgtatttttggtagagatggggtttctccatgttggtcaggttggtctcaaactcccaacctcaggtgatctgcccgaaagtggatcttggccttccaaagtgctgggattacaggcgtgagtcactgctcccggcccatctttcccactcttgctgataccatgt

SEQ ID NO: 42587 - DNA, 1047 bp, Homo sapiens
gaattaactgtatgtttattcaatataaaattaggttacatattatttgcatcataattaactctactgagtatctgatacatttgttggaaaaatttattgtgtgtgtatacatacatatgtgtgtgtatattaggtatgcttttgattctttttccttgacttgattatgtcagagatgaattacttactgagccaaagcaactcccagaaaaatactctcttcctgcctccccttctgtcatcctgcccatccaggttatgctgactcctcttcagaagaggttcaggtatcacttcagagggaaccggcagactaatgtgttaagcaaggtgtgttttgccagctcttgtccttggtttttattggtaacaaatgttagagtttctatacctttgctggtttaagttaaaatctgactctcttcacatttctgttttttttctaaagggctacattcctgttttgttactgctgttcatacatataattgaggacttgtgttcatatactgtaggaaaaatggtatttccgctcttgggcatcagatattgctgagttatcattgcaaaacaaagcaaagcaaatagtaagcacttggtatttcttttctttttttttttttgtgagttggagtctcgctctgtcacccaggctggagtgcagtggcacaatctctgctcactgcaacctccacctcccaggttcaagcgattctcctgcctcagcctcccaagtagctgggactacaggcacatgtcaccacactggactaatttttgtaattttagtagagatgggtttcaccatattggtcaggctggtctggaactcctgacctcaggtgatccacctgacttagcctcccaaagtgctgggattacaggagtgagccactgcgcctggcatgtacttggtatttctgctcttaaacctgtataagacatgcgtagtttttgtaatgcagactagcaattttttttttttggaacgaagtttcactcttgttgcccaggctggagcgcaatggtgtgatctcggctcac

SEQ ID NO: 42588 - DNA, 1026 bp, Homo sapiens
aagtggaaatactgtatcaaaaggtatggaaaatttaaatgatagataccacgtttcttaccattcaggatgtacctcagtgagagtgcagatgagatcacatgttttcttgcagcctcaacattccaggcagtgtagacagtgcaaaggtcctgtggtagagggaacctggtgtatcagcaggactgaacagattccctaggggcagagagcagagagccaggtggggagtgaagagggaggcatgggccagaccttgcagggccttgcgattcatcttgagggttttggtccttatcccaagagaaaggagaagccaaagggaatttcatgcaagctgacatgatgagataggcattttgaacaggtacctctggctgctgtacaggcaatggactgggaagatggaaaagtagatgtgaagagcacctggggtagctattttgggagtccaggtgagagatgatggtagcctggactcgggtggaggctggccatggagaggagtggctacatttaaccgttttttaggccacagaactgatggaagctgatgcctaagtgggcttaggtggggactgaggaagaaggcagtgtcctggaagaaagatggaatgggagttatcattgggatgatgagatgtcaaaggagcaggtgatgattggccaaaaaagtgaagatccagaggagatacctgctttagagagcagcctttgcacccttgtctctcatgcccgcagctctatcaaaggcaggctgaccatgggattctgccaccctggccacagctgattggagtgggaaagtacctgagccgtggccataacgtggtctggagtgaaagcctgcccatgaaggggcagtgccaaatggagctgatgagatgtccttcatggagtttgaaggagaacccaagtgagtggcaatgtttggagctggggagtcagaagaaaggccacacaaggagagggcaggaaatggaagtcgtaagttaaagtcacaaggaaacaaggagagaagagaga

SEQ ID NO: 42589 - DNA, 1055 bp, Homo sapiens
gagacagccaaagagctctgagagagagcaagtgtgggcaagaaagaggggacatttgtgtctctgaccatgaacatatgctgagtcacccaactgcaggtccatttttttggtgagactgatataaatgttcttccaaactggccaagctgcaaggtttccaaaagcaaagcttaaggctggacgcagtggctcccacctgtaatcccagcactttgagaggctgaagtgggaggggtttgagaccagcctgggcaatgtagcgagaccccatctctacaaaaaaaatgcaaaaaacaaaacaaaacaaaaacccaaaacaagcaggcacagtggctcacacctgtaatggcagcactttgggagtctgaggcaggtggatcacttgaagtcaggagtttaagaccagcctgaccaacatggtgaaacctgtctctactaaaaatacaaaaattagccaggcatggtggtgtgcacctgtaatcccggctacttgggaggctgaggcacgagagtcacttgaacctgggtggtggaggttgcagtgagctgagatcatgccactgcactccagcctgggcaatagagcaagactctgtctaaaaaaaacccaaaaaacaaaccaaaaccaaaacaaaaacagagcttaaaaagcaagacttgcagaacattaggactaggaggtagctgtggccagggctctgtgtaatgcaaagattatgtctataggacctctgcaggcctgggttttactcctagctgtgtccttactagttatatcatcttgggcaacttatgtaaacccctgagcctcagtttcttcctttgtaaaatgggaataacaatttctgccattcagtactgttgcctagatgagtgataatttgtgtcaaatacctggcacatactagggactcaataaattttaagtacagtaatgtcacttaacaatggagatatgttctgagaaatgtgtcattaggtgattccatcattgagcaaacatcatagagtgtacctacacgaacctagatgcctactacccacctaggata

SEQ ID NO: 42590 - DNA, 1030 bp, Homo sapiens
ctctgctactgtggtatcagctttattccaagtctggcttcctttgttgttgcaaaatgcttgtcagaagaagcctgggtccatctgttaggattaagtttactctgtatgctgtagtagtggctatgacaagatagaagtgtatttctcctccatataaaagaaatccagagataggcagtccagggatggtatgtggctccactatgtcatggacccagacatttaacttgatgctccacgtcctaaggtatggctccttttctcaagttcacctcaaggtccaaaatgactgctagagttccagccattacatctgcattctaggcaggaggaaggggcagaagaaaggcttgcctcttctcttttaaggagactcattggaagtgccacacaatcctttgcttacagcttattggctggcacatagggtagttgccagggagactaggaaataaagtcttttgttccccctcccatcctcagttccttttgcactgtgctaaacaattctaggacttttaacagaactcttcataaaagtcttgaattttattgtatttatttatttttgagatggagtcttactctgttacccaggctagggtgcaatggtgctatcttagcccattgcaacctccacctcccacattcaagtgactgtcctgcctcagcctcctgagtagctgggactccaggcgcgcaccaccacacctggctaatttttcttttttttttcgtagagacaggtttcaccatgttggccatggctggtctcaaactcctgacctcaggtgatctgcctgtctcggcctcccaaagtgctggaattaccagtgtgagctaccatgcctggccaaaaatcttgggttttagatcccttctttatttttttggatcttttctgaatcttctccagtctttcctgattcacaaggggcacagtcataagccaggaaatccctaaacctttatatactttagtttccccatctataaaaagataaaagataattgtagctaccctttt

SEQ ID NO: 42591 - DNA, 1046 bp, Homo sapiens
acaaatgctaaatgtgcattaaatcaaggtatgtaaaagtaaaaccgtccagtttaaaattctactctagaggctgccactgccaaatttgagaaggccctctgcagcccaccaccacaagctggaagttatagtcacagcagaggggagccttcgcctcctttgctctggacaccatctgcagtgactgcggcctccaactgcactgtgggcttggagcagtgagtaggtttcttttgaccttgaagcaactagaccctgagttttttgtttgctttaaataaacttgttcagatggcactcattttatatccttgcaaatgtgtttcttggtcttagaaggactttatatctatctccattatttttcttgttggttgtgatccattatatcaacttatatagatctttcagttctttcaatttgatcaccgattaaattatctcgctcaatgtcattctcagatcttaatacatgtgatgcctctctttgtccaaataattgataagagctttgttaaaggtaggaccaaggacagagtctttgagcacttgtaggggaattaatcaattaatactcctgggctacagtttttcaaccaaatatgaacacacctgattgtattatcattcagtcttgtctataagggcatgaaaaatttggtcaaatgcctttctggccacagcattttcctgattaatccagtaagtttattcaaaaaaggaagtattcaattttattcttggcaaacctatgtgagttcctacataccatcaccttttcttcttagggttcagaaaatatttcttttatggtctgtgcaagaactttgctgtggattgataccaaacttacattttggctgggcttcaagtgactcagaaaggggctgggttcaggctgggatgtctggagcctgtagtggtggcaaggcaaaggccagcagggatagtgaatagaggcctcagtgatgaggtgggtgcgttggttaattgcacaggtgatagggctggctaattagggtagggaattgactagctgtcag

SEQ ID NO: 42592 - DNA, 1047 bp, Homo sapiens
aaccaactgagaaatagttaagacacaaggcagatctcaaatgctgccaagtttacccatcttagcaggacagggatttataattagagctgctcagaaaagcactgccttacgggtggcaaaggacaaaaaaggctttgtccccaacatctccacaggctgcggtttcccagatgggcccttaacagtgtacacaccctctccatcgccagggtcctcaaagccaccgcctctaccaagcaaggttcgacttctacaccacgcccctgacattctctccaggcctcttttgtttctggcccaggctggatgcatcacactgtgaattcctggatgaggaagaacaaatcttgcggagtgttctggaattacagaggagagccataatgggaaaatgtgacaaagcaattcccttctctgacatacacattttacccctgtctctcacctttgtcacgtttccccattttttcaccttctgtgggtttctttttctgtaaaatgaagggattggatctgctggtttcaaactgtgctacctggagccacttgcgggcctggcggggcccagtggaagtggatggggagatggtgagaagggctctcttcaaaaaaagcaggagggggctccaacatagcatttcaaggaaatcaagggatccaaagttaaacaatttgaaaatcacaagtctggacgaagtctcattgttctttccaactgaacactgccggtgtggtgtgcctcacttctcagtctccattcactaacccaaatatccccaaagatgtgcaccaatttttctgtctagcattcatcagagtgctcctgtgtgccaggccctctgctaagcactgggcatacagcagtgaacagaaaccccagggggctcatagaccagttgggaagattggcattaaacaaatgaatatgtaaatccaaatcaagaggtatgaacaccatgaaagacaaaatcatggttgaaagttgagtgggcctggggttggagagatactgccctaagcatctcccctccccacctggcttgc

SEQ ID NO: 42593 - DNA, 1014 bp, Homo sapiens
acaagtctctagggcaggggcaaaatgccaccagtctctttgctaaaacataacaagagtcacctttgctccagttcccaacaagttcctcatctccatctgagaccacctcagcctggatttaattgtccatatcatgaacagcattttggtcaaagccattcaacaagtctctagggagttccaaactttcccacattttcctgtcttcttttaagcccaccaaactgttccaacccctgcctgttacccagttccaaagttgcttccacattttcaggtatctacagcagagccccactctattggtaccaatttactggattagtccattttcatactgctaataaagacatacccgagactgggcaatttacaacagaaagaggtttaatgggcttacagttccacgtggctggggaagcctcacaatcatggcagaaggcaaggaggagcaagtcatgtcttacgtggatggcagcaggcaaagagagagcttgtgcagggaaactcccccttataaagccatcagatctcatgggacttagtcactatcacaagaacagcacaggaaagacttgccaccatgattcaatttcctcctactgggtccctctcacaacatgtgggagttcaagatgagatttgggtggggacacagccaaaccatatcagataccaaccaactcccttgccttccagcttctagttggccaatggggagtcctggaaagagaaggagaggagggtcaggctctctctttgtgagctgggtgcatcccttccctgcctgaagatctccattcccaaaagcagctctctgtcgcaggacctgcttcctccactggcttccctgggcctagtggtggtaagggtgcttcactctcacgagccctgagatattgcaccatctgatgagatttccatatactctgtgagcaccttcttcatagtccctttactgacccctcctagaatgatcctaattcaccagctgcttcctgctgacacccc

SEQ ID NO: 42594 - DNA, 1044 bp, Homo sapiens
gaaaaatggtgatgcattttataaatatctatatagtaacttcctagaaaaggaacagtgaggtggaagatcatgcatatctaaaattttattaaattttgacaaatggcttttttagagtttgttccattttaccttctcaccggaagtctgtgtgagaatgcctcttttcccacacggtctccaacacagtgtgatattctaacatttgtatctttttgaatctggcgagtgaaaagtggcatctcatttcgattttaatttggatttctcttcattttcagagaagttgagtaacttttcatgtttttaagaatcctcctttctcttttctggaagctttgcagatcttttatctttagtgttctaaaaatacattatttcatcctagtgtggggatttatggtcattgactgtgctgggcacttgagtgtgcccttttggtctgaaaacctgtgttttcagaccaaaattttctttgggtctagaaaattcatcctgtattgtttatatttcctcctttttgttttctcttttactgtctctggcactcctttcttttcatctctttattgactttttttgaggtgtttggttttaatttttttaactcttttatttacctttaaaaaaattgtaatggtggatacatgtctttacacatttgtcaaacccatagaatgtacaacaccaatagcaaaccctaatataaactatggactttgaatgataataatgtcagtatagattcagcagttgtaacaaatatgccactccagtggaggatgtttatcttgggggagtctgtgtcatgtgttggggtagaggatatgtggagtatgtctatactttctgattaatgttcctatgagcttaaaactgctctaaaaaattctattttattttttatttttgagacagagtctcattctgttgcccaggctggagtgcagtgtaacagtcatggctcactgcagcctcaacctcccaggctcaagcaatcctccaatcttggcctctcctgagtagctgagactactcatt

SEQ ID NO: 42595 - DNA, 1047 bp, Homo sapiens
tcattaagctattttgagtcttctctgttttgcaataaccgctgtccatacaatggtgttatacctgatttccaaacctgattacatatcagaatcactttgggagcatttatgaattattgagccctacatgcagagatcttgagtcattaaggtctggtgtctcagaaatcttttttaatactatagcttattctgatgcagagccaggcttggaaataatttcaatatttgtgctaattatcttgtaaaattttcttttaaaaaaagtattaggagtaaaacaagtccaaattacagccaataccaaattgggaaacaagatgtttaatttcctagtgtcttagtccttttggggtgctatgacagactgttatagaatgggtggcttaagcagcatacatttatttctcatggtctggacgctgagaagtccaagatcaaggcaccagaagattcggtgtctggtgagggcttgttttcctgtttaacagacagcgtcttctacttgtgttctcacatggtggaaggggcaagggagctcattgggatctcttttataaggacattaatcccattcatgagggctccagcctcatgacctaaccatcttccaaaggctccaccacctaatactatcctgggtgattaggatttcaacagagggattttagagtgatagaaacattcagttgcagtccatcacacctagagactttcatctatactggcatttttctccattgcactagttcatttaaattcagccttattatgttggcataagaaagaatgaataagacctagtatttggtagcacaatagggtgaccatagtcaataataaaattgtatattttaaaataaatgtaattggattttttgtaactcaaaggatagatgcttgagggggcagataccccattctctatgatgtgcatatttcatgttgcatgcctgtatcagaacatctcatgtaccccataaatatacacctactatgtacccacaaaaattaaaaataaaagtaaaaaaaaattaaaatatt

SEQ ID NO: 42596 - DNA, 1099 bp, Homo sapiens
ggctgtattaaaattaaaactttgggccagaggcggtggctcatgcctgtaatcttagcgctttgggaggccaaggtgggtggatcacctgaggtcaggagtttgagaccagcctgaccaacatggtgaaaccctatctctactaaaaatgcaaaaattggctggccatggtggcaggtgcctgtaatcctagctacttgggagactgagccggagaatcacttgaacctgggacgcagaggttgcagtgagctgagattgtgccactgcactccagcctgggtgacagactctgtctcaaaaaaaaaaaaaaattaaacatttatatgtaagagcacaaatatactcaaagacaaaaaactgaggagaatatttataacacatgatagatagcaatactaatttctttgttttattaaaaaaattacaaataaaaagaacaactaatggaaaaattatatacagaaaaatgcaaagaatatgaagagagctcacaaattagaatattcaaatgttggatatacactgtatgataagttgtgaggaaacaagaacttttatccatattggtatatgtctatattggtaaactcttgaaagataattctgtaatatctatcacagtgttgtatgttaaatgcctattaacaattctcctaagaatttaccctatgaatatactcagagcatgtgaaacagtctaaaaatacactatatggtccatccgtacagcggaatatcccactataaagaagaaaataggtctgagtacatctcccagatacatgaggaaagaaaggaacactaggcacagtggtatatatagattgttcacacttgtttaaattttacaggtatacaaaaaaattgttctggaatgcagtaaactaattctcacctttgagaagagggtctattttgtcaaaagtattagaattgttttcatttatcaaattttgtactgtttgaattttttaccgtgtaaattgcttttaattttaaatattttaaattgtttaatgttatattatttggacagatgcttcttaggctaaaaaatcgttattgctattttatcctgtacaaacattaaagtttg

SEQ ID NO: 42597 - DNA, 1065 bp, Homo sapiens
gttaaggtgacaaggcttaagaaagatttagaaagagatcttacatttgaaaattgagttaaaaaaaagcaatttttttttttagaggaaaatagggtgttttccatatgaattttcttatcctttgtgttacttaaatctaagtgaaacattttctcccaagtgtattattggaaacaaaacgtaaatacaaatgtttatttaagctagttagccccaaatttaaaaagtggcattctgaaggcagctactgagaacactctatcagtagtggcaaacaccttcagtttttaacctccaactcctattttgaccaaagtttgtaaactattaccggtgcttccgtgcagtaatatcaccctagcacagacattgcatttagtggaaaaaccttctgatgtccaaagagattgattttaaaggtctcttccaggaaaactacttattttcataaatgaataccttcttttattcttttttttttttttttttttttttgagatgaagtctcactctgtcgcccaggctggagtgcagtggtgggatctggctcactgcaagctctgcctcccgggttcacgccattctccagcctcagcctcccaagtagctgggactacaggcgcctgccgccacgcctggctaatttttttgtatttttagtagagatggggtttccccatgttagccaggatggtctcaatctcctgaccttgtgatctgcccgcgtcggcctcccaaagtgctgggattacaggtgtgagctactgcgcccggtctcctttattcttataactagaaatatgtagcattcagtcattgtatgcatccaagcaatgataaaagtaaatatcgtttaaaaagtgattgagctgcatgtggaaatgtctgttcttcattcttttaggagcaggaatacatatagatataaaaaacatcccatattttaaaaggaattcttagggcttgccaatcttgtagtaaaggttgaattagcagtatatgtcttctacataaaggaaaagagaaaacagtaattgggggaaatttcttgaccatgccttt

SEQ ID NO: 42598 - DNA, 1089 bp, Homo sapiens
ctgtactacataaatcatatttttttccttacaggatcgtttagaaagaggcaacaagaaaagactgtgaactttataaaagacacttgcaatatactgtgtcaaaatgataattttgttatgttagcctctagaaaatttaagttcagaaaaatgcactatgaccggttcgtaatttttttaatgccacacataggttgtattgtaatggcattatcaaaatatttgatgatgtttcagatatattgcaaagtctgtattccagctcttaagaaaaatataagcatgttaaataccatatttacatattgataatgtcattggtatatggtggctgtttaccaataaaaggaaaaaattcattaaccggttgcttccaaaattagaagttttaagttgcatgaaaccattaatagccttgaaagctttgataagttttcagtaataataacctatttaatcagatgatgatgtgtttgaaaatagtgttcaatatcagcaaatttgtacacagggaatgtaaataaggataactgatcagagttatccactgtatttataaggaagagtcggaaaaaacaatgaccttagttttttttaagcctgatgatactatggtttactctaataagatagctatattgataattatatttttgttactgtgcccttgcacattttggtctttttgttaatatttttattaataacacataattagtaaccactctactgtttcaagttaatctagtaatagagcttacatatatttgtataactgctataccactgaactgaatttattttacaacagtgtagaattcttgaaaagttaacgtagaaaatatccaaaaagcagtatttctagaaagtgtccaaaaagcagtatttctttcccttggttgtgagagtaactaattatataaatattacctcaaaaatacatacactggtatcacacagtctttctacaatgtttctgtattctgaaagctaaatattaagtactatttttccattcaaatattcatttagaatttcctttagaagatggcagtgattataatattaatatgatttcatttgttc

SEQ ID NO: 42599 - DNA, 1026 bp, Homo sapiens
taacacagtgaaacctcgtctctactaaaaatacaaaaaattagctgggtgtggtggcgggtgcctgtagtcccagctactcgggaggccgaggcaggagaatggcatgaacctgggaggtggagcttgcagtgagcggagattgcgccactgcactccaacctgggcgacagagtgagactctgtctcaaaaaaaaaaaaaaaaaagaaaaattaattgagtttccttattttgaattttagatcacaccagcttttctaaggtgtaaatgggtgatataggagcctaggaacactcaggtgtaacttataagagcatcctgactttggattatacattcgtattggcagtaattaaatagcagtacactgaagtgtctatcagcttcaaaaacttcttgcatcattgtttgtgtgttaatgtgaatgtgtctctctgtgtgtgtgtgtgtgtgtctgtgtctgtgtataggtgctgtaatttagtcatgtgggtaaagttaaaacttgtgtgcttggctactctgtttaccagttctagggccaaaagagtcgtgagaagcctggctccttggagggatatatttgtctgctcagctttactttaggtaattggattctacctagaattcccatcagactgttgattggttttctgttcttttgtaggagttgagaagattgccatcaactttttaattaggccagagaaattgagcccctttcatcttcatatatcttaagtttattgatattgataaatgcattgtaggaaaggatacatgagaatacgatatggctcctgttgtttgggtaattaatcagggagtggttttaattgacaggatgaaatatgaatatgttaaagtgtctaaatcactcattttagggctaaagaagaggataacttgtttgctaataaaatcgatagaatgctttatgttttcattatgctattggcaatacaatcagtctcttagcataccatttttgtagctagactagaataaatggtgatcaatatct

SEQ ID NO: 42600 - DNA, 1009 bp, Homo sapiens
gaagatagaacatttatatattcctgtagtactgacagaaaacgtgtggtataataatgagggaaaggagcaatctagtttttttcctttattgttttcttagttttaaaaaaattcccagcacatagtatgtcttcatattttttgttgaatatatgagagagatatagatcatgtactatgaaaattctgagaaattttcctcttggtgggtatctgggaaaacttgagcagataccgtctaaacgtgcctaggatttgcagaaaagtggaggaagagaaggtacacagttatgaagatggattcttctgtttacagaaagctttcagtgacagagggagagggagcgtggagggcattgtggccaccaggatctgggatggagtgggtggcatgcaatgggaaggaaggtgataatctttgataaagactgaaaagaatgccaggcagcagagacagcaggaacagatactttccaaaatatctgggatgatgaggaaagggtaaaattgttagtaaattaaaggtttctgggatcaaggggatgtttttaattataaggaagccttgacaatggttgaactaattttcactcccaccaacagtgtataagcacagtgtggcgattcctcacagggctgaagacaaaaataccatttgacccagcaattccattactggatatatacccaaaggaatataaatcattcttttataaagacgcatgcatgcatacattgattgctgcactattcacaatagcaaagacatggactcaaatgcccatcagtgatagactggataaagaaaatgtggtacatatacaccgtggaatactatataaaaacatataaaaaaattaaaaaaaaacaatatcctttgcaggtacatggagttggaggccattatccttagcaaagtaatgcaggaacagaaaaccaaatactgcatattctcacttataagtgggagctaaatgatgagaacgtatggacacatggaggggaa

SEQ ID NO: 42601 - DNA, 1048 bp, Homo sapiens
catgcctgtaatcccagggacaattgcttgagcccgggaggcggaggttgcggtgagctgagatggcgccattgcactccagcttgggcaataagaacgaaactccgtctcaaaaaatgaaaagaaagactatcatttcataagtgctttttgattatttgaagtctgtttatgaatatttgataatttgatctttttaatttcctttaggctttattgaacaactctcattattaccatatggcccatggaaaagattttgcatctagaggaattgaaagtaagtatacttttcatgcttaatgatattaccagactgcttgacttggctcttctgtctaaagacttaaatgtgtctaacgtacgcataatagatgtttagtgaaggaagagtaaaataaataatctaaaaaatgtggagagatttacttaaaaaagaaggcctaaatccagatttctcccagccaagtataaccaagcctaaccctgcaaatccagatttctaccattatatcttctgttcctttgccaactttttcctgaggtttgcctttatgtgtttttgaagagtcagttttcatttcctaaaatctggaaatcactgagaaggctggattcctgagtactatggggagatagaggaaggaaggaaggcccacttaagctgttgatagtagaaaaattagaggagagaaagagtgaggcatagcggaaaaggaagaggacatttcataacgtatcttgtctcctgacatactttttgagctgttttaatcttttgtctccaattattgttgttgttagatacttccagaaaggtagtctcttctgggcaggacctagtcataaccttgggttgttacttttccttcatttgtttctttacagaggtaggtttgaggggctacttaaggcaatccattgggtatagagatgatgtatatgcactaaagcaaatagaatatcatactagttgaaaaatggaatgacgtaaagaaagaagagctaggggtagtcaggagacctgcattgtaggcaaggcttttac

SEQ ID NO: 42602 - DNA, 1047 bp, Homo sapiens
tggactaatttcttcactgctttatttggcagtaattagcattgctgattttcttgcctttgaaacactttgcctaacttctgtgatttcatattcttccatttttacatctgctctttgggctgaattctccatattatgcaagttcccctttcttaggcttccctttaattgttagtatttttgtttttctttttttttttttttgagtccgagtcttgctgtgtcgcccaggctggagtgcagtggcgcgatctcggctcactgcaacttctgcctcccgggttcaagtgattctcctgcctcagcctcccaagtagctgagactacaggcgcccgccagcacgcccggctaatttttgtatttttagtagagacggggtttcaccatattggtcaggctggtctcgaactcctgaccttgtgatgcgcatgatggttcatgtctataatcccagcactttgggaggctgaggcaggcagattgcttaagcccaagagtttgagactagcctgggcaacaatgtgagaacttatctctaaaaaaatgtaaaaaattagttgggcatggtggtgtgtgcctgtagtcccagctactcaggaggttgagatgggagaatcacctgagcctgggagtttgaggctgtagtgagctgggtcatgccagtgcactccatcctgggcaaaagagtgagaccctgtctcaaaaaaaaaaaaaaaccccaaaacaaaaatcagcttttaagttatctttttagtgaataattctttcttctaagaaagctcaagtctttcattttttgagtccttagtataatatatctacatttccatagtacccactaataataatacattgcatttgtttgtctatggctgactttcctataagaccaaagctccttgaaggcaggaccgaatttttaattcctatttgaatctccattgtttttcttaatgtttagtacttaggtctcctagacagcaggtctgttattttgtcatcaacctttggatcctgtctagtccgttaagaaaacttgtaat

SEQ ID NO: 42603 - DNA, 1126 bp, Homo sapiens
cccacacctaatttagggaaggtaaacttttatagttcatttgaattaccagatgattttaatatacattcttgcaaaggatatgttcatggtttttcatatttaatgctgtgaaattatgttcatcttgccagttatgtattgtttaatatataattatttagaagttatactaattgtcaaaatgttaaaataaactagcattcagtttaaattataatttgaatgaaaaagtaaacatttgtcctttgttgagaaaagaaaataggaagccagtttaatattctgcaaacatcagtgatttagtaacctgtttccttttcctcaagacttttgtacttgctgtttccctctgcctagagcaacactcttgccccagttaactgggtagttcattgcctcactccttcaagttttgtgcaaatgtcactcccagtgaggctttccccaaacgtgctatttaaaattgtaatcccagtaatcagtggtcctagttctacttcctgttttatttttcctgtagcactttattctctgttatgaattttacatatttgtctatgtcccctgccagaatataagatccctgagaacagagatttttgctttgtttactaatgtatgcctagaagctaaaatattgcctaccatgtagtagatgttcaacaaatgttgaatgagtaagttaataaatgtatgaagttatacatatttaacacagggtcaattttaaacctcggagcttctcataggaacatactagcgaaagaagaaaatgttttacaataaattattaagatgatttcgtaaacatttgctatagaaacttttatgattattgggtttttttaatttatttgcagggttcagtttggcaaagacttggtgcagatgtgacagcagttgaatttttaggtcatgtaggtggagttggaattgatatggagatatctaaaaactttcaacgcatccttcaaaaacaggggtttaaatttaaattgaatacaaaggttactggtgctaccaagaagtcagatggaaaaattgatgtttcgtaagtatacatcatttgtttttgatgtatcatccctgtctctttaagcaaaacactcaagtttcaaaatca

SEQ ID NO: 42604 - DNA, 1083 bp, Homo sapiens
tagtaagtggtagatatgaattgaaggccctttggctccagagcccaagctcttctgtgtcaccttttctattaagcttttcctgacttttcttcaactgataaagaaacagatttaaggcgtttttaagatctaaaagcttcccctcaacaattgctatcctattagcatgtagtttttgccttggaagcaaatttacttggcttgttattttaaagggtgctggagaaatggtaaatgaagctgctcttgctttggaatatggagcatcctgtgaagatatagctagagtctgtcatgcacatccggtaattattaacaacatatagaattgatggttgcctaaattttcttctgacccacaaatatttggattttaattttaaatttcttcccttgcagaccttatcagaagcttttagagaagcaaatcttgctgcgtcatttggcaaatcaatcaacttttgaattagaagattatatatatttttttctgaaatttcctgggagcttttgtagaagtcacattcctgaacaggatattctcacagctccaagaatttctaggactgaattatgaaacttttggaaggtatttaataggtttggacaaaatggaatactcttatatctatattttacataaatttagtattttgtttcagtgcactaatgtgtaagacaaaaagctacttattgtagcatcctggaatatctccgtcaactcatattttcatgctgttcatgaaagattcaatgcccctgaatttaaatagcttttttctctgatacagaaaagttgaattttacatggctggagctagaatttgatatgtgaacagttgtgtttgaagcacagtgatcaagttatttttaatttggttttcacattggaaacaagtcagtcattcagatatgattcaaatgtctataaaccgaactgatgtaagtaaacggtctctcacttgttttatttaacctctaaattctttcattttaggggtagcatttgtgttgaagaggttttaaagcttccattgttgtctgcaactctgaagggtaattatatagttacccaaatta

SEQ ID NO: 42605 - DNA, 1061 bp, Homo sapiens
caaaagatacaggaaggaaaggtgagattgtagcatatgcaagaagtgagtgaggagaagagaaatggggtgtggggttggaatgcaaatgattctttttagaaactgttcaaatagccatttatggaaatttcatttcaagagattttgttcctttctcttgtgataaaatgtcattatgcaaaatgccctgaagcagagtacttgagaaatttgtgtcctcagtactgcaggaaaccacacaaaccaaaacagaaaagacagctgtctgatattgtggcagtgaacttttctcattgttttgttctctttcccaacctagagagaggtagggaaagttactcttacgtaatgcccgaaaagctacagtaacttccagaaaatttttgaatagtagggagttaaatactgaaattaggtcagtaaatgcaggtgcccccaggcctacggaccagttaggaactgggtgggcaggcaagtattattgcctgagctccaccttctgtcagatcagtggtgacattagattctcataggagcacgaatcctattgggaactgtgcatgcaagggatctaggttgtgcactccttatggaatctaatgcctgatctgagctggaacagtttcatcctgaaaccatccccacccccgagtctggaaaaattgtcttccaggaaactggtccttggtgccaaaaaagttggggaccagtgattcaatggttttaagccccaccccggcgccaccaagtttttaatgttctctttagaaataagcattattgagaaactgaacatgtgtttcagttattacatggcttctgattaaacatttgggttgtgtgagtttttctctgcaaaatatagtgccttcgaatgagaggtgaggggtagttaattcaaaatgagtctcaaagagataagatttggtttcctactacctgttctctgttccaacctgcttgtaaaatattctcaaatggcctgataattactatatgccatgaagaatttaactgactaccgcacagaaataaaagttcaatatgactggtttttg

SEQ ID NO: 42606 - DNA, 1055 bp, Homo sapiens
gccatgttggccacgctggtcttgaactactgacctcaaatgacccacccacctcggcctcccaaaatgctggaattacaggcgtgagccaccatgcccgcccaagaatagaagtttttatctttctcagactttgtgggggagaaaatgagatgggacgtaatggtccagtgtctgaatcagagtccttttattccttgaaaacctatctccacttatttttagcatccatgctaacggagtagtttagatttattaaaggaatcctttaatgttgagttgtaagaatttctgttcatagataacaaatgtacttttctggtaagtgtatatgtaggtgtgttcccattcatgtaatgattgtgtatgcctaccgaagttaacaggttctgggttccttgaatgtcttcatctgcttgtttaattgccttctctgctgcgacctgggccttttctgcttcttccagagcttcctttaccatatctgcagtgactttaacatctgttgcacttttgctgagtaaaaaataatgagacagtatattgttgctgaacatgaaaaaagtactctcagtgttcttttctttaaagaatagccttcctgaaatgacccagagagactcgcataggtccttcttagaagtttcattggttaaagagatactttttactccatgatagatacacaaaataagccccttagatgccatgtctttagataccttgctcttttagcttcttctaacaacatctcagctctggcaatgtcagcagcactatgctgaagaataacctctacttgagaaaggctttcaactcgttcacgtatatcttctgtcaagttctgtaactgctgtggggtgctaggcatctccattttcaatacttcattagcaactgcttcaatgctgtccaaatcagcactatcctctgtgaaaagcaaagatgtccccaaaaagaggtgaaaagaatagatggttcattcattcaaccacttactggtcatctactatggactagcatggtggggttacacaccaagagacactaacttc

SEQ ID NO: 42607 - DNA, 1032 bp, Homo sapiens
cagacaattgagtactactagaatttgttttaggctgggtagtgagggaaaccttcgtggaagatgaggagctgatcagattttaagggataatagaatttgaaagaagaaaggacaattccagatggggagacaggaacggcagagtatgttacgggaaagtatagcagagtgaatctgaacattgtggaaaaccatagagggccagagcttaaagctgagacttaaaggcaatgaaatcttttaattgaggttggacgaatagctcagaaacttgtgaatgcagatatggagatttgatatttcctacaaatgatctagattcaggaaattatagaaagggagaaaattatagaagcaggagaaccggaataatgggttgtcaacaaagccaaggagtttcaaatgtaaaatgtggaagatggtgaaaaaaaaagtttatgaagttaagcttcaaatacgtcagatcctcatttactttcaagctttgcttatgttttaaactattgaacataaaaatggaccccagaggatttattcaaataaaatatgtacttgaatgatggcttccataaaatattacctaagatatccttagcaaatactgttgactccttattagccatgccttttttcttgctaacagaatactgattttttttcaggtacctgcctctaagtcaggtaaaattatcaacccagcattaaatattagtttgtgaattactgtaatcgcatttccattttccagtgacatttatgcattggcatgtgacttattgctggccagtgaggtttataaggatgactgcttaaaggcttctagggaagacttcctcctttttaaaaagatgcaaggaataggtggtctcttcttccattattaatctttatatgatgtctggaactttggcagctaccttgtaaccatgaggagctagaggacaaagctgatatgcttaagatggtagagtagaaagatgaaaagtatgtgggtcgcagacccaggaagctatcctgctactggatatc

SEQ ID NO: 42608 - DNA, 1049 bp, Homo sapiens
gaccttcagcaagtaataggacctcattattactattatggctgctgctgctgctactgctactactactacaaaagcttggatgtaactttaaaatgattacaaactaatcaaagaacattaaagctggaatcaagacaaatcccacattatacaatatataaactctgtaaggacaggaactgttaaatatacctttaacctcatcctctgggacagtgtcatgttgtgatggcatttggtggtgtttggcaactgtgaatcagcgccatgctgggctctatatgggatacaaatgaagaacccctagccttatccatgtggacatctcagtgtagttggtgggctctgcatccctgtctcaccggagctaataagagagtctcttctagttccatatagcactgtgggatgaagtggatacatttgattctgtgatatgcatgccttgccagaggcgctgagcatactaaagcttttacatgtgtttatttttaaaagaaaggaaattcttgttttgcctccttgtttctctaatactgtcctcatttcatgtttttttcttaactgaaagaactctcccctccctgcaagtaatcacagaggccctgcctttaaaaaactttttttagtgtttttatccaaatagagaggtttgtttttttactagtaaagatctcagaattgtaatcgtggttatttaacacagtcttctgttatgtaataagctgctattcaccagtaatagccaattagaaaagaaaatatcctgtacccgctaatcgtaattaccattataaagcaattaatagcagaaactgttgctgaactgtaacataacatcaatcaagctgtctttgccaaggcactgtacaactaattttctcaaatgaaggaggagaagggaaggaaaggaaggtgagagtctgcgggcttatttgaatttctttcaaaccagtttatgaatgacttttgaatgctctttaaatatgcatccactcacaaaggtaagtaatgctaataatgtactgcgacattgagttattttt

SEQ ID NO: 42609 - DNA, 1078 bp, Homo sapiens
tgttcctagggataacatcactattgtaaaacctaagattagtgtttgagatattttccagaccctgcactcagtgggtcagctggtaccaccgtatcaataaactggctcatccggtcttgtggccgccacccagaaactgacttagcgcaagaagacaagttcgactccctacgatttcatctctgacctgaccaatcagctcttaccactttctgattccctatccaccaaattatccttaaaaattccgatccccaaatttggggagattgatttgagtaataataaaactccagtctcctgtacagctggctctgcatgaattaaactctttctccatttcagttcccctgtcttgataaattgattctgggcagtgggcaaaatgaacctattgggtcttgaaactttgaagaaaaggaatgacaagatcaaagtttaatcaggtaacaatgtactggagggggaaagttaagtcaggagtccttgctaaagcaagagttaatgaagaaccacaatagacttcagtaacttgccgttgttttttgtttcgtattttagaattttttaattgacaactaaaagtatgtattatgtacagcatgatgttttgatatatgtattaatatacactgtggaatggctaaaataagctaattaaccttgcatacttaccatttttttgtggtgagaacatttaagatctactcatagcagttttcaagtatacattacagtgttattaataatagttaccctgttgtacagcagatctcctgaactttttcctgactgaaattttgtacctttcgaccaacatctctccaatcttcccctccccctagcccctggtacctatcattcattgtactatctgcttctatgaatgtgaccattttagatttcacatacaaataagatcacacagtatgtgtctttttctctctgtcttatttaacttcgcattctccaggttcattcatgttatcacaaatggcaggatttccttctttcgtaaggctgaatgatactgtattgtgtatatatatgcaccacattttctttatctgttcat

SEQ ID NO: 42610 - DNA, 1028 bp, Homo sapiens
tgatattctattaccttgtaaagtacttgatgtctgtgacccacacctattcgcacactccctccctttttgaaactccctaataaaaacttgctggtttttgcagtttgtggggcatcacagaacctaccgacatgtgatgtctcccccggatgcccggctttaaaatttctctcttttgtactctgtccctttatttctcaagctggccaacgcttcaggaaaatagaaaagaacctacatgaatatcggggcaggttccccgatagttgagagtagtgttttcaggcaccctgccctgataatgttttattttttaacctctgctcctcttgtggggagaggtgaacaaagagatagaaaagcttcctccccaaccctcccaagtggtggaagtcttgctaagaatgttggtgtgagttgcaaaatgagtgtccctctcaccaataaacattaatttttatccaaatcattttgcatcttctaccagtctcccttcttcaagtcggctgtcagcacatcattcccaagttttaaaacctagtgcctcctgttttctttttcaacaaatatcaacttttatgcctacttttctagcttataatttccacccacctttatttctcactaaccttcatattcctcaggtcctttttctttgcatttcttgtttcttcctctcttccaatcatataaatcctgcctagccttcaaaaaccaacttgaggaagaatccacacttggaacttccctctacttgtcagacccagagtgaatttttctcttctcagtttgctgcatgtttatgtgctaaatttaatgatttttaactctaatcccagagatgcctaagatccaaggagcctcattggggatgaaggacagttggcacagatggcacactgaagactccctgtaccctctttaaccaaaaagtttctgctcgtacagattttatataatgggattttatgtgagataatttggagagagttccataacttaaaaaagtgtttgagaaatgttgc

SEQ ID NO: 42611 - DNA, 1061 bp, Homo sapiens
gtaatatctctcatttttaaagacagcttataagagagtgtggtacataacacaaaggaatggattgataaagatatgatatcatgcattagcagcaagtaaggaggatagatttttcaggaatgccacttcaattatcagttttttgtgagactcacccagtcttgtgacataacttctcaatcccatttatgccttttggcctaacttttttacactgatgcacaatatgtgaactggtacattttactgaactacatgtatagcaaagccccattatttatgtttttcttactacattatttaagaagtatacagttaatgaaagttccattgatttgcttatttcctttggattacaactacatttgagatgcaagagggtagcttattgcaattaagaagtagaaaaacaaggctgctgagtggaatactgaactgagaataaagtgcctttgtcaccatagagccccgttgttctttaagcattttgttaaaagagtgaatgaatggagcaggatagcacaatattttttctgtgtgcggtacaagggtagagctgtggttttcttgagtcactgagacagaaagaagaaaaacttaaaaagaaacaaaactcttttctggctaaaaggtactttatacatatatacccgtgatgtcgctaggataaaaataactttgcccaattcctgaaaaggaattctactgggtagaatcaacaaacctggaatctgggggcatacaatataatttaccagtgatatccttgggcctgaaactaaacatctgatagctccctgcttctgtttccttatctgaaaagtagtaatgaagtaccctcatcagatgaaagtgattagacctttatattgaagtgcggtgacaacatatggtgaaatcctgaccatgagatccagtaaaagaaacaaaagatactcagcatttcaggctttgtatagtcagtgagtaaataaacaaagaaacaaaccaaagagtattccctaagaacctagatgtagtgtcttaggaactgggccacctactgaggatagaacgat

SEQ ID NO: 42612 - DNA, 1050 bp, Homo sapiens
agtatttctatagaactgaatatacttgaccatatatgttttaaagcgtattttttaacaccagaaatcttgtctgatttaaatctacaaataaatcaataatttatcatattaaagagggatttgtttttaatccatttattttctcttcctagtatttatttctatcatgaatttataatatttcaaaaagctgcttccacatcgttgttactgttgcattattaacgtagacaccactgattcctctttatgaaattgattaagaaggtatcatgtataaaccagaaacattcataatctatagccaagaaatgtaaccattgcaccattagtttcccacttttttaccaaagttgcttgagaaaggaagtttaaccacattttcatcattaggtagtttgaaactaagaaatgccacacggaaatggggcagcagtcaaaatcttagaatctgcagtgctttgctgacataagagggaaaggagcttcatcagtgttgtattgtcaaccatgtaattcacccatagtatggataggaaatcaagccatttctacaaagaggtccacctcaagtctaccagatggtttgttgctgagtccattttttagtagctcctgaactcattgagagttttctagacaaaaagaatagatttggaaataaccaacttcccggcccatcgtgggggaatctgatggatggatggatagtaccttgggaatgtataagaaagaaatgtctgggtatttctagaaaggttggacatgttaatagctttaatattttggtaggatagttgccaaatattcttattcaacccctgcgtgtctcatctttgctattgcttatgcttgcttataaattgaacaaatgggcttccctagaaactgtcggatgacaaaagatgctacaaagcttaacacctaaaacagagttttctttatagaatgagaatgtaaaaataaaaatttggacggggagcaaaagacttgttttccctgagtctatgtggaaaaatttgttgccttttctcaaataaatttttg

SEQ ID NO: 42613 - DNA, 1100 bp, Homo sapiens
accatttattcccttggtgtgatgattcttagccataggtcacaattgagccttagaaccttaacccagagtgttgcagccttcccccttgcaagtaccccgggaattgctgccattggccagtgtccaagaagaaggcttgaacagctgccctgacaaatgggtttcccccattcaagcaagcaaatgaggggtttgagctgctttgcaatactccctgcctctgggctacaaacactgtttaaaatgataataaagtatcctactctccagcactatgtatttttctttttggagacatgtaaatatctttaggatctttttaatgcaggaggtgggaaatcatccatatgaagagttggtttcagcttttctttctttctttttttttttttttttttggtctattccagacagtaaggattgtatcctggagccgctttccctgccagaaagtccaggtggcaccaccactttagaaggttctccatctgtgccttgtattttctgtgaagaacattttcctgtggctgaacaagacaaacttctgaagcacatgattattgagcataagattgtcatagctgatgtcaagttggttgctgatttccaaaggtaagttctgtttttgtccttaaaagaattaaatttgaccatgtgtggtggctcatgtctgtaatcctagtactttgggaggccaaagtgggaggatcacccgaggccagtagtagttcaagatgccagctctaaaaacaaaatttaaaaattatctaggatcaatggcatgcacctgtagttccagctacttgggaggttgaggcaggagggctgcttgcacccatgagttcgaggctgcagtgagttatggttataccattgcactccagcctgggtgacagaatgagaccctgtctcttaagaaagagaattaaatgtattgtttgttaaaggagtgacataatctatatataaaataattcccatacaaatatgaaaattcatattcattttcaggtttctccttagacttaaaaaaaaaaactttacaactcttttgtacttctgagactttttttttttttttgagatggagttttgct

SEQ ID NO: 42614 - DNA, 1051 bp, Homo sapiens
ggaggtgtgcagggattggttgggaagcgctcaagccccgcccacagagtgacgtcaggtggcggtattgctacttaaggcgtcgtggcctcccctgccccgccttagctcccgcgctagagagaaacatgtatcgttttcgatcacagctcttcacggggatttctgctgccgccaccgcccactcttacccccgccgcttctcgactctgttgttagccgaagactcgcctctcagccgcccgccgcacagacgcacgagtaaaaagtgcagctccatcggctgatcctcgctaagctccgactctgggcggcaccgggcgtcccacgatgccgaagaacaagaagcggaacactccccaccgcggtagcagtgctggcggcggcgggtcaggagcagccgcagcgacggcggcgacagcaggtaaggggtatccccgccgccggcatcccagttgccggccaggctggcgagtcttccatgcttcggcacggtgggagttgtagttctttctctgatgtacacatttgcatttccagggtgcgtggtttggctactgaactacaattcccagcgtgccctgggcgctgctcctcgcgcgatttagatctggcgtgcgaaccggactcttgggcaccggccgtgggggcagggaggaacgggtccttgggcctgagagtgtgtcgggacaggggctgaccgggagctgggcgggaaaggaaccattgtcagagttcctttctcggcggcgatctcgcccgatctctccccgaccacgggtggggaagaacggggagttgagcccgtgccgtcactggccgcctttgacaccctggctccaacatggagctcctgggatgccagacgtccggcgggtttggacgggctcttgcgtcacgcggcctgggccttgcgcggtgggcccggggtgacgcagaggcgctggggaagctttccgtctcgcaggtccacctggccaggcgaaggcgtcggaggcggggggaccactttctcccccctaggctgtgctccttcccctaactggcacct

SEQ ID NO: 42615 - DNA, 1024 bp, Homo sapiens
taattggctgtttttcttagagtcatcaaaaggaacgatgtagccttgcttctgctgcttgcttagcagtagggattatggattgaaaatttcctttaatgcttaggctacttttagattttaacagtgtccaatttttactaggatgatataatgacaataaaatagtgataccaagcagattaatatcacagatatcctcatagtactggaacagactggctaaaacctgggcctgataccaatggtgactttaaagacttaaagctttaataatgcttagaacaacatgagggaattttagtgacaaaatgtggagaaaggggaaatggagaataataaaatctcagattacaaattctatttttatatggattaatttgttaaaacaaatgttctgagaattgaaggcttctgtttatgttgcaagtagatggcttgtgtaagtgttgtgttctgagtatgttttattcgataagctttacctttgtaatcatatactatactcacttttgtttagcccttcccctccccaaacaaaaggcaattatatgattcccagcctcttttcagcataatccagaataagtgaaatctgagttaatgggattaattaattaattaggtgggaagtttgaagacaattatttacattttatgaaatttctgctcctgtgtgcttatttcttggaagctgatttcttttagaagttttcatagtagagtcttcataagaacaaaagaatatagttgtaacagcttaaaaaccaatggaattgtaatgtgttttaaaggctttttgatagagggtaggcttctttagctcatatgtctaagctttctatctttgaattacagttgaagtttaatgatctagtaagcacctgtaaagcatacagaaaggaaacaaggggatagttcaccctttcagaatgctttactgacatagactcataaaaatgattcaataatttaaattatagattatggagctgcaattgtttcagaaattatgtaattcttt

SEQ ID NO: 42616 - DNA, 1045 bp, Homo sapiens
gatagttttacatttaactttctcagaaaccaccaaactcttttccatagctgctgcaccagtttacattctcatcagcaatgtagaaagaaaggttccagtttctccacatcctcactaataattattttaattatagccattctggtgggtgtgaagtgtttaattacattttatagaacctggatattttatcagttttatatccacataattgtttcttgtacggcattttaagttttttttaagaaacattaatatttttacatacttctctcttttgaataatttttttgaagaaatcccctgcataatgtattgccaaattactttccaaagttactcttatattggagacgatatttaaattgtctccagcaatgaatgaaggcatgtagctgttacacaaagatttgacaccattgagttttataatttaaaaaatgtgtttatttaattgatattaaaatggcacttcatcacttttttccttgttctaattgacagccaagtaggactattttctgcattagtcatgatttgtcttttcttggatgaaacaatgttgatgtccatttttcactgttggtttttgaaatcgtctaactttcttggcgttttacaatttgattagtacttttcttaatatggaatagccattaactctttatttatttattttttttgagacggagtctcgttctgttgcccaggctggagtgcagtggcgtgatctcggctcactgcaacctctgcctctcgggttcaaacgattctcctgcctcagcctcccgagtagctgggactacaggcatgtgccaccatgcctggctaattttttgtatttttagtagagacgggatttcaccgtgttagccaggatggtctcaatctcctgacctcgtgattcgcccacctcggcctcccagagtgctgggattacaggtgtgagccaccttgcatggcccctgttaactctttgtttttctccttcattctttgtgtgtgttttataaacatttaaatgtttatagggtcaaattag

SEQ ID NO: 42617 - DNA, 1050 bp, Homo sapiens
atatttaacttaatatcttagacaagagttctgggtacaattttgggatctagttcccctggaaaagctgctgtatttttaatttttaatggaatgtagcttttaaaatcctgtcactggcatcaacaaaaggaattataccatgagaccttatagctgtacttaaaagccattcagttcagctattgggagttcatgatgaattagcatatgccagaaaggttgctaaccttaacatctgagagcagtaacactgattttatctgctgtatgagactttgtgcattttactttgaaataaagatttttttccacactgaaagtgcttctcttctaatagaagaaatattatttatggctttgaggtacagagtccaaaatgactaggccaggtgggcagggagacaaagctttatgtgtatatttacaaacattaaagtagatgaaaagaatgtagcaatacataattgggattaaggtttctgactttcaagaatatttctgcttggcaacatgcagtgtggctcatgcctataatcagcactctggggaggctgaggcgggaggatggcatgagcccagtttgagaccagcctgggcaacatagcgagaccctgtctctaccagaaatttaaaaaatgagtgtggtggtgtgtgcttctactctttatctacttgggtgctgaggcaagagggtaacttgagcccaggaggtcaaagctgcagtgagccgtgattgtgccactccagcctgggtgacgagtgagaccttgtctcaaaagcaaaacaaaaaagaatattgctgcttgtttgcccatgaggtatatttctttcattttatgaaaagcattttgacaacacgttaacatttaataaactttagattaaaatatatagtgcaagcaacatgccatttcaaatccgtagacttgtttctttgatactcttgctgtaggtcgccgtgaggggtagggaagcatatatactgtagggagaagtatcaaaatcatttaaggtcttttttccaaactagtgttcccctcccacatc

SEQ ID NO: 42618 - DNA, 1092 bp, Homo sapiens
ttcatctcagttatctgatgataatcatgatcaccaaacagaagatcatcccttagttaatattttttccatacctaaattagatcttgaagtgtccttaaattttttgttttttggtctattttatctcattttgagcatttattaaatatttgagccatgtttctatactgtttcttgccatgtatgtcacttctaaggttgaagaatgcttgtataactcttgtgtttctttggatattttctaattttttctttggtagtgttttctgagtttggaggatcattattttactttagtaattcataatttcaatagatgaggtgtcccaaaccattattgattttagaattttatgctgagccatcatatatgacaggagttgatgaaatttttctgtaaaggtctctatagtaaatgatataggctttgtggaccattgatctctattgcactttctcaccgccattatactataaaagcagttatggacaatacctaaatgaatgactgtgcctgtgttccagaaaggtttatttatggacacttaaacttaaatttcctataattttcatatttaatggaatattctcttgatttttattcaaccatttaaacatgtaaaaaaaaaaaacccattcttacctcaccattcaaaatcaggcagtgggctagttttaacccatggaccatattttgctacacacatacaaacaccacacaccacacacacacacacacacacacacacacacacacaccccaatggttattcatataaatatagacatatcttttaaatctctgtctctaaaatccatgccacatttcattcacttgcttggaattatgagcttaacattaacatggacttccaaaaattctctcacaagctcttccttgaaatagttcttcccttttcattgcaattaagtctaaagtagtagttctcagagataagaaattatcagtaagtaaataagttgttcagtgcttgacttttggtatcattagtattacaatataaatttggataataaagtacaatgaccagctgaatcttcggagatctagatagtgaaccatgaata

SEQ ID NO: 42619 - DNA, 1027 bp, Homo sapiens
taaaagcagccattatgtttttagtaatttaggattttctgcttttgttaatacattttttggtaagatataatgatttcttcaaagttttaaaacaatttttgtattcaaatctaatagactgatttttaaaactgccattagacctaattattcttggaggatttttcttagaattaaggtgtttgggaatgtattaaaatggggattatttacatgtatttttaaatgtagaacttagaacataagtttaagataacctttttacatacactttcattagcactattagtttagcaacattaagcaatcataatagtttcctagttttgcatcatacatttatctattgagatcatgttaacattgttttgttggtaaatgacagtttctcacagatcagctttattcagaaattatttttgatatgcctgaaagcctatattaatttaaaaatgtttcatttaattgctacatttaatctgctaaatctaggttacatagaatgatgaactatatctagcaatatttgtctgccctgtttttagcggaaaaaaataggccttcacatttaacatatgaaacactcacaaggtaatttcataaaacaataagtaagagaatactaaaacttttaatattttggtgatttttttgaagaaataagcactctgtgttactcatcctaattgcaaactgtgttcagtgggttatacaccaaagtgtcagattttattgttgtcttgtaattttgtttgctccagtaaaagcaggatattacaaagaacatggtcaatgttttgttgtataatatgtgttgaatttattgatgtattttaaaatagattatgtatttgataacatagtttggattcaatgtcattgatgaagttgggagcatttctttttaatcggcatatacattttaattccaaggtcatgtattatgttcatcttcatctttaatgtcatgcattctgtctcatcttcataattcatcctaatagtataaatcaaaataacaaca

SEQ ID NO: 42620 - DNA, 1023 bp, Homo sapiens
taggccatttaaaaataccaacaacttgtaacatgaaaaaaggttaatggattgtttttcatttttaccttttctatgtttttttgccattttatttatactctttactatttttcagattgttaatgttttcatactttttggcatcttgttgtcatgctcattggggtacttgtggtgtggaaaccagaagataatggttctttttctaactttaagattttggacacttttggacatttcttatgattatacattcagtattgattagaggtgcaaagtacttcaagaggttgagtatgggatatcaatggcagaatgatggctttcttcctggtagggggaactacttggccctgatgtatttaaaagcttttgcatttaacattcaaaggaatttttatttcttccataagagctttaagaatttagtagtgagcatttgctgtggcatatggtgcattttaaattttaaaatacttttgaatcctccataagcattcattcactgatatgttggactagtatgatcttagaacacccataaagaatactttagctcttaaaaaaataaggtgtggaacagataggaaagaaactttgttaaataataacatgatttaagtatcagaggattagaagaagaagtaacagccctgttaaggatctgctgtattagagtgctgcattaatgcctgcaatcaatcacacctcccagtatccaggttctcatgaagtcccctcccatagttattctggcttggttatgtgacttgctttggccggtgcgacatcagtgaatgtggtgcaagtggagactttataagtgcttgtacattggagcttatatttttgaaatgctgctgtcaccatttcaggaagccttgtatagcctccttccttaaagattaaagatcacgtggagagacttaccacaagggcccaggtgagctctacccctacctgccccaccagctgaattcagctgcatgagtaagcccatgccagatcagcagaagaacc

SEQ ID NO: 42621 - DNA, 1033 bp, Homo sapiens
cagatcatatgctgttaactgtcaggctgaggtagagtgactgcttttgataaaaggctgtattagaatttttcatctgtgaagctcttatactctaattatctccatcagtatggaagagtccatttgcttcagtaccctacaaattacactttgttaagaccaagtattatgctgagtaaaattggggggaccttgatttttgttgaccatctaaaaatggaaattctttgtaacttcctcatgcccccttatgcccatgcacacatgcacatacatacttcaaaaacaatatctaagtgacctctttgtaaaaggttaccgggacaatgttagtgattttttttacctcattcacttcactagaatattataactacattagtcgagcctgctgcaaggaatgtgcaaaaaaaaaagaaaaacatatgaaaagagaaatgtgtaaaaaaaggataactgtagtttcaaacaagaattgccaagattccattgctgattatggaagtgaggacttttccctgtttacttgtaaatagtagcacataaaaaatttgtctgttttgagatcctcaaactaaatatccacatacacattctcataaaaaggactgaaattgtgaaaattctttgtacaaagctgtatgagttgcacagtgaagaaatcattcacatagggtagttatattagtctttttttgtaactatctccatggtcatatgttagcattatctaatacctgaaggatgaggactaggtgaaaagacatattaaatatttcacattgtttatgtatggaaagcaagctcattactttctaaaataaaacttgccagttttcttggttagtgtcactatgtagttgttagtctttattgttatgtcttcttggaaaagcaaaaaaacgctttgttaaactaatattaaattataatttaccatgggcaaaactcatccttgctttccttaaaattacctactaaaacatattaaaatcaataaagtttacattttaataaactaatatcgtat

SEQ ID NO: 42622 - DNA, 1069 bp, Homo sapiens
ttttgaaacagagtctcacactgtcgcctgggctggagggcaatgacgcaatctcggctcactgcaacctctgcctcccgggttcacatgattctcctgcctcagcctcccgagtagctgggattacaggtgcataagaccacacccggctaattttttgtattttttgtagagatggggtttcactatgttggccagactggtctcgaactcctgacctcatgatccacctgcctcatccttccgaagtgctgggattacaggcgtgagccaccatgcccggccaagcctattttaatcatgagaaaaacatcagacagatctcagttgagggacattttacaaaatacctgaccagtactcctcaaaactgtcaaggtcatcaaaaagtttgagaaactgtcacagccagggggagtctaaggacacaaaatgacaaaatgtaacatggtatcctggatggtatcttggaacagaaaaagggacattaggtaaaaactaaggaaatacgaacaaagtgtgaacttcagttaatttttttaaagttaattttagcatttttcttgtatcagtaggcttagcatggctaacattgggtatatgttgtagttttacatttaacattgggtatatgttgtatatatatacaacaggggttacagggggcagggacttatgataatgttgaataacaaaaatagctaacactatgcagagcatactatagaccaggtactttaaaaaatatatgccttaaattacttatttttaaaatcaactttttggtaggtattactattttcatgttagagcggaaaaaaatgaatgtttaagtaactttaagtagcaatacccatcctctgggcctgtagttttaactgctaggctttaccgagttattcttggactcagagaatagttgttttcggggaggttgcagggaacagttcccctcttaccaggttcaacttctgcccagatctatagggtataaaacataataaaaaaggtttcttttatatatatattacattacatgaggttggaaagtttatttccttagattgta

SEQ ID NO: 42623 - DNA, 1037 bp, Homo sapiens
ctttatataacaacagagaaacagagtattacaagaaactcttgctagagcctctcaagaaaaggtgtgatttcccaaaacggacctcaaactaaagttcctctatttggtgacttaggaaatttatatatgttaataaagtatttgtgaaaaattagattcttagctggtctgaaggggatgaacggaatggtgaagctgatgagtcacagtaagttaacagatgtgccaggatgctgatcccttccaccctcagggtgctaaagaatcctggggcagccagagcctttagtcaattgtcactgctgcaaggtaacccaagttgctctccaaataccatcacttcctttgtgtgtggcggcatgaataaagtttggaggcaccaccacagcagtagtggctgcatttagaatgttaactgtaacagcctagttacctgccagtgcatggcacatccctacttaggatgccatgggctacaggtataaaataacggactactctactgtggattaaattacagaattttaataaaatttgcaaagaaggaaacacttgggttatttcttagtaatctcaattgatggttcatagtcaggtacaggttggactttttgttctgttctttccccgctgctcactgctatgcctcagtaatctttaaacaatttttagaaatgttttaaagaattagattgttttttttttagactgagtctcgctctgtcgccaggctggagtgcaattgcaggatctcggctcactgcaacctccgtcttcaggtttcaagcgattctcctgcctcagcctcctgagtagctgggattacaggtgcccaccaccacgtccagccagtttttgtgtttttagtagagacaggggtttcatcacattggccaggctaatctcgaactcctgacctcgtgatccacccgccttggcctcccaaagtgctgggattacaggcgtgagccactgcacctggctagatttttttctattttgagtttacagttttaagcttaggaagcacaaat

SEQ ID NO: 42624 - DNA, 1032 bp, Homo sapiens
gcagtagttgagatattcaacactttattataaaacagactcagggttagatgattttgcccatctgcaggctaatgttaagtgtctgagcatgttaaaagtaggctaggctaagctatgattttcggtagattaggtgtattcagcaacgataccttcaaattacgatggctttagcaggatgtaaacccattgtaggtcaaggagtatctgtatttttatttaattttctttgtggtttatggtatatagttcaccagtttgaaacagtatatttacaaattaaactatatagtttattttgctcatctttttactgtctctaatgtaaagcagtttgagcaatcagataaaccttttacttatctgattgtgtgacatttaaattttaatagtcgttagtattacattggatgactttttcattttacatatgtaaatatgagcatcatcttcagttcttaattcctaagtatttaaacctcaagcagtttgtcacaaattttctgatagtagatcttctaaccatgttgagtattattttcttaaataccaaaatattttctgacatattaaaatattaactatagagtttaaattatgatatattatgtaaattattaaactaagacccttaaaattattatttttcacctgagggagccatgctggttcagaagtgttcagagttctgaacatgtttatacttatatgtagccaaatattttacatggaaagagtgatcaatgaacaggcagcaaaatattaggttatttattgtttattttgagtacaacagtaacatgatacaacagagctcttaaaatgagtgttatcaaaaggatgatagtattaagaaaagaacactttttattatccactgaacgctattaatgttcaaattgactcttctgttagttgccttgttggagcaatctgagctgctaaaaggactcttaaacatgagttggtctccttaaaattctttgaactactgggatggcagcattagattaaagcagggaattgagc

SEQ ID NO: 42625 - DNA, 1049 bp, Homo sapiens
atttgtaggcattttctttcataggccattctgatttgtagctctttcttttcacagcagtattaaataccaaaccttctctgatatggaagttcattagagatatgtctttgatggcagccctttcctggcttcagtttcaaataccttgatgtaaagcttaagaagccattgtgttgtaagccctccttgatgtgccttatttagatctgcatagtaaatcaaggaaagtaaataacaaggcagcagatggaagcatggagataagaccagtgaacaattgtatttgtattttgttatgatgttgacaggagctaaaattcactaatctagttcaactgatctgcatttcaaagaaatctcatttagcagcaacttgaaggtttgtaggataaagttcttttattgcagcttttattgcattctttgctaatttatctggtcaagatttagccttgcttacttaaagctgcaagcatgttacaaggagtcttaaatactatgaaagcattaatgtctagactatgaactgaaggtaattacatatccagccttgaatagggtacatttagaaaatactgttgtccaaactcaattgtcagggcaatatagataaggtgggttttttttttccacctctcctgcctatttgctctgagatttttttccacatcataaacaagctaataaacaatcatcaactactcagaaattattcaaaaaataagtgtaagtacatctcctttaagtatgaatccattgatgctgatacttgttgtgcctttttgagaatggaagattattagttttatagttttgatacccttatttgactctacagttaaaaatgtgtaaatatataagtgaaatggttaatgtgaacttcaaagtgttataaaaagcattgtctgtggacaacttatacaaagaatattggtatgttctacttttgattaaatatattatttaatggaaattagtatttcaaaatgtgttcaaagagattaaatactatatgtgtatatttatatataaactgaatagtgagt

SEQ ID NO: 42626 - DNA, 1047 bp, Homo sapiens
agaatattcaagtgaagatacttaagagtcagtggaagacagctgagcaaaagaggatgaaaaattgcatttactagatgttttaaagtgctaaaagtcaatagcaaatattttgtcaaaatataagtgtgttgtatagcaaaatatatttactgattgttcaaaactcaaaccagacttttatttggaaaacatgttgtacttggttgtcaggtcgcaggctagcccatccatttaaccctcgtgttaaaaaagaagggagtggtccatgtcctttacagagcttgcaagtattatttgttggtatttattttttttttaatatgaacttagttgttaaatcttaaaaattggactctgtctcactctctctctcatgcacacacataatgatttaccagtctgtctgggaaattccgatttggcaagactaaacctacattcctacaaagcagtaatggcagtaattttatgggtcttaaaaaaacacctctttagagactttgccatagtaccatgaaactttcctttgtcctgcgccttgcctaattaatatttttgtctttaggtattttattttgtgacccttatgttgtatgtgatatttatcatattattctttctggtgattgttgccttgaaacctaacgactacatgcaaaaatttttgtagtcaaaataagttgggattacaaatgagagaccagtaactgatcacttattctagtgggtttagattcagtctgttttatgttgccttggagttttccgcagatgttcactccttccataactgttggttgtttccttggtctgagagcaatcctatcagatttacattcagaaaaacaaataacaaaaagacttgggttgggtgtgtagtatggattcaagagagttaagaatgaaggataagggaccagaaaggagattgtataaccagtaggtactttgaatgtgaaggttaggggagggttgtggactggatgtatatgttcgagaatcatttgcaacaagtagttgttgattcaagaaaaagaatacaaa

SEQ ID NO: 42627 - DNA, 1048 bp, Homo sapiens
gctttcagggtcattctccaattattttgtacaataatttctggcttttctccatccatactcatctccttatcaaatggtcactgggctgcaccttgattttccttaccaaacatgcttttccattctttacatgatcaggctaggaattttccacatctttgtgttctttcttatttaattataaactccatctttaaattatttctctcatctcatattttaatatatggaattaaaagaagctatgcagtaccatgaaatactgagctgcttagataattcttcagccagatatcctagttcattgcttttaagttctgccctccataaagtcctagtacacagacattcagccaaatttgttgctactttataacaaggatagatctgtctcagatttcagtaccttgctcctcatttccatctgagtctttactgtccgtatttctaccagcattctggtcacaaccacttatctctaggcagattcagatttttccctacaactcttcttctgagctgacaaaagaattgcccttaatgctttattcatgtaaatacagactttcctatagcattcatttcaaaactgttccagcctgtaactagtacctggttccaaagtcacgtgtacatttttaggtatttgttatagtaacaaccccattcgtgataccagtttttgtcttagtctgtcttgtgctgctgtaacagaatatcacagactgagtaatttataatgaatagaaatttattgactcacagttcttgaggctcaaaatattaatatcagggtgccaacctctcacaagggctttcttgcagcatcatcacatggcagaatggtttagagagagcgaaagagggggctaaactcacccttttttaatagtatcagtcccacccatgaaagcagagccctcatggcctaatcacctcttaaaggtctctcctcttaatactattacaatggcaattacatttcaacatgagttttggaatggacaacatgcaaacgatagcaatagtttcactagactgacag

SEQ ID NO: 42628 - DNA, 1028 bp, Homo sapiens
ctctcttcaacttagtagctggaaagataagtccttcatcccagaagtgtgtttgggcaacatatcacagcatccactacacttagaatagttagaacccatggccaagcttggtggcatgcatatgtcatcctggcagtttgggaggccaaggtgggtggatcgcttgactccaagagtttgagaatagattagaacctaaagtaccataaaaaggctatcccagtcctggtccaaaccacccgtctttccaggactacaattagagacacatctttgctctttctatttccatccttgccctcatctagtcaagtctccccaggacagacaaagcaagctgtgaaatgtaaaccagatagtctcaataccctgcctaaaaacttccagtggctttcaactgaaagaaagaaaatccaaattcattactgtggtcactagtctctgcttgacctaactcttatctatgtctgcaacattatttttgctacttttcacctcacatattatgtttctgacctgttgacctcctgtcagtttctcaaacatgccaggttatctcctggttgagggcatttgcacatcctgagtcctcagccaggcaagcacacctcctcactttctctgtgactgctttcttcttattatttagatcaaatccccatagaggccttccacgacaattccattttatgcagacctccagtagtcttcatctgtcatgtcactgtattttccttcatgatcttattacaaactgtaattatcttgcttatttaattgtttctatatttcctctcttcctctgttggaatgaaagctccatgagtcattttcccactttatacctctttctagaatagatctttgataagtttcattatttgttactaaatgaaggttttgagctatcttacatgacctacctgtttgacttatttttaatattacagctttattaaaacataattcacttagcataaaattcaccattttaaagtgtatgactcagtgttattttactatat

SEQ ID NO: 42629 - DNA, 1099 bp, Homo sapiens
tctgctagcttgtagggtttctattgaaaggtccacttttagtctgatgggcttacctttgtaggtcacctggtctttctttctggctgcccgtaacattttttctttccttttgatcttggagaatctgatgcttatgtgtcttggggttgattttctcatggagtgtcttactggggttctctgcatttcctgaattcaatgttggcctgtcttgttaggttggggaagttctccttgatggcatcctgaagtatgtttttcaactttgtttcattctccctgtctctttcaggtaccgcaatcactctctttacataatcccatagttctcagaggttttgttcactccttttcattcttttttctctagtgtgtgcctgtcttatttcagaaagagtttacaagctctgagattctttcctctgctgtctgttctgctgttgatacttgtgattgcattatgaagttctcatcttgtgtttttcagctccatcaggtcagttatgttcttctccatactggctattttggctgttggctgctgtattgttttatcatgattcttagcttctttgcattgtgttacaacatgcttcttttgctcagtaaagtttgttattagccaccttagcaagcctacttctgtcaattcatccatcttagccttagcccacttctgtgccccctgctggagaggtgttatggtcatttggaggagaacaggcactctggcttttgagttttaagtgtttttgcatcgattctttctcatctttgtgggcttatctacctttgatgtttgaggttgctgacttcaaagatggggtttttgaatggggtcttgaagtcttttttgttgttggtcttcttgttttatgcctgattttcttttaacagtcaggtcactctaccatagggctgctgcagtttgctgggggtttgctccagaccccagttgcctcagtttttcctttacctggaggtattaccagtgatggctgcgaaacaggaaagatggcagccaaatttttgccctggaagctgtatgtcccagggaagtactgacttgttacctgcctgaatacaactgtaggag

SEQ ID NO: 42630 - DNA, 1049 bp, Homo sapiens
aaatacaaaatgacatctctctgcccacacgttctcaaattcatgggttagatacatatattgttagagtagtagatgtggccctcagctttacccccagaaaaattattctttgcactacatccctgttcaccaagcagcagtaattacaaggcagttcttaaatataggtctggcttatggcagtagcatgtgcaaaaaatgcccctgggccatatgaaaataatagttttacacagtgggagagactcttcagagctatgtagtacttaaagacagaaagctcatcaagaaagccacattctttatttctagacataataagcagaaatgaaattgatatgagaaagaagatagaataaaaacaagtaaaaaataatctaagttaaggaaagtccaatgagtgtcaagcactgaatagattaactatgaaagaatagtcttcacttgtctggcagaattgcagtgtggttctattatgtgctgtttaaattgcatatattggacactgtcaatcattaaggatagttagtattatttatcccaaacagccacatttctatagcaacagtatacatgtttatgcaattacgtattattatatcaaatcatgcttgatatattttggtaccagctgccgtcctgaactcctttacaagttttatatatatttactgcctaatggaggaccctgcagtctcctccccaaaccagctactattttagcctgagttcaggcaagaaacatatgaagtgaaagactaacttaatattcagcattgcaactgaacccaaacaactgaagtctcaattcattttagtttaaaagctactagttttcgaaaaagattaattatactaactttcataagtagattgtatactaatcaaaattataattttataaaatttttcaaatacaaaagattatataaaattttaattatatgttgatttaaaccatttcagtgataaaaatttattatccaattgtaaggagatcataaggtcgatttcaacaacagtaaagaaagtggaaacagttcttt

SEQ ID NO: 42631 - DNA, 1034 bp, Homo sapiens
cagaaagaaacaactaacaaaatgataatagtaagttctccctttcaatacttattttaaatttaaattaattaaactgttcaagaaaaatacatagaatagccagatggataaaaacaatagccaactataaattatctacaagagactcactttagacgtaaggacacacacagactttaagtgaaagggtaggaaatgatatttcacataaatcatgacaaaaagagacagcaaaggtagatatacttatatcaaccagatagactttaagtcaagctgtcatagaaaaaaagagaaactttatataatgataaaagagtaaattcatcatgaagatataactattataaatatatatttgtataaatatatatatttaatatccaatgttagagcacctaaatatatgatgcaaacattgccagaactgaaaagagaaatagacagtaatacagtagtaggaaatttcagtactcactttcaatagtggatagaacattcaacataagatcaataaggaaaaagaggacttgaaccgcactgtatgggcctaaagacaaacattccatccaagagcagaatagtatacattcttctcaagcacacatggaacattcttcagatagatcatgtgttaggtcataaaacaagtttgcaaatgtaagaagattgaaataataccaaatatcttttctgaccatttcattatgaaactagaaatcaataaaaaaaggaaaattggaaaattcactaatatatggaaattaagcaacatattcttgaacaaccattgcatcacagaaaatggaaagaaatgagaaaaatctcttgagattaaaaaaaacaaaaacacaacatgccaagacttatggaatgtcacaaaagcaataccaagagagaagtttatagcaattaacacctacattgaagaaaaaagaaaaatcccaaataatgaacttgactctacaccgtaagaaaccagaagaagaagaaaaaataagccaatgctagaagaaggaaggaaatcatga

SEQ ID NO: 42632 - DNA, 1051 bp, Homo sapiens
tgggaaacatagattagaaatctgttttagggctcttgaaccacgtgctcaggcctgctcccacactgtggagtgtacttccattttcagtaaatctctgcttttgttgcttcattctttccttgcttttttttttgtttgttttttaaaaaaattattgtattctattttaggcagggctcagagcctcacacctctaatctcagcactttgggagactgaggcaagcggattacttgaggccaagagtttgagaccagcctgggcaacatggtgaaacaccctgtctactaaaaatacaaaaaattacccaggtgtggtggtgggtgcctgtggtgcaagctgccccagagactgaggcacaagaattgcttgaacccaggaggcagaggttatagtgaacaaagatgctgtcactgcacttcagcctgggcagcggcagagcgagactgcatctcaaacaaacaaacaaactaacaaacacacacacaaacaaaaaatcaatttttatctctggaaacaaagttgctaacaatccacaaacttttgacatatgtattttttgttaaccaattatcactgttttgtgcattatatttgtagatgtggtaaagagagaagtggtagttaaactatgaaatgcagatgtgctgtttgtgaatagagacagaaacaatctcaactcactggtgtattctattcccaagacagaacttgacctatatctaccatctgctaagattttaacactttttttttttcttcctaatctgaaatattttttccttaggaaattgtgattagttttaaaactctacacaaacatgaattgttatttcactgcatataaagttttgagaaattcatcatagatacagcttggttgtattagaagaaagaaaatatctttggctgtaattaggatgaaaaatagaaataagatgagtacttctatattttaagagttaaatgccttggcgaagtggctcacgcctgcagtcccaaagatttgggaggctgagatgggcagatcatctgagattgggaattc

SEQ ID NO: 42633 - DNA, 1054 bp, Homo sapiens
catactcacttttgaagttgaggaagctgtatctatatatccaacttaacatgtgcaatatccaacattatgtgaaagaaatagagggatagttatgttatatcatagccttttgcctgacacttaggatatgaatattgttagtggttcatttgcttggcattttagttccctcattgctttttcaatttatctcagattattcatagagctgaagatgccgtgtatcaagagttttgtaactgaaagactttttttgttttcatgtttataagacttgtacatgtgtttgtgaatgtttgtgcacttttaaatcttctaagtgtataaaatttattcaattaaaaagaacagaaaaaaatttttaagttccaaagttttttttccttgcgtatttcattttctgaaatacatttgtacgaaactgtactaaagagttattgtagaagaaattgtcaaaattagtcaagaacaaatatgagctatatagaaataggatataaaggtgattgttctctgacattagaaggtgatataaagatgatttgaaaacttattgaacatttctacacagttacagtgacatgatggatttgaaatactggaagtggaagccaaagtttcttccagtcatataaaatgatatacagtatctttgtatgtatgatattcagaaacaagctaattggagagactataaagaatattcttaaagttaagcactttttttttctaaagctaaaataccactttgaataagagcagttttcaaagagccctttaatcagtttatttaacaaatacttatctagctaaatctgggctagcagtaaagtagtgaaccaaacaaaatcatcaaacttaaaatcttggacttatttcatttaataatgtacttttctaatgagacccccaaaatttaaagcagatctagagtcttttttagttgcaacttttaaatcattaagccaaggaaacataagataaaagaagtaatatttattaatttattgtccagacactttacagggccttttatatgttgtttctcact

SEQ ID NO: 42634 - DNA, 1173 bp, Homo sapiens
ttgtgatgatttttttttctttctctttttgtgacacttaagtgtatgaatcagtagtctcagataatttaataaacaacacaaatgaatggatttgccagagtacactttagaatcctaagtttggaaaatagcagtaaaccttagcttacccaaagatagtattaattttgagcattttattcactaatcaagattatgtgttcacataagaacaaccttttctgaaaagtatcctgtggagttttttttttctttttgaataagactgttaggtttagtcaaagaataattacaatatatgtgttttacatatcatgtgaaataattaggggaaggaagaaaaatgttagagtgaccttagcatcttgaatcctgtgaacttacaatagcatataatgccgcaataacatatattgacacatatgatttgtgaaatacaaagatctgagcccttgcatgaagatattttgaacatctgatgcagagaaatgaagatctcttatatgattgctaggtcagatgaaaagtaaacatttatagaggacagatcaataaaagaattttataagaaaatttctgaacttgctgattaaaggcagtatctctcttcaaccttataaagattctgtcacattaatctttctcttataatttatcttgtagtttctccaaatttaagataatttctatctgtgcccctcttaaatgtgtatagttaattttttaaaaattttgctaaaacatttcatttgtttcacaggtgatgatttatgcttactttttagttatatccactatatgcatttttttttttcctgtcaagctgccctttatttcagggagagggcagggcagggggctcagtctttcttggcagcgactttcctcatggcgcccagaacgtttctcagctcctcctgcttcctcttggcgtggatgtgtccccacccttttctcgatgaaacttgagggcccgtttgtccttggagaccttcagtgactccatggcgcgcagctcctatggggcgaacccacacacctctgaatcatgtcccacgcaaacttggtgtgcttggtcaggcgcccgtggtggcggctgtgcctgggcttgctcacgttcttggtcaccttgtggcccttgttgaggcccactgtcataggggtagccca

SEQ ID NO: 42635 - DNA, 1050 bp, Homo sapiens
gatttagaatttttgtcacttaaagctataaatattctaactaatatactcattttaatcattatttgaggagttggaccctcaccagactttcacattacagggatttctatttgcataatgcagggtgggtttagggaagaggattgaggagctttaatagggaaaacagggatggaagtttatctcccaagagttcagaaaggttattaaaatgaatcaaaaagtggtttctttgtcttttgtcttctgaaaatgatttaaggaaatcaaaggattacacagtactcatttacactttcaggttgacatagatattccttgcaatttctgtgacattttcttacaggaaggcttattccaattcttccagcagctacccttacacacactcacacacacacacgtacacacactcacacacacacacaactttacttttggtgggatttttgataggaaatggaaaagagatttaagctactagctttttcttatctgaagatagctgcttctctggttcttattgttatactttaggcaattagatatatagattccatatttccttacatcacagatgacgattcaatctatataaccataggaaagggaactggttaagttagagtatataaaacaatagaataacaaataatatttagataaatgaataatgcaggtgcgaagcactatttaaataacatattttgtccttaaaatatgtatttatttattggaaaattattatttgcaaaaatatcagtgattatttctgggagatagaggtatataaaagattttcattttcctatttatacatttaatgattttctatattatttcaactttgttcatcaaacccatttttttcctgaaacaagaaaaaatattaaaataaaatagaaaaagttcttattctcaactggttgcaattctctgagtagtacactactataggtataattaaccagatgcctcattcctcaagcattcttagtaataacgatttaatatatcttttcttgtgtttctgctcagaattttaat

SEQ ID NO: 42636 - DNA, 1051 bp, Homo sapiens
taaatcttatcctaggaggaaaaacatgctacattattgaaaacttcaaaagttttctgtcccttacttctctgaaagaactattaaaagatcaggatcagtgcaggttggaagaactgaagaacgtatggaagatatatttcatgaagaaaaaaatgttaggatactgcaggttcctttctaccacaaaacgaaacagtctgcaagccagtatttggtggggagaaaatagataattctcggaggaataataatatttctaaattacaaaaaataaactgccagtgactccatgcctcatattatttggggaaagaataatagtaataatgacaaatattttagggtaattccaaagccctccctttccctggaagagaaaagattattcatttgaagaattgttaaccagctggtaacttccatttcgtttagtttggagaaggaggaatttttagaacgaaaaagcttaataaaccacatctacttttacttctttgctactgctaggtttccctcacttaatttttttcagtgactgtaattaagttctcctcaggcttctgtgattagaggttattttcaccattcaaaaaataagcagccacatttatgaggccaagtgtgggtggctcacgcctgtaatcccagcacatcggaaggccgaggcgggccgatcatttgagaccaggagttcgagatcagcctggctaaaatggtgaaaccccatctctactaaaaatacaaaaattagtcagtcatggtggcacatgcctagagtgcagcacgttggaaggctaaggtgggcagatcatttgaggccaggagtttgagaccagcttggccaacatggtgaaacccccgtctctagtaaacatacaaaaattagctgggtgtggtggcacatgcctgtagtcccagccattcaggaggctgaggcaggagaattgcttgaacccagtaggcatagggtgcattgagccaagatcacaccactgccctccagcttgggtgaccgagtgagactccatctcaattaaaaaaaaaaaaa

SEQ ID NO: 42637 - DNA, 1107 bp, Homo sapiens
atttgaagttactttactttagagtgaggacgatttgttgtgacaagaaatataaaacaatttttttatttcttttttaacaaatagggatactgaaaatacaatttttgcaacagtttccattaaaataatatgttgcaatactttagttgaattgtatagttttcttaaaatatttgagtaaaaataagcaatagtgaaattggatgtgtccaaaataagacattattttaaaattgtgtagactggtgacagcctattaaagtaagcaaattccttatgtggcatgagggaaatcattttatgattttgatagttgtatattttggtgaataatcttgtaatgtatcattaggtctgaagttatttactgttattctatacccaacttacaattatttagtctccataagcttaaactaaaacttctttcaaggtagtggttaacagttgttttcaaagcaaatgctaagtctgcaaaggcattccttaatgctttttctttctttcttttctggcagtaagaacttgatttgtgttcatgttctgaatttctttagtgttcctagtatggctgttgaaatctatactttatatgatctcattgtactgcctgcatttcattaatggccgattctgtttagggcttagggagtgaaatatttttcatatgacactacgcaaaatgagtacagtacaccagctgcaaaaaccacaaaccatctgattttgtggcttttgagggtgtgaatagttcaattcttaaagtacagcttatatctgtattataccatatggaagtgggactactgtagacttatgacaaatgtcaaaaatattaaattctcatcagtagccttatttcaaataaagatgagtaatatacttattaagagttattttgtgttatatttgacctagaatcacattatacctttttaatatttggctgcatagttatagtttttatagttttcacaaacagcaatttacattttattcacaaagataattgattactcatagatttataataattttttaatgatttttaaacatactgtattgtactcctattatgcaattttaagcaattatgatgtagac

SEQ ID NO: 42638 - DNA, 1007 bp, Homo sapiens
agttttatagcaagaattgttatggatatttaattatctttagcaacattggtaagtcaaatacatttaaaaatgattaataatagattagatcttaataattagatcccaattacagaaatgtaactttttttcttaatatggatgacatctaagctcaccaagctcaccattctttgaccttttcttttttatcctttactgtctttcctctaccttcattaattgattcatctttctttcctatgcttctcttcttcaaggtttgtttcctttttcccctcttgttgtctactttgttcaaattcgtctcccatagatttttagtcatatttcctcatctcatcaagaatgatggtattcttatgcatttatatcttcgtttttcccaatttttctattttttttaaactttccattctgtagctctgtaccagctgtttctggttcttctggaaagaacactcgtcttatagaaagaacactgtccaggatccaaaagacataaggttgagtgtagttctggcccagctttcttatctgtaaaactgtaagattaaaagaggccagactgaatttcctcacagctttaaaattctataaagtatgcttaggtgtttggaactttggatgaaattgttagctttggaagagagagatgcttttgcaagggtcaaactaagtaacaataccctaccctgcagcagcttccagccccaagtcagatcagccatcagtgcgtgggtatcagcttatgagtattcaacaccttgcctcgtttttttctcaaagcaaaatgggccaaatgggctcatgatggattccagaatcttgtggtaatataaggacataaatatagttcaaagctagacttttaagattctattttcaaacaatatctagagaattattgttatatgtcatgtagaataagatactattgtagaggcagtttcagacattgttcctgtcccatcaatgcttgtgactttactatgttttttttt

SEQ ID NO: 42639 - DNA, 1035 bp, Homo sapiens
ttgataacatctcaagtccttctcttcactttttgcattgtcattaattcagaatgttttaaacattattaaaaacttgtttgcaaagtgttatgaaagcaaagtaaaagcccactccaaaaaagcagctaagtggcttatggaatgcattttttcccctagacttgattgctagttcttgataaagattgaaaagtaacctagaatgggctgtgtaatgtgaataatacttctgggtcattaattatttcttttagttacaaagattcgctataggaacaatgcctaaagatctgaatgagcccagagtcaaaaatgctgaaagggaacttggataaaggtggaaaaaaggttcaaaaataaaattcaaacaatgttgatatgatgaaactatggtggccagggagggggtaaggagtggaacagtagtgtttaaagaaagagacaaatgtaaaaaatacaatgaacttacagttaaaggttaataaaaaattgagattcataatcatgagaaaagtatcaaggacagcaaacgtaagactgatgtaagcttacaaaaatggcaatgaaaatataagcagatatttttgagctatgttcaaatcaaaagaacaatgaataaccttaatgcttaggacaaatgttgtgatactcacagattatggtcacaaagttgaattccggttctaagtcctttcttctctgtcaaggatagtgagctacagttggtagaaaaaaaacaaaaagcaaaaaacaaaaacatgtttcagatgaatactatgctaaataagcaacagtgagacagaatgccatgctaaacaacttatggttatccaagaacaaaagtgggtgatgcctgaaatatgaaaaatggaaagaatttaaacactggagatgagctcaaggggcatattttttaaagtagggaagctggatacttaagcagaacttccatattggtctagtggttttgataattaaatagaaggtttgtgagccttcagaagtggtggcattaatagaaaccaaaatgtt

SEQ ID NO: 42640 - DNA, 1030 bp, Homo sapiens
ttctcccaaaggaaaacacatgattgctcttggggaatggctggaaatcagatttaaccttttatttaggttttttggaggactgaggagatttggccaaataagtgtatgctttttacaacgtgtctaacagccaaaattttggctaagatgtgaatatgcaagaaaagttagcaagctcaatagacacacaaaacaacttttgatgggaagaacagaaaaagggtataaacattgtagaatttatgaaaatattcacagtaaaaaaattcttataaattattacaagatttactatttcttaatgaaatcctggcatggtttcttatgcaatagacaaggtaaattaattaatttaaaatccattagttagcatattgctgttgaaaacaatagtagaaagggaggggttatggaggaattagagccctatcagaacaataaaagattttgaaatttagaaagacctattgcaataggattgcttcctcgcaccattcattttcaactgtatttttcaagtttatcttaaggtttcagtcatagagttcccaatattatatcctcatattttaatatataacttgacagagaaaggtgcaagattaatgtcattgatataccaagtgagttacaccaacacttgcaaaggtttaggtttggccaactggttagtaaaatctctttagtcatatttatttcactttaacttctttggagagtttcccacaattattaaggcaggtgtccttctcacactcttatcagatttggcttgtgggcctttgcctctcaaagctgaattgtaaaatgagccccacctttaggctagttgtaaccacatatttcaatcctgttatatttctggtaaaaaaaaaatggtctaaaatggcagtttgtgccatctgaaaattcactaagtaagttgacaaggaacttatctctttttttttttttagtctctgagagttttgcattttaaaatcatagaccttctcagaaagtagattgttgaattgtgaagctcctg

SEQ ID NO: 42641 - DNA, 1063 bp, Homo sapiens
tatttcaataaacccaggtgcctccaatctgccttctgattcttctgtaagaactcataatgactttcttctaaattggaataacagtgtgtttcctagagctctaactgaaagactagtaattaaaataaaactgacaaatgataatgtaaaatttttctgtctaaatgcattaaattgtaatgctaaacacacactcttctcagttgcttttatcaactggctatatttttcctgcattttgcctgtattattaaatgctaagttacagaatacatctatgctaactgactgtgcatataaaggcaattgttataggtatatgtatgtcaagtatatgcatgtatatacatatgtagtatgtcaaattttgataatctatgtgtattaaatatatactttatgacatactgttattggcattttctattgtttggcagcaatagtgaattcatccaaaataggtggatttcattttacataggacaagaaatacttgcaaacagcaagtttaggtttgaaatttgacggaaaggtttatgccatgttttgatattctgatgtgtgctaacatttaaaacagtttaaaatagttacatgttgtgtgttaatacaggtgtttttggagtaggtctgcttcatagtcacttgttttatacacacttgatgccagagtataaattaccctacatccctcacagttatttatccttatagcatacttgctatttagatcagaccatggtatgagtgtgactcatgctaacattagtggaagctaagtataaaaatgtttattctaatgcctaaaataaagttcaatctcaagaataacgtataaactattttgaaactatgccgtcaaaaaacctctgtgacaggtcgcttacatacacatagacacacacacacacacacacacacacacacacaccccagaaaggacaaaagcagtttcctgaccagattctaaaactccattcaacacaatcatgtggttacattaaaattctggccttaccattgcatccacctgctaggctcatgttggacttttgcacta

SEQ ID NO: 42642 - DNA, 1026 bp, Homo sapiens
ttatagaaaccataatttcaatgattagcatctggatgaaagctgaatttgtattgctttccttggtaaatgactattcaaggcttttttcttccccctcttctaaagatgctgtctctgtaattggcagagagggacatcttgataatggaagtgtgaaggtgtaacgtgtgttaattgatacttcttaatcacttttaggtattaagtcatgatgcaggaatctgcgacagagacaataagcaacagttcaatgaatcaaaatggaatgagcactctaagcagccaattagatgctggcagcagagatggaagatcaagtggtgacaccagctctgaagtaagcacagtagaactgctgcatctgcaacaacagcaggtaagttttgttttcctcagtgcttccttaaaacaaataagcttgttttattgaatatgaaaaatgtattcatagcaaactgagcatgttgtgttaagctaaaagatgctgagaatttattattatttggaacatgattgaaggatgagtaaagagataagattttcatattagttacgtcataccagtaccagagtacccttcaggtgtcaggatattaattaagctcacaggatgatttttggaaggtctgtaaagctttgtaacaaatattttatagcttctagtttactatcttacattgtgctgcagaacgtgatacttagttttccaccagagggccacattacttgatacttgcttatacaatgaatttcttcaagtctgagctaaggtgaaaaggaccacaaggacttttcaaaagacagatgcttgcctgcgttagctgcaaatattagctattaattagttgaaatctgctgagagattgtaaatcatgtaaacactacgatctgttgcttttcttgaaattcattccaagatattttgaatatacatctttcaataacattaaagagcactttttgtgttctcctaagtgtctcataaaatgcaatattctctttaaatctggaaatgttaacaac

SEQ ID NO: 42643 - DNA, 1046 bp, Homo sapiens
agcatattcattgtgcctgtcttgcatgaaagcatttactgaagaaatatgacaagaacatgttcagctaatgaggtcgaatggttgttacattaaatttaggcggtgttttctattaggttttatttatctgtatttgcattcaatcctttcacatttgttatctctcgcccaattccagggatggggcgccttttctcatttcacagccaattgttactgtgcgctgactctgtaagttgctggtgaatgtaaaagtgactgcaattaacctgactttgttgcttgaggagaatttgagatgagaaatctgacagcaaatgacaggcatttttctgggtttagcacagaagaaagtctaagtaacattgcaaagagaggcattagggagtaggtacctgcaaattaagtggctgacactgtctattgagaatttagatagtaacggctggaatttttatgttaagttcacattattttatattcatagcaagcttccttttgagcatttcctttgtgactgtgcatgatctcatttattgtaatttgtattttttggttgatcagaagatggctgtaattgtaatttttattaaagcacattcttaacatgtaagaatgcatatatttagatgaaaacaattttatttttgagaatggattatgtgaacttagattttaatatgataacagcctacccctaattctcagagatataatgtgaaatggtggaaaactttgagcaataatactcatggcaggtgagtattttttttaaataatacagttcaatatcagtatacttatcttgtcatttatttctgttgaactgaaggaaagaagtctgactgtacagtcataattctgtcttgcattaactggctagctatgcttttagcaatagttatttttactttccaaagcctgttggttatgtagtttgaattacaatctttgccttcaaaagcacactctatacaactacctcctgctagtagatagtacccacacagtatgcaacatttattgtatttgtcaggtgttta

SEQ ID NO: 42644 - DNA, 1775 bp, Homo sapiens
ataacaagtgttgacaagaacatggagaaacaggaactctcattagttttagtgggatgtaaaatggtgcaaccactttagaaaatagtttggctgtatcttaacaattaagcctccactatgttactcagtaattataatcctatgtatctatgcaagaggaatggaaacacttatttacatatatttataaaggatatatagcagcattacttataatagcaaaaaactggaaataccacaaatgtacattaattggtgaacaggtattacaaaacaaatattattcaggaataaaaaggaatgaagcactgatatatgccacaatatacatgaactttaaaaacattttgctaagtgagcccagccagatattttataattctatttgtatgaagctttcagaaaaggcaaactgatgtaaacagaaagattagtggttacctggggccggaggtaagaaggagcagtatctgcaaacgggcaagagggatttttttttttttttgagtgatggaaaatgttctaaaattggactgcagtaatgattgcacaactctgtaaatttacttaaaacactgaattgtacattgaaaatgggtgaattctgtttttaagacagggagagtctcactcctgttgcccaggctggagatcagaggtgcaatcatagctcactgcagcctcaatttcctgggctcaggtgattctcccacctcagcctcctgagtagctgggactacaggcacatgccatcatgcctggctatcatatttttagtagagatggggtttcaccgtgttgctgaggttggcctcaaactcctgggctcaagtgatccacctgtctggacctctggacctcccgagttgttgtgattacagacgtcagcagccatgtccagccaaagcgggtgaattttatggtatgtaagttgtacctcaatacagctgtttatataaagagagagaggccaaaaaaatggtgacataattccattgtattttttaatgtcatccagatcaaagatagaattgacacttctttgcatgcagcaagtggcaatctatgtgagtgagttaaaacagagtaagaggaaactccaattccaagtgtaaaggattattccaagtaagaatatcagaagagcaaagaactgcctttatggtagtcctttggcttcaacccacagttcatacccacatccttatggtaggtcagatgatgaaatgcacattgtgtgatcattaaaggacatatgctctcctgtgccctgaaacttttcaaaatgttttcaaataaatcaggcattttatgtgcaaacactcagtatataacatatgtactgtctctacaatatttaaagataactcttacagatctgtactaataaaatagtaaagaataaaattaattttgtctcacgttatgcattctttaattttaaaaaagaatacaaaaaaggcacatgcgatttattctattagtcctgacatatcttgactttgatacaaatatgcatctcttctcacttgtactgacaatcacttccttttctgaacagtttttttttaaagttttattttaggttcaggggtacatgtgcaggtttgttatatgggtaaattgtgtgtcacggcgttttagtgtaccgattatttcatcacctggctaataagcatagtaccctatagatagttttttagttctcagccttctcccaccctctatctcaagtaggcctggtgtctgttgttcccaactttgtccatatg

SEQ ID NO: 42645 - DNA, 1028 bp, Homo sapiens
ttccattttactgttgatgggcatttaggttgattccatgtctttgctattctgaatggtgctgagatgaatatatgcatgcatgtttctttatggcagaatgatttatattcctctgggtatatacccaataatggtattgctggatcaaatggcaattctattttaagttctttgagaaattgccaaactgctttccacaatggctgaactaatttacattgccaccatacattttttactcacgttttaaatcctaagctagaatgtaagatgtttgaggccaatgctaaaacatatgtcatctgcctttgtatcctcaaaagaacctagtgtcactataaatgcaagtgattagtgatcactgtatgtataatagatgccgaattatgtcaaataaacatgagaagttatctgtgccttactcttgactctcggtttccacagtcctttttgaaatctcaccaagacacagacaaaggctgaaaaacataggacacttaatctgcatgtggattttaagggctggctgaacatggaatgacattcagaagtactgtgtcaagttgagcttctcaagttcttgaaatcaccacaagtgatttccacaaccacaagtgtggtggtgatttttatagcacttggttgtaaagcctcactcttagttttctgctaagccatgttagtaatacttcgtcctcaagattggacttatcctttctttctcactagtacagctttattaattggtatatgaattgttttccaaaagaattactgtttttatgccattgtgcaagtactgacttctctatgatgcattaaattatactaacagcatgtataagtcctagactgagaacaaggactcaaaaatatttatataatgtttattttaagattgatgactgtatatttcaaattctgtataacagttttaaaatcaggaaaatagatatttaattaatttgttctatatagttaatatgtactgcatgattacagttaacattttaaaagttcaaaga

SEQ ID NO: 42646 - DNA, 1083 bp, Homo sapiens
aatcatattaaataattaaaatgtatatttatgactttttgaacttaatgtctctgttcatgtaaaacacaagttggtttaattttttaaagatacacgtataattttgatacaaagatatttttaaatgagaaaagcttactcttaaaacaatgttatttcttaaaatgctttgaaataatatctgataaaaggtttcaggatttgttttataatcatcaactaatgttttttatagtgtacatattgagagtaaataaaattggaaaacattaataatcaaaaattacctattttcccagcagaacctgggaagcattttaatgcttgttctttcaagtgataatgtgctgtcagggaaataacagactcttgaaatggcctcttgacacatgtatattttcatgaaattctagatctagaaaggcggtaggatagagagcaaatatattggtgttaaagtgcacatatttcggtgtgaattttgctttaaccaatcatcagctgttgaccttgggctagtaacttatcttctctaatcctcaaattattgtttgatgaaatgaggatcatactgtctactccatgtggatgggggaattaaacaactataaatgtctgatacttcctggggcacacacactcattaaatgattatagtttgttcttgtccttatcagaaagaaagtaagtccctccgtctcatccttccttcacttattcattcattttacttggccttagtatattggactatatgaaaatatagtgcttgcccgctttgagcttacaactcagtgatggagaaagtacatcatttacctagcacagtatttggcttatggtagctgcttaatacataaaagtaaatagtaagtaattacaagttgtaataagtgctctacagaaaaataataagatgttatgagaaaggactgcagagagcaccagattgagaaagtgacaattaagctaagatagaaggatgattaagagctagccaggagcaaaattgtagaagggttgtatttgagtgatgacagctgttagatgacaactaattttttatgccgaataatacat

SEQ ID NO: 42647 - DNA, 1033 bp, Homo sapiens
ttcctagtctcttttattcagaaaaaaaagatgccttattacttatgatacattttaaattgtcaccatgacgcagaaaacagaatttgattttatatatatatgcacacacacatagacacatgtatatacacatatacatgtaaatatatgtatatatacatatacattcatatatacatatataaacatatatacatgtatacatatgtatatgcatatgtgtgtatacgtatatacatgtgtgtacatatatacatatgtgtgtgcatatatacatatgtgcatgtatatacatatacacgtatatatgtgtatgtatgtatacgtatatatatacgtatacatacatacacatgcacaaccgtatattaccttttgatatcaaggatcttagacccaacagtgggaaattgctctaaagagttgacagtgatcattaaagaatcattgtagacattagtcagtctcccaataaacagtaaaatgctgatgaaacacttaactcccagtattctcgagctctggataatgaatgtggtttaaaattaatttaaccagatctaataacaaaaactaaaaccctctaaagtatttcatgtcttgtggataaatctcttatgtgttgctagaaacaaccttttattccaaatctaattttctttccaactctgaggatatgttgatatagattattttaactcaacaagtttgaggtagtacactaacctgagtcattatgtgtatataaaattgcaatcatcccatttccttttggagttttatagataagcttcttacttgccctcctgccccctcatgtacatattttaaattatctgtatacatttttaaaagttattataaataattatatagagaagtaatttggttatattttaatttattttttcaaaagctcaaagtacatttaaatctatacttaaacctagccagtcctgagaaacaactttgagtcacaataaataagagtttaagaaataataaggatcagttccgaattacagtgaca

SEQ ID NO: 42648 - DNA, 1030 bp, Homo sapiens
attatgttttattgttttagaggtcttaaattttttttaaatagtttataaaagttaatcagtgtgaacagatacttatttctgaacttttaagcaaacatataatctgaatatttaggtgaggtatttcagggtaaatgtttaaatctgtacatttaggtatccttgaaaattaagttgaaatctagacaatattacacttgctgtgtagtattgatgaaaatagtaataatcatgctaataacaataagaagaataaggaggaggataatatctaatatgtattgaacaccctacatttttgggattattctgagtactttacatgtactcacttatttaatcatctcataaccctttgagatgagtactgttcacttacaaaatttacagaaataggtaatgaactatgaagatggaaataagtaatgatgtgtataactgataaataaattttccaagttgagaaagctaataagtggtggagctgtaatacaaacatgtatggtataacttcagagccctaatcttaccctttacacggaagtcctaaagacatagtctcctcatttgcaaaatggagtcaatactactacaataactcttgctgccatggctcctgctactacttttcatgagatagcaatgtagaattaataataaaacatattttgaaccatacaaatgtaaacggaccctttatcaaacatgtctgtattagttctcacactgctaataaagacatacccgagactgggtaatttataaagtaaaggaggtttaatggactcacagttccacatggctggggaggcctcacaatcatggtggaaggcaaaggggaagcaagacatatcttacatggtggcaggcaagagcacatgtgcaggggaactcctatttataaaattatcaaatctcatgagacttattcactattacaagaagaggatgggaaaaacccacccccatgacttacttacccccaccagtttctcccacaacacttggggattatggaagctataat

SEQ ID NO: 42649 - DNA, 1049 bp, Homo sapiens
aaaagtttttaaaaaatatttattaagctcattattatgtttctttattaaaaaaaaaaaaaaaaaaaaaaagggccggacgcagtggctcacgcctctaatcccagaactttgggaggccaagacggatggatcacgaggtcaggaattcgagatcagcctggccaacgtggcgaaactatgtctctactaaaaatacaaaaattagctgggcgtggaggcacgcgcctgtaatcccagatactcgggaggccgaggcaggagaatcacttgaacccaggaggcagaggttgcagtgggctgagatgcgccattgcactccagtctgggcgacagggtgagactctgtctcaaaaaaaaaaaacaaaaaaaaaaacacaacaaacaaaacccctcaaactgtaactctcttttattttagtcttcacagaagtaatcaaaacaattgtttgcactcatggctatggttttccccattaattccctagtaactctctgcaaactacttctacttcagtaccctataggaactgatatctgataggtcacatacaaatcagatcaacatgaacttttcaacaaatcttgacctttttgagtttttgatgtttgaagatagtatcattcatcctgtcctctcacaattttttaatatataacaactttattgagatataatttatgtatcacaaaacctacccttttaatgtatacaattcagggagtttttagcatattcactaggttgttcaactatcaccactgtttaattccagaacattctcatcaccctaaaaagaaaccccattctcattagcagtcactttccattctatcttacgtctgggcccttgtaaccactaatctatttttttttttttttttgtctctttaggtatatctattccaggcatattatacaaatggaatgatacagtatatgatttttgttactgactttttttatttagcataatgttttcaaggtttatccatgttgtagcaggtatcaatattccattcacttttatggacaaatattctattaa

SEQ ID NO: 42650 - DNA, 1076 bp, Homo sapiens
tctcctttaatatcctccccatcctcaccagcacacacacactatgtggaattaattattcccttccatatattacttatatgtcttgttaatgcatctattcttatatgtatcacaccgaatcataattactataagcttcttgagggccaagactgtgccttattcatcttcacatttccactatctggcccatcataggttttccataaatttgttgagtctatagaccagtgtttgtatataactctatcaagcccctcttttctcctaggctccagatgtgttttttcacttgcttactggggcatctcaacctagatcaacatgttacaaagtgaagttatttgtttttccttacccagtccaatgttttcatcagcttttcctgacgccattgtgtagactccagccattaagcccttctgatctgttagtgtcgtattcctctgccctaatcatgtaaaaattgccctgttcttcaaccccagcatgtcacaaaaggcttttcgtagactggtgctatgcaccatcatacacctgatacattacaaccatgacttaatccttactgctctccaaacatactatttatttgttcatttattcattccttcattcattcacaaatgaataggttgttttacatatgccaggcattttgcagggcatcattaactatgcaaactttgataccaacttgtttttgttcctgcttctcatctgtttagaaggtcattccaacaccccttatctgattggcaaactcctatacatactttgaggcccctaatccctggagtcttctctgatgcatcaaaaagaaaaaaaaaatccctcctcacacaagtgaatatccagaattgcatttttattttattatcccaaatatactagttacaaagatagattataccatattttattacagttatctgattacttctctagctcaatcgcagactctaaatcttttcatgtcagagattgcattttattcatgtttataacttcacttcttaccacaatgcttgacacatggtagatgctaaataaaattcttgccaaattgaatt

SEQ ID NO: 42651 - DNA, 1051 bp, Homo sapiens
tttaaaaaaagagagagaaaaatgtagaaaagtattttaataatttttttacattaaaaagattatcatgctaagagtggcaggtatttatttttcttcattactgagactaacactagagtaataggtgctgttttaacatgagaaaaatcagaatacttgtaaggtggaccctcatactagcaaaggtatctaagagtacgttttatgacaaatatttataactactgttctttgttctatttgaaaatagccttatttctagtgattaacaaaacaatatgtgctttcaaaaataatccaggcaatacagaaaactatgaagaattgaaattcacttgaacttcaacctcccactgatactgttaacacatattttacattgatgttatcagaatttgtgcgtacattcatgagggatcatcaagccaggctagaaatgtatgtagtttcatattttgtagctatttttaaatgtgagattgatgtttagggtatagcttactttaggaccatggaaaagcaagaacatcttttaaatgacctgctggtattcccttcatgctttataataaaggtaagagataagcctctgtgctatttgggagaggcactgggttcaaggtttgactccaccatttactgactgtatgaccttcaggagggcaattcggttctatcgcctcattgcctttttctgtcaactgggaagacgtgactcaagctctaaaattttgttatctcaatgctttattatagtaaaagagtataccttctcagtaacatatatttacaaaaaattatccttttttatgtgttatatgccaaaagttttaactttgataatgagttagttttccccttatcagcaaaaacaagaagaagcaagattattttaaaagttggaagtttattactcatttattcaggttaaaatattctgatactcgaagaaaaagtgaaatttgttgttggatataatacaatgtccatattcattacatacgttattccattatgttccacatacccctatgacatgccagcttat

SEQ ID NO: 42652 - DNA, 1030 bp, Homo sapiens
cccccctaaggagtaaagcatacagtaaaagagatgctggtactttgtgaatttggaaaaaaattataatatgatagtgtttttctttacatataatagatattgcagtgaatcttcatgcttcattcattgaatcaagttctaatccaaaaatacattccaatggaaaagaccaccaaaaagtaattaaagggtttgcctcatccacaaactctgaggacatccatggtcagttcttctatgaaagcataataccctatataagcacagcatttattgatgctgataagctttctgattaagttcacaacaaatgcacttcagaattattttgaatagttttttctagtttattgcttaaaagtatatctctataagaatatcagatacagtgagatttctattaagaaaaaattagtaactttaaagatcttttgtattgttttttgaaaaaactgtaaaacaagctaaatgctatataatacatctactctgttactatgctgttttattctgcctactatattattttcctttttttagtaattttatttttcatttcttgaaattaatatgtaaaatacagtttttacattaagcaagaaagacttttgcttgaaaattaataaatctctacattaaattcttgggctcaaaccctgttttcatacattgttggacaatgagtcaaggtggaaaatctaaggttgttctgtgctcagtgtcttgatttgaaatattcagaatatagacttactcagagattggaagctggtttaatatgttgtgccagccatcctgaaagccatttcagtagattctgtaccctggcatttgttttagaaataattgcatgcaaatgtagttttacatctgtactatgtctcttaatcctaaccaggcattttccattagatgtagtctgaaaatcgcattaagacaaatatatatcatctgtgaaattatgctctgaatgctctaaataggaaagaaaggggcaatattcatgttaaatataataagaagtatt

SEQ ID NO: 42653 - DNA, 1033 bp, Homo sapiens
gccaacaccttcaattggagtcacacccctgtgtatctaattatgcactggtgccaaataaggttagcaagagtagcacaaggctgttgacaaaataatttagatgaaaatgtatttgttgaattctggcagcaaaatacaacttgaacaatttccccccagtcttcatctgctagcatcaggtgacatacttcttcctaagaaacagagggaaaaggatattttggaagccatttttcctgtttgaattaatgttgctcttatcttcaagaaaatggcatgtagtcatgtaaagcatatacaatccatttcttaaacataacctctgaacttcatagatgtatttgaaaagaattatttataagatgtaatatttacatgcatcaaaccactacaaatactccctgacacccttaacacatccctccttgcttttcttcttttctggtatagttataatttcccttgtgtatcttatgaatggggatcatcctttcatatcatacatgaagtctaaggatgtgttgtcacatggtctattcaaatgcagtgtaatccttttgcccttcagacaaaatctttgaaatgtctaatgctacttaggtaaaaaatgacattccatgtcatttatcaataaataatcactttgcttttacagataaaaatgcaaactatacatttgagtatatagagtagttttcaatgcaaatggtacaattcaacaggttttaacagatattatggaggttggttgcatagtcttagatacattttagtggcaataatttttatataataatgcataaccacagcagtttatttaaataaattattgtgattgttctcacatgacatggtaggacaggatttatgttcatttgtactggttacaattgattacaagtcagaggtttgctttttcaaaattattgatgattacattttaagaacaaataacatcccatacaccaaaattgcagtgtcatttaaatatataggagtatttatgattcttagcttacaagtgggaagt

SEQ ID NO: 42654 - DNA, 1027 bp, Homo sapiens
cagttccactggtgcatctttgtctttttgtcacaatcactttcctcatttatgtcattaagttcaccttcactaaattcctctggttgtgtacgtagtcttcaacggtggcagtgtcaacattcccattgtcagctctttattctatagcttgatttaccttctatttgaatttcacattcagcattatcactttttgtttctttgctgcattttcatcgtggttggccaatttcctcttttgattctccgttttgtaaaatgtcacataggtttatcacttggagacaaggagacaacacaactatattacttgctgtctgtgcatgaactaacagttgctcagtgatcagtcaccaaaaactttgaaagaagtgacatgattggttattgatcatgatgcatatctgttgtgtatgtagtgatttatggactaaagatctagcagtgaagtttatactttattcaattattcatagttaacatgctatggtaactaaaatttgaactgtgttgttgggagacttagattatttagctacaccattgcaactgaaattcttgtatattactgtctatatctacaaaatgattgagctttgaatggtaaaactgatttcaaaaaattccatgttttggtatttttcatattaactttaataaatttacattactttttaaacaaataaattctgttaaaaattggtatttaaaatgcagaaaatgcatcagttcttgatgggagtgaaggtaacagaatcgtaagtgaattttaaaatatattttaatattttaatgttaacattgtacatacatgtatatatatccttaattgaaaccatttgtaaaggaagattacttttgtaaactttttctacaattaactatgttatatatgtagtcagtaaaccttattgaacaccaggttcattgaagatgaaagacgcccagtaactgctaagaggttttttcaatttgtgttttttttttgtttttgaggtagagtcttgttctgtgactcaggctg

SEQ ID NO: 42655 - DNA, 1122 bp, Homo sapiens
ttcttgccttttttcagttgacctcttcactgcaaagttggccaaactctgtttgttgcttacttagtaaaattttggtgtatctacatgtttttcagacattcaatccacgtcaaggaagagccagtgattgcagaggatgaagactgcccaatgtccttagtgacaacagctaatcacagtccagaattagaagacgacagagagattgaagaagagcctttatctgaagatctggaatgagaactgacttgtgaaacctcagcgtgaagggacatatcactgaccttcataaccactccacaaccatgaatatttgacaaatttttactgtgactatttattaagcatggataaaggagacagccctaaaggaacttactaagccagccctttgggattcagtaccaacaggcaaattgcttgttttcttcttcttcttcttctttttttttttttttttagaaaaaaagacaaaaactgattttcttgaaaaaaaaaaatgaactgttctttctataatggctttgcccatttaaaaaatgtggctcttaagggttcatgaaatgactgaatatgaggatacatgtcctgtagaaagcaaatgcgcctcatatactgccaaaaatagtgttagtttcattaatgtgaattttccagcattcagtagttgtaatgttagaaacaattgctggtcaagttcaacttgttgctattgtttttaatttgcacaggagtagtatcagaaattagtgtcactgcttgtatctagctgaattttaaacaacagaacattagttttttatgttggtgccaccaactgtaaatgacataagttagttattacaaaacacagtaattagactgttgcaaccatctaaaaccttaggcttccagtctgtgctgttagtgttaagatgtaaagtgcaatcctaagctaacattatctgtgcaagcaccatagaaacatttgcatatctgcatagatcttacaactgtactctttacctccttgtgataaagctttgtctacctgcaaacacagtcaaaggctacagctgcaaaccaaagccaactctaaccatggccaagagctcaaggacagaagcagccacatgcttt

SEQ ID NO: 42656 - DNA, 1039 bp, Homo sapiens
cattcagctctgtagaccccacatccctcagcccagggccatgcacatagtttcccccaaatacatttatgttaattgttgaataaatgaaagtctttaccttttgactacatttagcgtctctgtaggagactgacagctttcaattagttaagctgtggtaatttgtttaaaatgtggattgactatctttgcttctcttaaggagctaattttctcagtccgcagttcatgcatattaaaagatgtttttattagtaatattaacaatgttattaccatagctttttacagttaatgaagtttttcatatattgctctaacctgggctatcagcagctcaagcatatgggatgagtatcactattatttatctataagactgagctcagaaaagtcaagcaactgacctggggccatgcagctaatatcttgatttttcagcatacacccttaaccctagagtgattctcaaatggagagtggggtagagataagggtagggaagggactttgtgatgtatgtggtcctctagagagtgttagaatcataggagaggagacagttgttccaagttataaccttattccaagctcccaattctagtccactttcctagttgaaaattactgctcttttaccactagtattaataagactgcattctgcccttgtgttggcaagagaaaagttggaaaaattgcagtatactatactccttcagaacttcatctttgttgtgctaaattcaaaacagttcttgggcttaatacataaatattatatatatatacacacacacatatatatatatacacacacacatatatatacacacatatatatatatatttgacatcttagaaaaaaggcatttttattctttaataccatttacttattgcctcctggagaacttggtctcattccaatggataggtagagaatcagcatatgccatttttaatgtgcggtaaatatgcattttccttctgcagcaagacaaaatcttgataactgaaaccaatgatatgaggt

SEQ ID NO: 42657 - DNA, 1019 bp, Homo sapiens
ttttaatgtttagcctacagcctagtgcctggcttatacaagttcagaaaaaagtgagttaggagtgtcaactggagaactagacttgttctttattactccatagacattgtggttgaaagggcaggaatggctgaaattcttaagggagagaatgtgaaggaataaaaggaagggcaaatatttgagctaaaagaaatgcaaaaagagacccagcagagggaggacagttactcagagatcctacttcccagccccatcaagttttctcactattccgtatgggtttcaaacaactacatattcttgaatcctgaaggtgggaaaagaaattagaaaggtaaaattgaaattgagttgtttgctgttacaatactgtttcaacagtattgtaaaatcttacattaattttttcccataaaaagcttttccgttttgcctataattgtagaagtactacagtagtattttagtggaaagataataataggagctcatgatatgaccataaagttataatcagagcttccagaaacaaattttctgtgactttggaaagatatgtcactgcattcctcaaaatacttaatttgcttggatgatgttttgttttgttatgttctgttttctcaggcgcagtgccttccatcccatgttacaataatggtgtgggcgaaaggtttagaattctgctttccaatgcaatatttgctagttctttggaaaataggacttcaagaaatgtcactgctcagccaacacattaaattgaaaaatagtaatacaatgaggagtgtgtgtatggagagtaggcatgatcagagttgactatatcaaagtataaatcattctgcacatataaatcattaatttttgtttacttgaaatatttaaattagctgtctttttttaaaaaataaagcaattatccatcagaagtatttataaatagtaagtgtttctgtagggccaaaagtaaacatttaagtgccttatcttaaagtttaggaaaataagtt

SEQ ID NO: 42658 - DNA, 1004 bp, Homo sapiens
acctttggtgactaaaaagcctttctcaaatccctactcctacgtcattccatgagcatttattgagtttgaatggaggggattgatagggccttaggattctgagttccaagtctctgacttgtgttttggatcacaaattgattaaaatcgatagcatcttatattttatgttcataaggcccttaattgaatttaatcatagcttttacacatagtatagtataagaagtaaaaacaaacatagctaagcaaacagctaaagagaagaaaatataagtaaagaaaccactgcataatgcagacaaatgggaaacagtaggttaattttaaaatatatttaaagtaaatttatgctttagtatgctctactcatcattgaattactatcacaaaggcttgaaaaggttaaagcttaatctataataaaaaggagttttgattaattgtgataatcttttacacagtgattctgatcatttttgatcacatgggcttctttgagaatctgacaagagttatttccacccgcaaagttttaaaaacagacaacaagatcctgttagcactgtgttattcttttttttttttctttatactttaagttctaggatacatgtgcacaacgtgcaggtttgttacatatgtctacatgtgccatgttggtgtgctgcacccattaactcatcatttacattaggtatatctcctaatgctatccctcccctctgcctgccccacgacaggccccagtgtgtgatgtttcccttcctgtgtccaagtgttctcattgttcaattcccacctatgagtgagaacatgcagtgtttggttttttgtccttgaaatagtttgctgaaaatgatggtttccagattcatccatgtccctacaaaggacatgaactcatccttttttatggctgcatagtattccatggtgtatatgtgccacattttcttaatctagtctgtcactgatgggcatttgggttggttccaagt

SEQ ID NO: 42659 - DNA, 1033 bp, Homo sapiens
aagtgcctggagaattgttgtgtatgatcccagtcctgtgaatattgtcagtatcagtcagccttcttttagtgtgtttgtttcctcccatgctgccataaagaccttatgtcctaggtgacctggccaaccctgtgcatctctgcagtaggctaatatcagtgactgaaaacactggatgtgaccaaggtgttattttactcatcatcatcatcatcatcatcatcttttacagaatcacccagtgggtacattatggtttaagttttgttagcaagacaaaactgatttattttcatttgttacttgcacaatgtataagccaaggacaaatgaaaagagatgaagctgaaatgtgaattgtgaaataaacacagttgggaaaataaaattagaaaatatattaagcatttgggagagattttttgggttatttttaccccaatatgaattttcattaaaactagacgatttacttgcatgtatttttgtcctagccataaatggtattgttaccaacttgagtgaactgttgcacattgatcctttctgggaaaatgtgtttaagatctaaagtagattttattatccagaaattatattcacctttgttattatttaaacttcttatattagaaatatttcaactggccaactgaaaatagccagcactgaataggttcaagtaaagtatagtttctagcttctggagaaaataaatagataataattgaaatatggaaaaaataggttattatttttaaatcttctgctgtagccaaacacaaggttactaattctctctgggcagacttatgcttcactcctctgcaaattctgtttcttagagttgccttcttggttcattctttcaagtgtttgagctgtggtcagagccttttacaaacctccttaggttaaaatagaatggtccgatgtccgtgtggtaatcagagtaaatggaacataggtaggtggagaggtgtggttttcctagaataaatattttgctatcatcttcactgctgtcaca

SEQ ID NO: 42660 - DNA, 1055 bp, Homo sapiens
tttctttggggcagaaattagctagtgactctttggaagacaagagctcccatttgacacgctagtcctctgccccaaaagaacagtagagcaggagccagatgctgagttttaggtctggtttgctattgagtagctgtgcaaccaggagcaaattatccctcctctctggattctattttcctgatctcttacatgagggagatgcctagtcctgtccagaataagaatatgtgggagactttaaaagagcagcagttcatgaaataccaccagctctagtaattctaataaataaaatgatagctattttaagaatatattgatgaaaagtgtcaaactctgtaaaagtatttgaagatcttattctgagccaaatatgagtgatcaatggcctatgacacagccctgaggagactctgagaacatgtgcccaaggtggtcaggctacaacttggttttatacatattacagacatccgtcaatacatgaaagatgtacattgcttcagtctggaaagacaggaccactggaggtggggggcggtccttccaggtcatgggcagattcacagattttctgattggtgattagttgaaagccttattatctaaagacctgaaatccaaaaaaaggaatgtctgggttatgataagggggcttgtaaggaccaaggttttatcatgtagatgaagcctcctggtagcaggtgtcagagagaatagattgtcaatgtttcttatcagagtctgttctgtcagtcttaggtctctgtgtttctgctaatgctggtcagctgtgaagcagcgcccacccacccccagctccccatttcctatcatggcctgaactagtttttcaggctcactttggaatgaccttggccaagaggtggggtccattcagatgcttcatgggtttataattttatttttgatttacaaagataaaaagttggtaggagaaaacaacttgcccctttgcaaagttgactttgtaagtcagtagcgagctactccaaagccttagtgtaaaaactgctgactcatggagg

SEQ ID NO: 42661 - DNA, 1028 bp, Homo sapiens
ggttcccagaggctcaataccagcaccatgagccgcagcacgcaaggcaaacacagccggaggtgagcacatacctgcttcgcaccccatgcgcctaaccacaaggttccctccctccaggaaggccgttgtcttccctgggacgacttgccagctctgaggcatgacagtacgggcccccagaagggtgaccaggaggccctcctcgtcccagctgccggcgtcgccgcccactgcagggcccgggctgtgactcgtggggacggttccctgcgccccggcgggggaggtgggcggggaggggcggcggggcgccggggcggggctcgggacggccgggctgggagctggagcccacagcgggaagcggccgccgcccgggcctcgcagggctaggcgaggcgagggggggcggggccgggcgctacgggaaggggaggccgcgcggaccgggagccgcaccgcgccagccgggctgcagcggccgcgcaccaaggctgcgatggggctggagacggagaaggcggacgtacagctcttcatggacgacgactcctacagccaccacagcggcctcgagtacgccgaccccgagaagttcgcggactcggaccaggaccgggatccccaccggctcaactcgcatctcaaggtgaagcccggggcgggcgggcccaagtccccgctgaggccgggaggtgcgggcgcccctcagccccgccctaacccgtcccaccattgctaccgggtcggccccgcagggtctgagacccgcacccttccccggtcccacccgtcaccaggccgcccgcgtagccaggaattcttagccaggttcctgtgcgcccaccgtgaccctaagagaagaggcggacgccctggcacgtccttccctcctgcttcccccgcccaaagcgctcccggttcccggggcgtcaggttggctgacagttcggggtccctgcgtcctgtctcctcagctgggcttcgaggatgtgatcgcagagccggtgactacgcactccttt

SEQ ID NO: 42662 - DNA, 1066 bp, Homo sapiens
aggggttctgctttctttgttcccctaagagacctgactgctgttccagggggcaaaaccacgtaggtgggctagagtttaggggcttcggaaactgaagagacgtggccacggcgaggacgaaactagaatggggcttgtctttttagggggttgcttctgatggccacctgtatgacttaggagggagaggggcgctgggacagtgggtgatgtgtgactgttacggcccagcaagttttaaagctgggatctgactcagcccttacaaaagggatccggtcatcctcgtcccaccgtgatgcagctggcaaggtttgagccgagctgtttccttgttcccagccttgctttatctgtgttatgttggggtccttccaaggggcaggtgtttctgtgaaagtctgaattcatttctggcaatcacgcggggcttgtgatccatcaattttccatcgtaccttatctctttctggggcttgtggtggacatctatcttattaggtgaaatagattataaccagaggctgagcgatgtggccagtcgtagtgctgacccgataattaaagcaccagtgaaagtactttccctgactattgtcaatgcagaatttactccgaagtacggtttcccattcatatctttcatgttttaaaagagccatttgctaatttggcagttggagagggctccaatggctcacgcatgaatagttgcccagtgtattttaccttatcacagttttatgttcaaaggagccctcgggcagaatgaaatattgtcaactctcttaggcaaaataatcaagatactttaattgctatgttaagatggtccatgaatgtgagaggattgtaagaactgacgttggaggcaatatagactatctggaccctctcttgaattttaagaagactgttcacattctgtagctttgggtgggggtttattctgtcgctttcatcagccagacacatgcacattgccatgcaaatggattcagaaaaacattatattcccttacagctaaactattatagctgactaatgaattttttctgcatg

SEQ ID NO: 42663 - DNA, 1029 bp, Homo sapiens
gggaatgtgatgctgaagtgatcccaagtcacattgtctttctgcctctgtgcactgtactctgcacaattgcatccatttttagaccatttccttctcatgagaatcatgtgcatggagggccaaaggagagacaagtgctcacaaggatatcatgagcacttatgaatgtacaaatgagtgctctccagtcagtgccatctttatattgttccggtttataggcaatgccttcatctttacctacagacacatgttgcctttctgtttcattttaatcctgttcatctatacatatttaatcacacaaatatctaaataagtttatgtcttgtagggaaggcactttgtcatgcttctttgtacctaagcatatgctttgcaaatcataaacaatagtgttgattttatttgatataaaaacttggattctcaaaagaaatctatgtgttcacacgataaacagagaccatctgaattgccaaagtatgactgaatcataagcagtattgttttagtcatctttacagaccaggaagatttgaaatacaggtgtaaaaagatgtgtgaggcatcaaaagaaatattcacctttctttgtgttcattttttttatttttgcttggccgagaaagaaggggtgttttccaagggaataggaggcttcagggcttattcctgtgcctacaagtcagagaggtcactggcttgccccttcctgaaggctgtaattacaggcagaggactatttattttcccgtaaggcgaccagaatcttgagtgtaaaaaactgtttacaagagtacactgtgtataggggttacacacaacctcaggaaaaataataggaaagtgagactatttttcttcatgtattcaataatatgagaaggtccaagactctggaaatgttctaaagtacaataatagagatgaatatgaggtcaaattaggtgatcctggggcttaaggaactgaattaaatgaataaagaagaggaatttctaatagggcataatctaactgata

SEQ ID NO: 42664 - DNA, 1033 bp, Homo sapiens
taactaatcacatatcaaagagcctatttccaaataaggtcacgatctgactttccaggtggacatgaattttgggaagacattattcggcctactgtaggtcttctaaatgaagtgaccatttaatatgtttctggcactggattcatttcatttaagcctcaaaacaaatctgttatgtagatatgtgttttcccactttacaagtgaagaactgaggtttagagatctaggaatcctaaagctgcacagccaggaagggcagggccacccctgacccaagttctctgctaggttagcatggttgtcacaggacaagctgagaaggtatttagggagcattacactaaaaagttgtagaagtcggcttaaggaagaagattctaaaatcaaaggaatcagattgtaggaggccatgtaggcaatttcctttaattcaatagaagagagtataagaatcagccaggcatggtggctcatgcctgtaatcctaacactttgggaggtcgaggtggaaggattgctagagcctgtgaattcaagaccagcctgggcaacatggcaaaatcccatctctacaaagaaatacaaaaattagccaggtattgtggcacatgcctgtagtcccagctactctggatgctgaggagggaggatctcttgagcccagaagggaagaggttgcagtgagccaagattgtgccactgcactgccgcctgggtgacagagccagagcctttcaagcaagcaagcaagagggaaggagggagagagggagagagagagagagagagagagagagagagagagagagagagagagagagagaaaagaaacggagagagagggagggagggaaggaaggagggaaaaagagagaaagaaagagaaatatgaaagaaagaaagagtaaggaaggaaagaaagaaggaaagaaagaaaaagaaaagaaagaaagagaaagaaagaaagaaagaaagaaagaaagaaagaaagaaagaaagaaagaaagaaagaaagaaagaaagaaga

SEQ ID NO: 42665 - DNA, 1784 bp, Homo sapiens
aataagagctgtgagaatatacacttacattctgaagccgttttatgcacggtccccaatgacctgctgaaattgaacagcgagctaaatatagaggtgggattcctgcattcctctcatgatgtaaataaggaagccagtgtaattatgttattctcaggcttaaaataaatcattaaagctcatttatgtgtgggttttggctcatcaactcagcctgcattcctagttgttattttagaaatagtgagctttttgccacattgtctccttccccaagcctgggaggtagatctcaaaagttctttctacccacactgcttctccatcacgccacactcttcccaaaatttgctgtaattctcagaagaaataaggatgcatccaagagtgtccttctactgcctcccaccaccccaggaggccagagccagtgttccactgccaaccactgtgatcactaatgcatagagtcccataaataaaggaagatgcatgcatcaaacaaagtaaaataaagattaaactactttacagtaacttttttcgtgtagacaactgaatcaaacaagctagaaccaaagcgagtgatctttttcattctttttttagcagctttattgtgatgtaattcacataccatgcaattcacccattgaaagtgcacagttcaatgggtttcagtatattatattgtcaatttctttgaattgaggtaaaatatacataatgtaatgtttgccattttgaccatttttaaatgtacaattaagttgcattaatttcattcacagtgttgtataaccatcagcattacctaattccagaactttttcgtcaccccaaacagatactctataaccaataagcagcagctccacatacccttctctcccccggctcctgataacttccaatctactctttctctctagaatttgcctattctagatatttcatgtgagtggaatcatacaatatttgtctttttatgtgtggcctattttacttaacataatgtttatccacgtggatgaacataagattcatccacgttgtagcctgtgtcggtacttcattcctttttgtggatgaataatattccattgtatatatcccacatttatccaagagtaagtgatttttaaagggttcctgaagtcttctgaagttataaaatggaaaaacacacaaaaattagaaaatcaaaggctgaatcatgagatcagagttggaatttcagaaggaccataaatcctaaaaatcataaaatgttagagccagaagggacttcaaagatttctgctgtgtatcaaaactgaagtaaaaatattctgagactttattgttccatcataacagtacaattatttacctcttatgggaagtcttctctgccctccaccccaccgtccaggacagaattaatgtcccattgtctctgttgattactgtttagtcatacttctatggtacataccacactgtactggaatcatttatttatatgtctgtctccccttctatacttcagttcctgttttttgtacatctttttatccctaatacctagttacaaatacaaacagctaagtaccacataagtacttaagggatcagtgtcccctaattatttgaacactggagcataattgaggaatctcttattatcctgaaggcagttatgccatttgtagaatggtaataaccagttggtatttgggacccaaagtgctacaacctgtgtagtacaaatatctatcatggctaaatgctgacttttc

SEQ ID NO: 42666 - DNA, 1038 bp, Homo sapiens
acgatgcaagagtacacactcctcatttggataggcttgtaagtgcccgaagtgtaagcccaactacagaaatggtttcaaatgaatctgtagactaccgagctacttttccagaaggtatatttcagtttattgttctgagaaatacctatacatatacctcagtgggttgtgacattgttgtttatttttggttttgcatttatatttttataaaaacctaaaggaagtatttacctctgccaagtaagtatttgacacaaaattacatggctcttaattttaaaagaacccatgtatatattacattatgattttagagtccataagctctcatttcacaaaaaggttaatttgagcaaaagtaatttgtttatcatctaagtgcaatagtaagaaattgcgaagctctcttttacaatccaggaagagttaagttacaaaatatacttatttaaatgtaagttggaactgctacattttttacctgttgaagcccaaacattgaaattatactgttagtaattcttcgaagtgttttcaatgaactgttagtacacagcctttttcccaccatattctaggacttgaatgtattttgagacttagccaaggaaaaccttcaattatgccatgaaaaaaaggaggggtcaatatcatcagctttgtaaaacactatgcctagtaatgttcaggttaatcagagttttcatgttgttttatttaaatctcctggtaaaagcaaaaggtctgtattgtatcagctccattatctttagaagttacaggatgtgagtcaagtacaagcatttccttggttgaatatttaccattggacaaataaaatgagtcacagatcattgaggatactggaaaagttagaagttgctcatccaaacaagttcaagagcaatgaagcacttaacattttaacattttcaacacttactacctcttatgttttgaagtttatgttatttctatggagatacacatagtaaacattgtctttgccctgattccattcacctttaaaaa

SEQ ID NO: 42667 - DNA, 1054 bp, Homo sapiens
tatattttttataaaaatgtttatttttaatgatatgagaaaaattttgttaggccacaaaaacactgcactgtgaacattttagaaaaggtatgtcagactgggattaatgacagcatgattttcaatgactgtaaattgcgataaggaaatgtactgattgccaatacaccccaccctcattacatcatcaggacttgaagccaagggttaacccagcaagctacaaagagggtgtgtcacactgaaactcaatagttgagtttggctgttgttgcaggaaaatgattataactaaaagctctctgatagtgcagagacttaccagaagacacaaggaattgtactgaagagctattacaatccaaatattgccgtttcataaatgtaataagtaatactaattcacagagtattgtaaatggtggatgacaaaagaaaatctgctctgtggaaagaaagaactgtctctaccagggtcaagagcatgaacgcatcaatagaaagaactcggggaaacatcccatcaacaggactacacacttgtatatacattcttgagaacactgcaatgtgaaaatcacgtttgctatttataaacttgtccttagattaatgtgtctggacagattgtgggagtaagtgattcttctaagaattagatacttgtcactgcctatacctgcagctgaactgaatggtacttcgtatgttaatagttgttctgataaatcatgcaattaaagtaaagtgatgcaacatcttgtatactgatagtggttattgccagtcatgcttgattacctgcatttgcataatgatagaggaagcctaagatggatttcacctggctgcatagagctcatccatgtaggagagccttagtcaagtgaatgctgaggaagtagtaaaacagcatgcatccccgaatctcaggaagtctctgtctttccaagggtttggtctaagttgctgattacctggatttttctgacgatctttcaactgctagagcatctggttcctgttttagcatggtgctcttctccagcaa

SEQ ID NO: 42668 - DNA, 1050 bp, Homo sapiens
tgagaacttgtaaaatttggaaaagaaaacttatttgtgacatgatttatatatttaggaataccaagagattctaataatataactcccaaccaaaaaaaaaaaagctattagaattaataaaagaatttggggagatgtctgaatttaaggtaaggatacaaaactcatgagttgtcctttattacagcaagtaaggacctgaaactagaaatggtgggggtcagagtgggccagggaattcaatttaaaatgatggtaaaagttacagattaggaataagcttcatcaaaaaaaggcatacgattatgaagaaaatagtgacggtcttctcaagcaacaaaagcaaaaactgacacatgggatataattaaagagcttctgcacagcaaaggatactatcaacagagtaaacagacaacctacagaatgggagacaaattttgcaaattatgcctctgacaaaggtttaaatccagcatctataaagaacttaaatttaaaagataaaaacaagcgcattaaaaagtgggcaaaggatatgaacagacacttttccaaagcagacatacttgaggccaaacaagcatatgagaaaaaagatcaccatcactgataattagaaaaatgcaaatcagaaccacaatgagataccatttcaaaccaatcagaatggctattattagaaagtcaaaaaataacagatgctggtgaggttacggagcaaaaggaatgcttatacactgttggtgggagtgtatattcaactattatagaagacagtgtggcgattcctcagagatctaaaaacggaattaccatttgacccagcaatcccattactggttatatacccaaaggaacagaaatcattctattataaagaaacatgctcacatatgttcattacagcactattcacaatagcaaagacgtggaatcaatctaaatatcagtgatgatagactaggtgaagaaaatgtggcatatatacaccatagaatactatgcagccgtgaaaaagaacaagctttatgtcctttgcaagaa

SEQ ID NO: 42669 - DNA, 1049 bp, Homo sapiens
agtttgaccagtagtgctagctattgcagaatacgcaaaatattcacaggttaagattaaaatagccgattaaatttttaaggtctagttagcattagaaattaatgtcaggtcattcacatttaagcagatgtattgagagagctgttctaggcgttgtggagtttggaaaatagaaaaccgtttcttaaagcaatctacaaactactcatggaacaacagtgttttcctacccttgtcacatcacaacatatgtagaaaatgatatttgtggctgggcacagtagctcacacttctaatcccagcacttcgggaggctgaggcaggtggatcctttcagtctaggagttcaagaccagcctaggcaacatggcaaaactctgtctctactaaaaatacaaaaattagccaggtgtggcgtacgcctgtagtcccagctactcaggagctgagctgggaggatcacctgagcctggacaggttgaggctgcagtcagctgtgatcgtgccactgcactctaacctgggtgatagagtgagaacctgtctgaaaatatacaaataaataaggcacactgcaggaaatggacaaggctgcatgctaattgttgtaagggttaagaagatcagtatcttggcacaccttaaacctgtttaggaagatgtgccatggacaacacagattgtttgtaagataaacttcaagccttacctaagatagcttttaaagagatgtcaagccaagggaggttttctggaaaggatgagttttaaactgctttggcaagtatgcatgccagtggtaggaaggaaatcctcttgtatctcagtgaagcattaatatgtagataataggtttctggtaaagaaatgtcatgggtcagaatgtcatccagttcaaaactaaatctgactttaaaacagcacagtacaaaatgaaattataacagtaacgttaagaatcagtgttcttataaactatagtatggctaataagatattttctctctggttttggtataatctaacaaaagagtattagttaacg

SEQ ID NO: 42670 - DNA, 1089 bp, Homo sapiens
gatcacttgaggtcaggagttggaaaccaccctgtccaacatggtgaaaccccgtctctactaaaagtacaaaaattagccgggtgtggtgatgggttcctgtaatcccagctacggaggttgcagtgagctgagattgcgccactgcactctagcctgggtgacagagcgagattccatctcaaaaaaaaaaaaaaaaagatatcataaatgttcttgaagaaatggtattttttaagtaatagcaatatcagaataattttagaaaaaacccttagaatccattcaataaaaataaaaatgtatttggctgggtgcagtgtctcatgcctgtaatcccagcactttgggaagccaaggtgggcagatcacttgagttcaggagtccgagaccagcctggccaacatggtgaaaccccgtctctactaaaaaataccaaaattatccaggcatggtggtgggtgcctgtaatccgagctacttgggagactgaggcagaagaatcgtgtgaactcgggaggcggaggttgcagtgagccaagatcgtgccactgcattccagcgtggacaacagagtgagactccatctcaagaaaaaaaaatatatatatacttcataaaaattaagattttctacatggcttaaaatgctctaaacaaagtcagaagacatcattcacaagggaaaacatttgcaacttacctaacaggtggttactttttcaaaaatctaatgagtacctacagcacaataacataagagtcctatagaaaattgaaaagcatgggccaggcgtggtagcttacacctctaatcccagcactttgggagactgaggtgggaggatcacttgagcccaggagttcacagtcagcctgggcaacactgtgaaactctcttgtgtctataaaaaaaaaaaaaaaaaaaaaagaaagaaagaaaattgaaaagcagtgcctatggcacctgagctcctgacattatggagagccttaccaaacttgaacttcctcactggacatttattgagaaataaacatatttaagccactgctctttggaatgtattttatttcttatcacccct

SEQ ID NO: 42671 - DNA, 1049 bp, Homo sapiens
acccttttcttagaggcactggagaacaagtaactattgcttcttgcagcacaatgttgtatgcctgtgattctctgtcctagtttacttaccacaggatgtaacaaattatccaaaataggatgtaaaattttcaaatcaataaaaaattaatgtatcacttgttactttcagaaataaaatggaggttaggaaatcaaaccccttgatgtatgtgataaagtgttacaaaatatcaaatgattcactttgctatttgtgagtttctatcactctttttttttttttttgccactaattgcaaaataactcatataaacctgggtttctcaagcaatgttctcctagatgtgtaggacgaaggctatattggtatgaataggtagtaattctgagcctgttctggaagaccccattcccctgcagagtttggtagggctcacatacccgcagtggtggtggccattaatgaccaattctgcctttgagtgctccacttgcgctactctcacttctggctcctggtgcttaggactgctgtcccctctccctgccttaccagttcctattgtggacattaaggagtgaatttggtcaggcagcttgtgcaggtcagtgtcccagaggcaggtctacagctctagcgggtccagtcccagtggacctttctgctaattgtgtccagcctttccattcttgaattactgacctgcgataaaaaatgatggcgcccttaccacattctagcaaaaaggtcaacagtcatttaccagttctgtgatcttaacactagttaccttgtttataactgagcatgataatgatgagtacctcataggactgttaggaggattaaatgagatactatgaaaaaagccttaaccagtgccagcacttgctagtgctcaatacattttagatatttacttgtagttactgttgtggctcctactataatattgactttgttttgtacttcttggtgtctaactcaatcagctttttctcttaagtcagtttctagactgatagttctttttaaatgcatc

SEQ ID NO: 42672 - DNA, 1044 bp, Homo sapiens
ctctgtaggttttctgtttccattcagttttggggtgaaatatgatagcagcatgaggagctccactcctggtctaaatgaataagcttatattatctctttcttaactttgctccttaactctttgtattctgttacctgctttcataattttcctggaacttcttaaacctcattggtaatttcaaagctaaatttcattaatcatttctcagattttgttcatactgattcgttgcactataaaaaaggatttaaattttttttctaatattcactttttttgttttgttttacaaattctcctccctatcccctcccctacttccctctctccctccctccctccctccctccctccctccctccctccttccttccttccttccttccttccttccttcctttcctccctccctccctccctccctccttcttccttcttcttccttctttttgcttcttcttgagacagtgtcttactatgttgaccgtgctggactcgaattcctgggctcaagcaatccttctgcctcaaccttctgattatttcgactacgggtgtgcgccaccatgcctggcttagaaaaggactttatgttgaacctcttttctcttacaatcaaataataaattcattgagtcatactattagcgagtcgcagtgcttggtgcgggtgtagaggaatggaatgatgaccaagacatggtccctgtcttcagtatcttgagatattgagcactcagggaaagaaaaatgggcacaaaactataatgcaaagtaaaatgtgtagagcacaaaggagaaataaataccaaaacaaggggatgagagaaagctttcaaatcatagtggtagttactggaataactttaggaattcccaggctgcttggagaatatgagaatgtgcatctgcttggtcccttcagaaaactgtcagtgtgacagatgggagggtgaaaaagagggaaaagctagaatctgttggggttaaattggagttcattttgaagcattaaaaataattgaaattctgatata

SEQ ID NO: 42673 - DNA, 1022 bp, Homo sapiens
actttctgcaataatggaaatgtcctgtaatacagtgtctgttgagctcatgtggctagtgtgactgaggaagtgaatatttaattttaattaatttaaatttagccatttatagctagtggctaccatattgaatagcacaggctttgagataactttaatacctttatgaggtatttaatacctttatgaggggagaaacaagtgaccaaaaagcaaagtgatctttgagactttgaagcagcttgttcgagagcctgtttagaggttaggcctatatcccacatcatctttatttgcatctccagttacttctgtagtctatcaaagtaattgcattattaggagaagctttttcagagctttgtgtgacttaagatcgcagggaaatacatatgaaggttgcgtggcagtactgccatgtggaaatgtgggtgtgggctttgccttgttgcaatgacttgttagtgctactggccataatacctgggaggccagggatattgactgtaatattatcctgcctaaaataccaataacaccctcattgagaagtattgctggatctttttgatggtaagagttattaaaatttagaaattccagaactcaaagaattatttcttctctgaaaaacccagacatctggtagacattctctgaagcttctggatgtttttctgtattgtagcctatggcattgtgaatctaagatgctttttgagcaccagacaattagtagaacattttaatgttgtggttggataacactgaaaaagccattgacatttgttttgagcagcagcagtgaaaccggcaccttatctcatgtgcacaaaaatccatgtagatgatttaaaaactgctgtgctgccgatgaagggaagaaagcaggaggtctaatcatcgtcaactgaaacctcacctaagtagtattcgcctgcctccactttaaaagacaaattaaactacttgtagtattatgtagaagaatgtatgtatttgtatatttccaaatttaa

SEQ ID NO: 42674 - DNA, 1046 bp, Homo sapiens
tagtggtccctagaacaggtgacccgagaagaacttctgacttaggtgaacgttatacgttttggagaggactatgatgtgattgtttgggaagggggcatctaggcatatcagcaagtctcacttgctgagagtgagatggagatagagaaaattctttgagaggtgggtggagggatctagttgaaggctctcctgttgagctttgaatttatagtcagtgtttatagagtctaggcaagtagtatctactgtgacatttggagaactgaaaagtagagtgggatttagtggttactgagtgtgccttgggtaggacaggtccttttatggttgtagctttctgcacttgagtacttatttctgctttactggctaatgccactctcattttaagctatcacaatgactaaacattatccctttcattctgattctctgttcaattttttcatatgttggaattgatcatagaatatagaaagaatttttatgaattcggaactgaactgtttggcccactgtagatttggttttattggaaagaacctagttttttgaaattttttttttttttttggcttccgtatgatcacctactctacacaggcagtattgtgtactggttaagcacaaggattctgagctagaggctactccagttgaatcctggctctgatcttagataagttgtttatcctccatgcctcagttcttcatctctaaaatggggataatacctcctagggtcgttttaagggttaaataggttaatacatgaattagaacaatgcctggtacacacaaagtgctatttacatattagctgttaatacattccaagcattgatctaggccttttgtcaatttataagtaaaccaaggctcagagaggtttaaaaacttgcttaatgaagataatctatctagtaagtaagtaaaccaaggctcagagaggtttaaaaacttgcttaattaagataatctatctagtatgtaagtaaaccaaggctcagagaggtttaaaaacttgcttaattaggata

SEQ ID NO: 42675 - DNA, 1045 bp, Homo sapiens
ttttggctatatttgatcctttcatatccctatgcatttttaaatttgcttgtcaatttctaaaaaaagacctgggattttgattgagagtatatttaatctataaagtaacttggggaggtttgacattttaacaatattaagttttgcaattcatgaacatggtatatttgtcatttaatttaggtctttaatttctctcacaatggtgaaaccagttataaaattaaaagaataggttatttttcattgatagaagaatacttatttggagtggaatgacttatattacccactgaatatatgtttctagggaacatatagtaaatgtaaaagtggtggtattagtaaagcatcattaatttgaatttggaggaattatttgcacttgtaaaaatcttaaataacctggaaagtgagatttcactaaacagatgttgtcatgaagaagtcttttgagggtatgtcttaacaaatagattagaattgtttatacatacaggcaaaaaacaaccccattgagaagtgggcaaaggacatgaacagacacttttcaaaagaagacatacatgcagccaacaagcatatgaaaaaatggtcaatatcactaatcattagagaaatgccaatcaaagccacaatgacataccatctcataccagtcagaatggccattattaaaaagtcaaaaataacagatgctggtgaggttgcagagaaaagggaacgcttatacactgctggtggaagtgtaaattagttcagccattgtggaaagcagtgtggcaactcctcgaagaaccaaaaacaggattaacattcaacccagcaaccccactactggatatatactcaaaggaatacaagtaattctaccataaagacacatgcatgcatatgttcactgcagtactattcataatatcaaagacatggaatcaacctaaatgtgcatcagaggtagactggataaagaaaatgtggtacatatacaccatggaatactatacagccataaaaaagaacaagatcatgtccttttcag

SEQ ID NO: 42676 - DNA, 1065 bp, Homo sapiens
aatacttttcataatactgaatttaacagccacagaatactttgttgtagtttgaaacatatttttttagctaatcctttatgagtggttacttaggttttctttttttgcatttttttctctataaatagatgtggcagacattcttcaggttaaatctttgcacgtaaccatgcttttttccttaggatacattcctggaactagaattggaggccaaaaggcttgccaaactttaagatacctgcttcctattaccaggttatgttggaaatttgtacttctttgctatatatttaaaaatattggctgggtatgatggctcatgtaatgtcagcactttgaaaggccaaggcaggaagattgcttgaggccaggagttcaagaccagcctgggcaacatagggaaaccctgtctctaccaaaaaataaaaaattagctgagcatggtctcatgtacctgtggtcccagccactcaggaggctgaggtgggaggatcacttgagcctgaaaggtcgaggctgcagtgagccctgatggcatcactgaactccagcctgggcgacagagtgagaccctgtctgtaaaagcaaaaaaaaaaaaaaaattttatccaaactctgaatttgtaaagacatggaagaatgcactaatatcatttgctttctgccttttatgtaggaaaaatacatctttttattttatttttaaaaatttatgttttttatgttaaggtggctgaaaacaaatccctcctctctacactgcacttcagtacttcccagtagggtgtgtagcacccttgcttaggctgagatcttggtaagtctgacttgaactcattctgggccagttatcccacatcttctgtagtcgcaaatcagactctcttgcctggccaagcatcttgcaaatcttggacaggtgtcccaagggaaataatctgtcatggaagctagaagagcccaagaagagccatcatgcttgcacatgaaaacagttcattgtaagaaattcagtcaggtaggatttggatgttattaatcatcataaaatcttacatt

SEQ ID NO: 42677 - DNA, 1072 bp, Homo sapiens
aatgagacctgtaaaaaaggcagaataaaatcagtaataacaactgaataataacaactgaagaaatcaatagactatttaaccacatctgtaggcctctacacaatctagtactgtggagtattaaatgaatgagatagatttagaaataaaaaaccattcatggtatattaaggaaaattcaaatcatagtatattacataatatgttagtgaaaggaactttgggacatggtagtgtagaactctgttcagatgaatgacacaaacaccttaggcatactttatagggacagatatactttgtttgccttttgttttcatccatctatcctgaggaaggtccacaattattgaataataactgcctaaagtggtaacatgtctctggtactcctgaaaagaggcagcttgttgtggagggcagtgtgagtggttagggccacaaactttggatcccaactacccgggtttaactctttcttctactgccactactcgtatgactcaagtccttaacttctctatacctgttaccccatctgtaaaagggggacagtagtagtacatacctcagagggtagttatgagaattaataataatattttagaaatctgtggaaaagtatctggcctataattagccctataaatgtttgttaagcaaatacacaaataaaatacatactttcccagcttccaggaatcaggaactaacttagacttttcttttcatctcacgtggatattgttctcgtggaatgttgaacatttcttgaagtattgttttaagcactgtggaaaaaataatagttaaaattgttagcagatcatggaattggatttttgacctcaatccttttgaaattaagaaaaaaattacactagtcactttaaactggttgttctatatgtttgtgctctaacaatatagaaactagatattgttatatgatttcctagatacagttaatctaggctgggcatggtagctcacacctgtaatcccagcacgttgggaggccaaggcgggtggatcacttgaggccaggagttcgagaccagcctggcca

SEQ ID NO: 42678 - DNA, 1025 bp, Homo sapiens
cttggagaaaaagggtatgatgacttcccaggatgctttaaatttctttcttgtttttagctgacctcactctaggaagagaaaataaattatattagttattttatttccaaataaaagcaaaaattataacttgaaaatataaaagggtattacctcaaatgttgattaaaacaatagttatatgactagaataaaatttggactttaacatgtagaaactgtaatagctactgtttagtgtgctcatagtaggtacctaacatggccctaagaacttcttctcattcttattaatctttattaaggccaggataataatatatgcatggcaggtctgaatgcttcaattttaaatgcttctcaaattattcatctttttgatgttttagatccaggaaacctttggatgcctccccacaatttattaaattttttcaatgtgttaatcatttcctttattatttttatagaaattattttaagtgtgatttggcacgacctgtagcagaaattttaatcatttcattcatctttttactatcatagtttatctgagacataatgatttttatgacttcaatgacacctgaaatgaaaccagtactctaaagtagtttttgtttaacatgatttgattcttttagaatttatgttttgccagagtgaatgaggaattcagatataatagtgactgtacagtaatgagtttcatttctagctagctatttttatccaaggaattggtattctctaaaatgacaattgtaaaagatgactaaaattatttttgaaacatttttagacttgatataccagggttccactagagaaacagaatcagtaggctacacacacatacactgagacagacagagagaaatagagattgagagagagagagagagagaggcaatgagttgggttccaggattttgggggctggctaggcaagtctgaaatgggtagggtgggccattaatcaggaagggcaggctggaactcttgtgtctaagctgaagcgg

SEQ ID NO: 42679 - DNA, 1003 bp, Homo sapiens
tgtatttttagtagagacggggtttcaccatattggccaggctggtcttgaactcctgaccttgtgatcctcccgcctcggcctcccaaagtgctgggattacaggcatgagccaccgcacccggcctcaacagttttttaaaaaactttcttgcatgctaacacagtactgtagtttacattcattttgatgacttagagttaccagtcaaagattgaaatatgttctggccattctttttaagggtgaagtcaagtatgtaatgcattttggaaagattccgttgtgaaattgtttttaaaagtgtctggtttaataggataaaaccttaactatcccacatgactaatttctgagggttctacatagccatagtcttgctatatgaggataatataagtatatctgggaccatcttgatttattaatgtgtagtagtcattgagtcttcctaatatggacttcagactgtacaggtagtctaaggatagaaacacacacacacacacagacacacacacacacacacacacacggcaaagtcccagccatcaaagacttgtagttttgtcagatttatattttcttatgaaggttattatcagaagtcctgggaaatggttgttataactttcctacctagaactctgccccttgtagtcatttagcgtttatcaaacattgagtactgtgtggaccaggctctgtgctgggtgctctgtgttggctgatggaggattgagacacagtgtgtgtgcttgtagggaagaggttcccagagcctggagcaccttgtcttagcaaagtttctatttctcttcaatgtaactatgtggaaggtttgctttgtgtacaaatagacatttattttttcttcctggtattaaatagtttatgagaaacagacaaacttgtaaaatagtcttcaatcataaatgaaagcatattttaaataattaaaaatataataagacttacttaggtctttcctctgttcttgac

SEQ ID NO: 42680 - DNA, 1049 bp, Homo sapiens
ttttccaattaatgccctcactttaacagtagatacctggtgagcctgagcatgtacctatcattgcaggtcagccactcacataagagcttgtgtctgattttccacaatttccagctctttctctacaagagatgagactctcactaagggcactcttagaagattcgaagctcagtatgtgcttctggagccaggagttagaatccctgagttcgttgttttcatcaccttgtccagtgaacttaggagcaaccaaccaacttcattatattccttggttctccacatatggtcaaaggtattatgtgtagagttgctaaactctttgcctctcaagagtggtgaatcaggagtatcaaatgcatttattttgcataactctctaaacagttcacgccaaggactgtcagtgttctccatactattagaagtagagtccttagcatttttgggtctaattatattaagcagccaactccagaaaccccaaaaccaactaaagaaatctatcctcaaaattctgtttctctagaactacttctggtactaaaaatctgttttggataaatgaaaatccaactagaaagcccaatgctggctgcaaagaccaacccaagttgaggtgaagcatattaaacttcctccttaaaatgggttgaaataaggtatatgcgataatttataccatgtcgcctcttaaatactaatctgttcacctgtatgtgtctctgaagttttccctgttctttagagatatgagaaaaataaagaccctgtagaaagtggctccataaagctataaagctggtcactaatttattccatgtaaggactgtattttattctgagattgtgtccttcttactttttaacgttaaaattttcttctgaaatgatggtgatagtgtatggtagtgttattttactattattactttgcaaagaagaatatagcagcagccccacattggtcttcacatttgtcggggcgggggcaggaactcttggcttcagagaacaatcacctcaaaaatttacttctactt

SEQ ID NO: 42681 - DNA, 1034 bp, Homo sapiens
aggaagttctgggaaggatcagcatgggaggtgatttagatagtgagtgaagatgagattatggaggaaaaagtgagtagagtaaaaaagaagaggagggagaagtgcaggatcaatcagtcaaaggatacttaaaagaagtggccagagaagtaggaaaaaagtttaggacactgttgtgtcatgaaatccatagcaacagaacatcttagagggaggaaatggtcaacagtattaaatgctacagagaaaaatgtatatatgatctgagcaattcttagtccagtacttgtcacacaattactcagtaaatatttgttgtggagaaaactatttgttaccttttacttcaaagaggtggttggcaatttggcaaaagcaagatcagtagaatgtaaagtgtataaaatagattcaattgtgttatctcccgaatgtgaggtaagatgtctactggagtagtagaactcttgcaataagcttagatggaaaaggaaaagagaggtgatgatacctagaagggaacctgtaagcagtagaagacctgagcatgtgccagtgtggatgggaaaatactgaaaagcaagggagaaattaaacatgcatatgaaagagaggggatcactgatagaatgaagtcctgaggagtgcagcgtgatgaattacagagcataggaggggaggattaactaaaggagtactacggaatgaatgtttgtattctccccaaattcatatgccaaagctcctctccccactgtgatggcatctaaagacggtgccgtttgggagctaattaggtcatgagggtagagcccttacagataagaccagtgcccttataagaaaagacaggagaggatctgtttgtgccatgtaaggatacagcaagaaggtgctcctctgcaaaccaggaagagggccctcaccggaagccaaatctgccaggacctggatcttggacctcccagcctccagaactgtgagaaatagatttctgttgtttaagatgcacagtctgtgacattctgtga

SEQ ID NO: 42682 - DNA, 1035 bp, Homo sapiens
gaactctcgtgggcctctgaggactctggtaaacaattcattcttctgttcatggcccttagtgtcagtaaaaattactggcaaaataataaccatgcattatacagtgtcttttctattttctatttatgcctttatttgaaactataattaaataatgtcaaacttgcaactataacaaaatagtatctgctctttgaatatgatacaggccaaattctataaactttaattagcccaagcttgtattgacctcagtaggaatctggctggctgaggatctcttttagttacctctgccttaaagtatgtaagaattttcccattgcctttctcactcaaggaacaatacatgcatagctgaactaataaaatgcttaaatagatacaaatcaaacttgaaaggtttaaactgttgttttcatcctgtaagtcagctgagaaaaagcatacagaccgtagttctaaattatgtccatagagtatttcaaatccagtgaattaactctgcctttttttcccatttgagctcataaatgttaacctcagaagtgcctcagattcttccattgaaataaacttgaactgacaatagccagatgatgtaaaattgaaactgaaattctatccttggcccatcccatgttcttccccataggtattagaggactcacaggagagttagcgttttcactctatttgagctgtaatatttgggcaaaacagggcatataaatttcttgctgccaggagaaagcaattaccagtgtggagaagatagcgggcaataaataaacagaactatgctagatagtgagcatgtttaaagatttatttagaatgacttagctgatagaaaacaggcctttatcatatgctttcattcaaagcttgatatggggactgtggtctttttgtaatagaaaggctaattatgttaccaagtatttatttggtacattattttaaaataaataaatcgagttatgttctattgtgcaactaaaaaatgaaaactattcacatatagcatag

SEQ ID NO: 42683 - DNA, 1029 bp, Homo sapiens
tgtgataaccatttttattattggtttcttttgaatgttaatgtgccaagcacagtgctagctgaagtatataagccctctcacttatttttcataacaactctgtgaggtgtattatattattatccctattacatagatgagggcactgacggtttggagaggttaaataatctgctcatggtcatacagcaaataaatgacagagccagaaccaattctgggttatctactcttaaatgttgccctctactgcctaccacaccccaccaggaaacagaccagcctaggcttggactcttcaaatgctggcaggcacactgcttcctaagacattcaatcccttaaggacaattcaggtttcttcaggatatcttaaatgatgtgacttccatggcttctttttctctatcacaggaatttgtcagtggcccaccacaggaatttttagtatctacatgctgtattgcataattgtcatcttctctgagggagaaaaaaataccaaatataataactgagaactgacttccttgcatttccagcttcgcttcatctggtatcccattaagcaaagatagataggtagtatttcaccatccaatgataaatactagtcatttaccttcggagggctactcttaggaactctcttcacttgcagacataaggagtagggaggaagtgttgctccttactacatcacaggactgggaaataaataagaacagtaaaaaccccttgtctctgttctgaagcagagccacttaagtggtcagatggatgcgaaacactagaatttctgaagtattagattgcagcaaactagtaaagaggaagcaaacacataggctcatcattaccaacagaattgtcactccctcctgagaaactgtagctgtgccgccagctcccataggaaaaggcataaactccttgtgagattcttcagtacccttcataatctgacccaacttgtttttcattttttccacttcataactatttgttcatcattccagaaacatt

SEQ ID NO: 42684 - DNA, 1024 bp, Homo sapiens
tttagtcaggattatttccttagggtagatttaaagaatgggaattactaagtcatgtgtagaagcacttaaggctcttgatattgcggaactacttgccaaaaaagattatagcagtttaaatcagcagacaactccttcttcactattttatcatatcctcactgtcattgagcagtttgtttaaaaaagaaagaaggggagcaataaatatttatgaacctattaagtacaaatggaattttgttcttttagtctgcatttctttgccactactagtttggtagaacattgttagccatttgtatttattcctttctgaattgtgaggcaaaacattataacaacagagcaaggaataatgacctaaaggtaaggagagctatgaagtatcattgaaagggttcatcacgcctgtaattccagcattttgggaggctgaggcaggaagatcgcttgagtctaggagtttgagaccagcctggcaacgtagtgagacctaatctccacaaacaaacaaaaaaattagctgggtgtggtggcatactctacttgggaggctgagccagaaggtcaagactgcagtgagccatgattgtgctgctgcaccacagcctgggtgacagaaagagactttgtctctaaaaaagagaaaagctcaaaagtgttcagaacaatgactcccgttacttcctgtccacaggactggaataaagtatgggaggagggagttaattagtttcctgcccattcttgttttgataaaatgaggataaaagtaatggcttcacaggactgatgacaggtaaatgaaattacatcgtgtaattcattcagtacctgctcagtacatgttggccccttcgttatctcttcctttttacctcccgttctatttctgtgcttgcaggctaggtggaaatagaggctgcctagaaacatgcattaacaggtgcttcttgggccaccctagcctgaagaaggacaaccagagagtataacagtggcacctcaatgccttggc

SEQ ID NO: 42685 - DNA, 1040 bp, Homo sapiens
acagatgaagagacagggacacagattaacgacccacgcaaagtcatacgctagtgagcctaggcaggtcctgctcatcctttagatgccactttggccgcttctccattatgtacacacagcaccatgactcccttggaggtattcatcaccgtgggaacctttgctcttactttcatgattggatcctgcttctggcacttggtggtgagctccatgagggcaggggcagtgtgtgctgggctcacctttgtgtgcttgtcacataagaagccactcaccttttgtcaagcaactgattataagaagtagagctgggattcaaactcggttccctctgttacaaataatctgtataaaattatctaagatactctaagattgattacattctatccttgcctatctagtaggtagagtaagaagaggtcattagaagtcattgggaaaatcaggaattaacttgttcatgtatccatccttttgtcatttctttggttctgtttatttttccccccagtatcaattgagaatctctgacgggaacagcactgatagacttggaacctagaaaatgtgtctggtcagggatagaagaagacagcattgtgccacagacttgattgtgaaggcatgatctgttctttcactaattctcagtttcattttgacccttcagcaaattcacaaccaaaatcaaggtaggggaagggatggcacacagaggaaagtgcagaaatatcatttatataccatgtattcactctgagtggcctaacttttttgttttgtttttaacccaatacatgtgtatttttaattcctctgaaatttgtgttttcttaaggatttttaggtctgtattcattcataaaatagatctgttcaaatgacctttttctattcttattagcaccaccaaatcagtgtgtttttaatacttagattcgcaaaatttctggacatttggcaaaaggcacaaggctgtcatggagcagttgcatgtcttagcagtgaaagggaccaggaggtgggaggtg

SEQ ID NO: 42686 - DNA, 1025 bp, Homo sapiens
acctctaatctctaatgcctagacagcacattacacccgtagtgcaattttattataattcagctctttatcactttgctgtcaatccatgttttcctcactaataaacattgtgtgttacctacaaggtttctcggagctagaataatagattctgccctcagagagctcctagtctgtagacctttattaaacttacttttcttcttccatttttatttccttccccattcagcaccacatgaatcagaatttttttgaaattttgcatatgcttagtaactttttaatgatttagatactattaatatctagataacatttaaggcttgtatacaatcttaatattctttgtttttaggttgtgtgacatgtcttctgtaggacacattatgatgattgactctctatatatacacatatatatgtaaaattggcttgttccttgaagttgtttctcccttgctaatttatgtcatataactaagataaaacgttcctatagtgatacttgtatttggaatttgatctgaggaattcatctcaagatttttgggtacttggttatttcttcacttacaattcatactttgaatgctttcaaaagaattttaaggctactgaactttctctattttctaaccttacctagtttctttaaataatttgatcccttatttttccattcttcagttttgcttttgttcattttctttttaagccttgtgattttttttcactgggtccttagtgactattattagtcaaagttctagctttgtcctttactaaatttatatcatgtgccaggtgcatatatgttacattatttaatgtacagtaaaaacttatgaagaataagtacccctgtattctagattaggaaacaagttcagagaaggtgactcactttctcagagtcacaagggtagcaagtgacagaaccaaactgggatttaaatttggtttgacatcaaagccaaggccagttgcctggcttctttcttaaggaagcaatgatgttt

SEQ ID NO: 42687 - DNA, 2758 bp, Homo sapiens
aaaaatgatttgttagataccaaagtacttgttcctactattatttttgtatatgaagaactggctttggatttaactgaaaacttaggaaaacaatctaatcgctgttgtctatatcattgatttaattcatcaaagttactcaaatgattgatatttttacttgctaattattttaggagtgattttgtgaaatttatttttaatacagtcctagaattgaattgaaatatggtttggaagtttgagggttttttactgtgtctatccttgtgtgtctgtttcctttaaagattcatgatacaatcactgtgtacaatgtgtcctttaatattggttcctgtaataatgtgccttcaaattatttcttgagttttgtgacttaaatatgcagttcactgactcacgccaatgttgtttgctttttaccttaattctttttactgtgctctctcagttttattttttggaagaatggtactcagtgctttgatttgattagtaagatttttgaaacacatgtaatttatttcagaaatgtgattgttttaactctgacttttttagtgcagtcattggagaaatcgatgaagaaacagattctgcgcttgatttggggaatattcgagcagaacctttaaattctgtagcacactgaggaaaaactacatacttggacatctgtaaatctttgtacagaaactgattattctgaggatgatatatggagtttttatgagtgtgtcactggattttgactccttattgattcattgtaatatgtaaattaaaatatttctacattttattgaaaaaaaaacctttttttttgcctaaatataagtttggtagcttggtttcttttttttattaaatagtgtgaaaatataatgggcattttgaaaacttttagaaaaaagtagtactttttgatactttagtatttatggaaactagtggaaaagagaaattagtgtgctatataaatcaggcattcaagtaacagtaatacaggatatatgtgttttctttccctgatgtttaggaaaatcacaggagggtaaatctttgctggagttatctgaatcattggcatttatccgattccactggtggtagtttgctagtgcttctaaaagttgctccctagcactgagaggtgtgggtaggtaaaaatgtgtttgcttgagaaaagcaaaaatgctaacaaggttttgatagattggcccaaaattctaacttgaatattaagaatgactaggaatggtagaattgacagagatgattagtaaagtctcttgatgcccaattggttaggtatgaaagtaatatgaacacattaatgttgaattttacagacagtatatttgaaaaaaattgattccatgtagtcttcaatttttaatttttaagaattggagaatttctaatgttaaagttagtttataaatgtgagtaaataaactctaagtttgtattgaagtagtgctagctattattgtcagcaattttccatgattcattatccataaacctgatttcagaagacgtcaactcagttttttaaataattgaaagaaacaatgtaagtagtgtttagatattcaggctagtccataaaatttctgatcaactcatgtataggcccaagtgtgtgtctttgtgatgagaagaacatagaaaaatatttacatccttgtaattgaaacaaatttaaatagtttatttgttttgtttttatgaaagtgcttaaaaatagtagttggcaagctttttctatgaagatccagatagtcttttaggctttgaaggccatgtggtctgtcacagctactcacctctgctattgtggcctacaaataaccatagataatacataaatgaatagtggctgtcttccagtaaaacttcatttataaaaatggaggtgggggttggattgggcttgaaggcatagttgctgacccttggcttaatacaagttcaataagaaaaaatgaacaatttgtataaattctggaatagatccttatagagagtttagaggtgggtttcattcatattttaaaatattttaaacttcatacttattaaacataatagctttttgggggaggaaaatatcttcactcaaatcagccttataaggggagaagcactattctctagaattatttggttgatgttaagggctgtctctgggagaattagagaagttagctagtattggctattcataagtacttgacttgtagtataatgttttataatcaatttattaataaaatgatggaaagtgggtaaggcaaacaggcaaatttagggactgtgaatgaaatattgtagtatatggcattttgaattggtaaagtaattccaaaaattaaataagaatacacattgttcagttgctaagaaaaatgcattctaacagtacaaatgaagtccagagtcagatcttttctcaaaatacttggcatatcaacacattacacataaacaaataaaaaccagtcctgtccctcatgataatgggtttctaatgtgatgtattcttgcaatctgaaacaccttataaagctgtattttcctgattgatgttggaaaaagcattcccaaaatgtgaattattgtttttatgaatagttacagaggatgtgatgacaatatgccagataatctatgtaattctttattcctggatacaagcacatggtggactgttttctcacaaccgattaaaattggatttattttt

SEQ ID NO: 42688 - DNA, 1024 bp, Homo sapiens
ctcatctctatgctattggctcgtagttatacatatctgtcccagaccattcttatgaatttcaaacaataatttccagctatatgtcatcaggaaatattatacccttggcttttctggacaatcagtggaagcaatagccatatggagaatatttccaaatctaatggaacccctaccattagacatagaatattgtctagctggcatattattcaatatcctgtacattaagagctacacatatatggaaatatatatatatgcttttttttcttgcatgccaactttattaaaatttggatgcttcctgatgtggctaatgagaagaattctcaggcatatacagggtcaccagtaatgggtgccatgaccaattagtgctgttatccgtaggttggggatagaagaaaattttcttacctgacataagcaaaatctcagtggcagaaaaatgaagagtgtattctgggcacagtaagtagatttatttggcactcatatcttttgaatattgactgaacaaaaatctgaaatcagttgtcactttttgaatcttaataaattctgctatgaatggatttgaaagtaatcattgtggcacaagtaatccatttataaattatatttgctcatgtatttgtattttatctatgtgatttgcccatcataagtgctcaataaatactggtgtaaatgaaataaaaatgaaaaaattatctttatgcatagaaatttgattcatttatgaagatggaaatataattttagcaggaagatggaacagattgtcttagatggtatttgaactttattttatggtcttaacacttgagctccccaaaaatctgtgatatttgacatggcattactttatgtctgtagtactgtactctgtaactatcttttgccatcattaagattattatttattaataatctgaaaaattggtgtatattaggtgttgaatagaatttaacaacttgaacacaattgtttagcagaaacaaacaaatatgatgt

SEQ ID NO: 42689 - DNA, 1029 bp, Homo sapiens
cctttcaacctgtacctatcttaggaccaaagccagattttcagaatgaatcactaattcagtgaacttgagtagattttagagattacctgtctaatgctctcattttatatatggacaaaatgaaatatataaatgtgaaatgatctctacaaggtcacacaacatttagagacagagatggaactaaaagcaaaatattagaacctcagtttcatccctatcctttacacttcactttgttacctgtactacattatacaattcaaagttctattgctaataaattttactttgtttggcagacagttgttataaaaaaaaaggtgagagatggatattacaagtcaaaatgactagaaaaactgtcttgtcagtaacatttccatagattacagaaaagaaaggtgaaataattactttatgaagagagacactgcagaatttgagaaagagtagattatgagttttgtttctagagatacacaaccaaagttacctataattgtgaaagtggtctgtgtctacatattatgaaacaacaaattggctatctttggccatagaagtacagaaatgtattttcagacagagctattatttctcttttttgaaagaagagatctaagaagttaaagataaaatcattaaatacctgtctttgaaaaactgtatagcatatatgctttctcctaaagtatcatcttaaatcatgtttagcctccaaagtaatatttagaaaataagttagtttatcctcaatattctgccaaagacaaaatttttacttcagcaggatttggggaagtgcatttcccaacttcatgctctctttggacattccaacatttaaaactattctcaagaatgttcatccagagcagcagaagacaaattaaatctttgctctcctaatcatccttatgtgggtgaaagagagaatgtatctctctactctcattctgaatgtgtatacatatctttcttctgtttgtcaatgtatcctttaaaataatgacagcacaagtg

SEQ ID NO: 42690 - DNA, 1028 bp, Homo sapiens
aattatttttaacagtaagtgaagaaaaactcaaatagagataaaatcacagagttaaggtttcaagtggcctaggcattgtacttgtttctttattatcacaaacaattgccttgaattatattggtccatacaatttgttgactcaaatgttgttttcagttgttactgattagagatacatgccctggatataatcattttggttttctcattaaaaagtcatattggtcttgttcaaataagtgtgggacaggagaaaactgccttgtaggtgggtatatctaaaataaattttgtccatggccaattatcagctgtgtaaatgataagttgtttaacttctctgagacttagtttcttcacctgaataaagcaaataaaggattcttgtttaacaaattaacttgaacacatctctaccccctttctgagtttcttattaaactaaaagcaaatgaattttgaactgtacaaacctacaaggaaaaagagacttagggacagaagataacagcaaatgaatgtttattataagatttttaagaaatggcctgggaaatatatgggcagtggcaaatgactcagtggattagaaaagccaagaagacctaagtgctttttacaaggaacacaaaacaggacaccaaaggctcaataagtggagatatttggtattttggaagacatgagtgggtaatgacttaaaggtcgttatagggaagagctagaccttgcgatcccactgactcacctctgcatccacgcaatcgctcttcgcagattctggcaaaagttaagatgtttattctttgggaaaatccaagaaaacctttgaaggaagagaacagaggtgacgcaccatactgaaaataagagtatttacagaaggcatacttaatattttgtgtgtgactggatgtatctctagaataaaagaaagcaatgtgcatgagaatgagtttctctggtaaatagtttaaatataatagaaaacatatatatatatatatatatatacacacaca

SEQ ID NO: 42691 - DNA, 1085 bp, Homo sapiens
gttgcttttcctagttgaaaattgaggaattttgttcaataaaatgagggctaatatatctttttctggtcattttgtcttttctgaactgacacttgcttcctcaagatttttttgacaatgagggaactattcttagctccagaatttgcggtgatttgataaaattctttcaaactacccttaaattggatattttaggtaccaaatagttgagttagtctaggcagtgaaggaagtactttctgctattatccatatgattaagagttttaaagagtgcagtgaatttcttaatttagacaaatgtggagaatgcttgctgattgtgctgcaaatttgtccaggactcatgttgtttaattattcatgactttaaaagtagcatacattacaattttgcatctgtagattattaatagaatgctcttttaataggatgttcaccactgagaagtgtttgtcatttgttagtttgctttgttttgctgtaaataaaaaaaaggtctatagaggatgtatagaataatcaatccaatgtctagattgacactacctgggttgaaaactcagctccccattcactagatatgtgaaccttaggtaagcttcttaaactttttttctgtcagtttcttcctctctaaaatgaaggtagtaaaatacctactgtaggtgaacgtagtgaggaaaaaaaatgaactaatctatcttaaatactcaagtgcctggcgcataataaaaaaagtaggctgggcgtggtggctcacgcctgtaatcccagcactttgggaggctgaagcaggtgaatcacctgaggtcaggagtttaagaccagcctgcccaacatggcaaaaccctgtctctactaaaaatacaaaaaattagatgggcatggtggcaggcacctgtaatcccagctacttgggaggctgaggtaggagaatcgcttgaacctgggaggtggaggtttcagtgagctgagattgtgccactgcactccagcctgggtgacaagagcaaaactctgtctcaaaaaaaaaaaaaaaaaaaaaaaaaagttagctaacattactcttctcaat

SEQ ID NO: 42692 - DNA, 1742 bp, Homo sapiens
gctgttgaaaacacagagcagagggaagggaaggggatcaggttgcatttttaaattaggtggtcaaaattggcctcagtgagaaagtggcatctgagcaaagacttgaagtttaggggaatatctaagcagatatctggaggacaacactcttaaggactagtggcagtgcaagccttcaaagcatgtgtatatctggtatgttcactgtataataaagaggacaggtggctaaaggtaagtgaatgagggagccattaggtcagaaagggagtggagcctaatcatattcactgtagtgtttcacaggtgcttgtaatcacttgacttttacactgagatgaagaactagtaggggatttagagcagaagagagacttacattacacaaggatcactgtacctactgggttcaaaaacagtttgcacatagaagaaagaaaaccagtttagaaaggaatatagtaatccacgtaagtgataactgtgacttggtatcagggtggtatcaatagaaattttgagaaataactgggaattctgcatatatgtaaagatattacaataggatttccaacaaattggatgtgtatatgagagaagggaaagatctgaaatgaagccagcatgtttgtttcatcaactgagcggatgctattgccatccacctatgtgagaaatgagaaagaatcttagtggagtaagtttgtagggggcaaaggaaacgaaaacttcagttttgggcatgctagttttgaaatatctatttgacatctcaatgaaatgtcaggtaggcagggataataacgtggttagaagagaacaattagtgtggcgtcatggaagccaataaagaaagtatatcaaggacaatggacttgatgttgataagccaagtatggtaagaattgaaaagatggccatttgatttggcaatccagagttcattggtgatcttgacaaggatgcttttgttgtaattatcagaggaaacacctgattggaaaggattacaaattgtaagaggatggaactagtgttactagcaatggtcaacactctctagctattttgttgtaaaagggagaagacaactggaattaaaactaatgggcaaaatgtggtttaaagcaggattatgtttcagattggagaagaataacatttttgttttgctggtggtgattactatgactacataaggaaaaaatagtgacgcaaagaaaaagaagtaattccaatgtgtagttttaaataggtgaaatgaattgtatttgtgcataagggaaggttttactgaggagagaatatttttatctcaagaaacttgatagagaacagagtatatgagtttggttgtgggtacatatatgaggctgtgagactttctgaagcttctccctggttacttcaattttatcagtggaaaaagaagcaaagtcatgaactgagagcattagggtggaggtgttcagaagaaaggaaaaactgtgaaatagttctccaagatagtggagagtacatggactggttaaatatattatattgtgggcagctgtaggagtcctctaacaatttgtcaaattgaatttaaagtgagatcattaagacctgtgtgtttctctgtgcatctttaattgcacaggtgcaggtgttgaagaaacagtgagttagatttatgtagggctgtaattttgcctaatgaaagatgttaaggggccttgaaaaatatgcgggatcaa

SEQ ID NO: 42693 - DNA, 1043 bp, Homo sapiens
atcgaatccatctttgttttctctaatcttgtatagtaaggagcatttaaagtgttatagtttagaggcaagagctcctggaatatcaaataacacatttagatgagaaaaagttattagaaaggacaaaccagtctcgatgggagtatgaattgtgtgattcctatgtgttaaccttgaattgagggagggcacctaattttttatgccaaccccatatgactaatgctctaatggaaaactactgagatgtaatatactccctgagcataaggaatgctatccctggtgattatataattacaacattttttacaaagtcatgaaataatgtgtgctcccctaggtatgcctttaacatcatgtaaactatagttacactgctgagagtgtagctactataaggataatagcaaatgttaggttctttataaacataaaatctggagacattgtaacaggaatgctaaatcataaataaatactttgaatgatcatatgtccggcagtagtatatcatgttaggtgagaaatgatgtgatcataaaattgaaatcctgtaaccatgatttaattgaaacgtgattaatcagggtaaaggggcccagtctggcccactgttggggtataatcacatgtagaatttggggaagccataatattagataagtcaagaaataacatagtaaaatgggagcatgaaaacaaccacaatttccatttcctcatcatttcttgctattggcaacttcttggatttttttatccaggatgaactaaggatctatttcacagaaattcttagtagcactctcattctctctatatcgttattatttttcttttaccatactctccagactaatcgcaagctccatgtgaatccagtctttctctctcttgtcttattatttccaggctggttagcgttactggggttgcgggagtgacaagctatgtgaccatgtgcataggtattattaaaaagttagacttccaggctgagctgtgcttttcagtactgctttgcaatccttttgttt

SEQ ID NO: 42694 - DNA, 1041 bp, Homo sapiens
tgagatgtctcctgagccgaagtgtcatttgtaggtatggacagcaagaatgcaaggttaggcagaaagttaagaccaaggatcatgtcagacagtagcaatctagcaggttttttactgggtcaggacctgaggaactaagaaggctgtaaggccatgtatacataggtcagtgtatcagcaagagctccgttttctcttttcagtccctattcagggaggacagaagaggcagaaatgtatttatgtttattacagccaatggtttagtcaatgccctgaacaagcctgcgtgcccctgattaaggtaagggcagaggtgctggacctatggggaatgaatgcagaaataagaaaatattgagatgtcaatcgtacaattactaaatactttttgacgtgcatggttaaggttataggaaagaaggaaactgaaagatgcacctacaggaaaagataaatgagattttcgagcaaaatgtacatgttctaaatagaagctctatggatagtgttaatgtaaagttctataagtaagtgaaatggatgttcaggtaagtaattaaaacaacataaatataactgaaaaatgttgaaactgtacaatttacataagaataaaatgagatatttaatagacatttaaaaatattattacaaactttagttaaaatgttcagattgagaaaaaactttgagggggtggataactgtgccctttatcagcaattttagacaattgttaattatagtagagatgattccagttagtaaacagcattgtggtgaatcacagagtcccatgaaaagtaagctttatcttgatagaagagagtcattgagttatgataactaaatacaagcagggtagtgtgtataggaaacattaagctaagagttaaagaaattttggctgggcacagtggcttacacctgtaacaccagcactttgggagtccaaggcagacatatcacttgaggtgaggagttcgagaccagcttggccaacatggtgaaaccctgtctctattgaaaatacaa

SEQ ID NO: 42695 - DNA, 1079 bp, Homo sapiens
tacatatatcacattacatactatgttaaacggtaagtactgtgacaaaaatgaaaaagcaaatgtagatgtgagtcataggggccagagtatatatggtggatggggaagagacttgcaatgaaaacaaaacaacacaaaaggatggtctgtttgccttcctatgaagatgacatgtggataaagatgtgaagaaggtgaggaacttggcagtggggattcctgaaagaagatcattccaggcagaggactgagctagagcaatggtcctaaagtaaaagcatttcctggagtgtttaaggacaaactgagcagggagaatagctccctggagtataaagtaagcagaggaggaatagcaagagaggaaatcagaaagggacaggggaggcgtggccagatgcagatcctggagggcacaattggctgatgttcttacactgagataaatgggaagctactgcaaagttttgggcataagtgatgtcttctgacttatttgcaatcaggacgcattttgaatgtagagtcaacagaattttctaatggattagtattgaattcagacagacacaaaagtacatgtgttacctacagaagccatggacaccttggcaaataacattcatagcaaataataatagtgatattaatggtaaataatgacatccatattattgccattgccagatactctctattttacatgagagagtaaacactcaaaacatcctgtaaaggattagttattattattctcattttacaaaagaagctgcaaagcacagaaaaatcagttccttgtccaagataacagcggaaaagggacagagttggatttaaatcttggtgttagagaatatgtgctcataatctgtactgttcatattttgaaacaaagattataccagagctccaaacagggaaaggtaacaaatacctcttatttagaatcaattttcttttgcttctttacaaggaaaaaaataacagagctggtaagtgttgacagtgctgaaggtgagtgattttattactccagataggttagcttatgctgtgggaacaaccagtctgtc

SEQ ID NO: 42696 - DNA, 1050 bp, Homo sapiens
gttttgctagagattctccagtgtgcaaggcattcactcgaatttctctttaaactccattcctcgacactgctccacttctcttatagatctagaagtggtataaatcaagttgatctgaaaatgaaaaaaaaatgcagaattctctcataaacggtttcaaaatttaatattacagctgttagttcactgggcaatgagcaaagtttgcttttttaaaaatctgaattcattttatttactctgcaaataatttacttcaatacatttaaaaactcaagttttgttttgtttttgattttaaagacaaaaacattctcatagttttcagacctagaaaaacaaactttgtattgtattgtaatgattttcagttttttataaagaactacctgttttattaaattgtaggccctttatgtaacaaatctcctttcttttcctttatttgaaatgataactctagaactttcacacaaataatcaaaactgtgaatagaaattcgtctttttgtttaactatgaacttctttcttacctgataggtttctttttccaaagaggaacaggactgctaaatttagtactgtcaaatactccaggatcaaagctctctgctaagtccccagaatggaatagctgccaccagcctttcaactacaagtctttatgaatctggactttttggactgaagttagtctgtgaattgaatttcctttataaagttttacttcggatttgtgcccttagcttcatttcccctcagggatcctttaacttcacgagaatattctctggaaaatgatacctttcagtgacttgtgcctgagtcctctcagaatgttcctattcattgccaatgctccaagacttcctagtgtaattcattattaaattcaggatataacttatttaatttttatagggattatttatatcctggcatttcctcatcttgttgctttcctctgatctaaggctagatttttgaatatagtattgatttacttcatttttcttccataaataaggtagtagaatacaataat

SEQ ID NO: 42697 - DNA, 1065 bp, Homo sapiens
tcatactatttttaactcttaaaaaattctaatgcttatgacaatttttacctcatagtagatattcaagtccgaaagttatggatttgtaaccactcagttaaaacttttgtattttaaagaaacattttacaattcttagtcggcttactttttttgtacaatctagtttggtgcctcccactcccccaacccccgaaaaagtggattcgaactagggttaattacgttttctgtgataattttaagatatttcttagttgaattacttcaagtacctccatataggtatctctctcagacttgctgtacatgggtttcatctttgaagttgccaaccaggtaagcgtcttaatatatactttgatcttaattaagagacttgctttaacgatttcccgttgattttcagataaaatttagactgtttaatgggcaattcaagtccttcttcatgtggctttgcctttcctttcagcctcatagcctgtagggcatattctaaattactaaagcacttttcttgtcacaaacacactttgtcctttgacatttctggatcattgcgtttcttctgcctgagtgtgcatctttcccttcacccacgctgctagattttagtaatcttttaaggtgtatatctgatatttttttctgatgagcttcaccaattgtcttgtatttaggccaaaccactggctcttttcagtgtttacactgtcgctggcccttcctggaaaaggagctagtcaaatctctgctttacagtcttctctccatgagaacttgggcttctttaacagagatgtctcttgcctcatgcccagctcttggaataatgccaggaacatattaggtacacaatacatggttttgtttttgctatttattgatttattttgttgttgtcatttgataaataatccacaaccagtaaattaaaatccctgaagtatcttaaactatggaatttatgatttgtgtagatattgcttgtttctagaagaacaaacatttttgcaggaataagtgaaatagctaccttttcccccacaaaatactatt

SEQ ID NO: 42698 - DNA, 1050 bp, Homo sapiens
gctttcctagataggacagaatttttaagtttactgattttgtaaataattgtcatttctcatttccctcaccccaagaaaaaaaaaagagtatatagtgttaaggtaacagtttaaggagtcagacagacaaaaattcatattcaagcctgacatttagattcttgaactctcagcttatttttatttgtaagaatgggagtcagtgtattattttatattatcattttaaatggcaaatattctgggaacttgctgaattgtttcgtatttccataggttggcacatgctctcccttcctggaatgctctttcccagtctatccacccagaaagcctctgtgtgtcccttcagcttaatctcagaagctacattgtcctcagcaatgccttctgtgacgcatcagccagcttatatgtccctttttgtatgctcatgttgcatatgtaatgtgacccccactaaagcaattaaattattggttcataactttttatttgattgttcttgtccaattagactgtatacttttagaggagagagaatgatgcatagaaggtagtatatgaataatgaatgaatgaacacaggaaacacttaagcctagaacatttaaggcaaacaaatgttactctcttttctgtatgtatatacgtgtgtatttgtgtgtgtgtgtaatcttaaatattaaaatttatattttaaaagtaattctatatgcaatggtttaaaattcatcttctgattgtcacatgccatgattaatattttgagggctgaaaagatgacttatactagcggcagaatcatgaaaaaccaagtatgatattgctttcttttaggaagtgcagattttgataagaacatttgaaatgtaaattttacaccaggaatcacaaagtttatagattttccatgattaaactcacccaaactcaggtggaagttttttttccatgaaatatttggtgggagttaggaataagctgcagaatttctttagtggccgctgtattttccccagtgacacctactgtatcggattttaa

SEQ ID NO: 42699 - DNA, 1026 bp, Homo sapiens
tttaattggatacattaattattatttgtgagtttctactaacgttggaaaacagagggacttagagccatttcagttagagaggataagatttcagtactcctaggtttaaatgtgtgtgtgtgtgtgcacatgtgagtcctaatgttataaactgaatgatttctgtgtgtttaagaaatgtgagccattggtcctaggtaaagacaatggtaaaagcaagaactctccaagttattgccttacataccacagacattatggccatatatttccacagaacagacaccagtgggtttttgttgttgttattttattgaatgacttgaagcttgctaaatgactttactgtcttattttatcagtatttaagctgataaaatgtccctctaggctttgggaagtcaagctatctatttttaattatttacaatttgctttaagttaatcttcccaagttgttcctgcattgcttatctgattttctttcttagtttatctacacgatcctaggaaagaaggccctatatctatgaacagacacctgcactgtagaataaatactaaagtattaccttgaccctgcactaggatgaaagagactatggaccagccaatatgattgtccatttaaacaactaatattagcacaaatcaagttcagtttggtgtcttccattaaactcattcatcaaaatagaaaatgtcatttcagtaagaagcaaaatatacccaagaatatttctacagtccctggtaggtatgattacaaatatcaacaaattctccacttatctggtcggtagttgatgctactttcacttactccactgatatagttaaggtcttttggccacaactacaaggtatggattaaaaagttagaaatcataaggattgtttctttattctgcatgtatgatgagcctcccaaagttattgactttaaagttctcaattgtagtattataagtcacttctacattttgctaagtttaataatattcttcaatttctttaaaatgt

SEQ ID NO: 42700 - DNA, 1060 bp, Homo sapiens
taggacagatagcacggtagcatctcaagatacagaccatgcagctgtactgacatcaaaaaacggcctgagtgtgacatctaatctcaagacaaacctgtcttttttcagttcctattttaagctgcctttttcatgttagtaaatgggaactagggaagtatgtgctgttcccagagttagatatgcttttgaggtactgcccattgtggaaagttacatctaaaacatttatactttctaattcaccataaaaccttttaaaaatactgtacaaatttatggactctgagccagttctactaaatcagtatttctagggagcacacagtgggaatccatatatatgagctatttaggtgattttgatgattgaccaggtatgggagctgtggctttcaaaagctttgatagatatttcattattagaaatattactgtgtttataaggcgtcagtcctcttccccccatctttagccacacatttctgcctctgacacaactcttctcctcatctgttgtcttagtagccttctgtccaaaattatcttgttgtagatttgctttgttattctatccctttcctatagtagcactttcctgtattcagttttccatcaattttgagtctaagacttatttttctatcctttctttctctctgaataacttatatcctaaagcacattgaaattgcatgtcatactgttatacataccccaccactctttttaagtatatcctcattggtagtacatcagctgggcttaatttctaaaaacaaaattagggcccgatggctcaatatttctgaataagtaaccaaaattgttattgttataagaatgtaagaaaagggtgacaaaatggtgaattgctttaacaaacggaaaatgagttcagaatgaagcagaatgcctaagacattttacatcttgacttgttttaacaagattctaatgctttgtatttcatttatagaatagttatagcttcccattggctctgtgctcccatttactcagctactgtaaataatagccatcagcaaagcttttg

SEQ ID NO: 42701 - DNA, 1054 bp, Homo sapiens
tatctgcaaaatttataactatagatatcacatcaaaatcaaaattaagagaacagatatttttaaaaaccttcttgtttgtcaggtggttactgaactacttgtcatcataggactaatttgtctttctaaaggtaaaatcatgacagatattaagtgtagaatgaaggtaggagtattcaatacattttgtggtattggtttagacaccaggaaagctcctgggaaaattccatatgctagtgaaactataaattgcattgagtgtttattggtttctgtcatggtatagtaggtattggttagtgatttttttaaaaaggaaaattcatttgtttgtagctttcatttctcagttatgtgttttcaggaaggtgcatttgtcttatgaaggtggtataaaggaactactttagaattcagttctcatcacaaacaaatatcttaatgtaatatatttattttttcccagggaagccagagaggcatatgatatctggtgaataactatggcctaccaatcgttaaataaaatggacacaatttacttttacttcttgaaaaaaattttccccatcaaaaggatcattaattcaaataaaattcaaagtggtgtatttaaaatacacacttttcttctagtaatctcaaaatcaacctggtttgtacaacataaaagatgtaaactctcaatcatatgaaattttctttcactgcattaatattcagtgaagcttgtgattttagcaaatctcttctgctggtttagagggaacaacaaaatatcaggcttttagggtgtgcttccaatactgccctgggtagacatggggagaattcaggtcatagaatttaatgactttttttcaaaagcaaaacacatgcacactaataatttaaataacctttcttgtcaacaatagaaatatgtaacacagcaatagctgattaatagcaaaattaatggtgtaggcaataattgctaaaggagttcacaagaaaagattgctttactggagaggtgagatacacattaatgcaaagttaggaattg

SEQ ID NO: 42702 - DNA, 1088 bp, Homo sapiens
cagttaaacagtaatcaattgttgtagtcattgtattcatcacttacaataaataaataaacaaaaaacagttcacttaacaatgcccttgataaagaagtaaattactaattgtattaaatgtcaacccttgagtacctgtctttttaatcttatgaccaaacggaagttacacaaaaatagcttttgctgcatgcaaaccatctccaggaaggaggaagaggtggaggaggagtggggcagggagagggggttggagaggggggaaggggaagaggaagaagaagaacacctgtgttattgtctcggttgtgagttgaactcgtcagtttttccatggagtgccattattgtgtgaaagaactagtgagtgacaaactatggtgatttagatttgggtatttgacagacatgtcaatattgaataagatgaacctctcacttcacagaaaaccactgatagtatttgttgccaatgataaaatttaaatgttcaagtaaaaatcagaaagttggaaaattagtgtctgccaccataagcttgacatctaatagagactttcttgatgagattggaatgacgttttaaaaaaatatattattttgatttagtataatcaaataagtcaatatttggaagatgcacataacatagtgaactaatatgttcaaaatgatctatgcatgatcatgcatggataaaaaatccattcaaagagaatgctataccagcagattttaatattacacagttctgtgttctgtgttactgacttaagagttctttgtattagtttcttagagtctgcataaaaagtacaacagcctgggagggttaaacaacagaaatttgttttttcacagttctgaaggctagagatttgagatcaaggtgctagcatgcttggtttcttcttaggcccctctccttggcttgcagtcttcttaggacttctccctgtgtcctcacatggccttttctcttcgtgtgcctccctggtgtctctccttcttcttataaggacaccagttctactctagagcgcaactattatgacctcatttaaccgtaattcccttagaagccc

SEQ ID NO: 42703 - DNA, 1025 bp, Homo sapiens
gcttgagtggagtgcagtggcttcatctctactcattgcaaccaccacctcccgggttcaagtgattctcatgcctcagcctcccgagtaactgggattgtaggcgtgcaccaccatgcctggctttttttttttttttttaatttttagtagagacagggtttcaacaagttggccaggctggtcttgaactcctgacctcaagtgatccactcaccttggcctcctaaaatgctgacattacaggtgtgagcaactgagcctggccataagcaataaattttagacaagctacctccattctttccagtttacattatgttttagaaagccatttttttttaacatttaaaagtaaccaggtacagaataagaaaatcatctcattttctaagggaaacagtataaagcaaactgtaatgatgattaaaacaaacgaataaccctattacaaaattaattgtgcatttatacaattcagaatcaatcaagacttagattttacattaacagtaagaaaaaaaatcaaaagagatctgaaccaccgaacagaaccataatatcttctggcatgtctaaccagtggatatatatatatatatagccagtctcaatgaagctcatcttctctgccttttctcactctcccattccaatggagtatgtttgtttgtttgagtgtttgggcaattgatgtgtttttccagttcccctagtagagcttattgcactgttaagccactatgcagtatattaaggagaattagatcccagaatttagaatttgcagccatgtggtaccttttctaatcagatgaaaatgtcaagaaattggtctaagagtagagtatgagagccgaaatgctgaatatcctcaatttcaatataaataaagatttgagaattatagtgtttgaaactaaagatacaaatagtaacaaaagggaagattttaaagctttatttttgcatttgaggtttataagctattattgctactgtatattttaaaaatatattctttc

SEQ ID NO: 42704 - DNA, 1049 bp, Homo sapiens
cctcacttatataactaataatggtgccaaagtggtattactatgtctcttaaaataattctttagttcaaaacatgcaataaatagaatgatttttgagttatcagagagtcccttattaggctaacaaaattacttcaacacagtgaagcgtggaacatgctagctttcttttgtttcattattattttacataaaccttaaaattataaactcaagtatgtggatctatttttatcattcattgaaaaaaagcctttatactgcttcttattgtaaatacctaaatttacaatgcttgtccttcatcttatatttgatggcagttaattgttagttggttttaattatacatcatagtctttgttctggagacaatccaaagagtagatcatcttggtgtgtaatttactgaaagtttctaggcagcctgccatactaaagaccatgtggtacaattgtcattaaaattagaaaaatattggtatacatgtttgaattaaggattagagggtggctctataaattatggaaagctctgcaaagtattaataaggtttgagttcagccaaagcctaatttccaaagatctttacaatacacagatgcattttttttgtacctgtggtaagtttttggtgaatgttgcttctgcttgtagaattccagatcactcatgaatatcggtatactcttttttagcacgtgagtaggtgggtaaatattgttagtgtttggatattggataagacacttagaaatattgttgcacttacaaaatataaagcacttttgcttttaaaaataaagggcccaaactctggttaatattttctttagttacaggtaacagtttttcaaatttaaaaagtgctcagacagtatttaaagacatatatgtattctcatgaaatataaaagaactgctctgctagctaccattgaataatgtaattaaacactattttatttttattattttattttcaaaactcagtaaaagtatgtcaggtgaagactggcgtgaggtggccaaagataacaacatt

SEQ ID NO: 42705 - DNA, 1035 bp, Homo sapiens
taaacccagagagatattagaataagctatgaatagctgtacagtggtaagaattctggactcagagtcagtgcaacacataaataagaaaaaagtactattagagaagagtagggtcataaggcctgacctgctcacttctgtctaattttacataccattatgtggctgggtgcaagttgttcttataacatacaatcccctgtctaacctttttgaaaacaacacatttgacattcaaatatattttattttcaagaaaattaaatacatttattatttaatttaatgtttttattattttgtattaataaaacaattttaaaagtatttattgtattttcttccaatactttaaactgtttgttaattttaaaccatttaaggaaaaaacacaatcttaccttccttttcaaagccagagggaggtgcaagctgtgatttttgaaatttttttttcttctagtttaaagaggaaatacatagagagtaggtatattaaaaagtgagtagtatggaactctaacttcatgtaataaatattgagttcgatccaagtgccaaaaatatgctagatggtgggtacacaaagataaatatgaatcatatccttaagcagcatatagccaaagacagtggctggttaattagattagagcaccatacgaaatgatgctgagatcacagattccacttatggaccaattagctcctctttgttctatggccatagattgcatacagatgagatactttcatggttttgtgcatttttactctatctcttgccaaaaagaatttgaaagagcacacagcaaagacaaacatagtactaaaactctgtaaggtaacagaaaaagcttttgagaccctattcattagaccaaacttacaaaacatttattttcatttcagtctatggaagtcatggaaacaaacgtactgatgaacttagtaatctggaaaatatttaaagctgtcaaatggttgtagtaaagaaagtgaacaattccctaattcatttgttaggaagcg

SEQ ID NO: 42706 - DNA, 1055 bp, Homo sapiens
cagcacttctaaaagattgaaaacaccaagaagatagatagaatattcactatttctcatattgatgcaattgtggtgctctttttcatttgaaacatcttctcctaaaatatacactttaagaaatagtcatttctgtttttgcattaaagtaaattaaagcagaaaacacatgctcacttttggctaacttcagtgtatagatttcatacttatgttgtctttcctgggtacagatttattactgaacaagtacgtgtaagtaaaatgtcattggtgagcaggacacaagataaaaggtgaacaccacatatggtgtgaattgtaaatgcttataccacaaacttgaaaatgtgtcatgtagagccatggaaaatgtctagttgtttttatgtagtacacacattttaatggtgctaacaacctgggctcttttgttcatagagttattctgaaaaaaatttcataaaagacactgcctaaagataggtagaataggctgtagcttgatttactgtggaataaaaaccaaaaaaaaaaaggtcttaattgtttcagtctttaattatgtctataaacttagaaaaaggcatttacatttgaatctagactaatttgtttagtaacattcttcctcatattcaatgactgtatgtatcagtccttatttagagactgcctgctttttaattcatatagctctttggttctattctttgttttgtttattattttgttgttttattgcttgttagacctttactaaagatattttgtgtatttagaaaaaatataacataaatatatgctttttaaatatgtgtgtgtgtgtattcatctcttatttaaaaaccacactgttcatccactctgtgcctgaaaaaagggagctgtacctgggtctaatggaggaataaaaagtaaatactaggccgggcgcagtggctcacgcctgtaatcccagcactttgggaggccgaggagagtagatcacgagatcaggagatcgcgaccatcctggctaacatggtgaaaccccatctctactaaaaata

SEQ ID NO: 42707 - DNA, 1035 bp, Homo sapiens
tttttagagttattaaccctttaggttctagtgccttttctgagctatctagtattgaaagtcttgtcattatttttaacattttcatatgtagtgaactttatcaataatatatttaataaaatgaaacaatccttaaatgcagaggtgaagtgagttagggcaaggtgtatggtatgaaaaagaaaggtctttatctcaccctaacactaccccctcaacctaacattcttgctcactgtgctttatatacatattacacgctacatcatactttgtttttctctaagcatactgtttgtctttctgtctctacattttttattgtgattccttttttccttctatttgaatacaatccatcttcaccgtcttaattcgtacctccttcgtgtctaccagtgttacttttttatgtacaacttctgactctttttgaactgttgcttatttgtgacatctagactatatttttatcccttattatattaaaaatcatatataaatcttgatttgtcagctaaattctaattcctatgaaggcaatgattctcttccattcttcatatatcctccatttaatccagcaccaagcacgtaatagctcaatatttattattagtataattgtaggtacaaaaagcaatggagtgttttcgttgcattagtggtcttggaacttaaatatgaatattttttctgatttcccttgagattaaattttgacaatgaaagaggtatgctcaaataacagacgtctgtgttcacactattattggaaaggaagttccattaaaggatgctcaattacctgcagattctttgaataggagcaagtatccataatatgtgatgttataggtttttaaatattctagaactctgaaaagtaatgtgtgtgtaaaggtagaaggaaaactggctttcagtttttgaaaaaatcacaaaccaacaccctaatgattgttgttaatatataaaatacaaataataggacaatattactagtttttatacttgagttatattattctg

SEQ ID NO: 42708 - DNA, 1028 bp, Homo sapiens
gcacacacacacacacattcacactcacaacaccactgagctcagtcaggctgagcatatttcagtttctcaagcacaccatgctctcagtcacctccagacctttgaaataaatccctgctgcttctacttggagttaactcctccaccactccctcctctgggtaacttccagttactcttcaaatgttagcttacatgctagttcctcagagaaaacctcttgacacactagactgggttggctgctcctaccatgagctcctgtaacagtgtcttatgtccttactcatgtcagtcatatactccttggctgtctgtctcctctgctggatggtaattgtgagagcaccaagggaattgtgggttaagggagtttatatggcttacactgacagcccaaatgccaaatacaattctcagcacatagaagaccctcaaaaaatacctggtatacaagtaagtgtagcaagcgtagtatctaataggtaattctccaaccctttgtcctctcccttcctcccgcttcttgtagaccccagtgtccattgtttctatctttatgcatattcaatattcagctcccactcataagtgaggagatgcagtatttgattttctgttcctgcattatttagctaacggaaggctccaggtgcatccatgtttctgcaaaaaacatgattttgttctttaggctgcatagtattctgtggtaaatatgtaccatgttttctttatctcatccacttttgatgagtacctaggttggttctatgtcttttctattgtgaatagtgctgtgatgaacatagaaatgcatgtctttttggtaggatgatttattttcttttggatacatattgagtaatgggattgctgggtcaaatggtagttccatttttagttctttgagaagccttcaaactgctttccacagtggttgaattaatttatgtttccaccaacagtttataagcattcctgttttgcatggcctcacaaacatctgttaattttttactttt

SEQ ID NO: 42709 - DNA, 1030 bp, Homo sapiens
aattatatttgcccattaaaagtatgaagttaggtggagttagaccattttttaaaaattttgaacaccttcttaggcatgttgaaacaaatggaaaatacttgatatttttgtatagcctcttggcagaggaaaagcctacagtatgtgtaccactaataagtatttgattatgatttgccattatgagcattaaatatttcaacagtctatgaaaaagagtggctacacttcaaattattttcaataaaactaggtattgtctaatgggcttaatttgaagattttttatatgcatgaacttctttagtcatagcttttagaaaatcataaggaaggtcatttgtctgtcacagtttagttgcatctcatttttaaattcaaatgtattaatttgcatggcgattacaaagacacaagtgtttgagatgattgaaatcactttagtttggaaacgtaaagaataaagagcatgaagaacagacagtgaggaaaggatttcataggaagagaaatagaactgggagaccactaatgatcaaaataaaatttccaaagtccttcatggttagttttaacgagaaaaaaagtgagaattaaaagtaagattgtgattgtttctagtgagtactttcctttttaaattacaggagttgtttagggtaagtaattttgaaacagctaagttgtcaagagtatgaactttatctgaatcttcttggaagctaggcatgcttaatagattttacataaattctcattttatggttttcaatatattaatacccagcagtcttggtaaaaaataaacgcaagaaactttgtattggaaaacagacctgggtatgatcaacatttaatgttggttcagttataccttgaaatttctatagagtatgcatttcctttgaggacataaaacatagaacataagcagcattaggatagtgcagagcataaattttggcgatagcctgagattccataaaggcatgggagtttgaagaacatcattataataatgctcaaa

SEQ ID NO: 42710 - DNA, 1033 bp, Homo sapiens
acgggcaccatcaccaccagtagcctcctcctcctcctcctccccagcatcaccagccgaacctgcctgcccagcccaatggactcctgccagcccatcgcagagttcttggcgcaccaatgactcggggacaatcactacttatttctatcaatagaaagtgttgtgtcaataacgcagccaagatctcgccaatcgttaacttccaagaggagaaggtaaactagataattgctcaattcgcttccaacagtcaacaggaaaacttttttttttttcatctgcagtcagtaactacttttcattggtgagtgaggttccccgcccagaaaaggcgggggcgctttcacccgcttggcgcgccctcccctctgcgcacacactctgccgcgcacacttcactaccctccgcacccccccatccccaccccccttttgcttcctctgcctttctaattctcaatctgcttaaccaggctttagaggccaagcaaatctgagatcaattttctcgtttagctctaagtgacatcatctaaaatcattgtgcaagggctaaataaggaaacggagtctaattcaggggcaaacgccaggctatatttatcaaacgccaagctccagaaagcctcggctaggaagcctcggcagtgaaatccgaggtttcgctgcttggttccactgggcctgggtgggccgggctgggccgggctgggccgggtcagatctgtgccacctccgcagacctatttcttcctccagggctcggggttgcccgctcccggaatcccggagtctccgcggcccgaaccgagtctggaccatttagaagacgccggcaggtaactggcctccccaaacgccccgaaaattaaaagccttaggaggcttgttctgtgtttgtggttttgtaaaggcaatgcccgcggcaataggcctgggaaagtcgcactttcatccacaaagttgaggagttgcaaggaataattgggtgtcacaccacaagcaaccttgactcgatcggaccccaccc

SEQ ID NO: 42711 - DNA, 1034 bp, Homo sapiens
gggaaaatggaagcccacagatcaaacagctagataggagcaaggtggaaaatgaacggagatcctcgaccccatatcaagtctgtgcagtacagaggtgggtaagaaccaccttttggggattttgaaatgagaaatctttagcaagtatcataaagatgagagaatatttgagagaattcctaatgaagataagagaaagattagccatctcctttatcttaggacaaaccaccaagatcaggcatcagtacgattaagccaatgaagagagacagtttcttcttccttcctcattgttttggtcttttcttggccacagtaatctttatcgtatcctccaagtctcttcagctgtttcaccttagtgtctagcatagagttggtatgcagcgtgtgtgataatgttaataagaccattttaaatagggattttaaaaatcaacatacatccttaaaccccaaaatgtcctgtttaactagaatgacaatagaataaaattccagaatcagagttggaaagaacctttaatgtcatcttgtcctatttcccacataatgcagaaatcttcagtaccacacctggcaaacagtggtgcagcttttactatgtcacctttgtaaataacttttttttaaagttttgtcttacactgatttcagttctgctcccacttgtttttagtcattgttcctagtcctatcttcttgactgatacaggctcaggctgttcctttttccaaacaggagccctttacatattgatcagggctaccttatctcttagattttttttccctctttctaggaacagtcagatttctttttttttccttcataagccactatttccagatcccattaactagcctggctgctttctataggaggaagtaaagtaaaaagaaaatgttgccttgaaagaattcagatgtgacttgttcacaatcatacagatgcgatcaatatggtataagtgaaatgattatttcctacaatgtagatactagattttattgtaatcaataataat

SEQ ID NO: 42712 - DNA, 1026 bp, Homo sapiens
aaaaatctgctaaggaaataaagataatctacattctattcacgtgggtcatttgtaatcctccccttaaagctaacagactcacatgaatgtgagaacatttgagagttactagcttcttttccatattttctcccatactctgttaaagatttgcaaatgacccatacatgaattactctcttgtgataaaaataaacttgctttctaagcagttaagccctagctatttggttgttacaacctttttttttccatttttttcttgtatggtatttatctgagactgtcgaaagttttttatcacttttctttcttgttggttaaatgttgagaattttttcctttgccactgaagaaaaatcaatctgtaaatgaaaatagatatgtaagccaagttattaatgaactttggctaatttttatagacccactctagtaaaaccttttacctatttcaactttaaggtgtggttgagttagagtgattctgttatataatgatggaatttgacctgatgtatttcagttcagagttactctatttgcacttccaatctcttgattttatgtgtcacataaagcctatataagtaaacatatatctttgttgactaaaagaaaaaatgtttcccaatctatagtcttataagccactaacaggtatatattttttatgcataaaagaaatgaaggaatttatcatttctatgcatatttattaaaatgtactatgaaatttaagatattaagataaatttattgaaaatggaatacattttcagatgcctggaccaccttctttctctagtccctactgtattttagattattcttttgcaaaattttttgggaggatgaactcttcctattgtaatcacatggtagtagaactaacattttattagtttcctctagaacacagtcttacttgattcttagaattatgcataagaattatatttttttccttaaacaagtttgcttgcctttcttgcatagtatgtagaagggagaatttgatta

SEQ ID NO: 42713 - DNA, 1029 bp, Homo sapiens
gcacaatactttttttttccaatcaagatgctaggaggtagaaagggaattccccaacacagtagaggagacgcagcctgggtcccaccttctcttctcctctctcagctgcaggaggacgagctgcgggatgcagtgctgctggtatttgccaacaagcaggacatgcccaacgccatgcccgtgagcgagctgactgacaagctggggctacagcacttacgcagccgcacggtaggggtcctgcccacctggtgctgaatcctgcctcttgagggaagctgcaggctgggacagagatataaaggcattccttttgttcctggttgctgacctctttctttccttttccccacagtggtatgtccaggccacctgtgccacccaaggcacaggtctgtacgatggtctggactggctgtcccacgagctgtcaaagcgctaaccagccaggggcaggcccctgatgcccggaagctcctgcgtgcatccccgggatgaccagactcccggactcctcaggcagtgccctttcctcccacttttcctcccccatagccacaggcctctgctcctgctcctgcctgcatgttctctctgttgttggagcctggagccttgctctctgggcacagaggggtccactctcctgcctgctgggacctatggaaggggcttcctggccaaggccccctcttccagaggaggagcagggatctgggtttccttttttttttctgttttgggtgtactctaggggccaggttgggagggggaaggtgagggcttcgggtggtgctataatgtggcactggatcttgagtaataaatttgctgtggtttgtacacggtgttgtctgtagcctgcaaaggagaggctaggttactgggtaccaagagacaacgtgggagaggatcaaagcagctaaggctgcagggcaaccccacccacacataccctcagctcagcttctccctccttattcttgggctggaaatactgtagggtttacagtggtgcaaatctca

SEQ ID NO: 42714 - DNA, 1033 bp, Homo sapiens
tgttactccttgtcttgtctgggagctgctattatggtaaatgacttcatttggtgcttatggtcttcacataggagtatggtgtggaagatgattgagtctgggtagtggcatatacaattcagtgatttgagccatctgtactgagtatagattgcactgccttctctgaccacactacaggggttgggtgagttacaggcagggattaggggaggaaagctgagtgaactgcagagtgacaggcagatttgtgccaggtttagaagccttgtctggaatgaaaaattgaccactggcaaattgctgtgtgtgaagctcttctgctaagcaaagttgtattttcctgtagagtaatagtttccattggtactaggaactgctttgcaagaactctacaaaggaagatggagctctgtgacagatgaaagtgagaaagaaatagtttgatgaataggaaaacaggagacactacttttctgccttttgggagagaggtagaaattggaacactgacctacgcttttcattgttaactctttggatttatctggactcaggctgagctgaaggtctgaaatcgtctagggttgaagtttgctgctgtaaagaggaatagtccttcctcttttttggcaaaagaaagtgttgcagggccgtgaaagacacaagtttcttctggtctctgctttgctatcctgttaagtcctacattattttgtttaaggttgaagaacttgggaatccagttgtaaaacactttgaccaatttttaaaaaacgagggtgatgttgacacctgtgtctgctattgagagttggggtgaagggacagagttggttctggaatatttaaggaggaagtggacagtaagttgatacagatattttggagttgttctgttacagaaaaaatcagcaaggatgatggaaaaacttaagatggatttgtattttctgagttgggatgagactagcaagtatgtgggtggacaaaatataacccagataaatacatgtcttctatcaaatca

SEQ ID NO: 42715 - DNA, 1052 bp, Homo sapiens
gcttgcattaagcattaatgtaaaacattcattttggtttttaaaaaatcagagattaaaagctgagcactggcaagtctttttttggtaaggggccactttttactgtaattaaaattattgtcctcacgataatgtgagttttattgtctacctttgccaagaagtctgagatgatgatatttccagtccctttttaccagtgtgttttaaattagaaggactgatttaagaccttcctgagtttagcttcgtggcatgtgtgttttttggaaggcttagtgtggggcgagagtgcctagcactcacatttaggctgcattactcacctaccttgcctttgctttagtgcccaacttttcgacgggaagcagatggcagtgaaactccagagccttttgctgcagaagccaaatttttcactgagtcgcgactgcttcagagagatgttcagatcattctggagagctgccacaaccagaacattctgggtaccatccttcatccagtgagtgtgtctgtgcagactgggtggtgatgggctagggatgcatttggggtttgaagaataggggtttgcttctctttctctgtatttaacatccattaagatattggccagttgtggtggctcacgcctgtaatcccaccactttgggaggccaaggcgggtggatcacgaagttaggagattgagaccatcctggccaacatggtgaaaccctgtttctactaaaaatacaaaaattagcctgtcgtggtggcgtgcacctatagtcccagctactcaggaggctgaggcaggagaactgcttgaacccgggaggcggaggttgcagtgagccgagattgcaccactgcactccagtctgggcaacagagcaagactctgtctcaaaaaaaaattatggcaggattattattaatatctgctgatttttgaggcattttctagggagttatcatttgtcttacagaattggacaattttctcacctttaggaaattaatctcaagtgttattgggttcataagaagaggaacttgatcac

SEQ ID NO: 42716 - DNA, 1016 bp, Homo sapiens
gcttatgtatagatacgttttacagatcccttttatctagaggtgtttagagagggacccaaaataaagagcttacttctttaattgatgtgtaatatttcattgtaggctgcaacataatatttttgaccagtctctaataggtttatattcatgtagttgagaatttttttcgttatttagaaagtggaataaatctccaagtaattggcagttatttccttagaaattatttggctcacatttgccaaacatgtctttagaaatgttaaccagtatataccactaagtgtgttcattttctaatatgttgtaaaacagggattggacagctttttcttaaaggaccacattgtaaatattttaggcttggtggccatgtggtctctgttgcaactactgaaccctgccatggtagcaggagaacagacatggacagtgtgtaaatgaatggttgtggcaatattccaggaaaactttataacaatatgaagtgggctggatggcccttgggccatagtttgccagcctttcttgtagaacactggatagcaacattaagttaaaaatggaaaaaaatacatgcattacttttcataacctggaactcaacagcagttctgtatcattttacctgatttaaaatatctgttagtggcaaacagcttttttcagggaatcctaaaaaagttctaagatacctgggaccttcacatagtctgaaagtcctgcaagtcttccctgagtgattctgctttcaagatcatgtgattgtgaagccttaacaaatagtgattctctcttcaacaatcaccctgttttttaggaattaattgtacagggccccgctaaaagcctcaaaagcctgcaaagggtaacctatggcctctaactggatgcctctggggctctacagttgatttctggaactgaggcaaagctgtaggtcagagtgccaagaggcttattaagcctgagaaatgtgaaacttgacaaagtattctctgatacatgtg

SEQ ID NO: 42717 - DNA, 1039 bp, Homo sapiens
ttttgtagtcatgacagttatgtagccataagagttatgagaattgggaatagggattaaggttgaaaatttttggggatttggttatgtcatatttttacagacgtctttcccgcttctgtttttgtcgtctgataactaaactgtgtgattatgttaactagttatagaactagttcctcagtgagagccagcgccaaaggcaaacatttggacagttttcagtaattaactattgtggattgaagttactgctgtgtgtactatctactgcctgcttttttttttttttttaagaaacagggtcttgttatgttgcccacactggagtgcagtggctattcacaggtgtgatcattgcgccctgcaacttcaaactcctgggctcaaacagtccttctgtctcagcctcctgagtagctaggactataggtgtgagccactgcacccaacttatctaccttttttttatttatgcctttatacaaaaaggatgggataaaaaaaatcccttttgtataaagggataactaaaaaaaggtagataagttgggtgcagtggttctaaaggtgtgaaatttgctattctgatgttttgcacatatacatatcttggtgcattcacaagttgaaattcagcattgttttcatttgtgtgagagtttatagacagcccgtaagagtaaaataaaaatatgattgtcttttgaatcagatcatacataaaaaccacgtacaggatgggtgatttgaatgtctggccaatcagttctttctctctctttttttcccttagaggaggcagtttaatgcagcaaacagtattatggtaaggttgagaatttaaatgtatgaaagcctagaaatgccaaaataaggttctctcagtaactgtagctctgcctcattgcacagagtaaatacacatctccaattttatcagtattgggagtagtccacaattctgcatctgtgccgtacagttggaattaaggttcccacagcaaccacaactttgaaattcttgaacgttaatttt

SEQ ID NO: 42718 - DNA, 1056 bp, Homo sapiens
ctctactctgattcaggcttttctgaatatcttcctttcatagtagttcaggtatcttgattcattgaagtttatagttgcagtttttactgaggggtatatatatatattttactgttgtcgaccttgttggttgtcagattatttctttgcttggaactaattttaaaatcaattagagatctctcccttcatctttctcttttatttatgagatactgattgcagagctacctacactgtgtttagataaattactttttttttttttttttttttttacataacatttatattcaaggcaagtttagtgcagtcatccagtgcttcgcatttttgcaggctgggctgtaggtttcattccttggtgggctaattagctttgtactgggaaaattttgtgcaattcagaaaccaaacatttaagttccttgtgtactttaggcactgtaggtctgggaaattatttttatgaataaggtgtttataattttaggatccatatctctaatcctgacaagtatgtgtgtgtgttgtggtcggtcaccaggtagactttagactggatgatggattatggatgaagcagcatcatttctgtcactgttctagaaaaaagcttttcataaccgagactggaatgggaagctgaaggacacaaatgatttccctaccagatgacaggccaattgcttaggcatatttttgatgtcacttttcattttagccttcctctgaaaatctacggtcaatttatgggctgttcacattggacagctctttatttatttatttatttgagacgaagtctcgctcttgttgcccaggctgtagtgcaatgtggcgatctcgggtcaccacagcctctgcctctgcctctgccttcaagcgattctcctgtctcagcctcccgagtagctgggattacaggcatgagccaccacatccagctaattttgtatttttagtagagatggtgtttctccatgttggttaggctggtctcaaactccgacctcaggtgatccacccgccccggcttcccaaagtgctggg

SEQ ID NO: 42719 - DNA, 2430 bp, Homo sapiens
gtggccaccaaggagtattgctgtttcacagtagggtctctattcagtttagctgtgaagacattctggagactttgtcttccttgccttttcatttctctgctagaagccacttgatgtaatagccttcatccttgtttcactttattgggcaattagtgtggataagcagaaatatcccctttatgtgtgttcagacattggtctcagaatctgcttacctctgctgtcctgctggttctggatagcccacatgatggacgcctgtagttctgctgtaaaatactttttcattgttttctgcatttttttctccttctctactcagtttgatttttctgggtcatgtagatttgtcatttcttcagatctgttgctaactaaatgtctagcacatagttgatactcaggtgttagatagtgtctcattgcatcctcactgggggcctttactcattattcatagtttggggatatagggatgggcagaatatgctgacacttggctttctgattctaccactctgcctttcctaggacatgttcctcatcactactgggaacgcgggacttttttcacatgctgttgtcttttgtaaggtgggccacaattaggagaaagccacattcatattcgtatggagctgcctttagcagcatctgcttctccagctggagaggcttgttttagaacgactggcatgcggaagcggtaggtggaggtctgggaggagctgcgtagccagggctccccttccagcctcccgtctcccttaggctctttctggcctgaggcatggtcgccatgggtgggggcactgcccgcccgattctggttggaccccctttcctctacttcataccgcagctgctgtgagcgagtgcactgtgctctgcacaggagaattggcagacagttccatatgctggttttggccattgggacattcaggattattaggccagtttgtactttaagaggagggagacttgacatcgctcaaagcagcttattttatttatttctatttcttataaaggggaaagaagctagcccagcccttagctgttcctttcaacgtagccggctcaacgttttcctcaggaaaacatgcagggttcctcacagctgcttgagccaggctctgtccttccttcgcagattgccccgtggctgcctgcctcttcactctcctaaagctttttggctttaccttccttccctcactcctcccagtcttccctcagaggactgactggttctttcagcctagacactcctgtttgcctgccaagttacccttcttccggaggtgcatagcctcagcactgtcagagttcaggagaacagaagctcctccagtgagaagccagttaataacagcttttggacccattgttgttattattagatatccataaaatctagcaggtagagaaccgtcactggggctctgctggagagatatgtctcaatcctaaaagatacaaattagtcccagagtacctgataccgtagacggaacctgacaaactggaaactcagtgtgataaaatcctataacctttcatctctcacccccatcacccagtaagaagtgcattctcagggcagaagctaatggtgttgaatgtctctctcttgtctctttatctaggaatacagtggagtgtgctcctgtgggaacacgctgtctctttgcctttgtgcccaccccagagatggtggatctggagacttcggcccttttggccaagcacattgtcttcctccacctgatggttctcaaaagttttgtttgtttctttgtttgcttttgcgttttgacttgccagcatttctggaagtatctgaatggtaagagtataggtatgtgctcctgctactttagttgtcatctggatttctttgaattaccttccccatgccacactgtggttccttccatttctacctgctaccctccctcttggagtgcagagggaatttgtaaacttgggtttgaatgatgaggtcatttctgaccaacacaatttggtcgttctattagttgttcctgcagaccttacaaaggagtatgttgctgttcttatatgcccttgtcttgtgttgttcaaaaatcctctgtgctatgctttggatgctgcatgagcctgcaaatgaatgcttagcattgttgaagttgactgctgccctttagctgtctggctttgggttcagccagaaagagtggcatctttaacctgagtcactttttaaaacatggacaacaacgaaactgtattctagttttcttgagcaaccacatttaagctgcttattaaatacaattttatattctagaaaactacatttgtacagtttaagcaagaccaatattcttctgctcctagaagaagttaagtaaatttatatcttaattggtaaaa

SEQ ID NO: 42720 - DNA, 1742 bp, Homo sapiens
ctctttgttatttctggctgcagtttgactttggtacatctgtcttttacctaggtccccttccctgctagggaaattatgtccatatatatggttctaaggtatcccctgatgcaaagttttacaagggcaaatcatttgattgttaactgttagatagattcactgcaaatatggctgcccaacattattgcttctcatttgctacaaacgagctccaagccttctgggtttgcacaggactgctctgaggacaaagattaagtggatttctgttgatgccatatattttgattgcacagcagagtcgcattgtgtatttggggcctgccactgactgccactgcccttcttttcatggtttctctccctcccctccctctaagccctagctgagaggcacaggtgcatgccctgttgactctcatggtgaaatctagttgagcttttcccctagagtagaggccagatcagtttttcttaagatgtagttcataagctacttgtgttaaaatctctgatcggaatgttcatttttcacaattgccaggtatctctactgcacttcagcttgagaaccaccgttctagattgttgctcttaccaatggaagagtgtgggcttactaaagctctatctccaggattttcgtctctgacaatgcaatttttcttttctgagccagactttagtgcagtaatatctctgcaatttcctgtgtgagattccccgctccaggtctcagagccagatgctaagcagacatgtccctcttagcttagaacatctcctgaggattccagtgaaaggagatataagagttctgcctgaagaaatttatctgcttcagagaacagagttctctagggaatagtagagtttcttagggtttataacatactatttgagctgatgtttaggtggggcctgctatttacagtttcaggttgaattttacgtcatgataaaaagagaaaaggtttatgaagtggtgccttgttagatctggggtcacacctcatgtgcaattatattagctgaactcggtaaggcagagaaaaggatgcaggttaaagaacgtgcttgcctccagcgtgtgcaggcagccctcaaatggttggaagaaaatacaggtgctttatggtacatagagagaacgtaggagcttgatggcggttcaggatacagcacagcaaaatcctcaagcaccttctgaactgtgactggcaccctaacacagtgtgcaggtttagtgttagcggacgatctgtgttaggactgacggaggaaatcttgtccttgttctgaggccttacagtagtcttctgccgagttcttttcaggactcagctctgagcattacaggatgagaaatgctgtctgttagactaattatctgatttatgctaaataaatgcacagatgtgatttaaaagtcagttttgggtttattaatttatgatgcaatttccagctgccagacagaccagaatattttgatgggccaagggcattctttttgtggaggaagtttgcttattatttacagagtctgagtaaaggaggttgctggatactgaggaaaactgaggtgaccctgagtatgtgcctggcccaggtagagcgtgaggtgctgggcatgcactattttgttgactcctctaccccgtccttgggagaataatgacaacttgctcagggttccttctctggtaagtggaggaaccaggattcgaattgcc

SEQ ID NO: 42721 - DNA, 1022 bp, Homo sapiens
gtgctcactagatgaggatccctagtaggaaaatctgaaatctgaaatgttcccatgagtatttcttttgagtattatgttggcattcaaagagtttcagcagttgagcattttgatttttggattagggatactcaacctgtataacctagagtccgcatctcaaatacactttaaggcaagagggcagccattgacaaatgcagacccagggacagtgtactgtctgtgttccatgtcactcaacaattgagctgctcattttttactggcttaatattctggtttgatgcctggaaagcatagagaatgttacagtaatccaacccagaagtgactataactctatatggttagcatgtatatggcattatgagaaaacactctcagatcctctagagtgttcacatgttcagctttgtatcttctctaattatttttcatgtgtcctttctcactgtgggcagcttctcctcccacccccaaggactggtaggtacattgattactcctagtgcattctcttagccactggaagtctcgctctggccttcctaaaaggtgtttcttttttttttttctttttttttttttttgagatggagttttgctcttgttgcccaggctggagtgcaatggcgcgatctcggctcactgcaacctcccaggttcaatcgattctcttgcctcagcctcctaagtaactggtattacaggcacctgccaccacgcttgtctaattttttgcatttttagtagagaggggtttcaccacgttggccaggctggtcttgaactcctgacctcaggtgatccaccggcctcagactcccaaagtgctgggattacaggtgtgggccagtgcttccggccctgaaagttgtttttttaaggctaacgtgtttatctgggagaagtccattggtaggaggggagaagacccaaatgaaagttgcatctgtttgctgctttttccctgaggtctttttcttaactctcttcctctcagagaggatcatctc

SEQ ID NO: 42722 - DNA, 1044 bp, Homo sapiens
gagagtggtctctgatatgtggtctctggaaattcttttggcccaagtcttaaagtcatggtggtaaaaggttgactagaagagagcctctgagtggagagacatcctatgcacaatgcttgttctcttctcccctttcttattgccagcataaacagttgcacttctggctggcagattcgcccttgctaagtctgtgctcaggttgctgtccatgattaaattctcgctgcctgcaagcacagattctaggtgttgttttaaggttcagggcaaaacagttttctgtaacctctcctgctgtaagggtaactggctatatttgtttgtaatggacacatgtctggctgtgtgtgtgtttgtgtggactacctttcttttattcattaggcatctattgaatggataaggtttgtaaaaaagccattttctttagcaagtagcttgggtatttttttaagcgtttatttttcatgtgttgatttggaataaaaagcacacacaacttggaatgaaataaaagactaatgagaaacaaagccatgaactcatcagtgtctcaactccacaaaattagagtccccaaagaatcacagcaactcatctgtgtatcaagcagcagaaccgattattgcctgctttgggtctgactctgtagcaacatggctcaatcagcagaataatgcagaggaaaaatgttaagaatagatgcttttaatgcagctctcaaccccagtctgcacatcagaaatcacccaggtagctcttaattagtgtacatgccccaggtctactgaatcagaatttccaagggggtggggggtggtctagtagcttttcttccctccaccttccaaagctcctcagatgcttctgatgtgcagctaggattgagaaccactttttagtgtgtcctgggtgtctgtggtagaagtggaaatctggtgagattgattctggatgggagtcttaagcttgaaagtgatgacatcaaaaccaaatcaaatcttatagatgcagatgttgtttagcctgctttaagac

SEQ ID NO: 42723 - DNA, 1312 bp, Homo sapiens
cactttggagaatttttacttattccataataaagatgtcatagccactcatttctttaacgatgagtttaaatatttcccatctggaaagctctttccttgaaaaggtttattacttctctgtctcctctggaagtagggagagaaaaccattaacataataatagtgtctgacttctcttctctgtcctatagtttgtgccagtagtttccttaagagccataatgtggcctgatttatgaaacttacctgggaaacttttattctcccgtaagaatacctgtaacataatcaggatacttaggtgggtaaatttcattccaggcttgatttgccttatatataattaactttctcaagaagtaaaatctaaaatgactcttaaatattgaatgtgattttataagatggctccttgaaatgcccttttccccctttgtcctttacctgtttgttttttgtttgtgtacttgttcttttaccttaaaatcgcctgggggaacttgagaacaaaataaaacaaccactgcccaggcctcaactaaaataattaaagcaaatctctgggagtggagtgcaggccttgttgtaccgcaggtgactctaattctgaaagaggcttgcaagcccctgtgttgactgttgcttggtgaggtgcttctctactagccctttctcctccttcctcactctttgctaacattgccttccgttgtgtacctgttatggcccttaggagacctaatcatttcacttctgcaggtgactttaaaaggcccacttgttagaatggaacacagtagattcctctatttgaactttgcttttaataaatgatgacactatatgcttatttagtgttcttttggggtagctcagatctccttaaaagtcttattgttaatcccctcagtgtttcccgagagtgaggtaagggtttccttgttattaaatctaataccctgaaattgctgggctctgttacattgttctcaattgttctcaacttgaatgctgtccctatcaggttggacagtttcccagaatgcctttctggtaaccgagcattaagatttacaatctagcttttcttagccagaaggtaagtcttgcagggacttcagaaaggtgttctttctaatccttagtgaagagatctacttgatgggcagctggtagctgggcctaggtattcttagaagaaggatgttgtaatgttagcattagtgtgaaagtctgcatgaacactgggctgatccaagccagaactgatgagtcgagaggacaacttgtgccaccaagatgtgtctc

SEQ ID NO: 42724 - DNA, 1050 bp, Homo sapiens
ccctcttttccaattttctgtgccttatttcattgggagatattttgattggctttatgtgggcggccttttcttactaattccttcttcctatgaacattcatcttttgagtatggtggtgtcttaggctagaaaactgatgtctggcctttgtaggtataaatacctatttatacctggcttatgtgatgcctagtctctggtccccttcagtccatagcactgactggccactttgagcatatggtagtgagctgcagatatgactaagtaaggctgctagcattcagtcttagccatttaagtagtcagcatatgctagtaatgtttgtattcagtataacttggaggcaaggtgttttttactagcacattttggttttctcgttgttgttattgttattaattttttaaaaagcttacattggggataattgagaataaatgcctttgcattcagcatgcatgagatgttttgcttgtgtatagggaggttgttgcttgggtggaagagttagaatttgtatgtagaaatgaaggaaaaatgtgatttgcagggctactttccaggtcgaccaagttcttcaaagtgacaaacatctctgttcctttgaaaattatagagacgctggtgtgccctatcattaaatgaattgtcaaaggccctggatcctatggtttggatataaatagcacatgtggctgtggaaaggactctgttgagtgtgggattgcctatgcaattcctgcccttgtctctctgaggaatcatggacttgaagtactttctgcttctgctttatattgtttttattcaaggttcagatggtattgcaaggaattggcattgggtattgaaggacctttctgtgaggatgagttctctggataagaatgatttttctagctacagtcttgaaggaaaattggagtcagataatccaaaaacttcatgtccagcctggaagatcctttagaaaaaattgtttttttctactgacaggagttatcagcacctggttgtgacatatttgacaagactgaacatc

SEQ ID NO: 42725 - DNA, 1009 bp, Homo sapiens
ccccttctcatcttttccattttgtcacatcctaggatattgtcttcctaatataactggagagtttattccagtgggaattgtacttgacatgctggtctccatataaatgatgagtgatttttatttcactctctgtggtgtcttgtggtttcaaaaagtgagcaggtggaaatttggagggggtgggtgtgttggtaaaccctgtgtggtgagttttgttttgcagccgtcgtaatgcttatgttcatcagcagttcaacaaaacacatttattaaatacctattgtgtgccagctattggaaatagaaagatgaatatggccacttttcttcggagacccagccagcctttcactgctggacaggctgcccatctggactgctgggttgttccagtggtagtgctggaattttaggtagtgctctgtttcctttggtaagtgaaagaggaatttaaaaagtataatgcaggggccaggatacttgattttctataaagggccaaatgataaatatgtaagcaaatattgagatttgtggaccaggcactctttgtcacaactattcaactctgccattgtagctgaaattaaacgtatacactaactgcctgaatgaatggatgtggctgtgtttcaatgaaactttattttcaaatgctgaaatctgaatttcataaagttttcacatctccaaatattgttcttttgattttctttcaaaccattaaaaaacacaaaaaccattttcagcttataggctgcacagaaaggccaggttatgtttactgacccctggtataatgcttttgttgagcattggcctttatactaattctgcctccttgtcttccatcgttgtctaaggaatatctgcttgaagacagctgatttagcattgatcaggtactgttttcctgaactctggtttgtgtggtttggcagcatggagataaacatggtattggcccagtgatcttaactcactcccagttttttagggacaa

SEQ ID NO: 42726 - DNA, 1915 bp, Homo sapiens
tcgggagacaaaaatgggagcatcgcttgagcccagaaggttgaggctacagtgagctgtgattgtgccactgcactctggcctgggcgacatagcaagatgctgtctcaaaaatagatagatagatagatagatagatagatagatagatagataggcaggcaggcagataggtggtagcagatacatactgcttagtagacaacttgcagacaagtcaaatgaatcgataagaatcgtcagaatgtagtatgtgacttaagatggtgtctgtcaggcttttttactgtaacagaatgttctctaatcaaataataaacatttcatggtgaggtgccttgaaactatataaaatcaaattaatttttatcaatatggactcttggtttgatactttattcagtgagttataatacattaatttttttgtttgttttcatacttaaattgtccctgatttggccagtgagagctcttaaagctagttcctgtgtccttttgatgtgtccccatccttctttgatccatttcttgctttgtgggatgaggcttagtttaaactatctccaggtcagccctagagtcagccattttgccaaggaatcttgttccttttagtagaaaatggtatctaaaagtcaagaccttgccatcagatatgctcattgctactggagtgttgcttgcccccagaccatctcagttgataagctctagagaatacataggggcatatacatccatacgtatatttatgtctgtatgtatttctgtaactccatatttatgttgcaaaccatatatccacaccaacacctccagttccaatccaacaccacagggttcagctagttttctccctttctgtatttgtaactcccttctccaacagtgagaagcctttgcttctgttacctttaatgtatttactgattttatcatttcccctgtgtgtaacaaactgtcgcatttctgctgccagcctctcctctaggaatgtaccctatagtgccccaatcaggaccttccttctctccccaggtgggcaacctgctcgacatacttgggctcttgtctctcccacgtgtctctcttacctggcttggtttcggactcctcatgacaggctgccctccctatggactcccctcagtccacttgggctctggcaccaacatgccagacttgctctggaaatgtcatcttagtcccttcatgatttggatttgcacttctttgacttatttcattcattaatcattaatctgtcttgtttatttattatgtgagagaccggatgaggaatggaaaaggaatggactttaaagggtgggctaattgtgtcggaaaccagccccatcactagttctgagatagtgggaggataactgtatttagttctctgtttgaatgcataaagtgggcaccataatgatgacttttcagttgttgcttggtaaatgaagttgaataagataacacatagaagacatttaacaaacattactgtctttttgtttgctttcaagaggaatctaatcacctgctcatagcctgttaagggcaaagtattttgtttgactttaataacactattaattttgaactttcctagctttgcctaggagaatcattatgtgccttgatgtcagtaagaaagattagttatgaagttaatgtataactttgcaagagtctaaaaaggcacctctctgccatacatttcgcctttctgccttctctttgccaacattaagggaagagcctccacaaacttttttcccttaacctaattatctttatatccagtagccctttggtattagcttttcatctgacttttcctttctttacttaagttgcttactcatgccttcaagcactgaggccctactaagtgctgggccatttggtg

SEQ ID NO: 42727 - DNA, 1034 bp, Homo sapiens
taaaatatatataaatgttacttaaaatcaagcatgtgaggctggacatgttggtgcacacttgtagtcctagctactcgagttctttgcactcagaaattcgagaccagtctgagtaacatagtgagacctgtctcataaaatcaagcatatgtgcacatcatatatatacattcagtcaaattaattttttttgagacagagtcttgctctgttgcccaggctggagtgcagtggcaaaatcacagctcattgcagccttgatgttctgggctcaagagatactcctgcctcagcctttcaagtagttaggactacgggtgcacactaccatgcccagctaatttttttattttttgaagagatagggtctcactttgttgcctaggctggtctcaaactgagcatgatttttgtttccatttatttctattaataataatatgatacttgttaaattgatttattgataattgacagcaggtgatcttttttttaaggaaaaacttacggacaaaaaaacccaggactattctatttactaacttagtttttggtatcattcttattttaagtagttatgaggatactttttctgcattatgtttcagaagcactagtattctagaaaagcgtagggccaggcagacatggtggctaatgcctgtaatctcagtatttggggagactgagggaggaggattgcctcagcatagtgagacactgtctctactcaagattaaaacaaatcagctggatgtgatggtgcatgcttgcagtcccagctactttggaggctgaggtggttgcagtgagctatgactgagccactgcactccagctggggtgacagagcaagaccctgtcgcaaaaaaaaaaaaaacaaaaaaacaaaaaaacaaaaaacccaagagaaagaaaagcataaattgaaacctactgacatacattgctgattcctattaatttcaaataatgatacaattttttatgggatagtatgtaattctaaactgaatattagcgatttcata

SEQ ID NO: 42728 - DNA, 1032 bp, Homo sapiens
tagcttgcaaaacttaatcgtcacttactcatcctacttctcatttttgttcatttgttgatggcattcctttatctttgggacattttatatgtaatgactaggtgtggtgccgttctcctcttctcagtatcccttcccccatccctttccactgtttaatgtagtagacatgaagaggagaagagctggttcacagtgtggtgagatttccaaccagatgcttgcatggtgggggcccagcttcctatcctggtcttcctgttttgtttcagtagatcaccacagctgccttcttatatgtgggagatgtgaagctaggccctcgaatctatttctattagccctgtcaatatagtttgataaaatgcaaatgtctttgaaatggtagacttccaattaaaaggctccagcagggagtctgttttgataatgaaagtgattaagaaggttctattttcttccattggtatgaatgttcagctaaaatagcttggctttttgtctgtaattggactctgctaatgaggttctaataactcttaggttctaataatgattctaacaaatctattaattctcttcattgatcagtgctggggaccagaacacagtctctggatagcagtgtcatataaggttgtaaatgtcattcatttccctttctccttcattctaaagaatcaatggagcaaatgtttatttccttaaattctataatcttatatagatacatcttacctctgagtagagccagacatatatggtatatcagtacgcatgttaggaattgccctcaaaccctgcagtttatattaggccttgaagcattggttttggtgtggaaagaggggctgcagaataaacacattcacagaagaagactaggcaccatctgaagcctaatttttagaacgttcattctgttcaacccctttccatacgtacctgtcagcccctggtaaaactaggcttgataattgaatatgccgcagctctttagccagcataatctgggacatagaataggtt

SEQ ID NO: 42729 - DNA, 1051 bp, Homo sapiens
attacaaagggattagagtggcaaatacctgttttgggtatgctcagtgactcagaatggccaccaaacttgctttgttatgtaagttcataatttccatttataattgtggccttgtcagtatagccgtctgaatcactggggacttttatggaacagagaggttttctatgatcttgatagttgaggaatgttttcaaatgaagggataaaactgactaaaaatttagagacgatgagtctttgtgtgaacatccctgtggttggaagagccatttttctcaggtttccagcttgtatagatggtgctcatattatctatagctaatcaaatagcagagttgtggtttttatttaaatatcagaatgacaaattacaatagaattatattttacccaggggtagaatctaaggtcagagtatgagacgaaaattgtatatagtgaaaattattcttgaaaatccatttagtgtcgttttattcaaactgaagtgcttcaggatggtcagatgcattgtctaggatcaggaacagtttatagtcaagtcctttctcttttaagtacaattgggaggggacagggctggatggataaccatcaatatttaaagttatttcccacctccctgactcctctcctaccttctttatctcagagaatatagttatataccaataagttaaatatgtgtatatggcaaattctttgtcttcatggcatctctggagtttataaatgaattgctcctggataagttaatgctgccatatggtttgtgtatcaggagactgaactggggatagtgaggtcttgatactgctggtaaaaatgttagctgctggcgtagaattaagagtggtcaagagagggcttgggtttgtttctcgaagcccaaaagtattaggtagagtgtttttttttttagaagtgacagtagtaaactccgtttcctcagggtgctaactaatcagaagcctgggctgtctgtccacaggtcagggagacggatgctcatctttgccaaagggcaggatgtaaacatgtttgc

SEQ ID NO: 42730 - DNA, 1082 bp, Homo sapiens
ttgagatggggtcttgctatgttactcagctgccctaaactcctgagctcaagcagtatcacccaccctcagtattctgttatatatagcaatgcaaaatggactaagacaacttagaagcagtgtctggcaccttgggagctatcaacaaatgtctgtcactgccattcaaacctatgttcacacacactttgcatatgtatttataaattaacaaaggaatcaaccttcagcaagactctacccagatctttcacacatcatgaaatacccaccaacgtccatgttaaagccagttttcatttttagagatgattaaacttctgcactaaacaacactgggcaccaagtgttttgtgactgggtagtttttgaagttcagtaggcttcatgaacatgtgactgttcaaaaaagcagtttgttgagtgaaaaaataggctttcatctagcagttttagaaggatggtttgggatgagctaaatgagatggggcaccaatcacaacaatatcaagagtaggtttctaaaaagaatgttgattgttttatggcattatgataaacttccactagttatcacagacttgagcattaaacagataaataaatgaggggcagggtggaaaaagtaagatttaagaaagacattaagtccagctgtgaaaaaacaataaatttatgatgtaaaatggtgtgtaacatcagagacaagattaatattctagaatataaaaatgaaaaagttctgcaaaatgaaatatatctttaaaatagaatatagaaaagtaaataataaaaaacccatacaaaagtcctaagaaagatacaactttatagccaataaaatagttcctcttatttaaaactaatcaaaggaggtacatatttacacatgtgaacatgatagtacctgtatatataggtgtagttaagaaattaaggagaagagagccttttgtgtgtgtgattccagttactgtgtcacttagacatccaagtacaggggtggtataaaacactgggtatttcttataaccaaaggttcaaagcccttatgtaaatggccagcaacaggagtgaag

SEQ ID NO: 42731 - DNA, 1028 bp, Homo sapiens
attctatttgtgctgagctcaagttttgttccccagagtgacattgtataaatgatgaatattgtatccctgagtagtgagtaggatgcaactcagctctgctgggctggaacattcctgatgcaaactgcttttcctgactcaccacctgaaaccacttgcctgtcttctgggcctgtcacttgccacagtgaacacccatgtactctggcgtctgggagcaggcagggcagttgctgcctcaggggagtggctagcacatcattgcacatttctaccaattcccttcagacctctgcagctgttcagcatggcacatggtgattaagaggcaccacgagggagcatgtgtatctatgtgcctgtgtgcacgaaagctgattagggcagcctgtcacagcttaagaaagataatggaggtaaaatcatcttctctgcctagactattatttgaccttctcagggattccataatatgacaattttgaggagttgctagaatgcagagaaataagactgaaggtaaactgctaaggtgttttgttggctttgatgacctccatcctagtttttggaaatggattcacttcctggatttaattctggattaatgcctttaattaaattacccatacttctcttggaggctttgtttcgtaatttgtgaaccgggactattacttgctttccttctctcatgaagttgagttatgagaatataggatgatggtagtatttcatgtttgtccagatgccagtaaagtatatggtttgattttgcttaatactgtttttatatagaatctttcatagccctactttttcagttatgatatattcctggttctgaggttatgagaagtgcatcagcgtgcgactaatctgacatcataaggagtatttttccctttctttgttggttctgctgactttattgccttttcaacccattgcatgaattccagtgttatttaattagatgtgcatgagggctttagctttcagaagatgagtatgtgctggtgcta

SEQ ID NO: 42732 - DNA, 1322 bp, Homo sapiens
atgacatctgttgtataagaagttgaataagaacagatttgaataactggtaagacaacagaaatgtatcacttgatggtatttgataaatattaatgcgaagtgtactgattgtggttatctttcacagataggagaggtctcacctgctgggtgaccttatgtatttaatggtctcagcttccagtcataaccctgactcttaggaataggaatatttcccctcctaacttctttctctgcttatagacttgccctgtttcttctgtctatgccatcttgcagattactatcacaattgctttcaaaatgcgtagacctgaccacgtcaccaactctgctgatacccatttgcctgcagaaaaaaaatctgattccttaaatgattatataataaaaagcaaaggaaaggcagctgtatataaaatattgtaacttcaagtgagcatcttgcttccatttccagtctgacttctggcattgctgtccacataatatgtcacaaagaacttctcaccattccatggacatgccaagccatttcacaacttctttccttcatacttttttttttttttttttttttttttggtcaggaatcttacctctgttctgtattcctggttccccatgtaaagtctggtgttctttgtcctccgataatatttttgtgaccctttctgttgtagtagttcccaggtctgaccttcctccccacccctatagggcaaagagcctctcttgtcttttcatcagctcacagttcctaagactgtgcttgacattgacaatgacgtcgagatcctcaatagatctttacagaaggggtgggatttgtcctctgctttgtcatatggaagatttggatatggagaaggcctgtcatatagctctgagctggggaaatggtttccttgtcacctgctttttaaatttcctcatactgttatataataatatagacttggagccctaattcagggagactttaggtataagtactgtctggttgaaatacaaaccaagaccttaaaaataggttggataaatatgttttcttttgttttgctatgtgtgaattgaaattgttggattattgctccatctgattggcagcatgcttgttgcctagtgtgaagtcttcatgagggaagctgagcagtcactccttagtactgtaggtctgatttggggcttttctgtgtctttttcattattgaaactgtgcatcattaaaaatcacagaaggatttactcaactaataggcaataaatactattttttggcttgaattctctattattattttaaagttctaagt

SEQ ID NO: 42733 - DNA, 1047 bp, Homo sapiens
gtagcatattttgtttaaagtgaccttgatatttaaagtgaaagagagatttgttgtgatttatgttatagagtgatgcattttatttactcatatcatagtcaacacttaagcaatgaaggatttgcgctggtattaaatattgagtatgacgacaacaaaatgaagcagaaatgctgctttattaaaaaatgtaggcaaactttttaaaaaagtaaataactacttttgtaaatgcagtgctatatttttatactatccttttcccatggtggtatctttaagtttccactgattttaaataatacccctttcaaaattaagtgcatattgactgcactaggtgatagaaaaaaatctgattttatatacatccacagcaatagtgttatttgtcatctcagaaaacttatctaccagttcttttaattcttcaaggaaaggcagttggtgctttgttcttgggaaagtattgaggttttattttgtttttataagccatattccgtgatgtagatgaaatctgttttctctccttgttcattggagacataacaagtgttcaaggccacctctgtggttttccttcttgctacctgattcttgataagttgtttattctaaggactgaagcaattaggtttgggatccatttcagctctgtatagcctagaatgaaaattctgatctttatccattttcattgtcccaattactttatcttttcttctcttccgtcacttcagcaagagtagcagtcccagtgctaaaaaaaagatggagtattcctttaatgtttgcacatatatgagactcctcatgcattcttttttttttcagcttgctttaaaaaatacttgatgagcagtggaatgtcatcatttttagtagttctaaccattttgctgttgtttaccatcctgttttcttagttcctgaccttggaaagctttacaaacctctaatcttcatcttctttgtgactaaccccattgtcttccacctcagatggtgtatttgccaaatttttggtctgttttctggaat

SEQ ID NO: 42734 - DNA, 1070 bp, Homo sapiens
ggttacatctaccagttatttgttttctttttaataatatcagcaattaacagaagccttaattattaactacaaaaacagttatttcttaacctgagtttctggccacagccaccatctacccaccatccatccattagaataaacttcaaacactaaggtaaagaattctagaatcatgttgacaaatcaggaattaataaaattcagctattgaattggtagaaggaactgaaaaataccttcaccaaactactgaatagaatatattttacatatatagtacagactaagggatttttccctcagtgtataaatttatcctcacacctgaaattctttttctgaactaaaaatgtatgtggcttatctttgtaatctagtcagataatagatttgaaaaagaaaatgaaggctaaatattttatttttgataccagggtttttatatcatatttttttcatatttggtttaagaatgtttacaaagattcataaaacatacgttcacagggaaaaatacagagagaaatcagaaccacagataggatagaggaatgaggctaagacttgtgccttaactgatactctaggaatgcccactgagttttaagcattgcagtgtggctggtccaaattgagatgtttgtaaagtacacaccagatagtaaagatttaatacaaaaaaagatctcaacacttttataatatttgttatatattgacacgatgttttagaaattttgcattaaataaaaaatcatattaaaattaatttcacttgtttctttttaatgtttcaacatggctactaggaaaatgtgaacatacacatgtgggtctcatttgtcacttattatatttccattacacagtacttgcctagaaggaggtaagtttaacatcctctcttgagagatgagcagttccacaacggctaatgtctgaattagcttggaggtaagctcagagcatgcccagaggcaggaccaacaggctccttagcaatttgttttgaagctcttcctgtacctcgatgaatgggtgattgatgtgtgttttaaaatgtt

SEQ ID NO: 42735 - DNA, 1056 bp, Homo sapiens
gccttcacagcacctagtggctttcctgttattaaagagaacagcagacttctgtaactacagaagagcttctctgaaactagtgattttaggggactgagaagaaagaggcagatgagatggtgtctcttaaagggttatttcaaagccaaagtttagatgcatttcacatgcagggagtgtgaattgtctgtatcttctatagggtttagtctaatccttttttcctctcgatgtatgggaaggagtcgcatcacaggatgctggcagggccttgctggtgtgacataggcttcagcttcctatctgtttcccctggggaatcaatgaaaacaaggttcatcattcctctaatagattaaaatttttttcttgattaacttcactgtggagttggcaagagttgttatctgttaatcaaaactgtttaaataaaaaataaaaagatcaaactttgagtcttttctcattctctggttcctgggttgggaattagctgatcgttttaggcctggtttgtgacatgaggctgtcaagatggcgcttcctgttaattactttttattgtatttaagacacttaaataactcttcttatgatttagtcgtctatgtaattagctgcagtgattaaaatctccttctttcgttcttgccagagccttcttgaagagtgagattttctgaggtgacctttccctgtgctggacttcccaattactttgagctccaatttggcaaacccttagaatctattaactccttgcttatgcctttctgcatatcacgttttcaaagaaaagtgttagaagaaaatgtgttcacatttagaaagggacatctacaaaatataactagggtaagccacacagatacacacactcattctcaccaccacctcacccctcatccatggaaaactgtcacatatacagaagatacagtcactaaggcacttccctattgtttcccattatgtgaagtatttcaggatgataggaaacaatacacatggcccattttgtgaaagttaaagaatggcacagagatggaacct

SEQ ID NO: 42736 - DNA, 1047 bp, Homo sapiens
tttcataatggcacccttgaatcctacaaatcagcaaaatcctttactgaagtatgtgagagcttcttcttttcccctttttgctttttatactgtcagttgagttgagtgccaagctgtggatggatgacttgaatatttactgcactgatccttgggaagctcccccttgtcagtttcccaaagtgtaccatggagagcccaggagagagtaaggcttttccccaaatctgtttatgttgtaacttttgcttcatgtctcattgtaatgtttctctaaatattttaaaacttcctttgctttttttcttctatattcaaggagatgtcttcaacttgatctttcaggttatatgcttagctagacagctggccaatcatgcatattgacttattttcattcatccacactctcttgtttatttattcatatcacttattcatttagccactcactcattagttcatttatcaagtattagtggaatgcttggtatgtactaaggactgtgttaggcatcatgaatatattggtaattctaaaactgaaattatttctatgcttataaaatttacagactattcttttaatctagcccattttattgatttttctttcagcatttatatttaaatttttgttctttaattgttctgtcttaatagcaccctattcttagtttatgaatacaatttgtctctaatatctctgagaacatttaaaactaaaagaaataacacgcttggctgggcacggtggctcacgcctataatcccagcacttaaggaggtggaggtgggtggatcacttcagcccaggagttcgaatccagcctgggcaacatggcgaaacccctgtctcaattaaaaatgcaaaaaaattagctgagtgtagtgatgcatgtctgttatctgagctattcggaaggctgaggcatgagaatcacttgaaccctggagatggaggttgcagtgagctgagattgtgccactgcactccagcctgggtggtagagcaagactcagtctccaaaaaaataaaataaa

SEQ ID NO: 42737 - DNA, 1058 bp, Homo sapiens
aatagaactcactggagcatcaggcttggaaaatagatggagaacagggctcctgcaaagggccaagaagcaggatgcagatttgttgtcttaattaggagcagtctggccaggacaccctcccttatggtgtcacaggggcaggacaccactgtaaatgaaatttgactcttccctctattttgtattactctccacgcagaagcatttaataggcagagactctgtcatgtgtctctgccccacctgccagggacagggacagggtagtcatctgatgattttcatcttctgtggtgtacagcttagcattgcatcctattaagagtacaacagtgtgatatgttaaaagggagataacagttgactgttacatccattgtttaacatgtgaaagttgactttcaaacacatattgaaagaccatattatgcacaaaagtatgtaatgactgttatcattttttgtatcaggaccctttgaggttactgacttgagtccagagtctaggacagtggtggagtagagaaaagtcccctgagtgactacacaaactctcaattcctactcccgccatcaatgacttgagagaagctgagggtgttttttgatacttctattcacactccccatactgatattttttgtgaaattttgtttctcaaaggatagaggagcagaaaaaaaaataaggaatgaaggaaacatacctagatctacaataaacatttctactttacgttggaatatatcctgagaaaaaagaaggggtcatcagacattttcgaatcatttctcccatacccctcaaaaaaatcctctgaatccccagaaggcctgcaaattattgtaattaaatgtttaatatataatttagctaacatattagaactagagtgctcaaatttacaatatgtggatagattatttttaatatgctaatacatttttaatgtattaagggcaacctagataattcatgcacacagtatacttatttctattttacagaattataaaagcacagcagtgtaataaagggaaacaggctaagaatc

SEQ ID NO: 42738 - DNA, 1147 bp, Homo sapiens
acaggagtgtgaggtttatggcttagaacgtaagataccagcctctgtagtggccaaataagccggcctttttgtttgttattacagatgggttttgatgtcaaggtcaactgagttttgagttgtccataagatggacagaacatctgcatataacaccaactgaatgaacccccagtttgtctagggctttgataaaaaatttggccctctagaccgggcgtggtggctcacacctataatcccagcactttgggaggccgaggtgggaggattgcttaaggtcaggaatgcaagaccaacttggtcttgtagtcagtgtagtgagaccccatctctaccaaaaaaaaaataataataaatgtgtgtgtgtgtgtgtgtgtgtgtgtgtgtgtgtgtgtgtgcgtgcgtgttgacccatctgcgtctcttacacctatttttagggtaaccactaaaggaagaaaattacatactcccaagctggtaccttagatcctgaagaagttactggttttttgttatttccaatttttcacagagtaggaactgggctattagaagtaccagccactgctgccatttctatcatagtctagtttcctttcaagccagggtgttccagagtgtgtagaaccagctgagaatttgaccgacttggtactaggtcttacttgatttgaaggatggttctgtggtgactgacttcatacatacatgttttcattattagttggttttgtttttcattgatcctgtctgagctccctccctcaccagcatagaaaaaattggagtatgtgtgtcagtgttctttatctcaggtttctcagctgttctttatcttaggtttattattgtttttgctgtagcctgctccgtaataaatacaatctcctgcagatacagagtgtaaaacaggcaataaaatggggctggtacatggcttactgttgttctggtagatcagacaaatcaattatggttctgagattagagagagctccccactcctcaagttgcagccagccctgcgagtgctgattttaccatttacctttacctccacttctccatcttcctcttatatgggagtaggactcaatgagtcatagtgtatatctgagttttcttctctgtccttttc

SEQ ID NO: 42739 - DNA, 1054 bp, Homo sapiens
cgcgcccggccaggtctttttttcttttttctttttttttttaagagagaaaatctctgtctcccggctcttattaaccctggaaatgtgtctaagagactgaagcacattgctacttgcactctctctttggaaggcaaattacttaactgaattctgtcaattttatattgttataatcagaatttctaaaataaataatttccataactaaattaccagggaggatttatagctacatcgcctgaggaaacgtgccagtcttcctaaccagtgttttcatttgagccactgaaacaaatattaaagatttcaagaatgtttgaaaaggaacatgccaagcaaaaaaatgcttgagatgacaaggaaagacatacacttttgtgtggctgtgactgagatttgaaagtgccgacatctttgggttcttataatcaatttaattgactttataagaacttaatattctgtcagcttggatgaaatatccatctttccacttagtgactggtccacaggcatatcacctcatccaagccttcgaaatacttgcctcaagaatatggggaactccatgttcttaccttataatttttatctggaaataaacatggccagttctgatgaggttttaaaatttgctgtatgcctttgattttctttttctttttttttttttttttttttttgtcggagtctcgctctatcacccaggctggagtgcagtggcacaatcttggctcactgcaagctccgcctctcaggttcataccattctcctgcctcagcttcccaagtagctgggactacaggtgcccaccaccacacccggctattttgttgttgttgttgttgttgttgttgttgttgttgttgttgttgtacttttagtagagacggggtttcaccgtgttagccaggatactctcgatctcctgacctcgtgatttgcctgcctcagcctcccaaagtgctgagattacaggcatgagccaccacgcccagcctgattttcatagttggctttcacttctgatctttgccataatcaatg

SEQ ID NO: 42740 - DNA, 1060 bp, Homo sapiens
aatgagcagagaaagttatttcatgaaatggaatctagtcccggcaaagatgctgtgaacattgtagaaatgacaacaaaggattcagaatattacctaaacttgatgaaacagcatcagggtttgagagaatggactctaattttgaaagaagttctacagtgaatgaaatgctatcccacagcattccatgctacagagaaatactttgtgaaaggaagagccagttgatggaacaaacctcattgttttttttgccacagccaccacctccatcagcaaccaccaccctgatcagtcagcagccacaaacatggaagcaagaccctccagcagcaaaaagattatgacgcactgaaggctcagatgatcattagcattttttaacaataaagtgcttttattaaactacagtatagggtgaacacttttatatgccctgggaaactaaaaatttgtgtgacttgctgtattgcaatattcacttcattgcagtggtctggaactaaacttgcagtatctctgaggtatgcctgtatatattcatctcatcctctgctctgtagcatctcatcttctgctctgagaaagaaaagcatccttttggcaatgtagagctttatcccagaggtgaaaaagagaaacagtattattcttcctgggaaacatggccacaaatgtataggggaaagagaacattgaagttttgtcttttaagctctaaactacctgaatggagccggctcagagcacagaccatcttggctggagttttcctgcagaattcttctagttttacgttgcttagacacaagcagtctgatcactcgactctgcatcagccagttcctgtgtgtatttggcattattttaagcttagcaattcaaaaggcattgcctgagttaacttacattgtgaaagatagattacacagaagcaaatacgtgataaaaatataagccttttacatttttctcctgccatagtgtgtgctgttatattatgcatcttttggtttcttcagaaacctggcaagaatacaggacagggaaaagtctt

SEQ ID NO: 42741 - DNA, 1032 bp, Homo sapiens
gttgggccagagaatttgcatttctagcaagtttccagacgatgtcaatgccagtgatttgcagacccctcttttgagaagaaagggcctagacttccctccccctttttttttcctctaggtttgggaattacgaaatattcattgtatacacaatgcgttaatggctaagagaacaggttctggagccagtccccacctagtctaagtttaggctccctaacttgctagataaatgaaactctcagtttccgcattaaagaagtggagaaaaaatagtgtcattgtgatcagcagatcatccttgtgatgtgcctcttatccggtgacacagcatttgtatgatgcaaagaaagccctaagtggccatttcgatccagtacttgatacatgaattgaatcctgtccacataaatgctattgtctgggaaggcctttgccttatgacattttagggcatatccttgaaccaatactgtacatgactttccctcccatccatgaaatgaaactacagtcctgttacattccctccctcctgcccagattcgcccttgtttggtaagaggtgcagagctcttagtgtgcatactaggctggtctgtcattgtggccacatcttacagagatgtaatggtggctgcagattaaatctcagatgtatataggattacagactcttaaaaaagattctggactgcatactcattaggatggctactatcaaaaaactaaaagatagcaagtatgagcaagaaccaatttattattttttttaatccccaaacatttgatatgcaagcaagcaccatttcagaacaaatctagatttggaacccttgtgcactgtttgtgagattgtaacatggttcagctgctatggaaagtagtatggagattcctcaaaaaaaatttaaatataattaccataggatccagcaattctgcttctgggtatatatccaaaggaaatgaaatcagtatcttgaacagatacttgcagtcccctgttcattgcagcacttattcaca

SEQ ID NO: 42742 - DNA, 1026 bp, Homo sapiens
aagggaatgaatatagtcaaataaattaagccttgaaacccaaatagtgctgtgtaagcaaactgactgcaaatcaaacagaggagtgttagcaaaagaatacacgatcttggttgaggctgaacaaaaccaggttctttgtatatacgtatatatttctctggacgtgtgcagagttgttgcatttctactcccttaatctcagacatctttggcaaaatgtgttatctgtccatgaagaagaaaactgaagagtgtatttcccccaaatggcaaagcgtaggctttatcaaatgtagacatgcctgttggcaacagaaagcaggatgtgtatggcttttctgtctttaggaatgcccatgtttcctatgtttcttaccatttttctggctagcatataaatctgaaaggttaggttatggtgtgggtcataaccatcaggcccagtctattctccatccccactctgcaggcagctctgacactatttctggagcaagcattgaaaactatccgactgtctggttttgtagatgaggaaacagcacaaagaaatggagtggcattgtcatagttacagactgtgtgagtggcaaaacagaggcttcatccactggactttcagctctacaacttgcaatcaggcataacatgttcttaacttgcctttttgaaatgacacctctctgagccaaagcttctctaagcatcagttcaaatgactccatgatctcttagagtctgtaaaaaacttgagagtagaacatattttcttccttcttagaacctcaagtcaaatcaacaattactttatatttattgtgatgatcgcattctgtttgatctatttttctctaagttgttaaacagcctttggctaaaatcattatgttctgacctgaacaaggagattggggcagctctattctaagctgtgtgaaaatgcaaagcatgggcagggtgcagcaagttgttcactttggatggaatgtggatggtggctgagtacccagagataagactaga

SEQ ID NO: 42743 - DNA, 1026 bp, Homo sapiens
tctctataaataaataaataaataaatgttttaaaaaataaaaatcctgataaggccccagtgtggattgccatcacctgatcgtctttacaggaccacaaaagcagtgaattcaaatactcagatttattcattctttcaacaatctttaatgagcttcttcccagccccaagccaccctttgcagactgattgttttgctggagttcagcacagagttatttcgatgtcacttttccctgtggctcagtttctttgctgttggggtggtcaccaaccattttacaaatcttagaaggctataggctttctccctagaaaatgccagatagatgaagaaagaaaaaggtttgtaaccagcaaaggaaggagagagggctgtgaaaaagcatcgttattcagaaggataaatagtttattatggctgtcatgtctgctagaagagggacagtggttaaaggtaagtttggaaagtcagatatcccagtcttagaagggccttgtgtctgtgcaaggttgtttagattgtaccacatagatcagttgttggtgacgctgagtcttagacattctcagtaaataatgaatctgaagagtacaaggtaatcttctcttcagaaaatacatacaaagatgttcatataatttcactgggtttacaaacaccagcctctctcccctaagcccattcttgacccctagtttaggaactcctaaggtaagttatcagaagcaatgaaagataggtgatacattgtcattaaaataaatttaaatgtgacttatatacaataaagtacacaagtcgtaagtatacagcttgctgaattaatttttttttttttttttttgattcggagtctcactctgtcgcccaggctggagtgcagtggtgcgatctcagctcactgcaacctctgcctcctgggttcaagcaattctcctgcctcagcctcccaagtaactgggattacaggtgcatgccaccacgcccagctaacttttttgtttttttagtagagacca

SEQ ID NO: 42744 - DNA, 1043 bp, Homo sapiens
taagctaattctgattggctcttttaaagagagcaggggtacgagctggagtggcagggtgagtagtttggcaggaagggcagttacagaacaggtgactctggatgaataagaacagagcaggtgaccaaggatgactaagatcagagcaggtgatagaggctaggagggggttgtttactgaaactaggggcaaggagacataaagaacgaggaagttaaactttaaaatgaagaacaaagaacaggggagctgaacatactgatatattggttctttggaaaggacctcagaactcattgtacttaacaatttacaggctaaaacctttgaagaggaatttattatatcctataacatgtcacaaatattcttcttctgatttttgtcttaaccattcaaaaatgtaaaaatcattcttagctcatgagctctgtaaaatcagtgggcagacttagtcttcaggaagttgtctgttgttccctgctttagagtatggtaactaaaaaataaatagatgaataaggcaaatgccattcttgacccacagctggcccaggattcaagctactcaggataggatatatgtagcttggcctgtgctcttggagaaccttgacttttcacaattcctttccctttttgcttgctttattttattttattttattctttttctttttttttttttttttttttgagacggagtctcgctctgtcgcccaggctggagtgcagtggcgcaatctcggctcactgcatgctccgcctcccgggttcacgccattctcctgcctcagcctcccaagtagctgggactacaggcgcccgccactacgcccggctaattttttttttttttgtatttttagtagagacggggtttcaccgttttagccgggatggtctcgatctcctgacctcgtgatccgcccgcctcggcctcccaaagtgctgggattacaggcgtgagccaccgcgcccggcctctttttctttaaagtaaagttagtgaggtgaaggactcttgctaagagtttct

SEQ ID NO: 42745 - DNA, 1030 bp, Homo sapiens
tgcagtggcgcgatctcagctcactgcaacctctgccttctgggttcaagcaattctcctgcctcagcctcccaagtagctgggattacaggcctgcaccaccatgctcggctaatttttttttttgtttttgtatttttagtagagacggggtttcaccatattggccaggctggtctcgaactcctgaccttgtgatctgcctacctcagcctcccaaagtgctgggattacaggcatgagccaaccgcgcctggcctggccatgctaattctttcatgtattgtctataactgctttcatactataacagccgagttgtgtagttacgacagaggctatatggcttgcaaagcctaaactatttacgatctgttcctttaccaaaaagtttgctgactactgctgcatatggtatgctgaattgggtttaaatggcttgtaatagccctgaaaatttaagttggctctcctgtcccctgccgttgaggctggactgcatgagattattgtatctgttggctgtagctgtgactatgagctgagtgccatgtcccattggatagcatgtacttggtgacccctgacccacatacagctgactctttaaggcagttccctgccacacagtcaaggacaggaagatctggtgtgatttcccagatggggagttgtgcctattactagcatcccccagaagtagtgagagatagcattagctaatgggtaaataactggcttaaaagtgtaaactcctaggttttcacactccagtttttatgtggtcctggatatgtgattcttttctgccttggcattcctgtctaaaacactgatctagcaatcccaagccaccctttcctttttgcggcccttgttctgaataaaacagtgatttcatgtctcttctcactttcttccagaaggcagctagccagcacatactcactgaccagttgctgcctgcacagcagtgttttcactgctgtgttggagaaacccgaagtcttaaagggccataaggtattat

SEQ ID NO: 42746 - DNA, 1050 bp, Homo sapiens
gtccttccatcagttcccacagcaccctgtgcatgtatctgttgtgcacttaccaatagtatacaagggatctatgacccaagtctctccccactagcttgtaagctcctcacagacaggaaccatgttttgtctttgtactccagtgcctagtatataagagatactcaataaataaatatttgtcaaatcaactaattgattccttgtgacctaattctagagaatgggaagaaggcctgttattttgttgtcctttatggttctttaggaaagctctccaagcttggcatttgtcagggtgggaggaaaactgttgaagtattaagactggacacatggctgctaattcatcagcttatcattgaaaaagtccatagccaaaacctgactgtgcacttactataggaccctgacctgcctgggtctccctgtctctccagccagtatatttaaaggtaatgagataatgatgagtgttttgaaaaatgtttagtgttcaaatagaaaccattcgtgtcccttcactctctgaacatagtctgcaaatctctccctctctggtatgtttctgttttgtggattagactgctaaataagcgaagagttaattttgaagttcaggtcaacaaattcctgtttggagacgggctgttcctgaataccaggttgttatctgtctattacagccccttcacttctgggctcctggccctttgcgaagtacttcagaaagcctagagagaagagagggccctcaaatcccattccagcccctaaatgaaagtggcatcacaaggagaaaagtggaggtagaaatgtaccatgggggacgttgccccattgcctttcttcccctgactactgggcttcctctatcagcttttaacgcctggaagtagctgagtctccagtcactggtggccttccccaagtgagctcagcagcatgtgctaataggtgccaatactgtgctggctccagtgggattcctctctgcaaagctgctggcttagcttgactgtttccctattcctctccttagaactt

SEQ ID NO: 42747 - DNA, 1025 bp, Homo sapiens
aagagatcaatagcaattcaccttttcccttattgattcaagtgatggcaagaaaaaatggcaggcagtaccaattcatttgtcatgagctatccatttcctaccaagccaccagtgacctctcccaatgcctgttaggttgctgatttacagttgggattacttctttttccaacctgctttgataggaatgagagaaccactgtgtttgactcctgtaatcaaagctgggtgaagaaggagactgcaggtactgaacaggaaaactgctgtggagcctggtctccaactccgaggcttgctttatttgaggagctccccacctgtgctgggctctctagcagaggcaatacggcatcagctgatggagctgcagtctcccccagcacttctcaagtccccacccccagcccccgacctttttctaaaggacacagccttcctttgttatctttttccacagaatgtaaaatgagtgtgctgagtgaaaagtccatgacccctgtgaactggctctgcttttgccaaaggtgcaaaggtttgtcattcccttcatgagccttcaagtagtaacttcagctgaccctgggggaatgtgaggtgcccagggtctggccttagcagggctgtgggtgaaggaagtgttcttgttcttagagggttctgtatccaccaggaatgtagagtggagacagttcttctcagcttctttttctgccctagagaaacaagcatgggaagggtgcgtgcgtgcgtgcgtgtgtgtgtgtgttcagcctcactgggaacagtatcttgactttcacttggaaaaggtaatggtggatccttgtgtgtgtgtgcgtgcatgtgtgttttgaccagcctcactgggaacagtctcttgactctcatttggggaaaggtaatggggtatcctccccccacctcccaaataggacagttagctgccacacacttacatgcacattttaaaaactgtgcattgcgaatggcaaatatgtattagttcactcacctggtgg

SEQ ID NO: 42748 - DNA, 1022 bp, Homo sapiens
atcaagtcagacaaccttgtccttatccttgcctccttttctcctgagagcccctagtcaatctaataccaagtgtttcccactcccagagagaaaagaagggaatggctttggatctctggctaaagatcacagactgcggagtcgtcactgttcccactgaacatctgattaagttgctgagtctgacccttgagtttcccagaacttgccaagattcagaattcccagatcatccaggcagcacgctcctgacagtctttggtccttttggcacctgaactgaaaatcccttttcccatagctctttcaacacttgttgaatgcttataatgaatccattcattaggatgacacagtatagtggaacaaagcactacacctgtaatcagaaatcccatgtttaagtcctgactcttccatttactatctctgtgaccttgacaaaatcatttcacctccctgaggcttcatcttccccaataaaaatgagtgttttggactaaatgacctgtgggtactaagaggatgaagaaaagagagccagagaaagaggcccttattgcaaagcctgtcttccacatagcctcccccttctgatgtcagcctgcatttaaagcagccctttcctgaggccacggagaggcttccagtgagtctagttaccactcaccccacccacaggttgttcagcaccagagacaccatgagccagactgcatggcattactgcctctggtggttattgtactcatgtgaacctcagggaagtcaagactggtcccctattactttggcatcctcagagatgccgtaagaaggcaagaggttccttggcttaggcagtgggtccataaagcaagaggggttttgtagttacctgaagtatgcagatctccatgctggctcaagggctgtttgccagccttcctttacccagtagtcactagtcactgctccaaggattggccccagccccccagagcccctgtggagccgccaacactgcacagctcacaaag

SEQ ID NO: 42749 - DNA, 1084 bp, Homo sapiens
atcatgtgtcagagtccaggaacaacaggtggacatggcacaatgctaatttatggcctcctgtgaatacattctctctgctttaccctcccttcccacccccctgctgccgcaccccttcaggggcctcctcctcctgggaaaccctgaatagacacatgccttgcagagtgggttaagcccaactgcaggaatctggtgcaatgtgaaagcattagactgagagctacgccagctcccgtccttctctgctcctttctaagcaattctgtcaggcaaggcacatgtgtgtccagtgcacagacccccaagacttgtgcacatggacaaagactcagcccctttaagggttcgtttgaattttggtggttttcctgcttaaaatacatgtacaggtctatcttccccttagcctctgaagaaaaatattattgccactatcattttggcacagtacaaattcatggtgctttttttttgtatttttttttaataagataattctgcaaagacagctctcggcttaagaaagatgtctgtagaaatggatagtcctgtgtcctatgaagcatcttctaaaaaatgacagattcagtctatccctcttgccccctcagcagcccacaccctacctctttaaggatgtttgttgttttagtttattttatctcagcaatttcaaccttataccagaaatcccttctggcagcatagcaagttaacttgtggcttgtaccccacaacgttcccaagattcccccccaccccctttaaatagaacttacaagttagaaaatatttttgttttgactttttgtctttaaattttaatataatctgttttttttaaccagcccatagacttaatatataagcatatacaagaaaaagtctctccccactctgtacaaaagttgctgtctttgtgtgcattctattgcattttataagttttttgggggaggggagtcatatttgagtttcctgtaccttgtccttggtatgggtctgaattatataaggttcagagatagtggtgactgtggggtgcagagagttccccaggctgttttctgtccagtgg

SEQ ID NO: 42750 - DNA, 1174 bp, Homo sapiens
gtctctctgtagctggtactcttcatcccaccccttcccatctttgagcaaaaggacaagcactttaccttaagagcggagggggccccggtgcaggggctcctgtctataatcctagcactacaggaggtcgaggatgcaggatcgcttaagcccaggagtttgagattagcctgggcaatataatgagaccccccatctctaaaataataataataacaatttaaaaaataagaggtggagggcagcgcagcattgggaacaccgggaaaccagcccagcgcccacaccactggctatcccatgagtcatcaaacaaccaatgggtgaattggctaacatccaggttcctggatgctgcgttccttttttattatgacttgagcttcttcaggagttagatctatcaagcctccaatctgctcttgctccacgtttttagaggcaactctgtctgcaaatgcttccagtggaaaatcacctttatatctagaggaattggggataggtgaacatgatctaaacgtgctagaactctcagctcctctatcagatttagaaaggatgagaatgtccccagtttgttggttggctagttggtctattcatgtacatactctctcacatttacatactgagtttctctgatacagctctgaatttggctagaactcacaggtagatttgtttgcttatttctttttaaccacaggtaacatgaccaccttgaaacttgttctgcctcatcccaacaccactccaagccatgaatccccatctttcaatgtttacctcactaccagccaagaatgctaagcagggtgttctggggaacctttcatcttggtctactttaaactgtttctctgatgaacaccagactgaaatggctctggttctgatggggggtgctaaatccccagcctttgtgcagctaccagctggggatctgaggggtctcctaccatgatgcctagacactggcagcctggctagaagagctctcattctctatcactttcttggtgactagggccagtttgtatggcagcccagtgaggctactcgatttgtattcagtgcacaaaccctgaaaaaaaaccctgccagccagcaactctgaaaggatgctttgtgtgagtgagcagtgtctgagatggacagggactctcct
